United States Patent Application Publication US 2026/0185061 A1 - sequence listing, part 2

SEQ ID NO: 3143 - protein, 567 aa, unidentified
  source 1..567: note = uncultivated organism
MKKRAYVYTRVSTAVQVDGFSLEGQLKEIEAYCDYKGIEIVRKYEDAGVSGTSIQGREQFQKMLKDVKEKREVDYVIVWKLSRFGRNACDTLNALETLKKCGVNLIATKESLSSEELTGDLVIKILSIVAEMERENIIEQTKNGKKYNALQGGWNGGQAPYGYKLDNKRLVVVPEEKKVVEYIYDLFLSDDKIGYTGIVCRLNEEGIEPRKVPKKSLKDKSIIPPQEHWDNSAVKRILDNPVYIGKLVYGKDTIVKQEDGTKKRVHNAVYTLVDGLHEPIIEEQKWNMVQEKRKRMANKHKRDKSKKSEVKNLLSQLIICPECGNRMIATKTGGHRNKHGEMKYYHSYVCGYNNNHKGCCHKNAVKTERIDIPVIETLKAYIQKKEFMLAVKEQLEKQVDISSIEKEIAGCKKEQEKLQARESQQYSILEKIGYDEKYKNVKEDRILDAINRIAEESSAVQEKLLAKEKALTAAKNNSLTMEKIQYAIENFAVVFQSASKDLQNELIQHFVDEIRLERDSENGKLYPKSMVIKFTGEEIDLVVENLGVKKSHVESVVLMRYCGKEKK

SEQ ID NO: 3144 - protein, 608 aa, unidentified
  source 1..608: note = uncultivated organism
MENERKIAGVYIRVSTEDQAREGFSLGEQEEKLLQLCSLKDYEVYKVYKDAGISAKDMEHRPSFQEMLEDMKKGKINYIVAYKLDRVTRSVRDLEELITMLEKYNTYLVCDRDDVNTSTANGRFFVRMLTVLSQLEIEITSERTKFGLVGAIKSGHVPGIKPFGYMNSEDKRMIIDPVAAPVVKRVFEMYLEGKSFQTICNTFVEENVYPGKPWYDSTIQSIIDNKIYMGDYEQYKTIGKKEKKEPILYKDVVEPIVSRAMWYECQRQKEINQRNYTRDRVYIFFQKIVCPNCGGIMKCKGSGGKKRKYMYYNCEHCHLNYREDRVEESLKTFIYDLLEYDMAVKKYFLPLLADKKNNNIDRINKEIKQLENQRDRIKKAYISGIVEMEYFKEDYKIIEEKLAILEQQKLEAIDLNKFTFSPHQLMAERDIEREKMIRLDTLMPTIKAEWESKTKEEKQEFVSKFIESVVLVKGKNDKLIIENVKFRSCFIEQLTKFYQAGIFDIAVPVDINGKEELVRGSVNITEEQLDEYLKQMNEYYETKFYELYEEIDDETNEVTYEFIKNKNEKVIRFVAIENKKDSPLLKEKLEEKYGIVTYKSNKPNKGDE

SEQ ID NO: 3145 - protein, 562 aa, unidentified
  source 1..562: note = uncultivated organism
MKEMLPCAIYTRKSSEEGLEQGFNSLDAQQEACDAYILSQKAQGWQALEFAYDDGGFSGGNTERPGLKRLLLDITAGKVKIVVVYKVDRLTRSLADFAKLVELFDAHGVSFVSVTQQFNTTSSMGRLTLNVLLSFAQFEREVTGERIRDKIAASKRKGMWMGGSIPMGYVPHERTLRIDEPQARQIYNIYQRYLQLGCVRLLKSELDRQGQLTPVRISKRDNTSGGRPFSRGSLYKILSNPIYIGQIMHKGTAFDGLHTAIIDIELWQAVQDKLKANLKGHRTRATAINPSLLTGLVFNEVGNRLTPTHSKKGALRYRYYIDQQSESEDQRASADVLRLPAQELEDVLLRTLISFLKDESRLVRLMGSIEADKARRQMQVAAELAEQLSEANSVQQIDILQRTINRITVHKNKLEIAIAMNKIWNVIQSETTEHDEQPVTVIEVPVELKRCGMAVRLIVRAPGELTRRQSDPKLVARIAKAHKWFAQLSSGRCDSIQTIARQEKVTSSYVTRVVHLAFLAPDIVQRIVKGEHPVELNIDRLIRMVPLPTDWDVQRKLLGMNN

SEQ ID NO: 3146 - protein, 611 aa, unidentified
  source 1..611: note = uncultivated organism
MRRCAVYTRKSTEDGLDQDFNSLHAQREACEAYVRSQAGEGWKLLPDPYDDGGFSGGTMDRPALARLLADIEAQKIDTIIVYKVDRLTRSLADFSRIVDVLDAHDVSFVSITQQFNTTTSMGRLTLNMLLSFAQFEREVTGERIRDKIAASKRKGMWMGGFVPLGYEPDGRTLTINEEEAKTVHKVFQLYLELGNVRHVKQAADTLGLTTKVRRSNDGKAGGSEARGEPGGDGTDGIVIHMPTGATSDTGRQAVSRRERARMGLGKQEKDSPVAKRSAGGRPLSRGYIYKLLGNPLYVGCIAHKGEIHEGLHPAIIDQAKWDAVQQKLTSNRGRKRSIPTRKTEPSPLMGKLFDADGRPLTPSHAVKSGRRYRYYVARHLVNGTVGESTTDSGWRLPAREIERITADAITTLIKDPARLAEAARDSGIPADWIGELLSRISADQQTNRSSQTQITTHSLNLAERVVLGTDQITITLDLSSMTGISDTTITHSIPTCIRRRGVEMRLVLDGPDKGEASANPDQRLIRCLVQAHTWFDDLKQGRVATLSDIARKEGVSDRHISQVLPLAFLAPDITEAILAGRQPPELTAETLIKRIDLPLHWDDQRAMLGFN

SEQ ID NO: 3147 - protein, 510 aa, unidentified
  source 1..510: note = uncultivated organism
MDKKIAVYARKSVFREDSISIESQIEMCGYETKGQDYIVYQDNGYSGKNTDRPDFQRMLSDIRSGKISKVIVYKLDRVSRSVLDFSELMDVFQKYNVDFVSATEHFDTSNPMGRAMLNICIVFAQLERETIQQRVVDAYASRSKKGFFMGGKTPYGYSKAPIVIDGVKTSMFVQEPDEAADISLIYQLYSKPSSTLGDVLRELTARGININRRGKYWNTARLSEMMRNPIYTTNDISIYDFFKAQGSNMINPPEEYNGVTSQYLFSGTNTNRKTWDLSGQNVVIAPHRGFIPPDIWLACRRKLLGNHQVKKKKKKNSFLSGKIKCGNCGYAPVVRFSQRSKGHVRYLIDTGWSDYHCCTHKLPTIHADDFEAVIIDKIREKLSELTIQADSDVKDELLEKIRNIEAQISKIEKEIEGLVDKIMLADIDKTTVKYINERIAKLDSRKVELSRECDKLRADRQKRSETDFKVLHNVMDKWDELTFDDKRSVVELLIEKILVFPDRIEIQWKV

SEQ ID NO: 3148 - protein, 516 aa, unidentified
  source 1..516: note = uncultivated organism
MALRMDDIAPAQVRCAIYVRKSTEKGLEQEFTSLDAQREACEAYIASQRFDGWVALPDRYDDPGFSGGNMERPGLKRLIADIKSGKVNMVIVHRIDRISRSLLDFAKLMELFEEYNVSFTSITQQINTGTAMGRLLTNVLLSFAAFEREISAERVRDKVAAAKKKGKYMGGTLPYGYDLDRERHKLVVNTEEAKTVRHVFKRFLEVGSGLGIARELNAKGITTKSWVTNKGDLRRGSTWDTQHIYRLLNNRTYLGETVHKDQSYPGEHEAIISKSLWDKVHSILDNPNGRKKNQPARTVPAPMKGVIRCGHCDRAMTGTYTKKGTKTYRYYVCTKASRNGYDVCPVRSVPAGEIEDAVIGQLRAVFRSPEVIAQTFREAQTLESQGLAQIHDDIAELKADISSLRTTLSDLAESDEDYWTISRLIDEKEALSNCKTHELHVLQSNALTENDVIDALTTLDPIWNELFPAEQQRIVGLLVDKVVVNTDGLDIRIRAQGLHSLVAELTDTHGTNSERI

SEQ ID NO: 3149 - protein, 534 aa, unidentified
  source 1..534: note = uncultivated organism
MNGLGRPSVRAVVYTRKSSEEGLEQEFNSLDAQYEACTAYISSQRHEGWKLVKQRFDDGGVSGGTMDRPALKALLDEIDKGLIDMIVVYKIDRLTRSLSDFARLIERLEKVGCSFVSVTQSFNTSSSMGRLTLNVLLSFAQFEREVTAERIRDKIAASKKKGMWMGGVVPWGYQVHPDPKIQSLEPHVKNAPDIQRIFDLYERLGCLSKLKRDVDQLWPARSYSRGRLHNILRNPIYIGKVRHKAEVYEGLHEAIIDQDQFDRVQEQMQLRSIIKRGTHHSRGPSAYLVGKVFDETGDRLTPSKTKKNGRTIRYYYSNRLTITGADPTGWRLRADMLEETLHDILKLYLKQTLQKMQLAPLIKSHALIAAIEALNTLSIEQTLNLIERVDLSDTLLIIKLSHDTLAQTLNINTAHFDHDYLSFKETVTFRRRSNGTKMVWADYKSEPNHALIRAIAQSRIWVDKLKAGESVTDITTSEGISESRLWKRIRLAFLSPKLVKAILDGTTGQELTIKKLSAKEIPLTWAEQHARFLN

SEQ ID NO: 3150 - protein, 505 aa, unidentified
  source 1..505: note = uncultivated organism
MKGIYVRQSIVKEDSISLDTQVEYCKRELRDGEDFKIYRDQKSGKDTNRAQFQDMIDDIKAGLIDTVIVYKIDRISRSVYDFGNIMRTFEKYKVEFISVNEKFDTTTPMGQAMLQIVMVFAELERKTIQMRIIDNYYARGREGRYLGGKPPFGYGKEKIIMNGKKTYQYIENIEQSELVKSLFEMYYNDNDMSYGKMAQWINEDTKYKTTRGNGWSSNTISRIIRNPAFTYATAEVYLYLKDKGCIMNNEVEDFIGKNGLYWYTEGGKERKKEEDNPAPTYVTVAPHIPFINADLWLACQLKADKNKQIKNSGKGTYSWLSGLMKCGYCGLAATVATRKDGDHKLICNGKKRHSCNGVSTSILLEEVENHVGTQLLQHLQEKVANSLSGITENENTDSKELNKLNIELIKVNEEIDNLVEAVAGAGATVAKHYNAKIEKLDKVRERVTKEILSLKIDNREVLSIEQIQDCIYNWNSYDFDRKKEIAQLFIKVVTITNEEIQIIFN

SEQ ID NO: 3151 - protein, 540 aa, unidentified
  source 1..540: note = uncultivated organism
MKPASIKPVRCAIYTRVSTEHGLDQEFNSLDAQYDAASAYIKSQAHAGWTLIKSRYDDGGYSGGSTDRPDLQRLLDDIRARKIDVIVVYKVDRLTRSLADFAKLVELFDAQGVSFVSVTQQFNTTTSMGRLTLNVLLSFAQFEREVTSERIRDKIAASKRKGLWVGGPLPLGYAMKDGKIAVVEDEAERVRLIYRRYLELGGVNELARDLREKDVRTKIRLRATGATQGGIPFERGSLFYLLRNRFYIGEVRYKGEILPGEQPAIMERELFDAVQQKLTDQWSHRNHAKTKSDHLLTGLLYDDAGHRMIPTHATKAGIRYRYYASLPHLKGESKTASVGSVSRIPATGIEDIVVNSVNEHLGARHNQPSSSSIHADDRGVVIAEQVVRIDVHKDRLIVRLKSAGDEEGSHSTDDELLSIPWQKPPSRKSRQILIPLGVSRSEVRPTRIERRARLVNAIARGRRWLDEIVSGSVINIGQIATRQKCSVRQVNMTISLAFLAPDLVKAAVEGRLPRGIGVERLRDAPAEWSRQFETLGLNPQ

SEQ ID NO: 3152 - protein, 562 aa, unidentified
  source 1..562: note = uncultivated organism
MPTAAKIIWTYEKRCGIVVVAKNQKGCENMVFEAPKVAMYIRLSREDLRLGESLSVENQRILLTNYAEEQGWRNLTEYVDDGYSGVNFDRPSFKRMMNDVHDGKINLIICKDMSRFGRNYIQVGEFTDYILPSAGCGLIALNDGVDTRSNIENDMMPFRNLFNEFYCRDLSKKVRTGRNVRCQQGKYLGAYAPLGYVLDSKDRYHYAIDPFGAELVKRIFGMRCDGMSILAIAKKMNDEGVITPRDYWYQLQGKENPRNVSHKWTDVTVSQILHNEAYIGNMVQNKQGRLSYKNRKNVPKPVEEHIRVEGTHSPIIDKETWETVRKMDSKKKFRSGKDKQPSMFSGLLKCADCGMSMKISKDMRPKANGKSRDLHSYVCRTYSNGGRSACTSHRIREPVLIEIVRQNLAQYIEKLKYSESELRKELASRKDSNDIKSVKQQLTYSNKRIAELDKLIENLYVDKVNGTIPQSAFDRLIQKYETEHTELEERAAALKIRVEDSAKDKDDVDRWIEIMKGYMKSGEIDRALLVSLIDTITVGEVREENGEKVRDIRIKYNFVGEI

SEQ ID NO: 3153 - protein, 510 aa, unidentified
  source 1..510: note = uncultivated organism
MAQVQIIQPYQPQSDALEKVAAYCRVSTDSKDQLNSYRTQIGYYTNYIAQHPGWELADIYADEGITGTSLEKRDEFRRMLQDCRAGKIQRILVKSVSRFARNTLELIETTRELKERGVVVVFEEQGIDTAQMLGEMQLTLLAMAAQEESTSISKNMRWSYQKRMENGTFLGCRSPFGYTLENGVLRPHPEQALIIQEIFARFLAGEGKQAIADNLTDRQIPTRFGNTRWNIAGVHYILTNERYCGDALLQKTFTSGFPTRKQRNHGQVNQYYALDTHPAIISEATFRAAQELIRKRDNGQRTRLHADFPIICPDCGYTYRKVKSRGKDYWVCSLQNRGQSRCQSPRLEEAKIKMAFLNLMGKLYLHQTELLSPTLSLLEEIAARQERGNTKLFELNSALADLNEKAHILQRLHNKGFIEDGDFREQSDALASQRKKLNDQRAQALHGSKALETLDKLRELQETLAALPEIPWEFDIELFDQLLEKIVPISNKELIFKLKCGLELKEALPK

SEQ ID NO: 3154 - protein, 573 aa, unidentified
  source 1..573: note = uncultivated organism
MKAAIYSRKSKFTGKGESIENQIQLCKEHGMKYLGILEADFIIYEDEGFSGGNTNRPQFQKLIKDAKAKRFDLIICYRLDRISRNVSDFSQLIKDLNKYNVNFISIREQFDTTTPMGRAMMYIASVFSQLERETIAERIRDNMMQLAKTGRWLGGITPTGYKSEAVVSIDSNGKERKMFKLAPVIEEINLVKLIYDKYISLKSITQVEKYLVENNIRTKNGLDFQRFSIRFILLNPVYAIADKVLYDYLIENGYDVCSDSEEFDGINGLTGYNKTKQDKENYSERYRDSSEWIIAVGMHAGIVSSEEWIETQGLLMKNKSKAFRKVKSSQSLLSGILRCSHCGSYMRPKSIQRTNSDGEQVFYYMCELKEKSRKSRCDITNVNGNTLDASILKELKNIVAKNSPIFDEVFNKRTLVDTTKNTVETEIDTLHAKITELDMSIENLVTAIAKGQKDEVLSIVFKKLEELTNEKENINKRISELQNVKKVVEFNDLNLELVIQSLGTISNSTWDMMDVDAKRRMIKSVVDKIMWDGKKIDMMLFGSKCINIPEMELPTLPSPFNDVDLFPQLKDSK

SEQ ID NO: 3155 - protein, 516 aa, unidentified
  source 1..516: note = uncultivated organism
MEKKQIRCAIYTRKSTEEGLEQSFNSLDAQRDSCEAYIKSQVHEGWKIIPKHYDDGGFSGGTLNRPAFQQLLQDIKQDKVDIVVVYKVDRLTRSLMDFSKIVEVFDSHSTSFVSITQHFNTTTSMGRLTLNILLSFAQFEREVTGERIRDKFAASAKKGLWITGATPLGYKKDNGALVEDTEQSWKIQTIFGKYLELKSVAKLKFYLDENEVHTRSDKKFSKGNLYHLLSNKVYIGKITKDNNIYEGKHDAIISTEIFNQVQKLLQANSICTPTTKRKSSNALLQGKIFDDKGNYFSPSRSTGRSGKIYNYYINQGIKQGKYDKTQCITRIPAKRIEDFIFNELNTFIHNTKSMQKIIANKPLNIQAKLLTNLQNFEFNRDSMRNILSKVIIDNNCTELLLSKNKLYELITSETSVSKDENISLKFNIKITQCSQKGNTMLMGLGGNYNQTLVNAIIKGFYYNKLILEGKTTAELQTRNARRLRKLRFLDPKLIEQIMFGTQSKDLTVEKLCAMVG

SEQ ID NO: 3156 - protein, 572 aa, unidentified
  source 1..572: note = uncultivated organism
MTEPIMKKLRCAVYTRKSSEEGLEQAFNSLDAQREAGVAYIASQKHEGWELLPTHYDDGGYSGGSTDRPALQQLLNDIHAGRVDVIVVYKVDRLSRSLHDFAQMMALFDKQNVSFVSVTQQFNTTTSMGRLTLNILLSFAQFEREVTGERIRDKFAASKKKGMWMGGVPPLGYLIKNRQLIIEPKEAELVKKIFNKYLECHSLLQVAEILNKDGDTNKYWQTGSGLWKGGHKIKVSHLNKILRNVIYIGRIKHGKENYEGQHEAIIDKSIWDQVQDIFMKAEADSRQKWHSFFLLKGKLKTHEGFMMSPTTTHRRALKNTEQKLKKQVRYYVSRKALIHGYKNCQIRNINANLLEGLVTGQLLNYLHHHHPEVFLSIKISDDEAKKSHLIRHLIKEIIVGPEQVIITIDKNNLDTTKANVALTHRSSKYDIQAPTIWQQPDIKEVDDKIHIIVPVLIKRVNGIRTILSSDGKDLVLPEIPKPDAAIVQAIGRGFKWRQMLEDEPDISVHTFAKRVGFGHPYVYRQMVLTRLAPDILHRALTGTLPSAIKLNRLTDAANYFSWDRQRRELGLI

SEQ ID NO: 3157 - protein, 560 aa, unidentified
  source 1..560: note = uncultivated organism
MKRARMLLRVSSNQQLEADGDLSVQRQIVKEYAESHSDWLLDSKEYFEGSNSGYKNSVEKRDILQEALNDAKNNEYDILVVYKDDRVGRLMWEIGAYVMTLKGYGVNIYTVKDGCISPETDDIMGQMVLALRYGNAQKSSADTGMRVKDTAQKLVQKGKFMGGYAPYGYKLVLSGEISKHGRALHHLVIIPEQAEVVKHIFDLSLNKEYGSLKIAKTLNEDERYKNLAPNTVWRSGTITSILTNPIYAGHVAYKRRERINGRSHRLDSSEWIKATTPNVNIQIIDGDSWNRTQDKRKCRADKHLKTLEHKNIKVIRRNDGMLSLIDVAYCGYCGRKLVNGTKYNYWRIKDTGEKRASKIPVYRCQTVQAGVPHAKTSQFRADKIEKVVFECLGEYISRLQENEDIMNEIENNQNKQKKALEAEIRKMNKNLEKIIHGIEVMQSHIPEAMTGEYPLSVTELANAIHKQQEEEEKQKQLIREKELSLKQTDVSNGEWEELKTKFPTWKKVFEKADGPTQRVLVNKLIERIDITNEQIVIRFKINLNDFFQQPRISDGFGVSQ

SEQ ID NO: 3158 - protein, 575 aa, unidentified
  source 1..575: note = uncultivated organism
MAVTRVCIYTRISTDEENQPTSLHSQRERLEAFCTAQEGWRIVAHQEDRATGTKLDRPGLQAGLELARDGRVDMLLVYRVDRLSRKVRQLAQLAEELDTYEVTLRSATEPFDTGSAAGRMMLQMLAVFAEFEHATIADRVSAGIERRAKEGRWFAGRPPFGYLFSDEQRTLVPDPVKAPVVRRIFDLYTRKRLGTIAIARQLRDEDAPAPAGGWGHPAVHWIIGNPTYVGKIRWRDRLFDGIHEPLVDELTFQRAQAILRERGDDISRRRGNASNFLLSGVVRCGSCGKAYVGMSARGNGGRYEYYAYSGRQKHGPKACRNERLPRHKLEHAVLQQLAALYRDGDLVAEALSQAEQEAARTRPEIEQRLASIGAEITRGEQALERYYEAFEQGKLSPERCDERLSRLQARLEDLNAQEAELSRSISQEAGRAPTPADLAAVADQLERVIADGEPQKAKALLRLLIEELRVDGRAQIQPIYRLVMPEVCATSEKVGRVGIEPTTLGLKVLHLRRKSENRIRKNTVSSLYPSRSDAALKSLPVRFSSPRVPRVGVRFADAHILSPWPAMSMVRLWCV

SEQ ID NO: 3159 - protein, 593 aa, unidentified
  source 1..593: note = uncultivated organism
MNNNVQVIKASVAPRDRRKLNQLGELRVGAYCRVSTDTEDQLNSYNSQVKYYTDLINSKKEWTLVDIYADEGITGTQVGKRENFQRMINDCASGKVDLIITKSISRFARNTLDTLQYVRKLKERNIAVFFEDENINTLTMDGELLLTILSSVAQQEVENISANVKKGLKMKMQRGELIGFKGCLGYDYDPNTKELVVNEEEAEIVRFIFRRYTAGIGTFKLAKELKEKGFKTKVGSNNWAVSTIINILRNEKYKGDLMLGKTFTIDPIYKKKAVNNGEVDKFYIKNHHEPIIEASVFDYVQTLIDEKSGPRKEAAKNSGRETSKYPFSKILYCGCCGGKYHRRAAYESNKARNAGWQCNTAAYKGKANCPDSRFIEENLLETAFVYAINQIRDTNLIDEFLYTVKCALSNKTPERKADELLKDIKMLENKKKQLIDIRMEGILTKEDFEEQYKELNDKVEKKKALLSRASSEIDKKEFIASRLEDFKKIISIKNGTDEFDREIFEMLVDKVIVGGYDEQGNPDPYAIEFRFKIDYNFKINGQAIKKKYTVCQNESNDLGSLTTYCQVHSVQVLQNLQSHSVHTLKITYKLRNL

SEQ ID NO: 3160 - protein, 703 aa, unidentified
  source 1..703: note = uncultivated organism
MVFAIYSRKSVFTGKGDSIENQIEFCKEYIYKNYPDKNIKDNDIKIYPDEGYSGRNTNRPYFKKLLEDAENKKIDCVVCYRLDRISRSVLDFSALIQKLNKLDISFVSIKEQFDTSTPMGRAMMYISSVFAQLERETTAERVKDNMYELAKQGRWLGGHPPYGFDFKKIIYYDEQMKQRKMCQLTVNEEQMKIAKEVFEKYLEYNSIGRVVTYLNEKGVKGARGGEICSRNVQSILRSPAYVKTSNEVFIYLKDKGCFVAGIPDNMHGSLLYAKKSQSPIVAIARHEGVIESDKWLKVQEILDKNAEKAPRAGTGKVALLSNLLVCGKCKSNMILNYKSNSDIVYYVCSKRKRQGKKTCDCSILRTDKIDKLVLDHIKKVDVKKIIEEYNNIKESNTEEKKLVELEVKNKKKKIKDLELQVNNLVNQLANFSNSTASTYIIEKIEELNKEITDIKFEIDKLDIDKISISKDDLNLDILIDNIKKFNSSLDNLELSQQRLLLSSIIKNVIWNDEENSLEINYLGLENIDNYGKKSHFCNDKWTYRNKRTTFKPNLTSSFSNIIPEIDLDLSHFNNRLRHARLDLGLTIKEVSEICNIDKSSLDGLELGRYVLTIENLKELEQVFDMNKICLDGYEYLLLNYDKFINRLNAFSKEKVPYTKYRKIADTLGVNIETIRNWITGESIIKYKTYNRIKDKLEKYNLIP

SEQ ID NO: 3161 - protein, 549 aa, unidentified
  source 1..549: note = uncultivated organism
MSRQHFLAAMYLRLSRDDGDAGDVTAKDGKRKSWSNSIGNQRELVKAFIHEQQDIELYDSYVDDGFSGSNFDRPEFKRMISDIEAGRVNCVIVKDLSRFGRDYIESGKYIQKIFPALSVRFIALTDHYDSFHADAGESGIVLPVKNFINDSYCRDISTKVKSQFEVKRKNGECIAPFALYGYRKADNNKNQLVVDNYAAQIVRNIFNWKMEGMAVSAIADQLNGLGILSPKEYKKSTGTNYRGGFSGAVKSAWSSTTVKRILTNEMYLGHMVQGKTGKINYKLKKTVQKPEEEWVKVENTHEPVIPEEVFQVVRNLLRTDGRVSPVSEKNSFFTGILFCGDCGEQMIRRVNRYKNTQKVYYICSTKNRCEGCSRHSIPEEVLKQLVLETVMKFANCFLEEKQMYEKALGMKTNYGSIVCCDKEIARLKEEQNKYASLCAGLYEDLKEGIITKDEFEHLHSEFKRKAGEFEDTRRKQEHRLKELSKKGVLSEERLKTMRDCPGLKEVDRHTLCSMVKEIRVFENHRIEIEFYYTDQYRMMREAGRRQADN

SEQ ID NO: 3162 - protein, 549 aa, unidentified
  source 1..549: note = uncultivated organism
MLKRVAIYTRVSTVEQAEEGYSIDEQERLLIEFCDKNDYEVYETYSDKGISGKDIKHRPSLRKLLKDAEDKRFDMVLVWKINRISRKLSDVLKMVELFENNNIAFKSYSEPFDTTTPSGKMQFQMMALIGEFERGTIAQNVKMGMCARAREGKWCGNTVLGYDLVQKSETTNKKRKDTQLIINEDEAKIVREIFTLYSKGNGYKAIVTIINNKGYKTKKNNPFSIGGIKDILTNPVYIGKIRYNLRQNWSEKRRRNINPKPIMADGIHEPIISLELWDKVQTILKSKKGKPSRIYDGEYPLTGILKCPVCGAGMVIMRTTNKLKNGTKKRIAYYACGNWKNKGTAVCHSNTIRCDKANDYVFGKISELISNDKLIKNITKKINNQRINKVAPTKKSLNKIKLELEKLEKRKKKIFEAYEDDLITKEEFLKRKEELNEQIMKLSEEKGQALETLSDDVNEEVPYELVKNILKEFGTLLNNSATREEKKKLLHMMVSEITMDTRRNIESINIKINDNLINYLKKEGVSIEGTPSFLLSQIGIKTLDIDIAV

SEQ ID NO: 3163 - protein, 512 aa, unidentified
  source 1..512: note = uncultivated organism
MPQAKVITPISRQGERKLNVCAYCRVSSNTADQLNSYATQIRVYTKMISQRPEWNLVEIFADEGISGMKANNREEFQRMIHLCELKQIDLIITKSVSRFARNVKEALSYVRKLKLLGIGVQFEKEGINTLSLGDEMLLNTFAAIAQEESKSISQNIRLANVKRMENGEYIATNVPYGYRLIDKKLEIYEPEAEVVRSIYKLYLNGWSTTEIARELTACEVPTKKAGKEWRSANVSYMLSNERYVGDCRYQKTVRDTTVPFKQSLNRGQEDMYYASETHPAIIDRKLFEDVQALHEKRKERFARTEEQIIYPLSSHIRCFECGSFYHRKIRGGTIKWVCSRHGKEAAACNSNYYSEDRIYDGFIAMINKLRFGEDILGRVISKLEHVVHEHKRNNKAAQQVSGEIAELRAKLLMLDQLYAKKYLASDVYQAQSRDIQKQISERKAERQESFDSEILSVLEGVKRLKSIIWEIEEPLDQFDEKLFREIVQEVTIDNKDIMTVTLLGGLKFEELI

SEQ ID NO: 3164 - protein, 510 aa, unidentified
  source 1..510: note = uncultivated organism
MEKPRSVIYIRVSDPSQIENNSLETQLKACQSYAERNGLQVVEIFSEEGVSAKTVHNRPEMRRLLKFCTDKKSKISKVIIYKMDRFSRSTEDALVAISLLAKQGAFVVSATESTEENPMGRAMRTILITLAQLDNELKGERVRDNMRTMFRNGIWPFKCPKGYFRPGNDRHEKRGQVPQIDKKSNAIIKSLFDKASNGYYSKKALADYLNSLDYKKYFGSEADGEIVKEILGNPFYYGNMYGPKWEEYIWGKHEKLVDKETWEQAYYNILGKKRMLKHQDNNAFPLKGVLKCAVCSHPMTSSNPKGRTKHYLTYECHQKDCPKQERIGIDKAHEQFQAILAYLKPSRRVLKLFSELVFAEWDQSVDSLKQEARLKDNQIDKLEDELTSIAHSNSKGILTDEEAKDRADKIRNEIAVLRVERSDVKIDQYDTEAVKNFTETFLINLDKFWYELDLAQKQALQSQIFPNGVVCQNKIIRTTDLSRSFELIEALKNQNSDYVTPRGIEPRLFG

SEQ ID NO: 3165 - protein, 549 aa, unidentified
  source 1..549: note = uncultivated organism
MEEIKQPKKCNYCAIYTRKSSTEGLDKDFTSLDAQREAALNYIKSQKHEGWLPLPEAYDDGGFTGANLDRPGLHKLLSDIKSQKINCVVVYKVDRLSRSLTDFAKLLEFFDKNGVTFVSVTQAFNTNTSMGRLTLNILLSFAQFEREIISERTKDKLSAARKRGQWTGGYIPIGYKLEEKDKKKKLVIEPAGAKLVREIFDLYLKGNSTLKISQILNEKGLRTYKITCKNGKIIGGVKFSVAKIQWMLRYVAYMGKVEYNGQIYDGEHEAIIDEETFKKTQALLDQNHRERKVTKNTDCTGLLSHILHCKVCNTFMVHTYTIKHGTHKYRYYTCTNAQKYGHSSCPTRSVNSKAVEDAVINCLQEIYSNKQKTENHTYKQEVDALLSPVWDTLYPEEKRRILKILLKEVDYTAAAKKLGITLADNNLRLEFEVDLKQVRPLNKWRKEEEIENEPKLRRNLILAHQLQKLFDEGKIKSPKQASEWLNFDQVRLNHLMTMLLIAPSIQNEIINGDKQAISLIPEHKVRSLAAEADWEKQTKIWQNIKETLS

SEQ ID NO: 3166 - protein, 536 aa, unidentified
  source 1..536: note = uncultivated organism
MTAPLRAALYLRVSTAKQAEQDISIPDQQRQGEAYCQAKGYELVETYIEGGATATTDRRPEFQRMIEAGTTKPAIFDVIIVHSFSRFFRDHFELEFYVRKLAKNGVKLVSITQEIGDDPVHVMMRQIMALFDEYQSKENAKHTLRAMKENARQGFWNGSLPPIGYRLVIAEHRGARAKKKLEIDPLHAETVRLMFRLAHEGKGEGPMGIKAIVNHLNAAKIFTRAGSRWGVGAVHQVLTRRAYVGTHEFNKRAKDGSANAGDDVIKVAVPPIVDEDVFEAVQKRLKSRDPKMVNGAISGSTTLLTGVLHCQSCGGMMTAMTGKNGQYAYYVCGNQRRQGLTSCSSRPVRRDKLDELVGQHIEQRLLDPKRLEEVLKEILDRRQMYVRERQAHVAELNKRVAETQQRLSRIYDAIEGGVASLDDPDLKDRISNLKATRDQAKADAERATALLSSSGKQAVTPDLIRRFADRARQRLRLSDGRYRRDYFQQFAQRVELHDGHVRIVGSKSDLYSTLMAVGDVTPRAVVPPAIPKWLRG

SEQ ID NO: 3167 - protein, 565 aa, unidentified
  source 1..565: note = uncultivated organism
MPRMRRAVIYQRISRTKDTSVALKRQEAALRELADREGWEVVTVIEDDGVSGTVKRPNAERALSLLRSGEADTLLVWAFDRWARSGLPAVAALIETLNARPGLLFIAHNSGLRSDQSTWRMVAGVLAEVAAMEAENTRDRIRAARAFHLRQTEPENQRFLGARAPFGYRPIKSPHGPGKVLVPDHYEAEIARQVADKLIAGMTLGDATKWLAENRVPTPQSEARRRRQNGVDIDAPNFDEPETVKTGKGREQAFRGAWRATTVRNLWRSETLIGRTTRAEPILGPEGDPVLDENGKPKMTDGVVRDASGLPITRWEPILDADTFTRLQARFKAPGREQPRRMVSWLTGVLHCQECGRRLYAHRRDRDDRDASYFRCAGVSDVLTPCPAPARISFARVEEYVESHFLGIAGGWPELERREFLESADVTQRVEDIKRAIDDITAALGRDDADEALLLPQLRELKRERSTLTALPSRLRVAMVPTGRTLRDIWDDTANDLRARRDVLSDVVRWVAVARADTPGTPTPLDRDHIFIQWDPERVPTHDLDLLDESSLATPEAPSRLRIKL

SEQ ID NO: 3168 - protein, 734 aa, unidentified
  source 1..734: note = uncultivated organism
MKSPKARQFVIYSRKSKFTGKGESIENQVEMCRQYIAAHYSQEEAGAALVYEDEGFSGGTLERPQFKKMMADSHKQQFAAIVVYRLDRISRNIGDFAKLIEDLGERKIDFISIREQFDTSSPMGRAMMYIASVFSQLERETIAERIRDNMHELAKTGRWLGGNTPTGYESESVSRVAVDGKVRKACKLKTIPDEINLVKLIFDTFLETGSLTKTDQFLLEGKYRTKRGKTFTRFAIKGILTNPVYMIADNDAYKYLTSHHVELFSDPSAFDGQHGIMAYNRTLQRHGKANQSKPMDEWIVSVGKHTGVIPGAKWVQAQNILELNRSKGYRKPRSNVALLSGILYCGKCGDYMRPKLSSRLNAAGEPVYTYLCSTKERSRGHVCDMKNANGNMLDAKVIEAIKGFGKDSADLARQITQAKRRIAGDREGYDAELAKVKAQIDENEKSIKGLVLTLGKSEGTSAEQYILAQIEELHETGEALKKRLSELEGILQQQDMAGIEFDVIRQMLSTIGESIDSYSVEQKRAAIRAFVRRIVWDGENAHLYLFNRAGDCEFPDPPAGGDDSNPNGHSGEDDSPLGEDSVFNAPAGIGGKARPAGAVKGADGLDEADGADADEVVLVAGEGVVFFCDVGDQAQVVPDDGFPRGGVARAQRLEGGCLLPGGQRPWEAARFEMQRQIEKLGIKKLQQCQQHGHDLPEIWLIQCMCRRAGICREASANEKDSSSSVRSRTGNCSR

SEQ ID NO: 3169 - protein, 528 aa, unidentified
  source 1..528: note = uncultivated organism
MSVIKRLRCAIYTRKSSAEGLEQGFNSLHAQREACEAYVLSQVGEGWTALPTLYDDGGYSGGSMDRPGLKQLLSDVERGLIDVVVVYKIDRLTRSLTDFVRIVEIFDQRGASFVSVTQAFNTTSSMGRLTLNVLLSFAQFEREVTGERIRDKIAASKAKGLWMGGNVALGFDVPDPGSRVLKINPEEAEIVRFIFQRYLELGTVRRLAEDLRLRGITTKQRLAGSGRLLGGCPWQEGPLHYFLKNRIYRGDIVHKGKVHPGQHDAIVDDETFEAVQRRISAASVKRGGTRRAAAIRSPLTGKIFDDHGHPMSPVTARKDGRVHRYYVSAAVIRGDRGAPGSLPRVPAEPTEALVDRELQARADPARVDGDMLAALTRMVVSDGGVELTLDPAKLKVGVINSDDQTAPVTLRIPVILKIFGGAKQIVDGAGASVRPLGPDLTLQKAIARARRWADQLASGEKTSVAAIAQAEDLHPAYVEKVLRLAWLAPDLTQAILGGARLRDFGLTDLIEAQVPADWDKQRRMMVLV

SEQ ID NO: 3170 - protein, 569 aa, unidentified
  source 1..569: note = uncultivated organism
MKAIRCAIYTRKSSEEGLEQDFNSLDAQHAACAAYVASQASEGWVLIKNRYDDGGISGGTLERPGLKALLADIAAGLIDNVVVYKVDRLTRSLLDFAKLVEAFDKAGVSFVSVTQSFNTTTSMGRLTLNMLLSFAQFEREVTAERIRDKIAASKQRGMWMGGTPPIGYRPDGRSLAIVEEDAAMVRHIFQRYLELGTVRALHDELIQQGIRQPRRTTSAGRSFGGTSFGRAQLYNLLKNPVYVGRIRHGSKTYPGNHPAIVDRDIWDRVQAQLADNSQGVQLAPTAKDPSLLAGTVVDQDGQPLVATHACKGKVRYRYYVSRRLQHGVPPAEVGTNGSGVRIPARELEQLVVRAILAELKDPIALSRRLGTSTDCPRQVTALVKNAAAMVATLDGKRGLPVQTLLGRIVQRVKVKEDAVELALDPAALCSELGLDQITPTPDAFIVAIPARVRRTGLAVRFVLETGQHASEGPVDQKLVAAIVKGRTWWKQMQADPSLTVTGLAAIEGASPSYIDRILRLTFLSPAIVDAMLSGEAPAELNLHRLKDVQLIAPSWGAQHRLMGLSASRA

SEQ ID NO: 3171 - protein, 535 aa, unidentified
  source 1..535: note = uncultivated organism
MSRSLAAASAQAENTERVRVATYTRISTDEERQPNSLEAQRVRLDAFVSSQPEWGIERRYEDQFTGTVIDRPALTRLLRDARLGRFDVLLVYRVDRLARSIRGLAQIIDELNQAGVIFRSATEPFDTGTPAGRMMVQMLGVFAEFERALIVERITAGLERKAARGGWCGGQRPYGLHRPDKQDYLSRHPTEAPLVPVIFDQYVNRKAGSSALAAWLNDQGYRTKNGRLWSSASVITVLRNRAYLGEIYYRGNWYPAPHDPLITTDLFDRAQAILAERGEDRSRRASNPAEYLLTGRIRCGRCGQAYVGTAAHGRNGRYTYYTCFTRARYGTKHCANDRLPAEQLEQAITRRLWKVLDDHDLIDRAITDAYERVIQLDEEQQGEITAVKRKLTETRAAMDRYFRAFEAGTMPEDTCAPRIAALSEEAKALEARAAELAAHEDDEQPERTTPADLDALRSTLRAALSESTPTDAKTALHTLIDQIRVDARDHIEPTFRIPAVRIDYGYMEPTGIEPVTSCLQISAERCRFAGSSRRR

SEQ ID NO: 3172 - protein, 550 aa, unidentified
  source 1..550: note = uncultivated organism
MARKSRKGAAAKPAPRSMKLWRAALYIRLSVEFNSRRGDSLETQREIMEAHLALYPDIEIAGLYTDNGITGRTFEREAFQRMLADIEAGKINCVVVKDLSRLGRNTIDTGYYIEKYFPLHQVRFIAVNDQYDSEAADNSGSHITVPLKNMINEAYAADISKKVRSQAHQSMKAGEFIGARPPYGYRKDPANCHKLLPDENVAPVVRQIFTWAADGVPLNQIVKRLNEAGILTPSRYKASCGLIKHENLMGSGVWQTMTVTKILSDEVYTGDMVQGKTTAIGHKQVSTPPEDWIVVRGTHEPLVSRELFERARAAREQAARKYTRTVKKPYSENILRGRIFCGCCGRPLHRQRSKSKNRSDDYFYRCISNDRIKKDACPRPVSVREDRLFQAILTIIHKEAEVAMGNSLRLKQHSGQLEQDKAGTDREIAKLRQSAADSRKYLTSLYENLVSGILTAEEYQTLKANYEGTIDAAVQRVRKLQRQQTERTAQVTEYISIVDRLAGISQDSKLSALLVEQLIDRITVNGPEDITIRFRFESGFEHVAEVLEDA

SEQ ID NO: 3173 - protein, 548 aa, unidentified
  source 1..548: note = uncultivated organism
MAKRQRRLATRGLPSPHGPGSIFRVATLTRISTDETNQPYSLEAQGRGLDQYVDSQPSMEITHRYVDQASGATLQRPGLQAALAAARTGEFDVLLVYRIDRLTRSIVGLMHLVEELDQAGVALRSATEPIDTQGPVGRMLLQLLGIFAEFERGLLIDRIEAGFERKAARGEWLGGRAPFGYSLDSASKTLVIEPDEEAVVRSVFSKFTLEHLGSTTITQWLNDNGRRTRSGTPWTNQRVLRMLQNPVYIGKISHDETIHEGKHAPIIDLDTWRRAQELADTRALTSATRAPNESSYLLSGLLHCAVCGNSYVAVSANGRKNTYRYYTCRTRQTRGNAACRGPRVPAEQLEQAIIASFMATYEDPGLFEAGLEAARAEAATERPVFEAQLASAEKQLRDTTGALDRYLQAFEAGTMPANLCAERVEELTARRNELTTHQAELANQLRLAAPEAPEVTLLSDAVDCVRDALNEGEPTVIKHLLRQFIHRIEISPDWEAHPTYLVPEMPVPGPQAARGLATPVRINEPFVEVAGIEPSDAPRHWGHLFPEA

SEQ ID NO: 3174 - protein, 546 aa, unidentified
  source 1..546: note = uncultivated organism
MATSFFICLPEVDAIMRNGNGKPAANGPAAPREIRCAVYTRKSTDEGLQQEFNSLDAQREAAEAFIASQKHEGWQLLPDHYDDGGFTGGNMDRPAVQRLLAAIEAHRVDCVVVYKVDRLSRSLLDFARMMAVFDRHDVSFVSVTQQFNTTNSLGRLTLNILLSFAQFEREIISERTRDKQSAARKKGKWIGGHPVLGYDIDPRGGRLVVNAGEAPMVRGIFELYLENEAAIPVTEELERRGWRTKRWESSEGRVHGGKPFTKNRLYAVLTNVIYSGRINHKGTIYAGEHEAIVDVATWERVQKMLGRNGPGNRERVRNKYGALLRGMVHCTSCGVPMLHTYTMRKSKRYRYYVCYNAQQRGWNICETKSVAAHSIEEAVIESIRKLGTNPELARETVQQARAQVATRIEQLKREESTAKERLRRLNVEIARTAATSDQMDGAARCDRLVEAQKEFQTIESQLTVIRTELETLNCDPLDELDLMAALCAFDPVWTSMRTHEQTRLLRLLVESVGYDGRSRKVTVAFRSPGMRELCAGVAAGSSEEKE

SEQ ID NO: 3175 - protein, 526 aa, unidentified
  source 1..526: note = uncultivated organism
MNVVIYARFSSSKQNETSIEAQLEECYKYCKSNNYNVIEKYIDRATSAKTDNRPAFQKMISDSCNKEFEAIIVYQLDRFSRSREDSAFYKHKLKKNGVKVISARETISEDASGILIESVLEGMAEYYSAELSQKVKRNLRQNAERGYFNGGKHPFGFKVVTVDCGTYKKRKLEIDVDTAPIVRDIFEMRANGTKISDILNYLNSKGCRTVQGRNFKKSSLECLFKNKRYIGTNIYENEEYPDTIPAIIDKELFERVQLVVQKFKHAPGISKASEEYILTTKIFCGQCGNSMVGTSGTSQTGTIYKYYTCNNVLKKKCNKKNVPKDVIEDAVFNECKRLLTAENIELITNKVYAICQEQNSQSCLLKSLEKQMNKLNNNIENLMVALENGENVDIISDRISQKRNELKEVKENYYVEKNKIENYTEKQIKFFLLKLKNGSIDDIKYRRTLVNAFVNKVYVYYVKIARMLNVTNESATMNKELLSEIRSNLLKAQSSYDEVLCQPKKGITCVIPFFLIRHWLVRRNSE

SEQ ID NO: 3176 - protein, 534 aa, unidentified
  source 1..534: note = uncultivated organism
MKAPSVRPVRCAIYTRVSTDHGLDQEFNSLDAQYDAASSYIKSQAHAGWTLIRSRCDDGGYSGGSTDRPDLQRLLDDIRGRKLDVIVVYKVDRLTRSLADFAKLVELFDAHDVSFVSVTQQFNTTTSMGRLTLNVLLSFAQFEREVTSERIRDKIAASKRKGLWVGGTFPLGYHMKDDKIAVIEDEAERVRLIYRRYLELDGVNALARDLRERNIRTKSRLLATGATRGGIVFGRGSLFYLLRNRFYIGEVKYKDEILPGEQPAIMDRALFDAVQQKLTDQWTTRSTSRNASDHLLSGLLFDDAGHRMVPTHATKSGVRYRYYVSLPHLHGESKTASVGSVSRIPATEIEEVIIKSLRAQKKNPSSKATQIGDRKILQDSIARIDVHEDHLAIRLSSADDETSDPTDDRLLSIPWQKPPSRRSREILLPHGIPRNEVRPTRIERRARLVSAIARGRRWLDEIVSGSVTDVQQIARRQKCSARQVNMTLSLAFLAPDLVRAAVEGRLPRGIGVERLRDAPAEWSQQFEALGLNPR

SEQ ID NO: 3177 - protein, 533 aa, unidentified
  source 1..533: note = uncultivated organism
MAKLWSTDGASALEEKSYRVIKIESQEQAKKARLRVAAYTRVSSDSEDQLNSFAAQNRYYTELISKKPEWTMVDIYADEGITGTSTEKRDDFQRMMADCRRGLVDQILVKSISRFARNTKECLENIRELKELGVNVRFERESINTANVSSELITAIYAAFAQKESESISGNMRWSYQRRMESGTFLPSSMAYGYKIVNKKIEIDPDAALTVCRIFQWYLDGINKTRIAAMLDDEGVPTNQNKTWRESAVHYILTNERYIGDSLWQKSYTTNTFPTTRCKNNGEREKYYAEGTHPPIIAKETFEQVQKLILLRKDIFGKKKKEHPYPLSQKLICENCGTAFRRKQQRKHAYWCCMKHDTSLADCAMLPIAEESIYDAFCRLYYKLKHQSNSIFEQMLVSLQAIRNQRMLWSPDIVSLNKKISELSSQNQTLAFLKQQGLVDPDIFISQTNELTKQLRQAKLEKEKLMDAESDMTAQQTQEILDLLENGPHFLDTFDAELFGELVDKIIVENCDSIRFRLKNGLELRERIERTVR

SEQ ID NO: 3178 - protein, 568 aa, unidentified
  source 1..568: note = uncultivated organism
MENTRAIALYRASTKQQTAKENNDIPTQKQIVREFIFKQGWTLIREFTEGGISGFKISANKRDALQTIKAMAVNGEFDVLVVYMSDRIGRIADETPLVISFLNKHGVKVISTTEGEIKTETHVDKLLTYIRYWQSEGESLKTRQRVTDYQIAAIEEGRFRGGSLLPYGYKLVDNGSKNYKGRHILDLVIDEEQAEVVKLIYKLSIEYNYGQSRIAQYLNEHGYPAPRGKTWYSSTIQSILNNPIYKGQLRYYSQLYDKMVLSPVQEHLIIIPPLEWEKNQLCMKARSYKPNSIVRKDKRSKNTHGSLLFSGLIYCGHCGMALTTMTAYARWETKDGIKKKTVYHKYRCSSFYTKGAVKCTGQSTYGVSKIEPVLIKYIKMTIAKKEKEKMDENYIREMEQLIKEKTNHKKNVQAEIQKIETEITALEDTIAKTLAGLLNDFTPERLGKILKNKEEELASKQKALENIEQEIQYLKVAKDQYEKIGFSFKDWSEQFDKSDFETKKAKINEVVNKIVVTKQEDGSLAFEITYNLFVEQFENMSCINTQDVLTNCAFLQPITFTEKYVSTS

SEQ ID NO: 3179 - protein, 801 aa, unidentified
  source 1..801: note = uncultivated organism
MPADTRRNRAPATAAAGHATAGTRVAIVTRISTDELNQPYSLEAQAKGLEAFVASQPGHAITHRFVDQASGATLARPGLQAALAAAKTGQFDVLLVYRIDRLTRSIVGLMTIVEELAAAGVALRSATEPIDTQGPVGRMLLQLLGIFAEFERGLLIDRITKGFERKAARGEWLGGPGPYGYHLDSATKTLTVEPGEAAIVGAMFARYVDERCGAPSLAHWLNDTGQRSRRGKLWSTQTVLRVLRNPVYLGKIAHGEDLHDGKHKAILDERTFNQAQQLLGQRSTGTAAVVPNTSDYLLSGLLRCAACHGAYIGVGAHGRGGFYRYYICRTAHAKGAPACPGPRIPASTLEDAITTALIDTYDNSQLFEQAASDAYAHITAALPRLTTELAGTDTQLRDTTKAIDRYLRAFEAGTMSEQLCAPRIAELSAQRDELTARRHQLSGQVHASQPQLPSAEHRRSITSNLQQVLQHGEPHATKQLLAELIDRIDISPDKQAQPYFWIPQHQQPEPSPARAAKGTRVRIKSQDVELRGLEPLTPTLPVWCATSCATAPRPPAYLRRAGRSGAHPPPLQPPAAAPLPQLPPLAVAHRAEAVPALGCPAEPSTRDRPRRPAVGHRDNEPARLLARHQRLEHSERAVRDLGVGLAVTAPDVLPAQPGRELVGVELCRLPARAARPGAEVDLAQTGVERERQPGQVGDAAGGVGGAAQVGRDQRRWVHRRDHRRHRAGLLAADVVQRLVELTLEPPARVVAGAPVAQDDQAATGLRHALAGAAAEARSSARSLSRSTKAMAGQSFHSRSRA

SEQ ID NO: 3180 - protein, 538 aa, unidentified
  source 1..538: note = uncultivated organism
MKTQCAIYVRKSSDRGLDMEFNSLDNQELACKSYIASQSYQGWEYVKTYSDAAISGGTMARPGLQQMLDDVRTGKINCVLVYKIDRLSRSIYDFKRMMKEIFEQHDCNLVSITQSFDTSTAMGKLTLNMLLSFAEFEREVASERVRDKMRATKSKGLWVGGVPPLGYDIQFGKLIVNEVERETVNKIFNTYLNSRSLLDCRDQIAAQGICGKQWTTKKGETRGGGTMTANIVERILKNQIYLGKLPNKSTGEVFDGQHPAIITQELFDAVQQKLQDNNKGRTMYCRGHALFHNMIYTADGMAFKNKTGNKGLRQYKYYKCGKISLPAGDFDTIVCNNVRDFLNSDMVQIPNTMRLALKQLEYSDALAQAIIDRIVYQDHKLTIFINIADLDKLREFRKDDYINTSVTPMDYCLSPDGAQVIIEQVVYLSSHTCINHRNAGCGRDLLTKKENATMLIKALAYGWKYKKAYESSIGVKSLAANEKRDQRTIYKYLNLAYLSPRIVNDIMDSKIPHHINLQTLFQIASKYENFAEQERVFY

SEQ ID NO: 3181 - protein, 541 aa, unidentified
  source 1..541: note = uncultivated organism
MSTKLRCAIYTRKSTEEGLDQAFNSLHAQREACEAYIISQAGEGWSALKETYDDGGFSGGSMDRPALARLLADIGAGRIDVVVVYKVDRLTRSLANFAKIVEAFDAKGVSFVSVTQAFNTTSSMGRLTLNVLLSFAQFEREVTGERIRDKIAASKAKGMWMGGGLPLGYDAPVDLTTRALVVNPAEAETVRRIFALYLEVAAVEELKRRLAAEGLRPKASQGGNAAAVFSRGALYHLLKNRTYLGEIPHRDKSHPGAHAAIVERDVFDAVQQRLAKQTQRYKSRPLRRATMRLAGRLCEAYGSAMGPTFTKGARGQVYSYYASSALKAAQRPVDDDRIQRVPGPIIERLVSETLAPFLSDDAFDAVIRVEVHATCVHMVIDPAQLIGRPILARDAAEEVQRKLPPSHRVMIEADRPARLRLVNPIRLALRGGRTSIVDAEGRRTGKSTKVDPVLVRALRASHELLSTLGGAPIGYPEAAALPASPAGSHERNLIKLAFLAPDLQAAILEGRQPPGLTLQAIVGANLPPTWADQRAWAESLA

SEQ ID NO: 3182 - protein, 587 aa, unidentified
  source 1..587: note = uncultivated organism
MTSTQKPALRCAIYTRKSSEEGLEQSFNSLDAQREACEAFILSQREEGWKALPARYDDGGYSGGTMERPALQRLLEDVEAGKVNVIVVYKVDRLTRSLADFAKIVEALDGHGVSFVSVTQQFNTTSSMGRLTLNVLLSFAQFEREVTGERIRDKIAASKRKGIWMGGPVPLGYDLEARKLVPNTKEAALVCKIFSLYLELGCVSKLAIRLARENIRSKVWTTKAGTRLGGNTFARGALYDLLQNRLYIGEIRHRDQWYAGEHQGIVPRELWDNVQAQMSSNRKKRRDHIRERSSSLLTGLLVDASGNRFTPSFTFKKRRRYRYYVSQLAVKNPATKFTGPIRLPAREIETRVTEKLLSFLKSDAEVFDRLGAAAESPAASGQLVAAARKLAFRWPSLRSEELRELLASFLRRVIVQENNIELLISRADLREVLEKGDDFVPANLDRPYQSIHPDDLICLTIEVKLKRSGGEVHLVVPPNASEISSRQPNPSLIKAVARARSWYERVLEGKSSNQRSLTLHAGLTRRYIQKVFGCAFLAPDIVESILEGRQPRDLSFKKLCDNIPLSWVEQRAQLGFSPASTRRSRVQ

SEQ ID NO: 3183 - protein, 523 aa, unidentified
  source 1..523: note = uncultivated organism
MSRAKKPKTPAGPAVRCAIYTRKSTEEGLEQEFNTLDAQRESGEAYIASQKNEGWECLAERYDDGGFSGGNLERPALKRLLADVAAGTVDCIVVYKVDRLSRSLLDFAKIMEVFDQQNVAFVSVTQQFNTSTPMGRLVLNVLLSFAQFEREIIGERIRDKIAAQRRKGKWSGGFPILGYDVDRSGGSPKLVVNSYEARRVREIFELYLSLGSLMPVIDELANRGWTNKHWTTKKGGSKGGRAFDKGSLYALLTNPLYVGKVKHKSNLYQGEHEAIISPDLFDKVGATLRRNGRTGGIEVRNRYGALLKGLMFCPSCNRTMVHSFTGRGGKRYRYYTCTQAIKSGRKSCPTGSLPAAEIERVVVDQVRGIADDAALREEVLRQATAHLEAEVAELQAERRRLEKEVAWQHAEICKLAVAGTASGATTARIADLHEHVARGESRLAELQNEIADRDQARLAPEDIDAAFADFDGVWEALSPREQARLLALLISRVEFDAEESTVEVTYHLAGIKALAERQLEEAA

SEQ ID NO: 3184 - protein, 532 aa, unidentified
  source 1..532: note = uncultivated organism
MPLTEGEHHMSLNMEKTETNECAIYVRKSTIDQRQSGGRSISGQIKDCQKLAESHGMKVVKVFEEEEGTSSSRYSKKKRPEWDAALNEIGTKYKNLIVWALDRGSRKGFEEVGQILTTIEECGGRMISFQDQIDTLGMDFMQRMNLVLRAEFAKNESDLLSARITRGKEVARERGLWGTGAVPYPYKMVREAGQPERVEQVPEQVEVIHRVKEMIFEGVTMRTICKTLNEEGIRNRKGAYWSAQTLSYMMKNVALIGQRHELGDVAREENGDPKIFHEAVLTESEFLKIQESLSSRRRTQQTPKTKSSRRATVLSGLLECERCGSPLSGTCSKNVKYRYYSCRIGCQGSMRYESLNDYVGNIALAHLSKIAYEDPSSEILQEIGRRWLGVVDPELKKEEIRKLDELTIYKDRLTRLHADYYEHGRIQEKQFFKMQDGLFAKIKNLEGQLQKEDTTVDHGPLLDLVSCSEAEGEDVFDFTAEGSPWSQLKDEEKRMIAYLLIDKIVIADHGKGEKPTIDTPLEERVKEITFNS

SEQ ID NO: 3185 - protein, 545 aa, unidentified
  source 1..545: note = uncultivated organism
MTSRRCAVYTRKSTEDGLDQEFNSLDAQREACEAYIFSQKHEGWTLVPGRYDDGGFSGGNMERPGLKALIADIEAGLVDVIVVYKVDRLTRSLADFAKIVERLDAKGASFVSVTQAFNTTTSMGRLTLNVLLSFAQVEREVTGERIRDKIAASKRKGMWMGGPVPLGYQVVDRKLVPVPEEAERVRTIMRRYLELRSVPALLPYLKAEGILTKVQERASGPHRGGIPFARGSLFHLLKNPIYRGKIVHKGQVYDGEHEPIVEEDLWERVQQMLQEKAPARKRPANDPQRAMLQGLLFDQQGRPMVPTYGCKGTRRYTYYTSRKDLTRKGDPRGTRFRRGEIEEHIVQHLTSLMDDEHALRRLSGCDDGAQLQTMFAEAERQSQAFAIRASAADAIRAVVAAIHVTNTELRIEIRPTALGLGATEPWTYCIPRPAKPPFREAKLRMDANRADERFDSDLITLLSEAMQVQRLVLQSPELSLSQLGKREGRCRAHLGRLLRLSWLSPRIVEAIADGTQPKSLTRHRLLSVSLPLEWDAQERLLGMAA

SEQ ID NO: 3186 - protein, 539 aa, unidentified
  source 1..539: note = uncultivated organism
MADKPKKLRCAIYTRKSTEDGLEQDFNSLDAQREACAAYILSQTSVGWEAVSEFYDDGGWSGGTMNRPAITQLLDDVKAGKVDVIVVYKVDRLTRSLADFAKIVEILDENEASFVSVTQSFNTTTSMGRLTLNVLLSFAQFEREVTGERIRDKIAASKKKGMWMGGPVPIGYDLDDRRLVINHTEAKAVRHMFERYTILQSVPQLVDELAADGYRTKPRLYKGERVVGNIPFRAGSLTKLLHNPVYIGKVRHKDAIYDGEHEAIIDQTLFDEVQSIFATNRRDNALGKKSENPSLLTGFISDPDGRPMSPTQARRGARLYRYYTTRLEPGEKKDSVWRMPCGEIERLVINAVANHLRSDQSNGCEAAADLSRQIDDRSDMASALPDMCISAQRKILLSYQTKVQVKETTVEIVCKTAENAEPEMLTVKAKLVSRGSDVKLAIPPGGGVSKRDPDPVLLRLVAHAFAARDFLVDGTPSPMIAEYSKAHLQKLTRLSFLAPDIISAILDGSQPLHLTGRRILRMGNVPLCWTAQRAMLEFN

SEQ ID NO: 3187 - protein, 757 aa, unidentified
  source 1..757: note = uncultivated organism
MIQHDRQQERVALYARISTGEGMQAEGHSIEAQLAEMHEFAAQRGWEVVAKFVDVGISGSHEQRPQLQALLAAVAEGVFDIVLVHELSRLSRSVYGTFDILERLGDYEIGFASVTDRDFDYTSPTGRLFLTFMAALNQYYLDQMRMHIRKSKKQRVREGLYNASIPPLGYRHVGDARTPPETVPEGAKIVKLIFEKYATGQYSYQKVADYLNAHGYTSRQDNPFSKDTVADIIRNPFYKGKVRYREGRRDQERDMIKEGHHEALVSEALWEACRQVRQQHQNASRPFQAQVRTYLLGQLLHCHVCNRRLRSQYASGNVYYREMSNARGYHDCPNARIGARGEALHAQMHALVRALHLPEDWQVEIREELGKDEAAVKLRRQRQRLVAERRSLLLDRQRGYYDDDDDLFHRRFERIKSELQLLPSPVELERLEQAALKLEYLHEVWDKADVEDQHELLQLMFRRVTVDVDQRRLVMLYPTAPFIPLFRNLAQVAERDLGAFAPLWTPEEVAPLGVAHTQLAPLQALPELPVELPFLPEYPWPPQPRSRITPAVSDVLKARRQAGYEGGLVLDVRVPGLAPLRVDGRQWPEVTLEQVTLAEALAERETEVACLHTSFQVQRHPQREELLESIYERLGPHGTWYWVDVLPQAMPAHWLFRYFPETWAYAQERYWSGYRIYNRLKEAGFGVEQVEQQERTVYQPVPASVAYAMAAQRPGLLQALPDGLYQAGLERLAAEEPDALLSSETTLVVVAARKEAS

SEQ ID NO: 3188 - protein, 534 aa, unidentified
  source 1..534: note = uncultivated organism
MKESVQKRCAIYTRKSSEEGLDQSYNSLAAQRDACSAYIASQVGEGWKEIADAFDDGGYSGGSMDRPALSRLLAEIDAGHIDIVVVYKVDPLTRSLADFARIVERLEAKDASFVSVTQAFNTTTSMGRLTLNVLLSFAQFEREVTGERIRDKIAASKRKGMWMGGRPMLGYRPNGRTLDVDPEEAETVRDIFKRYLELGSVYALRADLTARKVHGKTWMTKSGKVMGGGVLALGALYNLLRNRHYRGLIPHKKDSHVGLHEAIIDADLFEAVQRRLDGQSAQRRARPLLPGGAPLTGLLFDDAGNLMSPSHARGKAGKRHRYYVSTALIAGDRAKAGARPRVPALAIETLVEERISRLPALAPFSWATARAQIDRVTVSESTIAIALKTAVSASAARELLPVDDQCDATPEGIVIKAAARLGRRAGRTHLLDPNGRRADAAATPDPVLVRALGQGWRWRMMLLSGAYPGSDALARAESVARSHLQRMVRLAYLAPDIQEDILAGRHRPGLSIDVLTRHGAPMDWSAQRRLYKAH

SEQ ID NO: 3189 - protein, 522 aa, unidentified
  source 1..522: note = uncultivated organism
MAGNNSSSVFGLTARRGMRCAIYTRKSTEEGLEQEFNTLDAQRDSAEAYIRSQREDGWVALPDRYDDGGYTGANMERPALKKLLQDVRDGLVDCVMVYKVDRLTRSLLDFARIMEVLDKHSVSFVSVTQQFNTTGSLGRLTLNILLSFAQFEREMIAERTRDKMSAARRKGRWVGGIPMLGYDLSDRGARLVVNEDEAARVRAIFDLYLEHGSLIPVVQELNRRNWRMKEWTTRKGTLSGGKPFIKNRLYNLLTNIVYIGKIEHGGQIYDGEHEGILDPEVWQRVQDRLRFNGRTGGRQVRNKYGAVLKGILRCGSCEAGMAHTYTQKAPNRLYRYYVCVNAHQRGYDQCQTRSVSAPQIEQAVVDQIRGIAANPSVVDEVVRQLAEQQSTQREALEREKRVMERELSRLAEEIPGLIRTAGKHVTDRMADLQERINVLEGQLRSVCDQLAETVDQITDPAAVLRALREFDVLWEEMKPREQEKFVKTLVEQVTYDGRTGKVTVGFRTAGIRQLCIDVRATK

SEQ ID NO: 3190 - protein, 514 aa, unidentified
  source 1..514: note = uncultivated organism
MLIKDRYDDGGFSGGNMERPGLKRLLADIEAGRVDIVLLYKIDRLTRSLTDFSKIVEVMDAAGASFVSITQSFNTTTSMGRLTLNMLLSFAQFEREVTGERIRDKIAASNKKSIWMGGPVPLGYEVRDRKLIVNEHEAEQVRHIMQRYLALGSVPLLAGELNAGGYRTKVQRRASGPHRGGCIFRRGTLCHLLSNRIYRGMIVHKGKAYAGEHEPIVDQDLWEYVQAKLKDNASGSSHRKRHQHHSLLIGKVFDGKGRAMTPSHAQRGRKRYRYYVTRPEGVDGSPAWRVNAHDLERLICDRLAEKIGAPNLTRALMDSEELDARSLEQTMAKADPIAASLRSDTEKKKAALIEALVERVDLAETQISVRLNSAGLARALSVPKTADDRAPILIDIPAVKVRRGHQLRLIIPGENTSTSKPAQRDSKLIALVAEAMAARQLIEQNPERSIASIAAEHRRCRTRLGNLVRMSCLAPDIVQAIVEGRQPKTLSAKTFARMKLPIDWAEQCKALGLG

SEQ ID NO: 3191 - protein, 535 aa, unidentified
  source 1..535: note = uncultivated organism
MDKKKIRCAIYTRKSTEEGLEQDFNSLDAQREACEAYIKSQMHEGWTLIKKEYSDGGYSGGTMKRPAFQELLMDIEEDKVDIVVVYKVDRLTRSLMDFSKIIDIFDKHGTSFVSITQQFNTTTSMGRLTLNILLSFAQFEREVTGERIRDKIAASKKKGMWMSGCPPLGYKKENKKLVVEEKEAQKVKLIFDKYLDLQSVPKLMEYLKTENIRTRSDKEFFKGELYHMLSNKVYIGKIVHKENVYEGEHDGIIDDITFEMVQKLLYENKLDKICGTKCASNSLLTGLIFDDKNNKMTPSHSNCHGRRYRYYISQAIKKYKKSQAGSVSKIPAGEIEKFVVENVEEFLNNKKEMHRILSAYDLKEQEHLISTIKQIEDFAEPKLIRAIVNKVIVSDKSVEIIFNEKAVPKVLELIANGEELYIDEKEVTPFIVNKKIKLTQPSKSGNILIVKVNDENTPIPNPYLVNAVIKGNYFYKRIQEGATIEKLQAEEGLKDSKYIRNLLNLRFLPPALTEQILNGTQDDNISLQKLIKMVA

SEQ ID NO: 3192 - protein, 513 aa, unidentified
  source 1..513: note = uncultivated organism
MNPNVTVINPIITEDKESKIRVAAYCRVSTNSEDQQNSLMTQMRYYENFLADSETERLVSVYADEGITGTRMDKREEFQRMLKDCRRGKIDRIIVKSISRFARNTKDCLSVLRELKELGISVMFEKENIDTANITDEIMVTVMGGLAQEESASISNNVRWGIRSKMKNGTVKFHSAPLGYDLYEGSLVINKREAEIVKSIYKMFLSGMGYASICRELNESKVIKNDKETKWFPTSIQYILTNEKYIGDSLWQKNYNTSMPYRKVRNKGELEKYYYSKTHEPIISREDFEAVQKIVKERKCPNKELIKNYPLSKKVYCGECGSLFKRRVKNEKSYWICREHYYNAENCRTKPISEQVFYTAFMTMYNKLKTNYSVIFTPMLTQLQELKNKKYGGNKQYIEINKEIAQLKEQTHVLARLKTKGFIDENKYIEQVTEINAKIDKLNRELRKIVRCDDDDEIISQIKEIASIIENGTDLMTEFDDVMFESLIEKIIVKNHTEFEFNLYGGLKFTERI

SEQ ID NO: 3193 - protein, 559 aa, unidentified
  source 1..559: note = uncultivated organism
MKNKQFKKIYHAAIYVRLSKEDGDVAGASKAESNSISNQRELIRDFLKDKKDIVVVSERVDDGYSGSSFERPSFKLMMEDIKKGVVDCVVVKDLSRFGREYIDSGRYIERLFPAMGVRFIAVNDHYDSLKGDDQGDEILVPFKNLINDAYCRDISVKIRSHLEVKRKNGEFIGAFAPYGYQKDGEDHHRLMVDTYAAGVVQDIFRMKLHGMSQDAIAGKLNRDGILSPMEYKNSMGINFRTVFRAKAASGWSPVAVRRILENEVYIGNLVQGRQSTPNHKVKKSIRKDKEDWVRVEKNHEPVVSERDFAVVQKLLGMDTRTAPDRESVYLLSGVAVCGDCGAPMVRKVSSVNGKRYCYYICSGHKAGGNCSPHRIPVQALEDAVFVLLKRQIGCVLDLERVLDYAGTVPLRNLDVRKLEERREKLSGEAERCRELRLMLYEDMKDGVITKEDYVELHAAYEARGKEAQEAAGKAEREIRAVLEGEEDKYRWISYFKEYKDIGELTRNVVVALISEVRVYDRENIEVVFDFADQYRQALEYLKGRECPGLEGMATGREAV

SEQ ID NO: 3194 - protein, 535 aa, unidentified
  source 1..535: note = uncultivated organism
MNSGSRAYTTPGDICPNHNGTIRCAIYTRKSTDEGLDQEFNSLDAQRESAESFIRSQQHEGWVCQPDAYNDGGFTGGNMERPALRRLISDIENGEIDCVVVYKVDRLSRSLLDFSRIIGLFDKHGVSFVSVTQQFNTTSSMGRLTLNILLSFAQFEREIISERTRDKISAARKKGKWTGGMPVLGYDIDSQAGRLVVNQEEAEQVRAIFDLYLDRQRLLTVVQELNRRNWHTKHWVTKKGRERGGKQFTKNSLFRLLTNVIYTGKVRYKDSIYPGEHEQIISEDLWQQGRDLLRQNARSGGIDVRSKYGALLRGLLYCVPCGTAMMHTYTVKKNRRYRYYVCLNAQQRGWSACPTKSINAHDIESFIVEHIHGIGSNQEIIAETVRRVQAKSETRLAELNREQRVQKKQLRRLHIRLRKLIGEPSGISIDSSTIDQLADLQDQIRNAEQRMTEIEDEIITLQREAVDEEEIARSLSAFTPVWKSLNSREQSRIIKLLIERIGYDGRDESIKVTFRSLGIKALCAEKSPSNEKESQ

SEQ ID NO: 3195 - protein, 553 aa, unidentified
  source 1..553: note = uncultivated organism
MTQKPVIRCAIYTRKSTDEGLEQAFNSLDAQYEACAAYVASQRHEGWKLIPDRFDDGGLSGGTLERPALQLLLAEIDAGRIGMVVVYKIDRLTRSLVDFGRLVERLDARGCSFVSVTQAFNTATSMGRLTLNVLLSFAQFEREVTAERIRDKIAASKKKGLWMGGALPLGHNRHPDPQRRELVVNPVEAKVVEMLFRLYADLGNLRLVELEAERRGLRPKTLVSRTGRVRGGSPFARGQLHHLLTNPVYIGRIRHKDQTYPGQHPAIIEDALWQEVQDKLIAASARPRSRSHATTDPRILTGKLRDETGDLLTPTHTLKAGRRFAYYVSNRLIAGGRDPTGWRLPAEALEATLRQIAVGHLRRAAAGHALLQHPEANGAAELVRRATAFADRVESEPALLGKMIGSGTLTPGKLQLELDPGVIAAALEVSVESLSDRFLQFSCAFALRRRGAETRIIAGETMPVPDEVLQRTLAEAHLWTGALRGGTSLTEITRETGRSEPYIRNRIPLAFLAPKLQAAILEGRQPVHLSVAQLIRDDIPMCWNDQAKLFQIG

SEQ ID NO: 3196 - protein, 612 aa, unidentified
  source 1..612: note = uncultivated organism
MNEEKKLCGIYMRVSTEDQAREGFSLPEQKERLEAYCKFNNYKIVEYYTDAGISAKTGNKRPEYDRMLEDGRQGKINMIIALKLDRITRSTRDWETLMDYLEKYNVNIAFVNDDINTTTANGKMVSRIMMSVSQNEIERTSERTIIGLEGAIKKGHIPARAPLGYKHVDKKLVPDSLTKDIVIRIYNLYYDGLTYNTIAKIFNEEKVYDKTNWKDTSILKIISNVVYKGDYIQGKTTKNPRYFENVVEPIISKELWENCQVQKKKNQRNYMRSQTYIFLQKLKCPKCGRILAGGASHKIKSDRWYYYYRCEKCRGNIREHEIENSIKEMLSDIFEYDSVVNEFFLPVLQNKIHNPKEDYEKEITNLNNKKVRIRKAYIDELFTEEEYKEETSIIENKIKNLEKKLLENEQVSNLNLTIDDILIKRDMDFINKVKLPILYDAFSDSWNDLDRDDKADIVMRYIDEIELELVNNKYRVKLVNFRTTFYKEFKELFDKGYIDWKRKITHSFKGIGIDSKVRYSEYLPFKEVYRHLMRLNECYDVSFYKGTLYKKTEELKMLPLLKGDVVVRIFPTEKDDDSKDILGMGMFFTKDNPNDIKVNIPEIFECIPDIEN

SEQ ID NO: 3197 - protein, 567 aa, unidentified
  source 1..567: note = uncultivated organism
MEKKKIVRMLLRVSSNQQLEADGDLSVQRRIVSEYIADQENWQLDKKEYFEGSKSGYKTAVSDRDVLQEAMEDAKNKEYDILVAYKDDRIGRRMWEIGAYVMTLKSYGVDIYTVKDGCISPAGDDIMGQMMLALRFGNAQKSSSDTGMRVKDTAQKLVQQGKFMGGTAPYGYELVLSGELSKHGRALHKLVVVPERAEVVKYIFDLSLNKEFGSAKIAKVLNEDEYYKTMAPKDVWKGGTITSILTNPVYAGHVAYKRRERINGIAHRLSDDQWIKSNEPNESIQIIDSALWDRVQEKRKIRADKYIKTLEHKGVNVIRRNEGMLSLIDVIHCGCCGGKLTNGTKYSYWKLKATGDKMASKIPVYRCQMARNGVPHDGPAQFRADMVETIVFDSLLKYIGCLQEKEDIFEMIEKNQTMERRAQAAEIKRLENELEKTLQGIATMEQHIPEAMTGTYALSLDELVAVIHRQQEKKEEQEMLIQEKKEKQKQMAVTIGEWEELKAQLPTWQQVFKEAGRETQRVLVNKLIDRIDVTNEQIVIRFKINLNDFLPRISDGSGTIPCKLCSA

SEQ ID NO: 3198 - protein, 569 aa, unidentified
  source 1..569: note = uncultivated organism
MRNFAWYGRLSTKDKQDPTISFPSQREACETKVAELGGQIACEFTDQEAGRRDDRAGWAELVREAKEPDARRFDAVIVYATSRLSRDLFHALAYEREMKRAGVEIFYALTAGDQTSPEGRLIRHMFQALDQFEVEKLGREVRRGQTENIRQGYRNGGRAPYGYQLKREPHPDPARARAGDTKSKLVIDPEQAPVIAEIFDRFLCGYGYKQIADHLNRPGGPPSPRHVDPSRNLAGKWSKNTLRSMLQNPVYTGRLFWNRLDFRAVKQGEGGVVKRDPKDWVEANERHEAIVTDQQFEQVQVEMGKRSRNEGSRRRGKQKRFYLLRGFVHCATGHNPLRMHGRSRKGNTYYACCYRISYGDKAAEALGHGKWQYVREDTLLEAIDDFFATRIFGPERIACFRSQHQTLATELQTDDGSERRHLESEIADIDQRIERQLTAIENGVDPTVVGERIRKLKEERKHAEVALAETEPDLHDQDGVSLSFEQACETLESLPDLREALTQADPKVRRAVYEAFRLSVEIDRNAGQIRMKALVSSAFRNVRDLKDLTGLVANGSIAGAGFEPATFGL

SEQ ID NO: 3199 - protein, 524 aa, unidentified
  source 1..524: note = uncultivated organism
MTVKRSAIYTRKSTEEGLEQAFNSLDAQREACAAYILSQAHEGWEQVKDHYDDGGWSGGNMDRPALKQLLADVAAGKVDVIVVYKVDRLTRSLADFARIVDTLDRAGASFVSVTQAFNTTNSMGRLTLNVLLSFAQFEREVTSERIRDKVAASKKKGMWMGGPVPLGYKLGERKLLIDDQEAEVIRSIFRRYRELRSVAKLVDALARQDVRTKVRLYSNGRTVGGVHFGRGSLSQLLQNPIYSGRVNYRGTLHDGQHEAIISPEDWVGVQQILATNRHDRKLGKQARYPSLLTGMIIDPDGRPMTPVSTHKRSRRHCYYVTRLSPGEEKSIAWRVAAGEIDRAVLNSVGDWLRSHERACELGQLMSDRELADELPGFSVPEQRNVLLELGVRAQLEQTSLQVTLGDHAQASVILPLQMVHRGNELKLVLDNGASRRAPDPVLLKLVALAMTARKSLGSGHVDSLTSHYSKRHLWQLLRLSFLAPDIITAIVEGEQPPSLIGRRLLRVTNLPLDWAGQRRVLGFK

SEQ ID NO: 3200 - protein, 544 aa, unidentified
  source 1..544: note = uncultivated organism
MQATGITKIWKATLYLRLSREDGDKEESNSIAGQRSLLRDFLKKHPDIQEYAVQVDDGWSGSTFERPSFKKMMEDVKAGKTDCIVVKDLSRFGRNYLDAGEYIEKIFPFMGVRFIAVNDNFDSFQEKNASDDLIVPFKNLINEAYCRDISVKIRSQLEIKRKNGQFLGAFAAYGYFKDPQDKNRLVVDEYAADVVRQIFAWKVEGISPQDIADRLNGGGVLSPLEYKRSLGMKCSTPLQTNIKASWSAASVIRLLKNPIYIGTLTQGRATTPSYKVHKRVQKSENEWSVIENNHEPIIAKKDFDTVQNVLALDTRRSPGAETVSLFSGMVFCGDCGASMIKKPVSTGGKKYHYYVCSANKQDKSCSPHRIRTEVLEEIVLDLMRKHICTVVELDDLLAVADTAPLRTAEAVKVQRQLDAKKADYEKLQNLLMSLYENLTDGIIDKAEYVRLKQSFSLRADEAEKQMDALQERLTTIKTHTADTSWTENFKRYRNLTELDRTAVVTLVDRIMVYEDNTVEIVYRWQNEFAWQMDIVRQAQIKEAV

SEQ ID NO: 3201 - protein, 576 aa, unidentified
  source 1..576: note = uncultivated organism
MVIIDKIRAKRNIVRGVIYARFSSDNQRDESIDAQIRAIKEYAQKNDIVIVGEYIDKAKSAMTDNRPEFLRMIAESNENMFDIVLVHKLDRFARNRQDSIGYRMQLKRHNVSLISILEYIDESPESIILESVLEAMAEYYSKNLAREVNKGMKENALKGLHTGGLPPLGYDVDPISRKLIINEKEATAVRLIYDLFVKGYGYDKIINELNLMGYKTKTGKAFGHNSLHNIVRNEKYIGTYIFNRSTPKDVDGKRNHHKDKDDEDIIRIEDAVPAIISKEIFEQVQKKIVDRKKTRPCNKAKEVYLLSGKIFCGECGFAMAGNKKLSGRNKAVHITYRCMGRKNKHICINKEMRREYIEAYVLEKLSEYIFDEKLISKLAKEYMAYQLATNADVVAKKDNIKNRLNEITKEINNLITVIAKTGSDMMADRISELENEKHYLEASYEQICFESSTQDITVETLTERFNAAKTMLKSGELSTTKKLIELYVNKIYIYKDRIEIIFNFHPDLVPPDTFDNRKDDTDRTFITDEMPSNPHSDTILDKNKVSTLVGGYCGGGDGSRTRVRKCGNRTFSECSR

SEQ ID NO: 3202 - protein, 533 aa, unidentified
  source 1..533: note = uncultivated organism
MARKADRQTLRAAVYTRKSSDEGLEQSFNSLDAQREACAAYVMSQTHEGWEAVAERYDDGGWSGGNMDRPALRQLLDDVKAGKIDIIVVYKVDRLTRSLADFAKIVEILDGHGASFVSVTQAFNTTNSMGRLTLNVLLSFAQFEREVTAERIRDKVAASKAKGMWMGGPIPIGYALEDRKLVPDPQEAATVRLIFERYIELRSIGALVGELYDLGIVTKQRTYRDGRAVGGIPFSKGPLAALLQNPIYIGKVRHRNQIYDGQHDPIIDPELFAMVQAILDANRQDRKLGSNARSPSLLTSMLFDPDGRLMSPSHANKGSRRYRYYQTRLGPGETDQVWRLPAGEIERLVVACVVDHLRKPSPDENAQASAKELADLLADRKSLAEQLHRLPTAEQRRALLALQVRIDLQEATVVISIGPDKITLASKLVKRGNDIRLVIAEHRTASPDPILCKLVAQGFAARDYLMTGTLHPCIREYSQRYLKGLARISWLAPDMISAILDGTQPAQLTGRRLIRANAIPLDWPSQRKMFGFA

SEQ ID NO: 3203 - protein, 530 aa, unidentified
  source 1..530: note = uncultivated organism
MSQAILNTLVRVAIYARLSDEDKHKTSYTDYSESIKNQIALATQYAQERSWIIAGVYCDDDWSGLDRDRPEFNRLLKDCENGKIDIVLCKDMSRFTRDKIVTEEYLETKFLEWKVRFIGLTDGSDTADKANKKSREINALVNQWYAEDISNKVRAAFKTKRGQGAFIGSYPAYGYVKSETVKGKLEIDPDAAQIVKKIFSLYRTGFGTRSITRILNEEGVPNPTAYKESKHPRYKNAFKNDDRGLWNKTSVKRILRNEVYIGNMVQHKNEKFHFKTKKRRNLPKEAWEVVEGTHEPVVTRDAFFKVQELLDSKVRCTGEGTPHLFAGIVVCKDCGSIMVKSSNGHYRYLTCSRYRTGRDLCSRHSIRLDMLIVKVEQRVRALLADLLKDKEKFLKQLAENDGFTSGINVITANLGKINSRLRGVTEALKTLYVDKSLGKIDTLIFSELKREFIGEKHQLTRQLEKLQGELKAANVQTNRLIYWSTVLDKYAKFAELTREMVNELIHFVEIGERGDGRQEVVIHYNFKSGD

SEQ ID NO: 3204 - protein, 534 aa, unidentified
  source 1..534: note = uncultivated organism
MKAGPTHKVRCAIYTRVSTDQGLDQDFNSLDAQYEASSAYIKSQAHAGWTLIRSRYDDGGYSGGSTDRPNLQRLLNDVRSHKIDVIVVYKVDRLTRSLADFAKLVELFDASGVSFVSVTQQFNTTTSMGRLTLNVLLSFAQFEREVTSERIRDKIAASKRKGLWVGGPLPLGYELKDGKILVLDEEAERVRLIFRRYLEVSGINELVRDLKARNICTKAKTFSTGRTRGGIPFGRGTLSYLLRNHFFIGEVKYKGEILPGEQPPIMERNLFEAVQQKLSAHQSHTNTTRLKTDHLLKDLLFDDAGHRMIATHATKAGVRYRYYVSQPSLHGEARTARLGAVSRVPAPEIEQAIVSALQEQRSKQNTPRDQNGPTQFDHQMLTALLSRVEVNKNRLTVTLKPTDESTEHEVLSIAWQKPPFRRFRDVLLPHGTNRESIRPDRAERRARLVAAIARGRRWLDEIVVGTIVNAEEVAKRERCTVRQVNLTLSLAFLAPQLVKAAVEGRLPRGINIERLRDPEPSWAAQLQDLGLITT

SEQ ID NO: 3205 - protein, 525 aa, unidentified
  source 1..525: note = uncultivated organism
MAGSNHSALGLTGRREVRCAIYTRKSTEEGLDQEYNTLDAQRDSAEAFIRSQRHEGWVALPDRYDDGGYTGVNMDRPALKKLLDDVRAGLVDCVMVYKVDRLTRALLDFSRIVEVLDKHGVSFVSVTQQFNTTSSLGRLTLNILLSFAQFEREMISERTRDKMSAARRKGRWIGGHIPLGYDLAEKGGALVVNADEAARVREIFRLYMEHGSLIPTIRDLNNRGWRLKEWGTRRGKLTGGKEFTKNRLYNLLTSMVYIGKVEFGGQIYDGEHEGIVDPAVWHRVQEQLRFNGRTGGREVRNRYGAVLKGILRCGSCDVGMAHTYTQKAENKLYRYYVCINAHQRGYDRCQTRSVSAPQIERAVIDQIRGIAANPSVVADVLRQLDEQTSSQQEALEREKRVMERELSRLTGEIPNLLRTGGQHLTDRMAELQERIGGLEGQLRVVQQQLAERANQSADPAAVVQALREFDGLWEQMTPREQEKFVKALVEQVSYDGRTGKVTVGFRTGGIQQMCIDVRDGKWTRN

SEQ ID NO: 3206 - protein, 536 aa, unidentified
  source 1..536: note = uncultivated organism
MSGSNGTNGKNGNGKAPAGPVRCAIYTRKSTTEGLDSDFNTLDAQRESAEHYIRAQAHQNWTILPARYDDGGFTGANIERPALERLMDDIERGAIDLVIVYKVDRLSRSLLDFARLMERFDKKGVGFVSVTQNFDTSSSMGRLVLNILLSFAQFERELISERTRDKIQAARRRGKWTGGQVSLGYRIEPEQRGLLIIPEEAEVVRTIFDLYLQTHSIGFITERLNELGLSTKRHVSKKGKARGGQKWNKSAVYQILRNPLYIGKIRGTEDQLHPGQHEPLVSLESFEKVAESMSLRTTGRLRTNRKTEYLLTGLLRCGPCDAALTSARGTSRNGKQYRYYRCVHQQKNGGHCPSGLLPAADIEDAVVAQVKEVATRGEVRQRILDRFFSDTSALTAAQTTRANLLGRIEDLNAESKRLLGAFSDVGGNGGKTLAKRLGEIETEIDHLRIQLGEIEDRLRALTGARRQVERVASLLDGFGTLWGALVPQEQRELLHLLIDRIVVDLDAGGFRIAFHEVRVAPAAVPSTDVQCEEAAS

SEQ ID NO: 3207 - protein, 563 aa, unidentified
  source 1..563: note = uncultivated organism
MSSRLRCAIYTRKSTDEGLDQAFNSLDAQREACEAYIASQAGEGWRLIKTRYDDGAYSGGTMDRPALQHLLADINAGKVDTIVVYKVDRLTRSLADFARIVELFDANDVSFVSITQQFNTTTSMGRLTLNMLLSFAQFEREVTGERIRDKIAASKRKGMWMGGVVPLGYDVVNRKLIVNDVEAETVRALFRLYLKHASVSLVKNEADRRGLRTKLRRPQNGARKGGEPFTPGHIYKLLANPVYIGKIVHKGQLHDGEHSAIIDHETWGAVQEQLSRNAVVRHRNTNAKSPSLLAGILFDEYGDRMVPSHANKAGRRYRYYVSKPVPESASDTGWRLPAPMIEEIVLTELRSFLHDRLRLTKAFHLTGASIQEMLSEARRLGDRFQKNGTANQRSFLLEVVKRVEVQQNRVSIIQRSQVLHAMLRHGRLDDVKAKTAMFKEEELRLEIPVKFKRRGVEMKLVITDDRKRPLAPDPHLIAAVAQGRHWFAQIKDGDVKSVRELAADQGVNQGDVSRILPLGLLAPDIVEAILYGRQPTELTASRLKRIGDLPISWAEQRCILGFV

SEQ ID NO: 3208 - protein, 539 aa, unidentified
  source 1..539: note = uncultivated organism
MRPERRRCALYTRKSSDEGLDQAFNSLDAQREACAAYVKSQAGEGWKVLPTLYDDGGYSGGTMERPALRRLLTDIEAGRIDIIIVYKIDRLTRSLADFARMVEIFDRHGVSFVSVTQAFNTTTSMGRLTLNVLLSFAQFEREVTGERIRDKIAASKAKGMWMGGVIPLGYDKPIGGDRTLVVNEAEAALVRRIFALYLDLGSVHALEHRLQTEGIVSKRHAGAAGKVTGGQPFSRGALFHLLRNRLYLGEIRHRDTHHPGLHPAILGRDLFDAVQQRLDGNARKRTTARETVARSALTGRIFDADCHAMSPTFAYGKSGRLYRYYVSAPLQQGGRRDAKDTAPRRVSGPALEDALATALRRLWPEEAEKDADPLARIRRIEVLREGIELVLPIALLRRLEARLASGEDAAIDPADPAQLRLKLPLRLSTHRGRTEVLAATPRVRKADPVLVAALRSAHQMLTRDTHGRPTLDAAPDTSHRRRLIRLALLAPDLQRAILAGEQPDRLTLARFLDSELPLSWAAQRRMFAAIATEHQHLRG

SEQ ID NO: 3209 - protein, 515 aa, unidentified
  source 1..515: note = uncultivated organism
MAASSIKTVRCAIYTRKSTEHGLELEFNSLDAQRDACEAYIKSQASQGWRALPQHYDDPAYSGGNLDRPALQQLLKDIDAGRIDVIVVYKIDRLTRSLADFAKLVEAFDAKSISFVAVTQQFNTTTSMGRLTLNVLLSFAQFERELSSERVRDKIAASRRKGKWTGGSVPLGYDARDKKLVINKDEAETVRYIFKRYLEAKSFAKLVNDLDNKGIVTKRRNTKVKKFNGGIPFTYGPLAHFLKNRLYVGETRHKDKWFVGEHASLVNKTTFDQVQQLLASNAAGRTATRSASGALLQGKIYDDRGNRMSPSYSTKNGIRYRFYVSSALLRGRIAEVGSLGRVSAVEIEDAVRSAAEAQAQWSSNPSYGVSDAIEMVERVVVARDDLTICLLPFGDHSDSDAAKQIKIPWTVKARHPAGSVDYGENVHARDEGLVQSIVRAHAWNQSLLTGTHASVEALAGANGLHPKVVRQVLRLAFLSPEVTSAILEGGALGLSLARIPKLLALQWADHRRLLG

SEQ ID NO: 3210 - protein, 559 aa, unidentified
  source 1..559: note = uncultivated organism
MSRRQVRCAIYTRKSTEEGLDQEYNTLDAQRDACEAYIRSQASEGWKALSTRYDDGGYSGRNTERPALQALFADIRDHRVDVIVVYKIDRLTRSLSDFAKLADLLDDHDVSFVSVTQQFNTTTSMGRLTLNMLLSFAQFEREVTGERIRDKIAASKKKGLWMGGTTSIGYQVQDGRLILVEEDAEIVRTIFRLYLQLGSVRWLKQALEDRGIITKTRTLSDGRTTGGQPYQRGHLYQLLSNPVYIGRIPHREESYPGSHTPIIDQATWEAVQKQLGDNRQGHRRKASAKAPSLLAGILEDDQGHRFTPSHATTRGRRYRYYVEQTKDNVASPRRLPALEIEAAVRREVQGFLISPQRLLDALGPDLSARQVECLNTRSKDLQSYFADTTRSQWMETVRPILKRVVLSPHELRIEIAPAALRTLLRLDDADESPHSDPIVVTAPMEMRSRGSHLKIVIRSGHATDEPKSDMALIKAVARAHDWFERLATGEVRNVLDIAKAEGLTRPYVSRLLRLAFLAPELIEAILDGRQPIDLMADRLIFGDTLPMEWDQQREMVRSA

SEQ ID NO: 3211 - protein, 547 aa, unidentified
  source 1..547: note = uncultivated organism
MTRHSPQRSRRSAQSDQTANARTLRCAIYTRVSTDQGLEQDFNSLDAQREACAAYIRSQAHEGWVLVPGCYDDGGYSGGSLDRPALQALLDAVARHQMDVVVVYKVDRLTRSLADFAKLVEAFDAHGVSFISITQSFNTTTSMGRLTLNMLLSFAQFEREVTGERIRDKIAASKKKGIWVGGVVPLGYRVIERKLVVDEEEAKTVRLIFDRYLELGSIQALLQDLHERGVVTRRRMLATGKTIGGIPFTKGPLAYLLKNRMYLGELNHGANSYPAEHPPLVAKELFDSVQAHLASKAAASGYRQSRSEALLTGKLFNDRGQRMTPSYAVKGGVRYRYYVSSATTEGRQSEAGAITRVPAADVERIVVDAIARLAEPNAARDGADALDPGREMVRQFVERITIRPGAIEIALTLDAAAIVGNSSVVASWSKTPTRVQREIIAPLQGQWEDPRAMSSDTRSRLLAAIGMARRWLDELTSGRAPDIDTLAAREDRSPRSTSMLLSLAFLAPDLVKAIVENRLPRGIGLTRMMDLPSEWDEQRRVLGMQQS

SEQ ID NO: 3212 - protein, 541 aa, unidentified
  source 1..541: note = uncultivated organism
MSGTRFFIYSRKSVYTDKGESIENQIEMCRQYIQSKFPEAGLSDITVYEDEGFSAKNTERPQFQQMLRDIQHKKPDFVVCYRLDRISRSVSDFSSLIEELNERRISFVCVKEEFDTSKPMGKAMMYIASVFAQLERETIAERVRDNMLLLARTGRWLGGTTPTGYTSEKQQEILLDGRRKTSCKLKGNPEELQTVNTMFEKFLELRSVTGVSKFLIKQGITARGGGWYSLPGIKEILQNPVYCIADKDAWAYFTSQNADVCFEEKDCSGQYGLLAYNKRDYTKKHAPRQPVDKWIIAIGRHKGCIPGRKWAAVQRLLADNIPTGKKPAKMHNGYSLLSGLIFCEGCGSRLFAKPRSGQGGLFDYVCGSKLKGGTGLCGCQNIGGRQADDLVYRSLFPYMEESPRIDALLREQKRALRGQAREDEQNSAEARIRRCSGEMDRLVEALSRGALDPALIPRINARVRELKEEIARLSKERRPLPAAGAASGREEAAAAKLAGSLADIKSCAAALSVPEKRALIRLLVQKIVWDGKELHLYMNGR

SEQ ID NO: 3213 - protein, 524 aa, unidentified
  source 1..524: note = uncultivated organism
MSPRPGNGKRPSQPTKAGVVRCAIYTRKSTEEGLDQEFNSLDAQREAAEAYIASQKHEGWTCLSDRYDDGGFSGGSMDRPALRRLLTDVEASHVDAVVVYKVDRLSRSLLDFSRIIGTLDEHGVSFVSVTQQFNTTTSMGRLTLNILLSFAQYERELVSERTSDKMSAARRKGKWIGGSPLLGYDLDPNGTRLLVNEAEAVQVRGIFDLYLETESLLETARELNRRGWTAKRWVTRAGPERGGKPFTKGTLFALLTNATYTGQVDFRGTVYPGEHTGVVDEAVWQRVQRLLRRNGRAGGQAVRNKHGALLSGLLRCGPCDAAMTHTYSQKGERRYRYYVCGHAQRDGWETCPTKSIPAQEIERFVVDRIRAIGTDPALTAEVLAKVRSDTQAHADALARERAGIERELSRWAAEIKDLVGSLPRPNGKQSAATARLVELQDLTAQAEARLVEIQPAESADEGSEDDLVAALRRFDPIWETLSPREQARIVHLLVERVAYDGAKGTVAVTFRPGGIRALTEEGSV

SEQ ID NO: 3214 - protein, 536 aa, unidentified
  source 1..536: note = uncultivated organism
MPKYKATAYIRLSYTDDHSSESDSVSNQRKLIENFVEHNPDIEVVSEKIDDGYSGIIFHRPGFQQMLSDIEAGHVNCVIVKDLSRLGRNTIDTGYYIEQYFRIRNIRFIAVNENFDTANPEDAHSGIIIPLRNMINEAYALDIGRKIRAQQRQAMKDGKFIGARTPYGYLKAKDDCHQLIIDPVAAVVVQRMFRWASEGAGLNTIAVRLNEAGILTPSHYKKMQGKITHENLLGSGKWQTRTVGVILRSEVYTGDLVQGQTKTVDHRQVKADAEEWTVVRDTHEGIISREQFAAVQEILNQTASRAKAREVKAFTPNLLKGKVFCAHCGGSLHRQRNIRKKSDDVYFYHCLSRSRISKDACPGVTIREDALLDTLADMLQEALNTALGEYRLSLAEQPRQAADRAELREKITNRRQEIQRLRGIVRSLYENLVQGVLTKDEYFDYKEKYENHIADLAVELEQLEDGLRTMDAKAEQHRTMEQDAAQIKTDRALTGTLIERLIDRIEVSHDKQITVRYRFQSEFETYAEVLEQCRNM

SEQ ID NO: 3215 - protein, 524 aa, unidentified
  source 1..524: note = uncultivated organism
MVSVAIYVRLSDEDRNKQSINDESESIQNQKSMLTEYCKERNWDVYDIYCDEDYSGADSNRPDFNRMLTDCEKGKINIVLCKSQSRFSRDMEVIERYLHDKFIEWEVRFIGVVDHTDTSDIANKKSRQINGLVNEWYLEDVSENIRKTLQHKRESGEFTGSFAPYGYAIDPENKNHLIIDEAVASVVRDVFEWYSQGWGYRKIVMQLNSMGIPSPTLYKEQNNSKFFNANDQGSHSKGLWTHPTIYRMLRNETYTGTLVQGKSHTVSYKNHRIKRVPESEWIKVRGTHEAIISPELWEKVRERLSSKQRASNITQELAVLSGKVKCAECGKAMKRDVYYNKKRTVRYYQLICATYKTGAMNCDNTSGISGLQLEKVIVEQINCFFMEYLDRDKIQIENDYEERIKQIISAIDSCNALIADKQCKVERMYEDKLGGVISLEEYNHFKEKFDAEIEESINKTETLEAELKALKDSKNSSKRIEKIIDRHSHIEKLDRITVDELIDEILIGCKSEGQPRPITIRWNI

SEQ ID NO: 3216 - protein, 510 aa, unidentified
  source 1..510: note = uncultivated organism
MKTETINEKKKFRCAIYTRKSIVEGLETDFNTLDAQREAGMNYIASQKNEGWVALEKHYDDGGFTGGNMERPALQELFDDIRNDKIDIVVVYKVDRLSRSIMDFAKIVELFEKHKVSFVSVTQHFNTKDSMGRLTLNILLSFAQFEREIISERIRDKIAASKKRGKWVGGIPLLGYDIIAGGRGITVNEVEAQLVRDIFSRYLECRSVSQTVAYLNENGIRNKKWTTYKGAQKGGKEFAKTSLWKILRNPTYISQIVYKGEKYKAEWEAIIDNETFDAVQKLLKENGCDNSAKVRNKYNAILSGKVYCANCNVPMTHSYTKKSGNKIYRYYICSKASKLGWDKCPYPSLPAAELENFVLEEIAKISEDVELREEVLKSFDDGNAKELAEISKHEGALRKAMYQLKLKSEGATNKNGDPNALTDLKRRELELSNALVDAQARRKIVVKRMEYSKKRLEELFGDFYGIWANLNFKEQYELIDLLIERVTFDGKLGEIFITFRNSEIEKSKGL

SEQ ID NO: 3217 - protein, 544 aa, unidentified
  source 1..544: note = uncultivated organism
MMEGGGRRNGNGNGSGKNGGLRSNGGGPVRCAIYTRKSTAAGLEQEFNSLDAQREACEAYIRSQVSNHWEIIDQQYDDGGFTGANTDRPAFQRLLADVDAGRIDVVVVYKVDRLSRSLLDFAQVMDRFNRARTAFVSVTQNFTTADSIGKLTLNLLMSFAEFEREMIAERTRDKISAARRRGKWTGGTVPLGYEVQNRKLVVNEVEAVLVREIFDLYLAHRSALTVAHILNDRKRTTKRHRAENGNLRGSRTWAKDGVLRALRNPVYAGLIANGDERHQGEHVSIIDPDLYQRVQALLDSRPMTPWNVPRNPAYFLRGILRCGACGCAMVPASNRRTQKVYRYYRCSTRDKLGAKACPTKPLPADAIEEFVVEGIRDAVTSSGLADRVAREMRDQIQVRRADLRKLAAGLPAEIDRLRTEASTLADKVASVEGAARDLLAPRLTEAADALASKQAFLAEVRSGLTLLAQTEIDAEWVAGALADFDKVWDIMTPENRIRLAHALVECVTVRGANHSVEVTLAQLRLPPLPSMDSPPARQHRGRHE

SEQ ID NO: 3218 - protein, 560 aa, unidentified
  source 1..560: note = uncultivated organism
MSDAGKVVRCAIYTRKSSEEGLDQAFNSLQAQREACEAFIRSQAGERWVLIPDRYDDGGYSGATLNRPAMERLLADVSARRLDAVLVYKVDRLTRSLADFARIIEALDRREVAFVSITQAFNTTSSMGRLTLNVLLSFAQFEREVTSERIRDKIAASKAKGMWMGGCVPLGYDVPVDQSRALVVNDDEAQTVRTIFRWFLQSGNLYALQNKLDAEGVGSKRWTSTRGRVMGGCKFSRGALRHLLGNRTYLGEIPHKGQVHPGRHSCVVDRPTFEAAQALLAANSGRRRTRISRASQMLLCGLLFDADGLSMEPCIGGPATKRYEYYASKPLPRSGLRGQLDDAIRRVPAHAIDRLVRTLVAQLLPSPDEVPSNLEVRGIIARVEIHPSTVQIVVCSRALPGRQSARSAIEVVRSHCRPGEHVLVDPNDSGLLRIVLPLRFVTYGGRKWLTSPSGRRVPAPKQPSPLLVRSLRRGHAIARACGIEPDSVAPARNARAPTSAHDRKLAVLAFLAPDLQRAILHGEITACDLEAIPISWTAQRRLLGWQPPVARLETEPSFSS

SEQ ID NO: 3219 - protein, 556 aa, unidentified
  source 1..556: note = uncultivated organism
MNDTNPTAGYGRVSTRIQAEKGAGLDIQEEAWLRRCAEEGWNLVGAYVDDGKSGKDESRPALDRLMADIEAGRIKRVIVYKLDRLERDLQHLLNRLAFFKVHGVELVVTDELHDTSTPAGEMLSQIVGAIAEHERKMIRSRFERAQDAAARDGKWPSGPPPYGYVTVPSPDGRGKVAVVDTAKATVMLRIVDEYLGGRSTKEIADGLQADAVPTPRKGRWDRNKVRVLLSKCHLLAGSWTFGRSGDPITIPMPPILDPATIDAVKAALQERSFVRGPAATYPLSMRVQAPCGSHTIGHANKNEVRQYICSERKKSGPDHCDCVFTPAAPLEEAAFTAVSSFLRDKDAIERLVQHRLDRLVAIVGKSGANLDDIARRITELEERLGSEASEMRSAGLGAAALAAALKPLSDELSAVTEMRESALKVQRRARQRTPTNKALRAWVADDYSDWDSATPEERREMFARLNVRVVITGWSGCGDCVGVGRVADPELMVLASGKQFRRHLGCATCGGSGGIPHIKVSGSVPAELLDHVGELVQIGLPSGSDLAFTIGDQAVA

SEQ ID NO: 3220 - protein, 523 aa, unidentified
  source 1..523: note = uncultivated organism
MSRNNDKLKSVRCVVYTRKSTDENLDLDFNSLDAQREAGEAYIKSQQHEGWVCLSERYDDAGFSGGTIERPAFQRLMNDVTEGKLDCIVVYKIDRLSRSLMDFARIMETLETNGVSVVSVTQQFNTTTSMGRLTLNILLSFAQFEREIISERTRDKIAAARRKGKWTGGPPVLGYDRVRDNRGSRIEVNKDEAERVRAIYRMYLEEGSMLPTVQSLKALGWKTKRYETAKGTWRGGAEFDKPALRKLLTNIVYLGKVTYKGEIHEGEHDAIIDEDLFARVQGLLRRNRNSGGKHSRNKHGALLKGLVRCKACGCAMSHHFATRRNKRYRYYVCIRAQKNGWSACPAPSLPAKQLEDFVVEQIKTLGRDPCVLDDALRATQAHLQEEVDALQDQRAEVGKAIKDLGRQVGAVAARAGFDEVATHQLGLLQAQIHDRQQDAAEINAQIAGLRQRMVNPDELAGAIEAFDPLWETLPPAQKARLVHLLIERVEYDGADETISLTFHPTGICTLTAEQREDDSCPTT

SEQ ID NO: 3221 - protein, 574 aa, unidentified
  source 1..574: note = uncultivated organism
MNKSSSPKTRKKLICAIYTRKSHEEGLDSDFNSLDAQREACEAFITSQRHEGWKLMPGRYDDGGYSGGTMERPGLQKILSDIGEEKIDIVVVYKVDRLTRSLNDFSKMVELFDNRQVSFVSVTQAFNTTTSMGRLTLNVLLSFAQFEREVTGERIRDKIAASKKKGMWMGGLSPLGYNSADKKILINPDEAETVRYIFNAYLRLGSVRKLKNDLDIRGIVSKKRISKSGKLLGGNPIARGALYKILNNPVYLGEIRHKENRYLGEHEAILDQALWEKVQALLKENEVIKKSGAKTKNTSLLAGLLWDERGERLSPSHAVKKEKRYRYYVSRSLFTKNRDDGGFRIPANDIEQIVIRKVWDFLGSRPQVFEAIEALSLKGTEQKRILGLATSLAKKWHGLSKTKVRSILLTIIPRIEIHPDRIDIHLSPARLVKVFEDGHENIPPAHEESEESSPLVLSVPANLKRRGIEMKMIVETENEKPRVPDPALVNLIVRAHAMKKMLVAGGGLSLCQIARREQMDRSYLTRLIRLTFLAPDITKAILEGSQPPDLTTSRLIKRKLLPVDWQEQRAEFGF

SEQ ID NO: 3222 - protein, 548 aa, unidentified
  source 1..548: note = uncultivated organism
MAMAEQIGSQAQPRRLRAVGYCRVSTKRQADHQISLEEQQRKVDATCILRDADLVETFIEPGLTARADRRPELKRMLEFACNSSNGIDLVIVYAFSRFFRNVTQYLQYKEQLKQAGVRLISATQDIPEGPHGELMETILAAFDGHQSEVNAGLVRDMMIANAEEGYWNGAAPPFGYKTKVALVLRRKEKKILEINEEEAALVNTIFRLYLQGHRGGSPMGIKAITTHLNTKGYRYRGKAFYTASVERVLKNEAYIGTHYYNRIDSRSRKERPPSEWVRMDVPVIVDKEKFDAVQRTLQARNPRTTAPRVVTGATLLTGIAVCEKCGRGMMLRTGKGGQYRYLTCAKSATEGTGCSHSVRMDEIDALVIEAVEEQVFSPQRLTAILQAMTDRGDETHQKLKTEIDRQRVAVAEAQTRLDRLYDAIEAGLVELHDTRFKTRVDLAKLQIREGTAMLDALRQRGTALRELSPDMVQRFSSGIRRRLRDADPAFRRTWLHMFVSKVTIGKDRVRICGPKDQLLKAVSADEDSVRTMVPTFAREWRALRDSNS

SEQ ID NO: 3223 - protein, 539 aa, unidentified
  source 1..539: note = uncultivated organism
MAKLCGLYVRVSTERQAELRDGSLDTQTDRLKQYVKFREVPGSDDSAKWKLVRVYREEGKSGKNTDRPALQELLSDVKDGRINTVLCTKIDRITRSLIDFYKLSDTFKRHNADFISLEEGFDTSTPMGQAMLKMTLVWAELEREQTSKRTKDKLLWRAQQGLWNGGHVLGYDLVDKKLVVNKQEAKFVNLIFNKYLEKGSVLKVVEFLNEHGYRTKEYVSKRKNSKKGGSSFYNQNVLHILSNPLYLGEIKQLEKVYNGQHPPIVTQELWHDVNRKIQLQAPKRTNPKRKVKHVFLLQGLLKCGWCGNYMSTKYCTGRNGLCYYYQCTRNANSGKSACKMKYAPAIQLENAVLSEIKKMSTDKQRVQKIVDEANKDTGSSLVGLKKDRKHQEIKLTGIKGKIKNILHNISSHSDLKINRSITEELRELEDQKDQIGKDIQNIDFEIGQIQQQTMNARIMYESLTKFSQIYEAADPAEMKELLPLFVERVTWTPSEIEIALFEHEAQKGQFPPTTNPSGAGAPEVKEWLPRLGSNQGHCG

SEQ ID NO: 3224 - protein, 534 aa, unidentified
  source 1..534: note = uncultivated organism
MRAALYIRVSTDKQAEKYGIPSQFEALRKKCLERGCNPVLDGDKDAFIDDGYSGAELDRPALNRLRQAVREGRVDVVLSYDPDRLSRKLYHQMILAEEFEKQGIKLEFVTQDMGNSPEDRMFFNMRGLVAEYEREKIRERTVRGSREKARQGKVVSGGATPFGFCYNKEKATLEENSEKAQTIRLIFYTFANESLSLQGLAKRLNRLHIPTPRGGDRWRASTLGVMLRNEAYIGKLHQFRKYHVEPRMRRQPSTRIKKTSLVLRPEEEWITVNVPSLVPVELFEAVQRKLDTNASLSRRNTKREYLLSGLLYCSQCSGRIGGHAIHGVPYYRCYRKDNPDKVPFNTDGRLQPCLCPEVKAEAIEPVVWDTICQLIKDPDFLIQELHKRNTDNSQTKEILERELQLCRTRLKAIPDEQRRLVEGYRKGLYADFMMREDMERIQKEQGELEKRKNELERQLAQRQLTQGQEVRIRSLTEKISTGLDNLDFAGKQELMRLLIEKVLYDGQGVEIQTIIPLGEQLHPIHRGGQRGWIV

SEQ ID NO: 3225 - protein, 510 aa, unidentified
  source 1..510: note = uncultivated organism
MMREEAIYARQSVDKKDSVSIETQIDQCKTFSDSNAPIIFKDKGFSGKNTERPALQKLIAEIIAGRISKVYVYKLDRISRNITDFYQLYEVMKKYNTEFVSVNEHFDTTSPMGRAMMGIIAVFAQMERETIQQRVKDNYYYRIQDGRWAGGPAPYGFKNARTELNVPTLEPIETEIEVVKNVYALYNGTAHMSLTAIGSWLYEEGYRTRKGGRFTSTTLARMLQNPVYVAADQELYNFFQTRKIQFLNEKEDWNGVTSACIVAKKNGNQFIRKYEDMKEQTIYLSNIKPVIPSHLYIDVQDRLLKNEQFKRANSPSALEELAGKLKCAKCGHAIKAYSQSTTSRPYLSCHGKTVLRLCDLSFKGVNFYDLQENVGTEIQKYLDSTHLKKQQKLEENFILANEKSDLESQLNNLISLAAVGGMTADVLQKAIEERQSKIYEIELQIQKNSVAADYLNLNLLTNAELNFYHGSNGEIEYSALLTEQKKEIIKILVDKILVQENGKFEIIWNM

SEQ ID NO: 3226 - protein, 562 aa, unidentified
  source 1..562: note = uncultivated organism
MGHRIATYARVSTADQADTGTSLADQERRLRAAVVARGARLVDHFVDAGISGALDSRAGLDRLRQAARDGQVDVLMATKIDRVSRSAVGLLALIEELRKCNCHLVLIDEGLDTSTAAGDLTSGLLGVIGGWERKRIAERTKGGRRAAAEIEGRFVGSTPPFGFRVAASPEGKGKRLAVDENQASTIRRMYVLLVVERWSVAVAAQILNHDGRLTPSGKRWTIESLGRWSLREDPLRVASGIWVFDGIEVRVPPILSPSEATSWRAWQDERRQPGRRRRGPYLLSGMVTMPCGRAAMGRTAGRQRPTYSCRQHYLPKGDPARHEQCLNVSCTSMDNAVIDHIQRALSQPDVLRQTARARLGLIGDDANTYSRLVIELRASEESLAAEAKLFRAQGYSGSALIAVLAPLHEKRLSLSKELALARRHLASQNSDQTDVSRVVQMLRDGLADASRETWRELLKALVVRVSVDAFEGCPACAGSGYLSFEPGLGRRRPQNCSLCLKGSVPVLTIEFDDVAASEIANCARERAAQVDERPLRLVAENRKVGGSTPPLATPRNRRSKRR

SEQ ID NO: 3227 - protein, 541 aa, unidentified
  source 1..541: note = uncultivated organism
MTMPSNVIRCAIYTRVSTDAGLDQEFNSLDAQYDAASAYIRSQAHAHWTLIRTRYDDGGFSGGSTDRPALQRLLADVKARKVQVIVVYKVDRLTRSLADFAKLVELFDAHGVSFVSVTQQFNTTTSMGRLTLNVLLSFAQFEREVTAERIRDKVAASKRKGLWVGGTVPLGYELKDGKLYIVEEEAEQVRTIFKRYLELTSVNRLVLELRERDSRTKIRKLSTGATRGGVHFTQGPLFYMLRNRFYIGEVLYKGEICPGPQPPLIERELFDAVQAQLTEQRSHYVTTRTKSDAPLRGILFDNAENPMVRTHATKQGVRYRYYVSRPYLRGIIRPPAGAIVRVPAADLEAVVAKAVEQHLAQPSTVPAKKGSAEQKPIFANISRVEVRKDQLAIWLRPSDEKIRDAGEDQRFVNAGNPALLIPWTKPPTKRFREILLPVLATRRQVRPIKFERRAALLKSIARGRAWLDAIVSGTKTVEEIAARHKCSVRHVNMTISMAFIAPGLIKAAVEGRLPRGIGVANLRDAPAEWSVQFERLGLAQT

SEQ ID NO: 3228 - protein, 646 aa, unidentified
  source 1..646: note = uncultivated organism
METRAALYLRVSTARQAEKELSIPDQRRQAEDYCKAKEWTVVQEFEERGASATDDKRYAFQEMIDVATRAERQFDVIVVHSYSRFFRDAFQLEFYLRRLKKHGIKVVSITQETGDDPMSQMVRQILALFDEYQSKENGKHTLRAMKENARQGFWNGSLPPYGYRTVEAERRGDKIKKRLEIDPAEAEIVRMIYRLHLEGEGQGPLGVKSMANHLNRRGLHYRSGRRFSTGLVHRILTRETYIGRMWFNQKDIKTGKLKPRDEWIEIRAPTILDEALFTKVRASLQSRSPKKIAPRIVTSSVLLTGLAVCATCNGGMQLRTGKSGRYRYYTCSTCARHGKTACKGRSVPMSFLDNLVLDHLAQRLFTPARMQELLAHHAANARNGVAEWSRKSKEAESNLREIDTRLNRLYAIVEQGITSLDDTLGNRLAELRQQREEVLRLKGIAERQRSYPAPVMPVERISAFCEAMQTRLLTAEPGTRKAYLRLFVERIEVDDTEVRIFGGKDTLQRSLSGAESEVPSFVPKWRPQRDSNPRYRRERASKPYVTAYRRLKNPLSFLTFDCSKLTLSNSVYPRLLDKRWTGAAFPPWQERFAMPTSRRARRAIGSRFRVSRISVQSMLGCILAIAKAMPAASGLCAGTSAHKIIG

SEQ ID NO: 3229 - protein, 503 aa, unidentified
  source 1..503: note = uncultivated organism
MRIATYTRISTDEEHQPYSLSAQSDRLGKYIDSQEDWQLVREFSDQMSGASLERPGLKRALGEARAGRYDLLLVYRVDRLSRSVRGLAQILEELDSATAGFRSATEPFDTTTPAGRMMVQMLGVFAEFERATIIDRVIAGMERKASRGGWCGGQRPFGYDIDREHDCLAVNEHEAPVVPVIFRMYAEERLGARAIGNRLNERGRRTRHGRPWSHASVLTVLRNRAYLGEIFFRGAHYPATHPPLVDAAIFEAAQVLLEERGEDRSLRRSNSSDYLLSGLVFCARCGKHYVGAAAHGRSARYSYYVCHSRQRYGVSSCSSDRLPAEELDEAVLAALCETYERTDLVSEALQRAAEALNAGRPNLIQELGGVESDIAKGEAALDRYLNAFEAGKLSESQLGPRVEKLSKQLAELRWRKEEIQDRLEETVVGHPDPVQLDALRLQLRHVLTHGQTPTRKAVMRALTHRVTIEDRRQVYPTFRLSVDAVRIVDGVAAPTGFEPVSPP

SEQ ID NO: 3230 - protein, 513 aa, unidentified
  source 1..513: note = uncultivated organism
MKQQLPIKQTRCAIYTRKSTEEGLQQAFNTLDAQRESAEAYIASQRTEGWVCLPDRYDDGGFTGGNLERPAVQRLMTDIKAGRVDCVVVYKVDRLSRSLGDFARLMEVFDQYKVSFVSVTQHFNTTHSMGRLTLNILLSFAQFEREIISERTRDKIAAARRKGKFAGGRPVLGYDVLSNPTGPRLIVNDIEAQQVRRIFATYLEHQALIPAVTAITQLGWTTKAWIGRDGTPRGGQPFNKSTLHQLLTNVVYTGKVRYKEEVHEGEHDAIVDSELFQRVQAVLGRNGKTGGALVRNRYGALLKGILRCSPCDCSMGHTYSSKGMKRYRYYVCLHAQKRGWDTCQSKSVPAAEIEGFVVDQIRAFGTDPTVVAETVRQARAQVEQQLAHLKAEDRRLEKVLRQDHATVRRLIIQPGRGGEVAQVQDRLREAEQRSSAIRSEFEVLTGTLIEEHEVTAALAQFGPTWAALAPREQGRLISLLVERVDYDATKGTVSLTFRPGGIKELAQPLKEVA

SEQ ID NO: 3231 - protein, 543 aa, unidentified
  source 1..543: note = uncultivated organism
MSKKVYRTAIYARLSKDDGDKEESNSIVSQRLLCEEHIKKHDDLELVETFADDGYSGVNFDRPGFRKLEKAIKDGRIEAVVCKDLSRFTRNYIDGGRYLEKIFPQYGIRFIAVNDSYDTLTGNPQSDSFVIPFKNLINDTYCKDISVKIRTNLEVKRRKGEYVGSYAPYGYMKDAENRNKLVVDEYAAGVVRQIFSLYKEGIGICHIADKLNEMGIASPMEYKIASGIHYETAFKGNGPAKWSYNAVRRILSNEIYIGTLTQGKRGTPNYKVHTVKQKDENDWIRVEDAIDPIISYDDFMSVKLMLGRDMRSVADGAEENLFSGFLFCADCRQPMVRKAVPSKNGKYYYYVCSTNKRKAGCSTHCISANEVKEVVFNAIRFHIAHVLDLEETLEYMEKMSPEGVAAFNYDAQIALTEEDIEKYKKMKFRLYQDLSEKVISKEEYMEFRDRYDLMIGDKQRALDRLIHEKKEAGLNGDAERAWVTLFRLHSKIETLDRRVLMTFVDKILVGEDKQLEVVFRYDDEFKRAEEAVKELKAEMPQAV

SEQ ID NO: 3232 - protein, 602 aa, unidentified
  source 1..602: note = uncultivated organism
MQRNEEQIAIYSRKSKFTGKGESVGNQVELCKEYVRNMFGEEYVDRCVVFEDEGFSGGNLKRPAFQKMMADVRGRKFKAIVVYRLDRISRNISDFTGLIDELTKLDVSFVSIREQFDTSTPMGRAMMFIISVFSQLERETIAERIRDNMHELAKTGRWLGGNAPLGFRSEAVSKVTVDGKARKSFKLVTVPEEAEIPKMIFDLYTETDSLTAVEAELLRRRIKTKLGKDFTRFAIKAILQNPVYMVADADAYNYFTEREADVCFPKDAHDGSCGIMAYNRTDQEKGRTTMLLPVSQWIIAIGQHPGLVPSKQWIKVQESLDRNKSKAYRKPRNNEALLTGLIYCACGDRMYPKLSQRKTADGEAIYTYVCKMKERSKRERCNRRNANGNILDAAIIEQIKSLTENDSSFANQLEKSRQFYTGRREVYGTQLEDLRKEYAEHEKTINGLIDSLGMASDSVVKPRLIKRIEELTEANREIENRIRELEGLTSAHALSDMEFDMLRQMLSMFRTGIDWMSVEEKRAAIRTLVRKVVWDGVNAHVVLFGANEDEIEFPDMKDRIGCLNGEAGEEDGLEDFGDVNYGEFEDEDAAADSKSPWGEDSK

SEQ ID NO: 3233 - protein, 652 aa, unidentified
  source 1..652: note = uncultivated organism
MNGKQTKCYTYIRVSTEMQVDGYSLEAQKNAIQKYADFQHMQIAGEYCDAGKSGKSITGRPEFMRMLDDVSGQKDGISYILVFKLSRFGRNAADVLNSLQYIQDYGVNLISVQDGIDSSRDSGKLTITVLSAVAEIERENILVQTMEGRRQKAREGKWNGGQAPFGYDLNPKTGVLTINEKDAEAVRTIFDRYVMHHEGFDYIASYMNRHGYSKEKKKDRELSIFTVAHIKDIISNPVYIGKIKYGENTFEKVKGSRDRFRRVKNADYPVYDGLHEPIISQETWDEAQRIRQGKMRINVKKTNHVHILSGIVKCPLCGRGLAGNVRKRRNKNGTVAEDYFYRCNHGKRDAEGHRCTYSPSWEESAFDAFIEQAVLDTVRRSDFGEYCLSRISNQVNVSSLEEERSRLQDRLRQATGARNRLLSMMEKLDPSDRHYDRKVQDMQDRLDGLYDKISEAEDDIHDLTAKIGGMESERLSVKEMYEILRQYDKLYAKMSPEEKKTFYNNLIRSIELDPDERDVKKAVKEIRLRFPIAVDGEEIQGIRWAEGETVETVCLLSKLSETKSHISVKVEMYEMDLTAAESKATYQEIQDWVQEKYGFHVTHLNIAQVKRKYGIIERENYNKPKSEDSRQPGCPAEKIRAIEEALMFFRMI

SEQ ID NO: 3234 - protein, 575 aa, unidentified
  source 1..575: note = uncultivated organism
MARKRRTYTELATKAESKPVEEQRTYEWPTAVYARLSIENSGKDDKGESIEGQVEICRDYVDEHPYLHFTDTYVDNGWTGTNTERPEFQRLLGDIHAGKIKALVIKDFSRFSRDYIEAGNLLENVFPAMGVRFISVADRYDSFETDGSTSSLLIPIKNLINSYYSKDISKKVSTALQARQLAASYIPSMIPYGYMKSTTRAYRFEPDPETAGNVTRIFQMRVDGVPLNRIASTLQNEGIPSPGKLRYQRGQTTDKRYATSKWSAQLIKQILKNPTYLGHLAFGRMPTALYLGKPDYHYEPDESKWRVLENMHEPLVSQEIFDRAKAMAAAGQAEHKERLARTAAYREKNLPLFNGILFCGDCGAKMVYHRNLFFAERLTGSYDCPHWKYETCNAPHTIQQDVVKDAVWQTVQDQLAYCCDYEAVLNKLKGGGTTLKMDEYRSKMQSLTIQLHSRRDKRERLYEDFTDGIITAEEYMVMKKRYDDEYQLISGELAEIQGRLARLKKSLSGQNKWLVHIRQFSDAQEFSPEMVEALVEKILVYQDKDGKKRLEIRFKYGADRELLTNACKEIGGEAK

SEQ ID NO: 3235 - protein, 564 aa, unidentified
  source 1..564: note = uncultivated organism
MKAAIYLRVSTEEQRERQSIATQRDFAERFCALHEIPVADYYADDGISGTVPLEQRPEGTRLLDDARAKKVGAVLVYKLDRLGREPRLILNAVKELEDLGAQVKSMTEPFDTSTPAGRFLLTILSGVAGLERENIIQRSVEGTNRLAREGVWLGGLVPFGYRVEGERRDRRLVISEQPLPGTALSEADVIRLIYRLAGDEGKSCIVIAEQLNALGIPPAYVRDALGTTRGKRRKATAGIWRSGRVRNLLISPTYRGLHQYGKRSLKQRDLIDRPVPPIVDTAQWDRAQKTLRHNWLFSRRSAKRQYLLRGLMKCAHCGLTYIGTAYPTRRGDQRIYYVCNGKHQGRAIFGGKAAKCPSKAISGDIEDVVWRDVEGFLRDPGPVLRLLRDRMKDVGRESAKAQADGAALKTALQGKDAERNSVLALYRRGRIDAATLDQQLDEIERERGQLEGLIRQSEAREAQSESAEARIRSVEDLLGQLSQRLTASPTWEVKRQLVEALVDGIRVDTVTVDGKKDASVSVSYCFSTPFASTATCTPASAAGSGIPNAAAAARRLISHNITRG

SEQ ID NO: 3236 - protein, 539 aa, unidentified
  source 1..539: note = uncultivated organism
MSDKKIRCAIYTRKSTEEGLEQEFNSLQAQREACEAYIKSQKHENWQLLPTEYDDGGYSGGNMERPALKRLLSDIKSGLVDIIVVYKIDRLTRSLMDFSKIVEILDKHNASFVSITQHFNTTTSMGRLTLNMLLSFAQFEREVTGERIRDKISASKKKGMWMGGKPPLGYYRKDKKIYPDEEKSALVRSIFEKYTELKSTTLLKDWLNKQGYAISVGNLNCILRNKAYIGMVGHKGIWYQGEHQGIIPTELFEQVQAVMVANRINRQHYDPKKSLLSGKLYDDKGNAMSPSWSTGCSGKTYRYYVSQAIIRKEPSKLGKIGKVSLPQLENFIDSWFERFLREKQKIHPYIQHFEVAKQKKLLKQLSAYTMTRDIEKALIKRVQLNPNKVEITLHTEQVLELFNTIYENREMRQLKPEELKTENTYTEPYHIGIIANGEKIIVGQFVEPKKRPNSELIKLLNQAYTWHQDVISGTSTQDIAKRDKVCVQYVRRILNLSFLSPKIVRSILNGTQPADCTLKKLLSIKSPNWQEQEGKIIKY

SEQ ID NO: 3237 - protein, 531 aa, unidentified
  source 1..531: note = uncultivated organism
MREEKIYRAGVYLRLSREDGGFAWSNSIQSQRELAVSFVHGRSDIRIVDFYVDDGYSGISFKRPGFCRLLEDVQAGLVDCIIVKDLSRFGRDYIEAGRLIQKTFPALNVRFIAITDHFDSLTAGYNEFSLVVPVKNFVNDSYCRDISGKVRSHQRVKREKGEFIGAFAVYGYCRDPQKKNRLVADDYAAFVVRDIFRWRLEGMSSTAIAKELNEYGILSPMEYKKIRGENYSTGFALREMGKWSAMAVRRILTNEIYLGTMVQGKTEKINYKLTACQKKPKEEWIRVAGTHEPLIAERDFRAVQELLLHGARAIKGQKKAHPFSGVLFCGDCGRPMVRRMGRRGKEETIYFMCSAKNAGRGCTRHRIAETELEAKVTQALKAKAGEELEALKGKAMGELEALKGKAEGALEADCERHRLLRREIERLCDAARECLNRKGGLYEDWKRGVISQEDLAAFSDFYEKRYQGIREAAERQGRILKELMEKGEKDAPAGRRLLQREALSLAVERISVYEGGEVFVRFREEGSHYGG

SEQ ID NO: 3238 - protein, 581 aa, unidentified
  source 1..581: note = uncultivated organism
MEAVQTRQMRTIPSLSQLDRKRAAEAKERWERNRSAAMIPPAEAPQPVPAKPTLTAIPPKSVAAASVPTKLRVAAYCRVSTGSVEQETSIENQRAHFEKMINANPDWEIADVYWEAAVSGTKKDSRHELQRLLADCEAGKVNLVLTKSISRFARNKADCLEMIRKLKALGVNVRFEKENIDTGSMESELMLTLFSTFAEEESHSISRNTTWTKRKQFQEGTFKYSIAPYGYRLVGGTFEVDPEEAPIVREIFDRVLAGVGTPTIAKELNARGIPTGTKRNDGSPGVWGSYMITGMIQNVVYIGDVLMQKTFRDEHFHLYNNYGERPQYYSEGHHEGIIDKETFELANAALRQRGKEKGNVPMENKQLRNNPHNNRYAFSGRLKCGCCGGTMQRITQKLRDGKQYHWGCMTHIEDKDKCWMKREYEDTIQNAFMTMLNKLVYGQDVIIDTYLTALRNEHSLKNREKIKELEDRLEQISSEKRRLSILIAKGCEPVSFRVKTLELDAEANNIRAELMQLQGDPAQVKAALALRDHLTVWKKRLTDDFPAQLFSRIVDHAVVRTSVEIEFHLKCGLVLTENYGK

SEQ ID NO: 3239 - protein, 542 aa, unidentified
  source 1..542: note = uncultivated organism
MSEITKTWNATLYLRLSREDGDKEESNSITGQRELLRDYLKAHPELREYAVRIDDGWSGSSFERPDFKKMMEDVKAGKTNCIIVKDLSRFGRNYLDAGEYIEKVFPFLGVRFIAINDNYDSLGDKKASDDLIIPFKNLINEAYCRDISVKIRSQLEIKRKSGQFIGAFAVFGYTKDPAQKNKLIVDDFAADIVRDIFKWKLEGVSPQDIANALNKLGVLSPLEYKKSIGVNLATPFQTGAKSVWSAVNVLRVLKNPVYTGVLTQGKSTTPSYKVHKRITKQENEWAIIENSHEAIISRNDFDTVQKALALDTRRGPEETAVALFSGMVFCGECGASMVRKTVPAGGKKYVYYICSAHKQDKSCSPHRIRDTELENIVLTAMQRYIREVIDLDALLSMTDTAPLRTAEAQKVQRQLDRKRAELERLNKLLMSLYENLAENIITREEYARLKQNYSVRAEDAERQMNALHDSLTNIRERGGAEKSWIDEFKRHENLTALDRSAVISLIDKIMIHKDKCVDIVYRWQDEFAWQLDILSRAAKEAV

SEQ ID NO: 3240 - protein, 519 aa, unidentified
  source 1..519: note = uncultivated organism
MTIADQLRKPLRCAIYTRKSTEDGLEQEFNSLDAQRQSAEAYIRSQQSSGWVALPDRYDDGGYSGASLERPALQQLLAAIDAGKIDCIVVYKVDRLSRSLLDFARVMSLFDQRGVSFVSVTQEFNTTTSLGRLTLNILLSFAQFEREIIGERTRDKLSAARRKGKWIGGIPLLGYDVDPRGGRLLINPEEAQRVREVFSIAERLGTLARTLIAVNERGLLTKSWVSRGGRVRIGKPFSKSGLSALLANVLYKGCIRHKGTVYPGEQEPMVDVALWEKVNRKLELRRTSQSGRPHHKQNVLLENLVRCGECGSPLVAVFTRKRGQRHTYYVCPQARQHKGCRQRPVALQDLEISLRQHLEPRLGPQPSAFMIRAALERVLYASHTRMVTVVLSNDTRFEFALPPPNRRGVRQPEPCRSGRVPRISKLMSLAIKIERLVQARQAADYAAMAQAGHISRPRMTQIMNLTNLAPEIQETLLFLPETHVGPDAITERQLRPIVKVVDWAWQKKLFNDLLAQTSA

SEQ ID NO: 3241 - protein, 529 aa, unidentified
  source 1..529: note = uncultivated organism
MTRRSKPAPASGPVTRCAIYTRKSSDEGLQQEFNSLEAQREAAEAYIASQQHEGWACLPERYDDGGYTGANMERPALQRLLTDIERGRIDCVAVYKVDRISRSLLDFARMMETFEKHQVSFLSVTQHFNTATPMGRLILHILLSFAQFEREIIGERIRDKIAASRQRGKWTGGTPILGYDVDRSNGGPKLVVNAAEAARVRQIFDMYLEHGTLLAVVAELDRRGWRSKAWSTRSGKHRGGLPIDKCGLHNLLTNVLYVGKVRHKQEVYAGAHEAIVPEDLFRRVQARLQQNRNAGNVELRNRHGALLRGLLYCKACSRAMTHTFASRGNKRYRYYTCTNSIKNGRCKCPTGSLPASEIEKAVVDQIRIIGEDPDLLAETLHEARAQTEAAIELLTTERRAVERSLARCHADIRQIATSEPATSATSGRIADLHDKIGQFEQRLTEIENQIAVHQGDLITDGEVAAALRDFDGVWAALSPREQTRLINLLVSRVEFDAPETAIEISFHPSGIKALASGKNAANAAVEDAA

SEQ ID NO: 3242 - protein, 514 aa, unidentified
  source 1..514: note = uncultivated organism
MTVNPQVRVAIYCRISQDRDLDAESPERQEALCRALIASKGWTVAEVFTDRDASAYSRKAKRPGFDAMWAGVEAGRFDAVCVWKLDRLARRFVQTGPILSRLEKHRAQLVSVVDNIDTSTPMGQAIVGVLIAQAETESLNTSTRVRAARDAEAAQGKSHGGRRCFGYTTTRDFDPVEYPIAREAVERILNGASLRATARWLNETGALTASGKTWQAITLKQWLRAPAIAGIRVHKGSETPGNWEAIISPAEREALLLRLGTTRPSGDPVTVKNLLAGFVLCGNCGARMYVQHSGGTERKTTGRGRYRYCCCKDRPAGACGGVSVSRSSLEAVVVERLISFLATVERRPIEGDRNIAGLRQALRDDEAALIDISRERFVKRTLDGAVYQKLSAEISERIEATRQTLAAWEQTASVDIPTESREAIETWWETASLDARRAALSQSVKAVLVNPTQVRGKKFDPQRVGVLFRDEAFYSGRSEKNLTMDEFGNVYAGLEVLTEAEYLAATNEKALAER

SEQ ID NO: 3243 - protein, 525 aa, unidentified
  source 1..525: note = uncultivated organism
MVGIYPRQSLFKKDSLSIEQQVNACIKLCETNDWEYKVYDKDKGYSGKNLNRPSFEELMNDVRAGEIDKILCYKFDRISRDIRDFSALLVELQSLNCDFISISENFDTSTPIGRAMVYICMVFAQMERENISQRIHDNYYYRTELGFWGGGPAPYGYRLKRIEYKGKKHTVLEPDPLESPVVKKIYEWYLTPSGSATTTLNKLRDAKFLTRKGKNWTSRVLMDVLSKPLYAPNDMNMYNYLRELEANITNPVDEFDGKASLDLYGKKDANDSKHKRCREIKNMYCNISSHKALVDSDTWIRVQEKRTALLRVPARSGTGKNSWFTGLMKCAVCGRSVSYTNSRGTMGYYICSSRKNSGWDSCTMKPASKKLTDPSLLQSIIVHYTKPEVIKKLNQATLKVDSRKPESDKQLNDLMIQQSKIQQSIDNLLSSLEHGNDVLIKYVNDKIVELDKQMRQIDNAIREYHTHHSSNKELKHQLRSIAEIINDIPDKLENGTFDEIRDLCHLLIKQIIFQEDGKINIEFTI

SEQ ID NO: 3244 - protein, 538 aa, unidentified
  source 1..538: note = uncultivated organism
MSDKKIRCAIYTRKSTEEGLEQEFNSLQAQREACEAYIKSQKHEQWQLLPTEYDDGGYSGGNMERPALKRLLLDIKSGLVDIIVVYKIDRLTRSLMDFSKIVEVLDKHNASFVSITQHFNTTTSMGRLTLNMLLSFAQFEREVTGERIRDKISASKKKGMWMGGKPPLGYYRKDKKIYPDEEKVILINNIFKKYIELKSTTFLKDWLKEQGHNISVGNLNCILRNKAYIGLVGHKGTWYQGEHQGIIPTELFERVQNIMADNRINRQHYDPSKSLLSGKLYDDKDNVMSPSWSTGSGGKKYRYYVSQAIIRKEPSKLGKIGKVSLPQLENFIDSWFNQLLREKPKTHPYIQHFEVSKQKKLLKLLFSYTITRDIEKALIKHIKLRPNAVEITLYTEQVLELFNAIYENREMRLLKPEELKQESNYTEPYHIGTIANGEKIIVGQFAAPKKRPNAELIKILNQAYTWHQDIINGASTQDIAKRDNVCVQYVRRILNLSFLSPKIVRTILNGTQPADCTLKKMLSIKTSNWQEQEQSFYK

SEQ ID NO: 3245 - protein, 566 aa, unidentified
  source 1..566: note = uncultivated organism
MKQNNNITLSNYAIYSRKSKFTGKGESIENQIELCKNQLISKYNIDEKNIIVYQDEGFTGYNTNRPQFQEMMKDIRRKKIKCVIVYKLDRISRNVADFCNLKNEFLKYNVDFISITENFDTSTPIGSAMLMISSVFAQLERDTIAERIRDNMYELAKTGRWLGGNTPLGYKSQKIENLSIDGKKRSLYRLEIIPEEAEIIKLLWNKMYELKSLSKLETYLLQKGIKTRNGNNFTRFSLITIFKNPVYVIADEKIKSFFEKMNIVIYESKEIKCDGSHALIAYNKREESSGKTKSYKNISEWIIAVGKHQGIIISEQFIQVWNLIENNKDKRYRIPQKNTSILSGIIKCKYCESYMRPRLRNSLATSGERNFTYLCELKDKSRKQLCDCKNIDGIKTDKIIIDKISELKVPVSMIVQKLQSFVDKNRNNIDKNIVELRTLNTSLTRNNIKIHMLIDKMLIIDNELISDITAEIKKLKIKNIEIEKRIHELIKEKKQDINQSKITKFALDIIHKYIDSFNTFNIVDKRVMIKSIIKSVEADGKNIYINYIGSSNTAMCPRGDGSRSST

SEQ ID NO: 3246 - protein, 541 aa, unidentified
  source 1..541: note = uncultivated organism
MRIFIYSRKSIYTGKGESVENQIEMCKEYIMTKLPHADQAVITVYEDEGFSAKNTDRPQFQQMLRDIKANKPEYVVCYRLDRVSRNVSDFSSLIENLNNHNISFICIKEEFDTSKPMGKAMMYIASVFAQLERETIAERVRDNMIMLARTGRWLGGTTPTGFTSEKTQEIVIDGKVKTSCKLKDDPVELKTVDCIFDKFLELRSVSGVSKYLIKQGIVSRTGKIFSLSGIKEILQNPVYCIADEDAWNYFTELQADVCFDKSDCSGKYALLAYNKRDYRKKNAPRQGIDKWIVSIGKHKGRIPGKKWVEIQNTLKDNIPTGKKPAVMHNDYSLLSGLIFCGKCQSRMFAKQRSGKSRNRDLYDYICNNKLRGGLALCDCQNINGQQADDLVCEYLMQYTNENSGIYKLLEKLKRDLQGQVQKNPIADIDERIKKCNSEIENLINTLSHGNLGTAFIERINTRITELDNELSSLKGEQACLQKDNNVISDSEIQVNMLSTALSSFKDNFDILSMEEKRTLIKLMVKKIVWDGKDLHIFVDGE

SEQ ID NO: 3247 - protein, 545 aa, unidentified
  source 1..545: note = uncultivated organism
MDTLTDNDISAFAGKVRPGYQQLLELMRAGSIDVVVAWHTDRLHRNPLELEEYISASECSGVSTVTARAGELDLSTAAGRMVARMLGAAARHESEQKSERVSRRRRQDAEAGRAHGPLGYGYDDNQVIIAHEAQVIRDVAERLLGGDSLYGIAVDLNARGVPTPGAGRWSHGQVAKIVESDRFRDPTGAIRTVSELSPVVVGLVKAAVADVALDDASVAQLLEDAAVPPWRGKRWTSEAVACVPAVCPAVALVRMLRSSDPPANGQLAAALNAAGVESPRTLWRAANLRSMIRRGTLCGWRDFGPSGRGGGDMVAQGDWTPILTRETSLEMRRLLDAPSRKRTGRERRYLLSSILVCGRCGAPMGGYTDRRDGKARYACSSQPGLDRCGRSTVVAVPVEDAVVEAVLAALSDVKTRRRQRAKGDEAEVAHTESELERIRGEREEYAKDAAAGRITRAEWMILREGLTDRQRNVERELGSHLDKRGTALAEVPVTRAELHEWWNGAPLKRQRDVIKALVERVVVRPSTHGGNRFDRQRLEEPVWRF

SEQ ID NO: 3248 - protein, 557 aa, unidentified
  source 1..557: note = uncultivated organism
MKEPGTPVRCAIYTRKSSEEGLDQSFNSLHAQREACEAYVLSQKHEGWQVLPAHYDDGGFSGGNMERPGLKKLLLNIDAGEIDTVIVYKVDRLTRSLSDFARIVESFDKKGVSFVSVTQQFNTTSSMGRLTLNVLLSFAQFEREVTGERIRDKVAASKKKGMWMGGTVPLGYDIANRQLIINPVEAAIIRHIFNRYLALRSVATLKEELEKSRIRSKRRTTSTGRMWGGKVLSRGTIYHLLSSPVYIGKTAHKGALYPGKHERIIDAETWKRTQDLLKENAVIRRNRKNMPSGRMLHGKLATEDGVLYTPAHAAKGGRRYCYYILLRKGAVHSKTAIRRLPAIEIETRVMACIAVLLADSVRLAKHYPKLVVRDTKLLTSAARHKATMMAEGSTKEKSEFLHKVLTRVSVLQSELHIELDRAALGRELLNENDASDKKGSILLQEPFQLVRRGNEVRLILESREAQPEECTPSLVRVVVQAKTWYEWIVNGEICRMRELAKRAGLNRHYTSRIFPLVNLSPQLTEAVLKGDHPPTLTVAQLTADVEMDWSSQRLVIL

SEQ ID NO: 3249 - protein, 569 aa, unidentified
  source 1..569: note = uncultivated organism
MARTSKRYLETQAETENVSLPAEKYSVGIYSRLSVDNDDKKSESIENQIEIIRQYIADVNRDPSRKQKFEVYDTYVDRGISGTSFERAGFDRLMDDVRNGNINCIIVKDLSRFGRDYLETGNYIEKILPFLKVRFIAITDGFDSMSDNVSEKKLAMNVKNLINDMYAKDISKRVMGARKLAAQQGAYIGSTAPYGYNTEKVNGIRKLVIHPENARIVRYLFESYATGIPYKEMVSYLYKEKVHRISDYNKYGHTFWEDGEVLHQWNPSVIRGVLVNPVYAGKLVQGKRKSRLQEGQKGISYTGQNEWITVENSHEPIIAPELFEKVNSVLTGIGGKEQTESRDVKRAVRDDENIFRNILYCGSCGGKMHARYYQSRINGKRSYVYNCRRLYYIDGRKCSKNEISEEQLEKYVLEQVREILDSQKISSKDLTTMNRQEWEKRKTVYLEEQDSIIRERQKLSNKAGVIYMQYKEGSISEQEYIAFRENRAEYERFCEKRLEELKRKIRRSEIRSEEQDKFLRSLKKVKRCTKLNVQMIEALIEKITVSPEGIIDILFRFGGGDGDGGDCDA

SEQ ID NO: 3250 - protein, 513 aa, unidentified
  source 1..513: note = uncultivated organism
MKPDIKNCAIYTRKSTEEGLDQDFNTLDAQRESCEAYILSQKAEGWKAVKAQYDDGGYSGGNIDRPGLQRLMQDIKAGKVQTVVVYKIDRLTRSLTDFSKLVEVFDEYGVTFVSITQSFNTTTSMGRLTLNVLLSFAQFEREVTGERIRDKIAASKKKGMWMGGFPPLGYQRIERTIVSDPIECKTVALIFNQYLKLKSVRALADFLLKESIKTPQRVSKKGRLYGGKEYSRGHLYKILNNPVYIGMVRHKEKTYEGQHEAIIDEAVFARAQELLNKQAVVRTSKAVDSEQLLKGLLYDADGTIYSPTYTSKGKKRYSYYISQNLLQYRDHPKGILARIPAHEIEKTIISGLKSWLSDESYLAELFPSVDRQTLEWISNQPLDILHDDVRTILNMVVLAQNQITLKINVFKLQQYLIKTLDVEIAAPPLKEMNIDIPYKTKHANNGAVIVQASNNDKDMLDTPNDQLARIVKGIVWRDEHFAGETLRDIAKRNNYGENYINKCIQDSFSFLSV

SEQ ID NO: 3251 - protein, 519 aa, unidentified
  source 1..519: note = uncultivated organism
MNPNVTVIQPKTTEDKNCKIRVAAYCRVSSDSADQLNSYMAQMRYYESFLSGSDTKILVNVYADEGITGTSMDKREDFQRMLKDCRRGKIDRIISKSVSRFARNTKECLTVIRELKSLGITVMFEKENIDTANISDEMMITIMGGLAQEESISISNNIKWSYHNQMKAGTIKLHSAPYGYTLYNGQLIINQAEAKIIREIFDMFLSGCGYMAICHELNSRNIPKDDKKTKWLPAAIRYILTNEKYIGDSLWQKSYNTAMPFRKVRNHGEQEMFYLPATHEPIILKDKYELVQKLISIKRKSNKNKIQDYPLSRKIICGDCGSVFRRKTHNAKTYWTCRKHTESAELCSIKQIPEVRLYEAFIIMYNKLKSQYDIIFTPLLSQLQELKTKKFSSNQQYMEISKNIAQLKEQIHVLTRLKTKEFLDDEKYFSQTAELNSKIEKQNQELRKIARSDDEDEIIDQVKELASIIENSSDFMTEFDEVMFASLVEKIIVKNQTTLEFHLYGGLKLTEKSVKDIVI

SEQ ID NO: 3252 - protein, 568 aa, unidentified
  source 1..568: note = uncultivated organism
MSKQQLRCAIYTRKSSEEGLDQEFNSLDAQREACAAFVASQIGLGWKLVADRYDDGGISGGTMERPALQRLLQDIRDRKIDVVVVYKIDRLTRSLMDFSRIVEIFDDSSVSFVSVTQQFNTTTSMGRLTLNVLLSFAQFEREVTAERIRDKIAASKKKGMWMGGTVPLGYTVLQRKLVIRQPEAGFVRGLFERYVQLRSVPALVAEVNRQAIGQAASAVGAVPFTRRMHAGMVYKMLANPLYTGKLRHLGNIYDGEHQPIVDNELFDKVQELMALGAVRAKGSSVHPDTHLLSGMIFDETGDRLRPTHATNRGKRYRYYISSRLLPKDRRGEGGWRVPASELENVVRSFAKSLLSDQIKLSEWIAAGSSPDMVHSGLSAASQIADRLASCQTNVQAKAILQMLFKRITLSATEIRFDIDRAALIRMLIAGSVQTELVEASAPDPSTVGIETIVVPIAFKRRGIEARLILDLENAPARQPAAPLVSLIAKAQLYLAKLTERAGITLVEIADHFDVHPAEISRLLPLAFLSPQLTNDILTGLQPVELSARTLARLDLSMDWSAQAAQLRS

SEQ ID NO: 3253 - protein, 509 aa, unidentified
  source 1..509: note = uncultivated organism
MENKKTMRCAIYTRKSHEDGLEQEFNSLDAQREAGENYIASQKGNGWRALPDRYDDGGFSGGNMERPALKRLLNDVEAGKIDIILVYKLDRLSRSLLDFMKLAEMLEQHNVSFVSVTQDINTSTSAGRMMLNILMTFAQYEREVIAERIRDKIAGAKRRGKHCGGCPVLGYDVNSEMKKLVVNKREAELVRKIYTRYCQVGSARQVAQEMNEQGHRNKTWKTSKGKLHEGTLFKPDIIYRILKNPLYVGRVPHYDKVYPGEQPAIVDEKTWNEAQKLLSENLVAGTGKKARAVSPFRGLLECGYCHGSFGLTYTQNHGRSYSYYLCEKDAKRAVGECPVRRIPSHDLEMLIMKALGEVFKTPTLLSKVYFAVKWINHEAIARLQAEQAELLASQEQLRGKLMTAAKLGAEESVALIRQLRTEINEVNQSLAVVNQELKKLNITHEDVMAAFSSIEQLWEELFPAERYHLLRLLIEKVIITSDGLRIQFKGGGIEQVAGELINFEQKKGA

SEQ ID NO: 3254 - protein, 541 aa, unidentified
  source 1..541: note = uncultivated organism
MIGRIHCAIYTRKSSEEGLDQAFNSLDAQREACEAFIRSQKHEGWIPISAKYDDGGFSGGNMGRPALKRLMADISEGKVNTVVVYKVDRLTRSLADFAKIIEQFDAKGISFVSVTQQFNTTTSMGRLTLNVLLSFAQFEREVTGERIRDKIAASKAKGMWMGGRVPLGYDLRDRNLYINAEDANTVREIFNQYLRLGTVPALVTHLRTADIRSKIRKNTDGTKVGGGCYSRGALYQLLRNHLYVGEIKHKGAIHSARHEGIIDRKTWERTQALLDQNRLGKRDRSRTASGSSLTGLLFSETGVRYIPTSTQKGGRRYYYYTSQAVIKGESKAGLIGRLPAPAIERAVLARLKQFLGSRSDVLDALRELDLNAASVQKVLKEAAQWTLSEANDLIRSVVKRVVVSSEALEFQINLGALAKEAASQTWSVSAPFRHVPQGKILKLVIGDEAPSRNGGNEAALKAIARARGWYQQIVRGEVGSIPELARLNRVTPRYVKTILPCAFLAPSIVESLVNGNSRHLTLSELRNDVHARWDRQKLIVD

SEQ ID NO: 3255 - protein, 527 aa, unidentified
  source 1..527: note = uncultivated organism
MKTQTARQRAQAAPQATKSVRCAIYTRKSTEEGLDQAFNSLDAQREAAKAYIASQKHEGWTCLPDRYDDGGYSGGSMDRPALRRLLTDVEAGRVDAVVVYKVDRLSRSLLDFSRIIGSLDEQGVTFVSVTQQFNTTTSMGRLTLNILLSFAQFERETIAERTRDKMSAARRKGKWIGGSPLLGYDLDPNGGRLLVNEAEAVQVRGIFDLYLETESLLETARELNRRGWTAKRWVTRAGPERGGKPFTKGTLFALLTNATYTGEVDFRGTVYPGEHAGIVDAAVWERVQRLLRRNGRAGGQAARNKHGALLSGLLRCGPCDSGMTHTYSQKGERRYRYYVCGHARQHGWETCPTKSIPAGEIERFVVDRIRAIGTDPELQAAVVAQVRGKVREQAERLATERRQIERELRGYADETIRLVGQLPLPNGRQTAATTRQVELQDLTADAEARLAEIARQEAMVAADAGTNDELVAALGRFDPIWDTLSPREQARIVHLLVERVAYDGAKGTIAVTFRPGGIRALTEEEGA

SEQ ID NO: 3256 - protein, 529 aa, unidentified
  source 1..529: note = uncultivated organism
MRLVGYVRVSRVGGREGDSFISPDVQRDAVEAYARAHGHELVAWQEDLDEPGSRLRRPGFDAALAAVERGEAEGIIAAKLDRLTRSIADLGRLLERSREEGWTLIAVDVGLDPKTPQGKLVANVLGSVAEWELDRKREDWSTAQARAVARGVHIASRTPTGYRRREDGRLEPDSLSAAVIRELFRRRAAGAGWKELCDFMDGAQVAGPYANASWAPRTLQHIVANRVYLGEARSGKHVNEQAHEPIVPRGEWEAAQGVRVGRSPRNGDGLLLAGLVRCAGCRYVVKADHMRDRDGSRLGLYRCRARHPGGRCPTPTSSLARVLDPWVEERFLDALGPDGPLAQAIADTEDAQAAEAELETAEAELAAYRDDTLISVIGRAAYHAGLEKRAAVVDAARATLTEARRRSQLAELLPATPGSLVNAWGGLRVAERRTILRAAIDAVILRPVRGGGSHVPIAERALILWRGQAPTDLPRRGIRVPLAPFAWPEERPADLGVTSGEDAEPRTLDRRPRRRGKRAHVSSRSSGAA

SEQ ID NO: 3257 - protein, 531 aa, unidentified
  source 1..531: note = uncultivated organism
MISTENTKQRSLSGLAPSDEAVARVAIYTRKSVTAGLDQEFNSLDAQREAVEAYVASQRGHGWEALPDRFDDNGYSGSNVERPAFQELMRQIETGCIDVVCVYRMDRLSRSLLDFARLMEFFNKHSVAFVSVTESFDTSSPMGRMVLGMLATFAQFERESIAQRTSDKMQASRRRGMWTGGRPPFGFDVVEKKLVVNTEEAKQVLEIFKLYLEWRSLLSVVNELRHRGITTKQWTNKKGALAGGSAFTKSSLRGLLTNPLYVGKVRCGDEVFDGAHEAIVDQETWDAVQELRESNGKRARRTGANGRNKWSALLQGIARCACGSALTFHHSKKGSRIYGYYSCSRYQKEGAASCPGSRVSAGKLEAFVVDQLREIGRDPRLLAATLKADKESRKKCKPELATAAKRATKAMNKLVKVRDNILDAIAQENGDNVSLAQHLEDLDAQLGEATQVEANAKAELRALDLGDVDADELREVLADLEPVWGELLPAEKARAIALLLERVTFDANAGEVEITFRPGGSQQLLGSGGGA

SEQ ID NO: 3258 - protein, 531 aa, unidentified
  source 1..531: note = uncultivated organism
MGTEEKQEKKTITCAIYTRKSTSDGLEQDFTTLDAQRESCESFITSQKNEGWVTLPDKYDDGGYTGANTDRPALQRLIADINAGKITCVVGYKVDRLSRSLLDFASLLSLFEKHNVAFVSITQNFNSSTSMGRLTLNILLSFAQFEREIISERTRDKMAAAKKKGKWIGGRPPLGYDIDREKHKLYINPKEADIVREIFDLYLQKRSVMAVSSILNEKKYPTKAFSTPEGRKFGGKQFKGTSVGIVLHNIIYTGKVTYKGEPFKGEQEPIITEETFYKAQKLLAEQRPEWSMAKRNKHIGLLHGILRCKRCNCVMYYAYSLKANKYKYHYYLCMNAQKRGYKGCTVKMLSAQKIEDKVIELLRTIVSVPKLNETVWATLTILEKIDVIEPVLKTASYDGVNQTLELILCGNDKPHEFKVALGELKNLPVPPNQVDIKKEPQLRQNLILAHQIGRIISDKKAKSLKEVANWLNISHVRICQITGMLLLAPEIQEEILLSDSSALFEIPEYKVNEIAQEPIWQKQKETWQQLI

SEQ ID NO: 3259 - protein, 543 aa, unidentified
  source 1..543: note = uncultivated organism
MITGMVSAEKTVTVIPTKPEYSGKNRIDLRPKRVAAYCRVSTDREEQEHSFEAQKQKYTDMIMMKPNWQMAGIYADEGITGTTAKKRPGFMKMIEDCRKGKIDVIITKSVSRFSRNNLDCIMYVRELKEKGIPVIFEKEGLNTLSVSSELLLALFGGLSQAESESISMNVKMGIRQGLKKGNVSFCYKSFLGYRKGEDGKPEIVPEEAEIIRRIFNEYLLGRTLSAIAQGLTDDGILTATGKEKWTGGGVMAILKNEKYKGDALLQKTFVADCISKKVKKNDGELPMYYVENNHPPIIERSIFDKVQCEIARRNSKQKVREKSTKTELGKYSGKYALSELVYCGECGKPYRRVTWNIRGKRKIVWRCVSRLDYGKKYCKHSPSIEEQALQNAVAEAITQKAQSESPVAENLISHIEQYRRLHNTETAENKRQRLKELQERLDKLMETDVTETDDEDFNEKFENLINEIHRLEDELEEIRKKKSDTVYSQNPYEEITLAVQGLKNRPVEYKDEVIRQLVQYIKILSKNQLQITFKDGTTMTAEI

SEQ ID NO: 3260 - protein, 598 aa, unidentified
  source 1..598: note = uncultivated organism
MNTQIKTTYPTIVKTKRAAIYTRVSTEDQASEDRTSLALQEEKLRQFCASQDFSLEDSHVYIEKGVSGSLDVDDRPEMHRMFEAARNKEIDIIIVYKLDRFFRNQRKALNALHELVELEVDFKSVVESEIDTSNATGRLMLQIMNAFTEHERETIRDRMMDGKLKAAANGKWVTGVPPYGYRVDKKTKTLTLHKEEAEVIKQFYEWLVYEKCSLREITRRAIEQNLPTPAHKSVNGKKIKDEVRNGKWYKRTIGRFLVNEVYTGKFYYNKYKRPFKYLDAIDNEEHQRPKSEHIELQVPEIVSREMFEKAIEQLKENRSMQKRNEKRTYLFSGLLHSGYTGRKLQSGYQKPKKDLKTPELGKYYHVYIPLLDRNNSESQQNDIHGQCAETRLLPIWDTLVSILKDPENTIPQLEEYTFKNSNEARTVKKIADLNKQIGTVKEQRQRIARAYTDMGIEQDEYESEMKEKRARQKELEVQRQKLSQTLLKKKEQKNRNEVIAKLFEKFQTKLDTVAYEQRQYILRLFVERITLFHKQNYAEVVFKFPTKTSVPTVVPAEISGDGQMRLVLHVKIKSEHQRRQEILKNNPAMYRPKRGRIA

SEQ ID NO: 3261 - protein, 625 aa, unidentified
  source 1..625: note = uncultivated organism
MDSGIRRAAIYSRKSKFTGKGESIGNQIELCRRYLSAGFSESCAKAAVVYEDEGFSGGDTNRPAFRRMMESARAGELDAVIVYRLDRISRNISDFTALVQELEHLNVAFISVREQFDTATPMGRAMMYISSVFSQLERETIAERIRDNMRELSRTGRWLGGALPTGYTSERDIIGGKQRSRLKQDTKEIECVLQIFSVFLKTESLSATQREIMRRGFRTKNKKCFSRFSIKAILQNPVYMRAEGAARDYFVRNGAEVCSTISDFDGKRGIMAYNRTKQKKGSAAKHNPICMWIIAVGEHEGAVRAEDWIKVQEILKKSAKIAEESPKKANPILTGLIYCSCGSRMYAKRHGQSDRYSYVCRRKESSKKRECAVRNANGNELDEEAAKKACGLEYVRVRIKKVIWNGEKAEIILHSEDSKCYPLADAFMVSNQYPQSKREPKWRILSQVSENIYILCSTSDGYVRYAPMYIHSFRLIAPRKLLEAQLFNQQYQNYEDIPNVQDRLRWCRHHMGLMQKEVAELIGITRGHYIDFEVGYVDHYPKEIVDKLAELYQVPVDDLLDDYNRFLYKGQGKLIQEYRESLGLKKKPFARLMGIEPNLLRAWEADQKRMNINSWNKYFKDKIKV

SEQ ID NO: 3262 - protein, 529 aa, unidentified
  source 1..529: note = uncultivated organism
MTINKCAIYVRKATEHGLDMEFNSLQNQEEACKAYIAAQSFNGWRYQKTYIDAALSGGTMARPASQQMLDDMAHGLINTVVVYKVDRLSRSILDFHNMMKYFEKHDVNFVSITQSFDTSNSMGKLTLNMLLSFAQFEREVASERVRDKIRASKAKGIWVGGNPRLGYDIVDKKLIVNQTEAETVKQLFEKYLELQSLIRLKHFTDANNIHNKQWTTKTGKFRGGRPFQAQTLLNMLRDKIYIGITECKAAGTSVPGEHAPIIPNELFESVQRALDKNGNNKGDHVHSAPNLLTGKLFNDNGDKFINQQTRMPNKTTKYYYATRGCYIQSGALDEIVMNVISEFMNANLNCIQTDFVNAIKHVDFTNMTFPRKRDFIRLILKYAIYTDNKLTLFITPNPDIREFITPDFINEKSAPMDYVVSATDIIIRHEFILKKYTKQNEYNAGKSAAVSISENNHLIVRAFARAFRYREMYEKCGDYKSIAAAEKVSESSVYRHLHIAYLNPETVNAVMSGTMQCSVDQLFNLPSGL

SEQ ID NO: 3263 - protein, 582 aa, unidentified
  source 1..582: note = uncultivated organism
MPSTNGRGHGEAPERVGLCLRVSSEDQRDRETIEIQRDFLNEYCRLYGLEIADIYEDDGVSGTIPLHERPEGCRLLQDAREGKFSTVLVKKLDRLGRSLLVIVDAHDRLQAASVALRSTTEPIDTSTPSGRLIFQMLASFAEYDRENIRERTQDGLHRAFKKGKHLGCIPFGYDIDQDGKFVVVEGEARIVREIIANMAGGATLYGEAKRLNDEGEPAPGRKYRGKPRQRGVSWCHATIRSLLDQGAYSGIHVVNAHKGPIERSVPAIVEPELQRKALARLDENKRYSGGRPARQYLLRGLVWCTCCGTAYTGGVSKPSGRDKRYYKYRCRKRGTTGYDKRARMLNCPSVKAEWIEDLAWQDVRSFLKNPGEVLLRVREQLAEDEQGYDLEERHASLTRRLAAKQGEKARYVKLYAQGHVDEEELEIYMADLRNQVDNLKLLISSVESDLAQKQEHTMLAATTEAWMMALAKNLTDVEADTAEAFEKRRELVRLLVERITVGRNEEGRPKVEITYRFGPPAASSEDSVAGVRRSEEFRKAHGRSGGGDLLSGHPKMASYEVAVERDASAGSSGPGQARSASS

SEQ ID NO: 3264 - protein, 556 aa, unidentified
  source 1..556: note = uncultivated organism
MRAGLYARVSTERQAERGTIGSQLALLREQIAAAGDELVGEYVDDGHSGARLDRPGLDALRDAAEAGLIERVWCLSPDRLARAYAYQVLVLDELARFGVTVAFTDSPGLSADDPQATLLTQVQGVIAEYEKAKIAERYRRGKLFRARAGEVVTWKAPYGYRRIPRSTATGQAHHEIYEPEATVVRRIFSDRAAGISVREICRRLNADAIPSPTGKPTWGTSTICRLLRNEAYIGRVYYNRTESVPDRRPTHHNRQVPRDREEWIPIDCPRIVSDDLFQAAGRVAIDNAKWSPRRAEPGQWLLKGLIKCGVCGVGTSCHKMRGRNGTWHRYYRCRNYDPIRAGGEAHRCPERNIRADALDDFVFDQIRTAITRPDLLLAGEQAVKLTTPTPDDQLLAAELARLDRKMDAAEAERRRLIDLYQGGFIELPEMQRRATEVAARRKQLQHKRSSLADERAMLARDNQLRSRVHDFAARIHAVIDTLDDTQKQQLLRLLIEDVRVTGWHVQIRLRIALDPSPPHLPHPSGPTGPRGKPSPPRAVSTQDHLRSVGDHDGGVV

SEQ ID NO: 3265 - protein, 540 aa, unidentified
  source 1..540: note = uncultivated organism
MKVAIYSRKSKFTGKGDSVENQITLCKEYISSHFENAEILIYEDEGFSGGTTDRPQFKLLMNDAKHKKFNVLVCYRLDRISRNVADFSTLIDDLAKCDIAFVSIREQFDTSTPMGRAMMYIASVFAQLERETIAERIRDNMLQLAKTGRWLGGNTPTGFSSEEVITTDATGKDRKMFKLIVNEDIELVKLIYAKFLEYNSLTKVAEYLLLKGIKTPNGAEYSRFAIRNILNNPVYCTADEKAYIYFTNNGYDVYASENDFTGTFGMMAYNKTIQSKNTSNKLRDVSEWILSVGLHDGIINSSDWIKIQTMINNNKSKSFRKVKSINAALSGLLRCQCGAYMRPKNGRTSKAGEQIFYYICETKEKSKGKLCNTKNLKGNDVDKAVVDYIKTPHDTAFKKQLSNDMLYATSSKENISKQIADIECKIADNASSIENLVSSLQTATGTSASKYIIEQINSLDEQNATLKAQLLDLKTKEESATSDALTYDFYDNQFNYVSSMIQGLEPTQQRELLKTIIEKVVWDGENLDIILFGATSTKKH

SEQ ID NO: 3266 - protein, 566 aa, unidentified
  source 1..566: note = uncultivated organism
MSAPIRAAYYGRVSTADQIDGTSLDTQRDRCLAAIEAKDWELAGEFVDEGVSGAKGNRPELDRLMAACQAGEVNAVVVAKLDRFGRSVRHLSRLIGDLDDQGVTFVSVAESFDSSNPAGRLMRNMLGSFAEFERDQIRDRTMAGLIAVTKQGFWPGGPAPYGFRLDKDSGGSGHTRLALHETEAEMFRVAVTEILAGRTVWATANLLNSLGYKPRSAKEWTYHNLRRVLVDAQLSGKWSYGRPYGWGRSRSEGEFPVGIPAIVTPEQHAALRKILFGKAIPRSERLGFFLVSRGVLVSPCGRNMRGKARKDRGTYRYMCPNTEWNASGTRCECNTVPGDWIDELVWSEVKRLMSDPEHLVALADDYLDRRVEMAATPENAADIDAKIVELERARTATATDYLKRGVDPALLIDAVAELDSELTAWRYRADQALAWSEETVATKGRLQQLTEMAQRASLRLDSLTPKEQRVVIEALELKVYVLGWDPCTLCGGTGKLKGGRGGTPCTACRMVKEVPRLRMDGIWSSALDSAQGTHVGHNLDAPHTGALVRFDNANWSGFAGATRPEG

SEQ ID NO: 3267 - protein, 513 aa, unidentified
  source 1..513: note = uncultivated organism
MERPGLKRLLVDIEARKVDTVVVYKVDRLTRSLADFAKMVEAFDARGVSFVSVTQQFNTTSSMGRLTLNVLLSFAQFEREVTGERIRDKIAASKQKGMWMGGMVPLGYDLNDRHLILNEQEAEHVREIFRLYLEFGCVKKLKAHLDQRGVKSKMRVSCSGRSSGGTAYSRGALYKILQNRIYLGEIPHKGQSYPGEHVAIVDRELWERVRTLMAENVRSRRHGTNAKAPSLLRGLLYDEDGNRFTPSHAVKRGKRYRYYVSQRVIKDAASASAQPGRIPARELEKVVLKELKSFFSSADQVVSALAHADDDIGTTQTLIESATQYAKRLDGNSPSGISEMLEAIVHCILVHQESVEIQIDKAKLRAQLLGTNRTDPQTQDTMNDPNQQPIALTIETRLKRCGGEMRLIIPVQSADRAPGSAVPALLKAISRAHEWVRQIVAGEYKDQRAIAKATGFNERYVSRIIQSAFLAPEIVEAIVKGRQAPEITLVALLDEVPLSWAEQNAKMAAFVTQ

SEQ ID NO: 3268 - protein, 517 aa, unidentified
  source 1..517: note = uncultivated organism
MNITQIMPTIQVTAKKIRLAPYCRVSSDSADQLHSFAAQIRYYSDFTNKHSEYELVDIYADEGITGTDMSKRDDFLRLLRDCKKGLIDRIITKSVSRFARNTEELLETLRMLKSIGVSVYFEEQGIDTNKMNMEMIITFPGMAAQQESETISGNLRWSIRKRMESGEYNCTYPAFGFNQKNGVMTINETEAIVVRRIFDLYLQGYGLQKIAALLNAEGIPRREGQSRWYNCTVKYILKNERYMGDAVLQKKYRTDTLPYKQKNNHGERQQYYVENSNPPIISKETFLKAQEMLRSKKAPTERTQSVLKGKIQCPECGWNFRRQKINGKNYWICSGRSSGETDCKNRRVREDMIYEAFISMMYKLKGERKYLLEALIHQFEQMQNRASKSNERIRQIDKEIADLGARNLVISKLHTNGVLNAVAYSAQSADINNKIAILRAERKKKLAEDEDDELLDTLKTLNEIIEEYQLANEFDEELFEQIVERITVNDNTSITFHLIGGVDLTEEINEKGRCKSA

SEQ ID NO: 3269 - protein, 509 aa, unidentified
  source 1..509: note = uncultivated organism
MDGLGIDRQREDCLGIIQRNNWVLFDEYVDQSISATDRRVKRPAYQRMLKDYEAGYIDGIVAWDLDRLTRQPRELEDIIDMAQNRGLVVTTANGEADLRTDGGRLYARLKAGVALSEMERKSARQSRAHKQRAKLGVAPKGPRPLGYHTDGSVVENEAAVVRGLYLAVLKGTSLRTLTQVLDGTRDDVRVRDTDDSGRPVALHALPVMSVIRAIEINERRAEEGLPPKPVPEPKSGWLPSTLHGILRNPRYVGYSVYTDRTEKGRRDLGKRGPHNRTYWRERIVRDDKGQPVMGQWEPIVDESLWWMVQEKLNDPGRRTNRTGSTRRTHMGTSLYRCGECGDTVRSHGNRYRCINACLVRARGQIDDYVDEVVRSRLSEPDYVREFIAATAPADTENTDVREAITAERGRVARAEADYDDGIIEGRDLKRIRDKAEERIATLEKQMLSAASAVTVSPILLARSPEEAWVNADIDAKRQVIDALMTVTLHRGVHGNRAFNPDTVEITWRV

SEQ ID NO: 3270 - protein, 521 aa, unidentified
  source 1..521: note = uncultivated organism
MRRITKIEGKKKNAEKKLRVAAYCRVSTGQEEQLKSLREQREHYQQLIHMHDDWTFAGIYYDEGITGTKMEKRPELLRLLRDCERGKVDLVLTKSISRFARNTTDCLKMVRMLSANGVGIYFESENINTLQMEDEFILTVLGSLSANESLSISENEKWSAQKQFQNGTFKQAMAPYGYSVKDGKLLIDEDQAKVIHFIFDEADAGKGTLKIAQELNAKGIKPLKSDRWEAGSIKGILKNERYIGDALYQKTYSDSNLVRHVNHGECDQYLHRDHHEPIISREQFERVQELTGQHRKEKNISGGSVKYQNQYPFSRKIVCEECGKHLKRKIIKARVSGPYIVWECPTHVKDKDMCSLKVIQDEAIKNAFVTVTNKLIFSKKDLLIPFVKEIQERGEGDGGLEIDDINEKLKTNLERVKKLETLAAAGLLDPTALSKAMAELSIERSDLNSKKAAIGVQMEDNYHGISEAGKLLKQINQMKISSDFDEDFFSEFVKEVHAYSRTELGFEFTCGLIFREEVKDG

SEQ ID NO: 3271 - protein, 514 aa, unidentified
  source 1..514: note = uncultivated organism
MQGDFTSLDAQRESSESYIKSQQHQGWVLLKETYDDCGLSGAHTDRPALQKLLQDIRDKKIDCVVVYKVDRLSRSLSDFVKVLQFFEEQQVTFVSITQHFNTNTSMGRLTLNILLSFAQFEREIISERTKDKMSAARKKGKWAGGLPGLGYEVDKPTKKLIINPKEAEVIRRMFQLYLEGNSYRKIALLLTAEGFRTKKYPCRKRNQGGVIFRNTNIQLILKNATYMGKIRYEDKLYDGLHEGIVTPEVFNQVQEKMKANCRVPGTSTHRKFPGLLTGLFRCTSCKCSMCHTYARGRNKNFNYRYYVCLYSIKHEWKGCPTKSVVASAIESKCLEFVIQLTKDQRLTAEDWPKLPLEKQSAILKELVKGIEYDGLKGKLWIELNGAFKKHEFDLPLDLLKKRLPNLPRMAYEHEPHIRKQLLLAHQIRGMLADGKAKDLQQIAGWLNLSKQRLEQVTNLLFLSPAVQEEIIFGDSVQLCDMTERTLRPLAAELDWAKQAVSWQAILPTPYVKPS

SEQ ID NO: 3272 - protein, 500 aa, unidentified
  source 1..500: note = uncultivated organism
MEAIYARQSLDVKDSLSIETQIAFCKRHCMEDVEPLVYRDKGFSGKNTKRPAFQKMLSDIEDGKISKVIIYKLDRLSRSILDFAEIWRIFEQKKVNLLSATQNFDTSTPMGKAMLFIVMIFAEMERETIAERVKDNYYSRVKDGRWPGGPAPYGLSIGRLQDKLGRKVPTLVQNENMSIMKEVFERYAFTELSLGKMAGELNKRGIHCMRCQNWSSVSLAKLMRNPVYVQADYDVYCYFKSFGIQIVNPVDEFTGNRAGILVGKRGTLAGGTNREYKDYTDMVFVLANWKGAISSESWLAANYKLDSNKQIGNNGKGTITWLTGLIKCGECGYAIKLGSPGRKRNRENRGLYCSGAYARKNGCSNKITFCLGELEECVQKELECLIDSCHGEAIEFEETLSNDDKIELEKTEQAIENLMATLRSGEIDSTLLFYINSEIKRLDMRKKEILKRISRIKRPRTVIDKIDFTKMSLKEKHLVAASYIEKILIKGNETEIKWKV

SEQ ID NO: 3273 - protein, 539 aa, unidentified
  source 1..539: note = uncultivated organism
MKRPAKAAGGLARLRCAIYTRKSSEEGLEQNFNSLHAQREACEAYVLSQVGEGWGALAAQYDDGGFSGGSMERPGLTQLLADVDAGRIDIVVVYKVDRLTRSLADFAKIVERFDARGVSFVSVTQAFNTTTSMGRLTLNVLLSFAQFEREVTGERIRDKIAASKAKGMWMGGNIPLGYDTEGRALVVNPAEAEQVRQIFRRYLALGSVHGLRRALSDEGVRSKRRVTLNGKAIGGAGFSRGALFYLLSNRHYLGEIVHKEKSYPGAHAAIVDAELFEAVQLKLAENAGEARRARTGLEPRPPAAPLAGLVFDDRGNAMSSVQARKNGRLYRYYVSTAIQQGRAEEAGSLPRFPGPVLEDLLRDRLGRLELIRGVEDLAAVIERIEVGRTQVIVRLDIRDRVPSHANVVLGDQFEILDDTAVLTILTHLKWRGGAKCAVGPSGAKAVDTPKPDLALLRALARAEAWKARMLGDGLSMDQLIAEQNVNRSYAQRLVRLAFLAPEIKRAILDGRTPQGVTLQRLMQGEIPLAWADQRYLANQ

SEQ ID NO: 3274 - protein, 572 aa, unidentified
  source 1..572: note = uncultivated organism
MNANLKPSTIPGSKRTIRCAIYTRVSTDDQAQGEYSSLDAQKDICEHYVAIHKEADWIISQHFEDSGYSGSTMDRPGLQALLNEVRTGNVDMIVAYKLDRLSRSLKQFYDLWEEVQRHKVNFASATQQIDTATPHGMLFLNMLLSFAEFEREQTRERTRHKLVQRAQQGKWNGGWVPTGYTYDKKLQKLAVKADEQDLIKEAFNQAVRLKNPTAVAKYLNKMGWRTRKRILVKQDGTTREVGDKRFIGDRVQAMLANPIYKGTIIKDGKEYPSEHPAIVSPQLWRQANEALQPKEKENFVFLDRDTHVHLLKGILKCGHCGLSLTPKPAGKKDPDGNPYLYYTCTNVSKEGGEAACLVRNIPVRPFEQLIIRYLGEIGKHPEIIKAVIADANAIKNKGIKPLKAKLHELDRQYDVLSKAVKNFMDTARRDGARRIADEMVMEADRLAEEKRQVELEREKIKIDIQYKEKVVTDATIIAESLIQFEKGFKFLPPADQKEVIRLLVKEITVNHFDPEKDQLPVAPGVFKAEIRTKWYLVNMTLYASDLFARVKTSEGNKFVFDHDWLRRQGSNL

SEQ ID NO: 3275 - protein, 528 aa, unidentified
  source 1..528: note = uncultivated organism
MRKKFAKPVRCAIYTRVSTEQGLEQDFNSLDAQHDASQAYIRSQAHAGWSLLRATYEDGGFSGGNIDRPALRRLLDDVRAGKIDVIVVYKVDRLTRSLADFAKLVELFDKHSVSFVSVTQQFNTTTSMGRLTLNVLLSFAQFEREVTSERIRDKIAASKRKGLWVGGMAPLGYDTKDRKISVNEAEADRVRTIFRSYLRLGSLSLLMADLRKQGIVTKVRTLKSGATVGGIPFTRGPLAHLLRNRFYIGEVIFKGEVLAGEQRAIVDPDLFDAVQAKLSEQLNNHKSERMKSEALLTGRIFDDRGNRMTPSHVRKRGIKYRYYLSSALLQGQPERAGAVSRIPAAEIEGVVAQSVRYHLNQSEEIEDAVLISTHVARIEVQSDQLVIELTNAKGIGSKRSRSRNTLKVPWHKTPLKRRCEILVPASVLPQDARAMRSENRALLISSIARGRRWLNELIADPMANAASIATRDGCSVRKVNMTISLAFLAPDLVKAAIEGRLPHGMGVVRLADLPAEWSRQHQMLGLPA

SEQ ID NO: 3276 - protein, 518 aa, unidentified
  source 1..518: note = uncultivated organism
MQITDITPVKPKSNKKMRLAAYARVSTKSEEQIHSFLAQIRYYNQFVKEHPEYELLEVYTDEGITGTEMEKRDGLNRLLADCKAGKIDRIITKSVSRFARNTEELLAMVRFLKDIGVSVYFEKQGIDTEQLNAEMIVTLPGLAAQKESDAISANVRWGIRKRMELGEFVGGIPYGYKSINGQLEINETEAEIVRRIFREYLSGMGIYKIKDSLNEDLIPRRKKGVLWTRESVRYILTNSRYKGDALFLKQYITETLPHRQVRNKGEQPMYFVENSNVAIIDRNDFDKVQELFQKKKFEDKKKRASVFARKIICADCGGSFHNHNVRDKTYWVCWRVENKETNCISRRVREDMVKDCFVNMVYKLKYNKQILTDAIETIETIENTAGIEQEEIRKIDKEIADLSAKNLVITRLHTSGIMSATDFSAQNSAISNRITKLRSDRKKKLAEAENDEINILKELDETIADYVPNGKFDEELFENIVEKIVPQSNEVIKFRLIGGVELVETIKEKGRCGSNEIS

SEQ ID NO: 3277 - protein, 563 aa, unidentified
  source 1..563: note = uncultivated organism
MSKQISKIYHAAIYVRLSKEDGDVSTSAKAESNSISNQKDFIRNFLADKKDIKIVKEYVDDGYSGSNFDRPSFQTMMEDIKGGIIDCVVVKDLSRFGREYIDSGRYIERLFPALGVRFIAINDNYDSMTGKSQGDEIIIPFKNLINDAYCRDISIKIRSHLEIKRKNGEYIGAFVPYGYQKSEADKHKIIIDTYAANVVREIFRLKLHGMSQDAIARKLNDEGILSPMEYKQSIGSGYQTGFLQNEKSVWSSVTVRRILENEIYIGNLIQGKRTTPNHKVKQEVTKPEADWIRIEKNHEPIITDRDFEVVQRLLGMDTRMSPDADVVYNLSGIAVCADCGAPMTRKITTAGGKKYAYYICSNHKLTKQCSQHSISVQMLEDTVLEMLRLHISNVMDLEEILDFIGEIPFQQLDVKNLETRKQKKMDEVEKCKRLKSSLYEDMKDGILTKEEYLELHEAYLKKEKEGEENIRQIERDITLILEEKDDKHLWMNYFTEYKDIKELTRDVVVKLISEIRVSENKEIEIIFDFDDCYRQLLKSVGKFGYQVSVDTKGKLNISRREAV

SEQ ID NO: 3278 - protein, 532 aa, unidentified
  source 1..532: note = uncultivated organism
MDKIAGIYIRVSTEDQVREGFSLGEQKEKLQDLCKYRGYKIFKIYEDAGISAKDTNRPEFQEMLQDMRNGNINVIVAYKLDRITRSTKDLENLITEIQKYSCGLECAVDDINTDSANGKFFTRMLTVLSQLEIERTSERTKFGLVGAIKNGHLPGAIPLGYKRDNKKVVIDETTKDVVLKIFDLYTKGYSYQKIAHSMNEQNVLNKKWADDSIYSIINNRLYTGDYIQFKNTDYETIYEKVIDGIIPCDVWLECQSQKNKNSRNYTREVVYLFLQKVKCPHCGRIMSGRAPGGKKKHKYVYYKCFECDDYINESAIETKLKPWITQLLEFDSLIKNQFATLLSNKISNPTPKLEKELESLKIKKDRIKKAYINGVIEIEEFDKELKEIKNKIDSVSKKLSQEQLNDRIDISFENLMIMRDIKRFEWIQVHDILELSPAYEYDGLSLEEKQTLFMKYIDFIEVEKTDKNIEIKKVYFKESFVTEYDNYLKNGGYDEMAIMRLKDTSHLIYFANVKTHNEVIRYIDKLKELYDI

SEQ ID NO: 3279 - protein, 562 aa, unidentified
  source 1..562: note = uncultivated organism
MEHAKSRTRRCAIYTRKSSEEGLEQDFNSLHAQREACEAFIKSQTGEGWRLVKTAYDDGGLSGGTMERPALQRLLEDIRRRLVDVLVVYKVDRLTRSLADFAKMVEVFDAHGVSFVAVTQQFNTTTSMGRLTLNVLLSFAQFEREVTGERIRDKIAASKRKGMWMGGVPPLGYDVRDRRLIVNQAEAKTVKRIYEGYLELGSVRLLRNDLERHEVVSKVRLSKNGVRSGGRQFSRGALYQMLSNPIYLGEIRHKKERYPGQHEPIVGRELWEEVQQHLRDQAAKRRERPTKAPPSPLAGKLFDENGEPLYVQGAVKGARHYRYYVSRELVRGSAEYTDRGWRLAAPELERAVRAATQQILGDRAAIAGAIEEFNIDASRLPSIFKAAEAWIQSLRSEVEAAPVLTRLIERVGLKQLGIQVSIKLPIPAGEERDAAIPNELALARSVPIRMRRRGVEMRLIIDGATTPAAPVDLPLLKATARAYQWSNDLLAGRARSIGEIAKREHLTSRHVRRVMRLAFLAPKIVTAIAEGRQPADLTTLAMTQRIELPPLWSAQERALGLC

SEQ ID NO: 3280 - protein, 546 aa, unidentified
  source 1..546: note = uncultivated organism
MPRIIETKPEKSEGKVKRVGIYCRVSTREQGESGISLKSQERRCVNYCDAHNYQVVDTFVDAVSAKDLNRPEMMRMIQAAKENKIDIIVALKLDRISRVPRDFYNLIEELELYKTGVVVVEDQWDTTTPVGRMLVGILIQFAAFEREIGIERTKAATKQRALDGKPGGGVPPLGYDRVNKEFHTNPTEAKIIKRIFGEYLSGIGPKRIADALNKDGFRNKKHYNPDGTLRNGGREFTEKHIHNFITNCLYCGRIHFKGEMLPGNHEAIVSEKDWNDAQKIVAINRDKKNLGNTKRDQFILAGLLSCGICTDIISATAGIGKKGKRYNYYQCLSARAPKGKRNDCNCKSLRTDQLEKVVAAMIREIANTDGFLKAIEEEFIATSTAKELEGLKDDLRNANSQISDTEMKIRNLIDVLAKGSLDDTSPIEKELGSLNTLKQEKAAYRENLIQEISQKKSPTPNADTLMTIYKEFDELWDTFSKPERRMVLNLLIDGIEINYPKDSDKGEIILYLYNEPPIKSLYEIIEGSHVYLCKLRRRDLNSRPGD

SEQ ID NO: 3281 - protein, 549 aa, unidentified
  source 1..549: note = uncultivated organism
MARKSRKQTAVPMPAPSLYVHVALYIRLSVEDNKKRGCSVENQKLVLNDFLSDKPDFVVYDTYIDNGATGTNFHRPGFQQMLSDIEAGHINCVIVKDLSRLGRNSIDTGYYIEQYFHAHNVRFIAVTDQFDTADSGNLHGGIMLPLKNMINEAYALDIGRKIKAQARQAMKDGDYIGARAPYGYRKDPDNCHKLLVDENTAPVVKQIFEWAHEHVSLNRIVRNLNEMGIPAPSHYKKATGEITSPGLIGSGKWQTRTVMKILESEAYTGDLVQGKTKIVDHQQVKAGEDNLIIVKCTHEPIISHELFNAVQEYRKQICEESKATPKRPYTPNIFKGKVFCADCGRSLHRQRAERRKGPDTYWFHCLTNSRVEKDSCKGATMQEKELISTVTAILEKELTVALGMSLPLFQLEARQKQEKDKLKIQMSAKRQEIEKTRRLIRGLYENFVQGILTNDEYFELKADYEHAINALSGEIEVFEKSMDSLDNQLARYRAMEKDAKTLAQDHVLTAELIERLIERIEIDHERNIHVTFRFKNEFQGKAVEPCATM

SEQ ID NO: 3282 - protein, 534 aa, unidentified
  source 1..534: note = uncultivated organism
MKSKIRCAIYTRKSSEEGLELEFNSLQAQREACEAYIKSQKHENWHLLSTKYDDGGYSGGTLNRPALQQLLSDIKAGLIDIIVVYKIDRLTRSLMDFSKIVEVLDKHNASFVSITQHFNTTTSMGRLTLNMLLSFAQFEREVTGERIRDKIAASKKKGMWMGGKPPLGYYRKDKKIYPDEEKVKLVNSIFKKYVELKSTTLVKEWLNKQGHPISVGNLNCILRNKAYIGFVGHKGTWYLGEHQGIIPIGLFDQAQAVMSSNRINRQHYNPSKSLLVGKLYDDKGNVMSPSWSTGSQGKKYRYYVSQAVIKKDPSKIGQISKISLPKLEEFIDNWFAQFIRDKAKIYPYLKGFDIAKQKGIINKLTSYTITRNTEQALIKRVDISLKHIKITIYEEQVTELLNALYENRDMNLQQSEREYPYTEDYHIGIIDNGAKVLVGQKIKPNPRKDINLINILAQAFKWHQDILKGKMLKEVAQREQKTEQYVRRILELSFLSPKIVRAILNGTQPADCSLKRLLSIHTSNWREQEEEFCR

SEQ ID NO: 3283 - protein, 501 aa, unidentified
  source 1..501: note = uncultivated organism
MTTTKDNAAPRAAVYARISLDRKEEAGVKRQEKACRDLAAARGYTVTDIYVDNSISAYSGATRPEYQRLLRDIKAGLIDKVLVWHQDRLHRRLAELSEYIDVVTAHGVDTETVDGGAIDLSGATGIMLAQIIGAVSEQESRHKAERIKAAYEQMNLNGVPYGSGRRTFGYVADRTALNEPEAEALRHVAGLIVNGGSLYGAAKWLNEHGFTTTAGKQFYGGAVRDLLLNPRLAGYATHNTLNHEGKRVKSNRKIVGRAKWPAIFTEEEHEQLKAVLTNPARTMNKGRGHKPEHLGSGIFRCGCDVCLAEPDNARVMYVRWRKDKLKNGTVYRKHMYYSKSNENLTSKGHTSRLADPVEDYVTAAVLARLSRPDITTAIAAAEDTGTATRLTAERTELRDRINGLEAELVAGNLDPSQFGRLNKALLAKMEQLDAELAACAEDHTALSAIMAAGDDVRGWWVTAPLELKRSLVDAVARVYIIPDRKGVKKFNPDKIRIEWKV

SEQ ID NO: 3284 - protein, 527 aa, unidentified
  source 1..527: note = uncultivated organism
MAATRAKRTQDRATRPARVAVYVRLSKERAGSVSIVKQREACEDRVKQLGAEYFYDARMYDKQGDYYVDNDRSAFQADAIRPAFDELIRRIKENEYRRGVVVFYALDRLVRRTKQWVEVEELARNHGVGLLAVTQPIDTTNEHSSIVATLLAELAQHEAKTIGRRVQSAQTQLAKEGRYFGGRIPFGYARVVHPDGVGYALAPHPTESEVIRRAAELVLDRTPLTVVARRLNAEGFRNRSGGPLRGSNLGKWLRNPALKGTPTYGGRQVGAARGERSWLVEAVLDDKQWRALQLVLDRNPALSAGRQRDNDILLAGLVRCATCGHRMRGVVRAYGTYGCFAGSDGSGECASPSYISRDALDEFVIEWFLSQLRRNAAGSDEVKRKRAVAAGKRRLRLLGEQHSQIDAAVRRIEAREDAGEFDGKPAIQRRNTVRLEELYQELERLELEIDEIDLRLRRLRSRESEAITRADWDALDIFTRRRLLADFIECVVVARPPLGNRSGPKAVLTQGRVVIRSAVETLAAEGK

SEQ ID NO: 3285 - protein, 531 aa, unidentified
  source 1..531: note = uncultivated organism
MREAFYARVSTDKQAEKYGIPSQIEAFRKRCLEGGGTPVLDGDKDAFIDDGYSGAELDRPALNRLRQAVREGRVDVVLSYDPDRLSRKLYHQMILAEEFEKQGIKLKFVTQDMGNSPEDRMFFNMRGLVAEYEREKIRERTVRGSREKARQGKVVSAGATPFGFYYNKEKATLEEDLEKAQTLRLFFYTFANESLSLQGLAERLNRLHIPTPKGGDRWRASTLGVMLRNEAYIGKLHQFRKYHVEPRMRRQPSTRIKKTSLVLRPREEWITVEVPSLVPLELFEAVQRKLDRNAELSKRNTKREYLLSGLLYCSQCGGRMGGHTAHNVPYYRCYRKYNPDRVPLDPSGEPQPCSCPEVKAEAVEPVVWDTICQLIRDPDFLIQELHKRNADNSQTKEILESELRLCQIRLKAIPDEQRRLVEGYRKGLYADFMMREDMELIQKEQGELEKRKAELERQLDQRQLTQSQEARIRSLTEKISTGLDNLDFAGKQELMRLLIERVLYDGQGVEIQTIIPLSEQLHPLHRGGHRG

SEQ ID NO: 3286 - protein, 524 aa, unidentified
  source 1..524: note = uncultivated organism
MLKIGCYGRKSIYSDKSDSTEVQYTLGSEYCKSHYSDYELYRYEDEGYTGANTDRPDYNRLIADIKDDRLNVVICYKIDRISRDVLDFSNFFSLLSEHGVEFVSIKEQIDTSTPLGRAMMYICSVFAQMERETIAERVTDNMIELSKSGKWAGGKAPIGFKRQRVEIGAKTHTILVENPEEITFLSMIVDTFLEGKYSLGGLETFFRKQGVKTLKGNYLSASQLHSILKNPYYAPADKQTLEYFKSLGCTIGCDESKFTGEYGIMAYNRTTGGKKKKHSLNPPEKWIISVGLHRPLMTSDKWLSIQERFGNNKINKTRKHNIGILKGVLRCSCGYTMRVKHKVDKIYHKTYDHYICQNRNRRGVEYCDCPFTPVANLDNAVIELLKSIALDKSTIDNYIYEDKTIHTCMRSRSDVRRDINNLESKMNNLTSALGSNSSSTAAKYIISEMEKIDKQIAGLKYELMEIESNDRKRAKSHKDTEDKYKMVCHIVDSLETADYDELNGLIKNLFKECIWNGTSLQIKL

SEQ ID NO: 3287 - protein, 552 aa, unidentified
  source 1..552: note = uncultivated organism
MARTAKRYKKNTEKKVLGIPVCMAAIYARLSVDSDEKKSESIETQVTLIKEFIQKHNENPDREYEIAVYDIYSDLGKTGTNFDRPGFERMMNDVRAGKINCILVKDFSRFGRNYIETGNYLEKILPFMKVRFVSVCDNYDSYALGAKNQELSMNIKNLVNDAYAKDISAKERAAKRIAQKNGEYVGSTAPYGYCVEKVNGIYKLIVEPEAAKIVRRIFEEYASGDGIQSIIDGLFEDGVHRISDYNRYHHVYCQDVENLHQWGNSSIRAVLNRNNYYGDLVQRKYESRFQRGEKWCDILDESQWIITPNAHEPIISRELFDKAQVRLKAAQQKTTKTTAGWEEDERAFYNVFYCGDCKRKMCTRRYRGNVYYFCNAAQYRDERKCSHKSISEEKLQKIVRSELTRQFQLSGLRKKDMSAISSAVFLSKIKEIQAEIRKLDADMERRSEKLAQAFMQYKEGELSKEAYIEMKDDRNSWKEFCEERKKSLEQTIRKLEKQQKEEARFLRSLLELDGTTRINAEFAEGLIESMYLYGDGKLEINFGFKGGAVEHE

SEQ ID NO: 3288 - protein, 516 aa, unidentified
  source 1..516: note = uncultivated organism
MNIAAIYCRLSDEDKNKANKYEDSESIQNQKKLLLDFARENKWEVHKIYCDDDYSGLDSERPGFKQLIADAEAGKFNIVLCKSQSRFTRDMELVEKYLHHKFIEWGIRFIGVTDNADTFEKGNKKSRQINGLVNEWYCEDISENIKAVFDVKRKRGEFIGSFAPYGYKKDPLNNNKLLIDEEAARVVRRIFSRYLEGFGAQQIASMLNREGIPNPTKYKELMGLNYKNPFKAEDYGLWNKTTVKRILRNETYIGNTVQAKRKKLSYKSKKMIAVSPDKWVRVENTHQPIIDKSVFFAVQQRMDGRIKSAGNGKPHLFASKVKCHDCGSTMVKVTSGKYSYLRCKLYSASYGNKMCTSHLTRLDELTDLIECKIKEHLKRYIDIPKMAERLEKELKWAYNERKYHEEIKKIKKEISEKELAIKSLYIDKIKGIIDEEQFIELNREFIKEKRKLSERQKTIQKEMELNEKTGIDYEDIVKDLIEFKELKHNMVSIMIGRIEIGEKTAEGKRIKIYWLF

SEQ ID NO: 3289 - protein, 519 aa, unidentified
  source 1..519: note = uncultivated organism
MKSAVIYARYSSERQSEQSIEGQLRVCNEFAERNGLRIVGTYIDRAMTGTNDHRAEFQRMLSDSDTPQEWEIVLVYALDRFGRNSIEIAINKQRLQKNGKILISATQRTSQNIDGSQNLDGIILENVMIGIAEYYSAELSQKIKRGQNESREKGNFVGGGIAYGYKVVDKKIVVNEDEAEAVRYIFDQYASGKVAREIIEILHQRGLSHRGKPFLPNAIYQILRNTRYIGVYYHNEKKYTNAFPPIVATELFSTVQAMLAKNKLGSHSRETEFLLKGKLYCGICGKKMNGESGTSYNGKVNYYYKCSTRKKKSSACPKANIRKEDLEKIVLQTTVNLLRAPGNAERIADAVVDIHRKRWQDQSVLHILKEDRDKKQKALKNLLNAVEEGLLTATTKSRMTELEEEIDILNGKILAEESKESNLLTREQIIDFLTILPDQEPQLIIDAMIRKVDVYDDKLEIHYNFSKLPEPDDPDGLLPEDRRVFSVSFQSNLSSSVPPRKKRVPLGTLFLRGGDVPKS

SEQ ID NO: 3290 - protein, 523 aa, unidentified
  source 1..523: note = uncultivated organism
MNVAIYVRLSDEDRDKLQKEDESESIQNQKSMLRDYCKERNWTIYDIYNDENFSGIDSSRPEFNRMINDCQEGNIDIVLCKSQSRFSRDAVLIETYLHDKFIEWGIRFIGVVDHADTNDKGNKKSRQILALTNEWYVEEVSENIRRTLKHKREQGQFTGSFAPYGYLVDPEDKNHLVIDKEAAPVVRDIFNWYAEGWGYRKITMELNGKGIPSPSKHKELLNSNFRNPNELKSYNKDLWTYTTIYTIVRNETYTGTLIQGKTHNVSYKNKKRQRLPESEWIKVYNTHEPIIDMEVWNKVKERVESRQRVKKTTDKLSPLSGKVKCAVCGKAMKRNVYYNKKRTIQYYGLQCATYKIGAMNCPNVHTISGLVLEREIVSQLNELIKKFSDQDKIEIQDETQTNINKCTEDIIKISKQISEKENRLERLYEDKLDGIISKEQFISFNQKITDEIERLKSNQQFIEAKKKQYQSSYRDNEHIKEAIKKFSQIDVLTKDVADEFIKTVYVGEVIEGHKRQVTIEWKF

SEQ ID NO: 3291 - protein, 537 aa, unidentified
  source 1..537: note = uncultivated organism
MEWQEILRGGMMKKKIKCAIYTRKSTEEGLEQDFNSLDAQREACEAYIKSQMHEGWILLDKQYNDGGYSGGTMERPAFKELLKDIENDEIDIVVVYKVDRLTRSLMDFSKIIDVFDNHNASFVSITQHFNTTTSMGRLTLNILLSFAQFEREVTGERIRDKFEASRKKGLWLSGTCPYGYEKDEHHMLHPQQPYAENVRIIFESYLKIKNVLKLKQYLAERKILTRSGKELAKGSLYHILSNKVYLGKITHKNKEYEGLHEPIISEELFNDVQNLLKANSVERKHATNAKNGSLLTGLIYDDIGNKMSPSASNSKNKHYRYYVSQAIKNPVDYKRGEITKISAGEIEKFVQEDLIKLLKNTHKIQNYIENYPVEQQKIILEKMQSFEADKVFLRTAVKRVDLKTDCISISYDINYIIKYFATLSFKAEFNHSEDEEVIIINQIQVRISLTPQRQNKIIIPGKANYDIKLIQAIVKSFWYNKLGAERRLPIEARNGNNKRLRKLRFLPPEIIESIMNGTQDPELNVKKLIAMAEKFVL

SEQ ID NO: 3292 - protein, 618 aa, unidentified
  source 1..618: note = uncultivated organism
MRETDLKNGGTVHRPASHQPGIVPRNARRRPPGKPAVGISGAGKSPVLRCAVYTRKSSEEGLEQDFNSLQAQREACEAYIASQRHEGWQVIPQAYDDGGYSGGSMERPGLKALLSDIAAGRIDVVVVYKVDRLTRSLTDFVRIVERFDARSVSFVSVTQSFNTTSSMGRLTLNVLLSFAQFEREVTAERIRDKIAASKKKGIFMGGPVPLGYRIENRKLVIDEEEAQTVRLIFATYLKTRSTIATANELKRMGIRTRIRQRSDGSHIGGIPFTYGPLQALLRNRVYIGEITHKGQHYPGEHAPLLEKTTFDAAQQLLTTQRSSPERTSHTLTSLLTGKIFDAKGNRMAPSHTNKKGVRYRYYVSRALLDGEPERAGKPSRIAANEIELLVTNVLQQECIKQKKAEAWGATDKRFAPATVGRGSSTRGNTPSGTSVSLADVPVQPEALIEVLLDRVEVFDDRIAIFVQKHQDESQIEPEHAANDDGQHGASFKRIIVPCNLGYAPPVKQVKVSERGKGEPPLPNSQRRNRERLIMALYKARGWFDELASGKIESVDAIATREGKSARNISMMLNLAFLAPEIIEAILNEETPASLSASQLAQTLPLSWEGQRKLIASYA

SEQ ID NO: 3293 - protein, 534 aa, unidentified
  source 1..534: note = uncultivated organism
MLVVGYVRVSTRRQANEGVSLDVQRMRIEAFAESNGWTLSEFYIDRGASARDDARPEFQRMLLDAAAKPAPFAAIVVYDRSRFYRNAAKAELTIRELRRNDVQIVSVTQPNGNDEAGDMIRQLIAVFDEHSSRETAKRVRGTMIQNAKEGFWNGSAPPYGYKTEIADRRGKKEKKRLAVDEIEAPVVELIFRLAEEGDLRSGPMGVKSIVEHLNTHDYRTRRGNLWHVGPLHGLLTNSVYRGEYVYNTVDSNTRLKRPEADHVTVRCPAIVDPRRFEAVQASLRSRNPKLSAPRVVTGPILLTGLLQCAKCGAAMTMRTGKSGRYAYYACAGRQARGTAACEGCSHPMGHVDEAITDALVDEALLPTRLDGILRRMESDRKAANENSGEMLRMEGELAEARQRISRLMSMVEHGIADASDPELGMKLSAAQKDRDIAAAGIERVRRRTGPALDLDPERIVAFSNYMKDRVRNGEIPFRKAYIRSIVDRIVVSDTQATLSGLRGGLRTLVATHNEGAQTVPTGIQEWCTRQDSNL

SEQ ID NO: 3294 - protein, 507 aa, unidentified
  source 1..507: note = uncultivated organism
MIPVAAYCRVSTDKADQANSFQTQQRFFREYIQRNRDWELYAVYADEGITGTCTKKRKEFNRMMNEAYEGKFRLLITKEVSRFSRNILDTIAYTRELKKLGIAVLFLNDGINTLDPDAELRLSIMASIAQEESRRTSERVVWGQTRQMEKGVVFGQSLLGYDVRDGHITVNPEGAEIVRLIFHKYAVEQVGTSEIARFLTREGCRTYRGSRNWNPGTVNKILKNEKYVGDLVQKKTYTPDFLSHEKKTNRGAIPLITIANHHEPIISRKVWNLTQERLRKNNKHAAGESGHSNRYVFSGKIQCGQCGSRFVGRFKYLKDGTGIRRWCCGKTAREGTAGCDIGKLIRDDDALEMLKTAIRSLPVDFEAVIRNVTELALEAILTGQAENRNDPDRLRQGLDHVQQKKEAVMEAYFSREISKADMMTFTEKYEQQLSDLRTRLEEAQNRRDRKQDPSALRAQFQSEVTAILRGETESEVFYKTTLHSLTVYKDRHMELRLNHLPQVFHFV

SEQ ID NO: 3295 - protein, 533 aa, unidentified
  source 1..533: note = uncultivated organism
MITPYKHYFYDNGNINFRVALYSRLSREDEKDQAVSESIQNQVEFLEQIILQNGWTLVDTYIDDGISGTTFERPSFKRMIADIEAGKVNMVITKDLSRLGRDYIQTGYYLENYFPSKGVRYIAVNDGFDTFEEASSNDFIPFKSVFNDMYAKDISKKVRTALKTKQMTGTFIGSSAPFGYMKDPKQKGHLVPDPVSSAYVKRIFEKFLAGVPMNTISIQLTQEGIPTPSQYSGIGPTQERFAGVWNDKTVRLILKNEVYIGHTVQNKNRKVNYKLDKQVNIHPSQWIKVENTHEPIINLEDFQMVQAILKKRSCARKQGEPHLFTGFAVCGNCGAPYSHMNGHREGEHYLLCGTAKRHRKLGLCKTFTVREEILEAHILALLREIAEQYIDPNKLVSSSHAEMVEKAVGEKKREISRLQSKTEEAKRLAMNLYKDKVNGAIDEDTFKELVAQVNGERERANKQMLLLQQEIRELSERTTDDEQVKQMLIDFLKFSQIDRMTLSMLVRKIIINHDSTIEVQLTFQEPVHSKIVR

SEQ ID NO: 3296 - protein, 501 aa, unidentified
  source 1..501: note = uncultivated organism
MKRCVIYTRVSTDYEAQAKSMGNQEALMRNYIEKQGWLYCHTYEDDGITAVGTKVRGDYDRLLADAYSKKFEIIVAKSLTRFSRSQRQGLTDIIKLMESGIRLVFFEDNMDTADPRVYRELGLKLWLAEDEARRTADRIRSTWKIHNLQGKLHACTPPYGYDYCTHACTFIVNEDEAQVVRRIFLEYLQGEGMLAIAKKLTKEGIPTKKGGRWAQATIRSILTNPVYTGILILGKYTHADITNKKKQKIPQEHWHIHPNIYKGIKQEIIDEETFNQVQRELEKRSTKKQRHSTQALFSGLIKCGECGASFTIKRKKHFRNYSPYYTCITYDHKGKEFSGHGRMAIYEEELLEGINKYLTTLRTDKEEELIIEYTRQKEEGYTIKKLEKTLEKNKKSQEELYTLYHENLKLKQNGELTQRLFIKEMERIDGWLGELEQKAYLLEEQLEALQEIKPSKDKIKEEIDEVLNTSNFTNLNMRQIIHQITIYEDKRIEVELNVLEE

SEQ ID NO: 3297 - protein, 681 aa, unidentified
  source 1..681: note = uncultivated organism
MNSETSKDKHLRAVLYERLSREDGDKLTKEEKSESIKNQDLMLRNYAKDHGYEVVGVYNDEDWSGADSSRPQFNEMIKACEAGKVDIVIAKTQSRFARDMELIEKYLHNKFLEWNVQFKSVVDHIDNTRRETKKTSQILGLTDEWYLEDTSINIKETLRTKRASGEFTGSFAPYGYNRDPENKNHLIIDPIASEIVKKIFENYINGMGLRTIARDLNDNSVASPYEYKVSKGSNLKLAYLDNYLIYDHIEKAGFYKIDINYINESKEILHNLIFYNIFSKDKKTFDNKCKLYLKNYSESKMKIYYTTDNNIDYNNFDVKKWTLLKKNDIIPFDTTCIASVVEVLDRKHIINYQFDVLLENNIEHEKYYFDVVQITNDEKKIIDYEKNIRKKCKWCDQMIKKILTDEVYIGNLVQSKTTNVSYKNKKKIKKDKEDWIRVENTHESIISPENWLKVQERLKHRVRANKNGYYNPFVHKLYCKCCGKVYTRTGDCNHVYFRCKDQNEKYKSCDNQNSISKDELNNFALNKINELLNRFYNEEQLKEFKEKDTDNDLFKSRINSLNKELIDVNKELQNKKTYFQHLYEDKINGLLDTEEYMILKSKYKDDSEKLENRVIKIKEELNLINEKKNVLKNKKTVYSKYKHIDCIDIDIVSDFIDRVYIGKYDKKTKTRDMKIVWNFES

SEQ ID NO: 3298 - protein, 560 aa, unidentified
  source 1..560: note = uncultivated organism
MKSKLLQNTKAGIYLRLSNDDERSGESLSIENQRRILVKYVMEQGFELVDTYIDDGVSGTSFERPGVQRLLEDAKFGRINVIIVKDLSRFGRNYIEVGQYTDYIFPMYNIRFIALGDNVDTANSESSGMDMMPIMNVFNEWHAANTSKKIRAVIETNAKAGKYRACYAPYGYVKGEDENRLPVRDEPAASNVRRMFEMRASGISPNKIAETFNDEGIPIPSDYKEQKFGIPNTRRSHHLWSCSTVKQIITNPIYLGHLVQMRTTTVSYKNKKTVKRDPEDVVTVYNTHEAIVTQELWDKCREMEASVSQGKKTRRGTTLPLSGLVFCCDCGSKMHSGWNNTRHSRKGPRIHYRENFKCGSYAKFGDRACSSHYIKMDTLNKIVLEDIRSKMSLVQTDEAKARAEFLKRCEQITATETAQDRKRANQINRRLGELEKLITAAYEDKVAGKIPEDICVSLLNRYVEEKNKLKAELSEIEKRQAEVNKDKADVDEFIRRLKAYMEVPELTREMCMELIEFVTVDKCPGKYSKAPREIHIYYKLIDKQPIPEKKYTNNSTCEDC

SEQ ID NO: 3299 - protein, 579 aa, unidentified
  source 1..579: note = uncultivated organism
MTPESKTVIRCAIYTRKSSEEGLEQSFNSLDAQREAGEAFIASQRHEGWRALPACYDDGGYSGGTLNRPALKRLLEDVEANKVDTIVVYKVDRLTRSLADFAKIVEALDARGVSFVSVTQQFNTTTSMGRLTLNILLSFAQFEREVTGERIRDKIAASKRKGMWMGGTIPLGYDLKERKLIVNPEEANLVRRFFHLYLQLGCVSKLKMRLDEEGIKSKVRISAAGNRSGGSSYSRGALYDILQNRIYLGEIQHRGQSYPGEHEAIAPREVWERVQAQLRGDNQGRRHGLKANSTSLLVGLLEDAKGNRFTPSHTSKNGRRYRYYVCQMTTHGCGRMPAHDVERQVCLKLRSFLQSGRKVMDALGLPEDPPARTQQLIAAAVKQSDEWLSASPAAVQDFVRKVVRRVVVHPDRVEVEVGKRKLRATLTGDPHAPRPAIQKLEQGSCDVIRLAIAARIKRCGNEMRLVLPPDRLSQAPSHPASSLLKALARGRKWYEWVVAGEVSGRRSIGQKLGLDERYAGRVLECAFLAPDIVEAILDGRQPSDLTFEKLTRRLPLSWIEQRRRLGFPPLEPTAIDHRS

SEQ ID NO: 3300 - protein, 522 aa, unidentified
  source 1..522: note = uncultivated organism
MKKNKSESTTRTVVRCAIYTRKSTEDGLEQEFNSLDAQRESAEAYIRSQLSEGWEVIPTLYDDGGFTGGNMDRPGLKKLMTDIEAGKVDCVVVYKVDRLSRSLLDFSRIVESFDKHGVAFVSVTQQFNTANSMGRLMLNVLLSFAQFEREIISERTRDKIAATRRKGKWTGGIPLLGYDIDPRGSKLVVNENEAVRVRQIFELYIDHRSLLAVAKELGERKWFTKSWVTKKGVSRGSRVFDKTSLHKLLTNVTYVGDLKYKEEIHNGEHDGIVDRVLWDQVQTILRRNAMNRGADVRNRFGALLGGLLRCVGCNSAMSPAHTTKNGNKRYRYYVCCSAQKRGWDTCSTKSVPAAEMENFVVSQVRGLTSDRQFVAETVSAYTKKQRSQITILQGERKSLERDLELWQSEINRVLESGDSSAAMADRLAAYETRVRETERTLADLALQQQTLGSGTDEATLEKALKDFDPVWNSMPSRHQKRVLQLLIRQIDYDGATGKIAVTFHQHGFEGLADTLRQRDNTK

SEQ ID NO: 3301 - protein, 548 aa, unidentified
  source 1..548: note = uncultivated organism
MKVAIYSRKSKYTGKGESIENQVEICREYIHNNFPDVRDEDIAVYEDEGFSGKNTKRPRFQMMMEAETKEHFDIIIVYRLDRISRSIRDFADLTDRIRDYGTKFISVKEQFDTTNSMGTAMMNVSMVFAQLERETIAERIRDNMLMLARTGRWLGGTPPLGYDSQQVSSIDEFGKARYYNKLVANDDKEKVRLIFGKFLETQSMTATTAYLIANDIKSVNNIDFTNFAIREILVNPVYCEITQESYDYLMKLGCQMCFDIDSINGSYGFAVYNRKKSDSKGKRTGSNPPTEWIVAMGKHEPLITAKDWLHAQEICSINKKYSFHRKVHNKDSLLSGILYCGECGHKMRPKINSRPKVDGTRSFFYMCEYKEFSRCSKCRMKNVNGEIIDRLVCESLFEYDVIGSVINNQVKELHGRMKKAANTAEEELKNINGKIGEINLRIKNLMGNLMKTSDDDVLYEYIKTEITELDKRLKELNALKEENLEKSKAANDIDGQYEFICNTLRNFKDSFSQMTAVQKRELLRNIISRVEWDGENAKIFLCGADCDK

SEQ ID NO: 3302 - protein, 564 aa, unidentified
  source 1..564: note = uncultivated organism
MPAKTRRNRASVAGPPGPATGGTRVAVVTRISTDEVNQPYSLEAQAKGLEAFVASQPGHTITHRFVDQASGATLERPGLQAALAAAKAGEFDVLLVYRIDRISRSIVGLMTIVETLDAAGVALRSATEPIDTQGPVGRMLLQLLGIFAEFERGLLIDRITKGFERKAARGEWLGGPGPYGYALDSATKTLVADPDEAAIVQAIFAKYVEERYGATALANWLNDTGRRSRNGKLWSNQTVLRVLRNPVYLGKIAHGDDLHEGKHDPIVDESVFARAQLLLDERAAESTTIRPTTSEYLLSGKLRCQTCGGAYVGAGAHGRNTFYRYYVCRTRQAKGARACPGQRVPADDLEDAIAAALIATYDTHDLFEQAANDAYAEAANEHPRLEAELASTDTQLRETRTAIDRYLHAFEAGTMSDTLCAPRIAELSQRRDELTARRNQLAVQVKATPPQLPTAAQLHTVSAHIRRAVSEGSPDVIKQLFDELIDRIEISPDKHAQPYFWVPDVQRPGPSLARACGTPVRMGPHQVEVAGIEPASFGFSAGLLRAQPAEGLGPRPTTGTVARP

SEQ ID NO: 3303 - protein, 552 aa, unidentified
  source 1..552: note = uncultivated organism
MKLPTPKAQRCAIYTRVSTDQGLEQEFNSLHAQREAAQAYIKSQAHEGWRLIRDHYDDGGFSGGSMERPALQKLLVDIRERRIDVVVVYKVDRLTRSLTDFAKLVELFDEHGVSFVSVTQSFNTTTSMGRLTLNVLRSFAQFEREVTGERIRDKIAASKKKGIWVGGVVPLGYEVRDKKLIVNEEEAKTVRLIFERYLALGSLPALQQELRSQGIVTRKRTLSSGKVIGGVPLTNGPLAYMLRNRVYLGEINHRDQSYPGEHQPIIDSGLFDRVQARLDENLHGRRLKNERSQALLLGKLFDDRGNRMTPSYAIKKRVRYRYYVSCVLAQGRTDEAGSVPRVTASEIEAIIMDALATLVPASEEPVELDRSGPAPSEKHPMPTMPVRVEGRPEQPSDKARVEKYVDRIIVGARSIEIRFVEGAQSAAQSSSITVPWRPAPFRCKRELIQPVDGVRPIRAEARGKLLAAIARGRRWLEEIVFDQTDRIELIAAREGVPERSARSILSLAFLAPDIVKAAVTGTLSKGFGVSRLIDLPANWAEQRRALGLSARS

SEQ ID NO: 3304 - protein, 545 aa, unidentified
  source 1..545: note = uncultivated organism
MEERQVEVIKKVEGPVIRDRRLVGKPLTITRKRVAAYVRVSTNAEEQLQSFKSQKEYYQDKISANKEWALVGIYADEGITGTKTNKRDEFLRMIDDCMKGLVDIIITKSVSRFSRNLVDVLSYTRMLKAKGVTVIFEKENIDTSTMESEMQLSLLSALAQNEVESLSQNVSLGVQMKMSRGELMGFNGCLGYDYHSEDKSITINEKEAETVRMIFDLYVQGYGAYTIAKELTRLGKVNKKGEVKWTDSGIRGILKNEKYKGDLLMGKTYTVDPISKRRLDNRGESNKYYTRNHHEPIISEEIWNKAQEIRESRYRTNENVSDGARTKFARKYAFSSMCQCGFCGTNFTRRSHHQDTQHKKPVWKCRTAANKGIENCPHSKAIDEVIIENAFLEMFQLLAENFEDVLESVLSSLEAAISKDDSTEKLKRVEKEISTLEKKRKKLTDMYLDDKISKEAYEEKYSELNHKLDKCEEEKLLFSENALSHNNIASRMKTIRAKLKNADVTDEFDRLVFESIVEKVIIGEIAEDGSTDPYKLTFVLKGMDD

SEQ ID NO: 3305 - protein, 510 aa, unidentified
  source 1..510: note = uncultivated organism
MDAIYLRKSRIDIDAEKSGSGNTLLRHKTALLDLAKRQDRHIGEIYEEVRSGESIAARPEMQRLLQDVENSKWDAVLVMEVERLARGNSIDQGIVAEAFKNSGTKIVTPAKTYDPNNEFDEEYFEFGLFMSRREYKSIRRRMEAGKIAAIKEGKYLGKTAPYGYERVRIQNGKGWTLRIVPEEANTVRRIFDMHVSKRYGIQTIARVLNTESIPTSKGNAWHPNTVRGVLENITYAGYVYWGRRAVKKISQAKRCRPKNNDYLICKGLHEPIISKELFDASQVQRKANPGIPLHNDKKLANPFQGILYCKKCGCRMQLNPRSGRTTPSIDCRNITCDMISSQLPVVERTLLEALERWLSDYKINVGTGSYVSDLENRIKEAHDTQQHITEQLQQQEARMNKAYEMLEIGVYTPEEFTARRESIFQKKSQLQEDLQQAVEQENECRQAIVQQKEIVPKIEKLMAAYSTATSAQEKNGMLKSVIERIDYEKTTRYDDNSLKLYIYPILNVNS

SEQ ID NO: 3306 - protein, 509 aa, unidentified
  source 1..509: note = uncultivated organism
MAIAIYARKSVERENSISCETQIEYCKATIKPDERHEKVLTFVDNGFSGGNVDRDGFQKMMKAVRQGKIKKVLVYKLDRISRSLADFVGILNEFKENHVEFVSSQESFDTSSPYGEMIVKILMVFAEFERTSIINRVTQAYEHRSDLGFYMGGRQPYGFELVPAVIHNIKTKKLSPIPAEIAQIQHIFEVYSQESVTLRRLLDLLLSEGMTPLNGSEWTTAKLSALLKNPIYVKADASVYDYYDHHGTKMITDVSEFTGEYGAQLYGRNKHDSENPDWSDMKLVLLSHEGIVDSDTWLKCQRKLNKNRQITTSYTNPTSWLAGKVICEQCGHTMTTIKGKPNKNGEVRRYFNCTGKSHKKTCKGPKVTIYAEDLENMVYACITEKLSELKDVKQKPKKTNSTEVNDLKLQLKAIEKSERQLIDSMMSGGFNEDLLALANEKASRLKHEKLALQDRLDELQCAEEAAEAVVDLAKSWKKADYEGRKAVAMLMVHKIAISEDGSAKITWNI

SEQ ID NO: 3307 - protein, 525 aa, unidentified
  source 1..525: note = uncultivated organism
MCRDYIYSHFPEVLEEDISVFEDEGFSGKSLNRPQFKNLMEIEKATPFDVIVVYRLDRISRNVGDFAGLIDRLNGYKTAFVSIKEQFDTSTPMGRAMMNIAAVFAQLERETIAERVKDNMYMLAKTGRWLGGTTPLGFDSERVDYIDSKGVSRKCYKLTENPAQIETVKLIYKKFIELGSMKKVETYLLNRGITTQNNCQFYVTTIRTILTNPVYCTADEFSYEYFSVQGCDIAADKEDCDGSFGFMGYSKTETSGKGERIINGREDWIIAIGRHKGIIPSESWVEAQNILEENAESKEKFRQSHNPIALLSGILFCDCGSRMRPKYYRENKKGVKPYAYMCELKERSKKEKCDCSNLNGMAADKLICDILLNYDIPDNIFNKYLERLSKANRAADTDGLIKAQECIKAKKQKEISALIKALTADVEKTTVQYINKEISKINDEITAADNEIKRLRLIEAGHKQTGGKFYTVQKAFAYFKENFDNLSVEYKRRFIRQNIKKILWDGRTLSVFIRGRHSNSTGCLS

SEQ ID NO: 3308 - protein, 537 aa, unidentified
  source 1..537: note = uncultivated organism
MKKVLCLYRVSTKGQVDKQDDIPMQRRECMAFIDRMEDWIYYDERMEKGVSGYKVSANKRDVILEIRTMAEKKMFDVLLVFMFDRLGRREDETPFLVQWFIEQGIEVWSTREGQQRLDNRVDKLLNFMRYWQAGGESEKTSLRVKAAHTQMTADGIWRGGQKPFGYKLVHNGRLGKKNRPLYDLMIDETDGPMVQEVFRLIGEQGYGTLRAANYLNQKYPNPNKIWTAQTIRTMIRNPIYTGRMHMNDILSDPKEELRLVSDETFDFCNRALKERIPFRYPQARKKENEAIPTDATKASVYGATLLSGLLYCAHCGKKLVGGYCTKQRKEHAYHRPIYRCYNGSVAAKACDGQRVYAAKKVEEAVLDAVRQYFKTFRSMDPVWKEQMRKRLRKTREAAVQAAEYRLHQLQKTQQTLRMEVVKALNGESVFEESLLREMLNDNKTAMAEAEETLQHLQQERQAEEEKLASLVQQYKHISDWAQEFDRCESDEKKMILARLIDKITIDRDYHIRIYFFISLEEFGEHEPEKRRRKEEKE

SEQ ID NO: 3309 - protein, 555 aa, unidentified
  source 1..555: note = uncultivated organism
MKISKPGHKVALYIRVSTEEQASNPEGSIKSQEQRLRANVDLRNLETHFGEVVAVFIDRARSGKDTNRPDLQRMLQAVRNREITLVMVSELSRLSRSIKDFCDIWELMRRMGCEFQSLREQFDTTTAAGEMVLYTIANIAQFERKQTSERISANFKARAERGLTNGGPVPFGYILDPDKKGHLLVKEEDAAIVREAFDTFLWEGTLATTARSLNHRGYRMSRHRQGGGGKPRLGHFIVENTHQLLTNRAYIGVRVFKVDGEEKTSKALWKPIVEESAFEKVQAILKKNRYRLKMPSAARYPYLLTGLVQCSVCGDRLTGKSAHGNGGKIGYYEHSWATRRQACLNKLIFDHAPQRILAKIIEPKVWERVAALLTDPSNSQLLIASALKVYEGENQIQNTDRLRSKVRGIEEQIEALAEHLAKIPKGLSPAPIFSQMEKLEALKNAAAGEVDDILRSGVRCEPPTALTDYQTYLAQIRQLLTISDSPELRTKIIQRLVHKVEVAQGTLRIHFYVGKHQFVPREPEKATGRDSGLTSGMAAHSSFLDTGSNRLTNGG

SEQ ID NO: 3310 - protein, 568 aa, unidentified
  source 1..568: note = uncultivated organism
MTKPRSQIRCAIYTRKSSDEGLEQDFNSLDAQREACEAYIASQRHEGWWCLPAHYDDGGISGATLDRPALKCLLEDVKEKKIDVVVVYKVDRLTRALADFAKIVEIFDASKVSFVSVTQQFNTTSSMGRLTLNVLLSFAQFEREVTAERIRDKIAASKRKGMWMGGTVPLGYDAKDRTLTINAEEADTVRHLYRLFLEHKSVHVVVDTANRLGLRTKLRPQLDSKMKGGRPFTRGHMYRILSNPVYIGQISHKGQLSPGLHPPIIDGATWESVQLCLDKNRIQRRTRSEALEPSLLAGKLFTVRGNPFTPSHAVKSGKRYRYYVERPTEKGVDQSDSSDGMRIPAATIEDLVFDSIKRLLEDPLDLIAYLESELTPAGILQTIRNASLTFARSLPKESSGPKRGSLFECIAKVEVGPSEVVVHLRFAALFGTLSLKDLAAKFVDRSYVVTIAVELRRRGEELKFVIASTSAGQAVAPDPILIKAVVRAHAWVKALNEDGKMLDDIARTEGVTSAYVRRNLKLTFLAPDIVEAILDGRQAADLTLEKITRTSEFSSDWIAQRSMFGLIP

SEQ ID NO: 3311 - protein, 542 aa, unidentified
  source 1..542: note = uncultivated organism
MKVAIYSRKSKFTGKGDSVENQIQICKEHAIKHFNCAEEDFVIYEDEGFSGGNTDRPRFQQMIQDARRKRFETIICYRLDRVSRNVSDFSQLIDKLEKLGINFVSVREQFDTTKPMGRAMMYIASVFSQLERETIAERIRDNMLQLSKTGRWLGGITPTGYRSEMVISREENGRETRSYKLVVVPEEASLVQLIYNKYILFKSLSKVEKYLAQNKMSTKNGRVFRRFSIRFILSNPVYAIADDKLYEYLSSNNYEIYSEREEFNGINGLMGYNKTRQNATSSGERYRKSDEWIIAVGLHNGIIPSEVWIEAQELLTKNKCKAYRKVRSNTALLSGLLKCAGCGSYMRPKASKRIRPNGEPAFYYICELKEKSMRTLCSMTNINGNMLDGLVLSEIGQLFQKYSPLIDDKSLNEMKKWFNSDIQNDELHILEEKLFNTDFEIKNLVRVLSKVEKGGIETAITDQLKSLNAQKEIYIRAIEKLLLNKAENPGNTGAAQAYYNNLFPPENISWVNIGIEVKRGLLKNIVKYLEWDGKEIKLSLNM

SEQ ID NO: 3312 - protein, 544 aa, unidentified
  source 1..544: note = uncultivated organism
MDENKKIIKCAIYTRKSSEEGLELEFNSLQAQREACESYIKSQKHEGWHLIDKQYDDGGYSGGTLERPALKELLKDIGSGQVDIIVVYKIDRLTRSLHDFSRIVDVLDKQNTSFVSITQHFNTSTSMGRLTLNMLLSFAQFEREVTSERIRDKFAASKKKGMWMGGKPPMGYYRKDKKIYPSEYAARVRTIFNKYIELKSVAKVKDWLDNNGITSQNNKSLSAGNINSILLNRAFLGEVGHKGVWYKGEHEGIIEPEVFNNVQEIMAENRVERKKYSPEKSLLSGKIFDDKCNIMSPVRSSGTKGKKYRYYVSQAVIRHEKDKTGQITKISLPPIENFVDNWFAGNFTSKEHILSLIPEYKVSDQKSVLEKLHDMCISREMERILLHRIDLKESEIILTLYKEQILEFIKAIHEERETKELQTDDLKTKLTYAIKYKIGVIDNGSKVIVGSVYNKNKNKSLINIVLKSQRWNKELLRGAATVEDIVKKENVSARYVYRLLKISFLSPKITTAILEGNQPADLTIEKLEAIKIYDWKEQEKFLNI

SEQ ID NO: 3313 - protein, 576 aa, unidentified
  source 1..576: note = uncultivated organism
MKQLTTGVYVIYSRKSKFTGKGESVENQIELCRQYIAKMYGQVEADTALVYEDEGFSGGNLDRPQFKQMMKDSHKQKFAAIVVYRLDRISRNIGDFAGLIEDLGDRNIDFVSIREQFDTSSPMGRAMMYIASVFSQLERETIAERIRDNMHELAKTGRWLGGTTPTGFSSVGETTVSVDGKARKAFRLQPIPEEITLIKSIFEEFLETGSITKVDQYLLTSNAKTRKGRTFSRYTIRNILTNPVYMVADKDTYDYMSANEVDLYSSESEFDGVHGIMAYNRTLQRPHKGNEIKPMNEWIVSVGKHPGIIPGAKWVAVQDKLALNRSKRYRRPRSHVALLSGLLVCGHCGEFMRPKMTSRHTATGEEIYTYMCNLKERSRKKCCDMKNANGNLLDARVVELVKELGQNSNELGTQIEHSKKMIRSEEKNYIAEIEHVKKRLAQIDEQNRALVDSLTRATGLSAEKLILDRIEELNSEAEGGHRRIEEVEAIIKKHQLADMELDLFRQALQQFSDSVDEYNLEQKRVALRSIIKKVIWDGKSAHVIMFTKSGEVDYSGIIGENGEILACKVPLSDDSE

SEQ ID NO: 3314 - protein, 559 aa, unidentified
  source 1..559: note = uncultivated organism
MPRVSKRTNKEDTQPKVKYYRTYIYLRLSEKDGGHGRRDSIYIQKQICVDFAKIHPEMLVMKVCTDNGVTGTTFERKAFEELMTDVRAGKVDCIIVKDFSRFGRDALDAVDLIDVIFPTLDVRFISVLDEYDSENPACVQDRVTNILKHFMNDYYAREVSSKLIQAHKISREKGEFWGPKPPYGYERAEDNSKKLVPEETERAVVQKIFYWYVFEDMSSYDIARELNAEEIASPTESYEIRKFGKSKRKKKIYWGADAIRRILQNPLYIGAAVNGKTKQMLCENVPLQLLPKEQWEIQENVWEPLVERAVFERAQQLAKDRWKDTLEIWAGNMTAKRGAEGPFLGRIYCGCCGKRMGRSRSGGNERHQYIVYKCSTASIVEGSQCLKRLNEKNVFQAVGDALRYQIQLAADYQTKYGMDFYRKLEKESSQVIKKSKDAYEKYGGKLEQLFEHYATGIIDREEYMEFKETYLLEQEQAHRKLKETQIHCQNILEHLMAKIDWADTLIKCQGFKEITRELVERFIEKVTVNSATEITVYFWFGDIFEQEMLDMEGGLLNAV

SEQ ID NO: 3315 - protein, 549 aa, unidentified
  source 1..549: note = uncultivated organism
MRFAIYSRKSKFTGKGESVENQIQLCKEYVERHYGDLTQHIIEVFEDEGFSGKDLQRPEFMRMRSLIRKKQFDYVVCYRLDRISRNVSDFSSLIEEFAKDKVSFICIKEQFDTSTPMGRAMMYIASVFAQLERETIAERIRDNMLMLARTGRWLGGNTPIGFESASVSKEAVDGKEKTYFKLIPVSAEQDTVRLIYRQYLELRSLSKLETFLVQNECKTRKNKYFTTVSLREILTNPVYCIADESAYDFFTTHDSDICCEKSAFDGKHGISAYNRTTNEGNMQIKNDISQWIITTGKHKGIIEGSDWIRTQQIIKTNMPKKYGGRVQNQASLLSGLLVCSKCGSFMRPRVNSNKRRDKDGNQTFAYLCELKKKSKSKNCNIPNINGNELDKIVCDEILKFDVEGSQINSKLLSLKNSLSSGGSLTQITLEAVRTQIKEKKDLIDDLIITLAKSRDKDENDVVYNHVNEKLKELDKQLRELSKEEYRLSQEIESSGNFENQVDVIYEALKNFSGFFYTASTQDKRAFLRSIIEKIEWDGRNIHIFLFGEQ

SEQ ID NO: 3316 - protein, 543 aa, unidentified
  source 1..543: note = uncultivated organism
MGPSMSDPRLAAVSDGAEATAVATYTRRSTDEEHQRFSIEMQDDRLDKYVGSQESWHLTTTYSDDKSGATLDRPGLQRLLRDARAGRFSMLLVYRVDRLSRSLRGLVHILDELDKAGVAFRSATEPFETATPAGRMMVQLLGIFAEFERATIIERVVGGMERKAARGEWTTGTAPFGYSRAKGEPTLTIDQGEAAVVRRIFITYLKLGLGVRAVADQLNTQGSRSRRGRLWSGQQILNMLRNRAYIGDVFFRGCYRTGLHEPLLERTLFDEVQSLLKERGEDAVVRPTVSDFLLSGRVICGRCQHHYVGVSGHGRWGGRFRYYMCQGRNKRGTRQCTAPNVSAPRLEDAVLDALRQTFVEPLNLERALTAARAELREHQPAYSEQLIQVEAELRKARSQIERYLEAFDAGTLPEAVCGDHLRALAARTAELELRRDQLNSAIDEAPTDPYATVDIDAARKAILHAFETENEPAYAAERADLVRSVVHEIRIESAQAVHTRFRLPVPPGAPGGAPRRDLPPPRPHQPAQGRGSHGVKLGTPGGT

SEQ ID NO: 3317 - protein, 573 aa, unidentified
  source 1..573: note = uncultivated organism
MRSSRPSLAADLSVIKLVRAAIYCRVSSDESLRLEFNSLHAQREACEAYIKSQQHEGWELVSTDYDDGGFSGGSLNRPALKRLLDDVAGDKIDVIVVYKIDRLTRALTDFARIVDVLDKANTSFVSITQSFSTTTSMGRLTLNVLLSFAQFEREVGAERVRDKIAASKKKGMWMGGVCPLGYDPKDRKLVINEPEADTVRHIFNRYLEVGSVLILEEELNRQGTRSKLRVSSAGVTSGGGRFARGALYTLLKNQIYVGKICHRGAAYSGQHDAIIDDATFEKAQALFAMNRTRSGLLPKNDQVALLTGLVWDAESRRLSPTHSKKGAARYRYYATKPDRSDQRPPTRVAAAELEKVVRDRLADLLNDRGAIQGMVAPWAPDAVSLEAILFTAKQLVSRLTEERRTDARDIIRTLVRRIDVLKNEVHISLRPATLLELAALPSEEVKDSKHVEVVVPVRMFRRAREMRLAIAPGASPDDPAKDPALVKLITKAWQARMMLFKGEGSSLRQVAVANGYEPHYFAVLVKLGFLAPDLLAAVLKGEQPQQLTRQKLARIRKLPISWNDQRTLLCASE

SEQ ID NO: 3318 - protein, 555 aa, unidentified
  source 1..555: note = uncultivated organism
MSSQIRCAIYTRKSSEEGLEQSFNSLDAQREACEAFVKSQQHEGWRLIATHYDDGGFSGGNMERPALKRLMADIHAGKVSVVVVYKVDRLTRSLADFAKLVEQFDKFGVSFVSVTQQFNTTSSMGRLTLNVLLSFAQFEREVTGERIRDKIAASKKKGMWMGGNVPLGYTAQDRKLIINEPEAVTVRTIFNEFLRFGNVHSLHEWLCENNIVSRRGSHFFRGPLYMMLRNPHYIGLIRHKKATYPGQHPAIIDRGTWDKVQAVLDENIQGKRRKVRATKESILTGILFDASGTLYTPTHANKNGRRYRYYTSQAVIKKIGKGNSPARIPAHDLENAVVDRMLEWLQTPTQLLAAFRDETTVAPAQGVLSQILAQAATAAQRWPERIAADRTQFLKTVIERVVIQQTHVEIRLRVPALLKEILGGGQTVVGFPPFTSVDCPFRHVRQGRAVRLVVGDTNITTDASRQAILKAVARARRWYELITTGQAKSIRELADLHRISPRFVNEQFKLIPLGPQSIEGLMTRPESIPLSLNDLLNSIPMNWRKQPFSLSAKSA

SEQ ID NO: 3319 - protein, 548 aa, unidentified
  source 1..548: note = uncultivated organism
MSKRVAIYCRVSTVEQAEEGYSIDEQNLKIREYCEREGHEIYNLYEDRGISGKNITNRPGIKQLLHDATNNKFDLVIVWKLNRISRTLLHILNIVEVLDKNNIAFRSLTENFETETPSGKLQLNIMGAIGEFERETIAENVKMGMLARAREGKWNGGIVLGYDVVEIPNDGKKGKNSRLEINEREACAVRRIFELYSQGNGYKSVVNRINKEGYKTKKNNEFAVSTVKEILNNPVYIGKIRYNVRQDWSKKRRNKINPDPIISEGQHEPIIDMETWNKVQVILKERSKKHNKIYDSEFPLTGILKCPVCGAGMTISRSTSKRKDGTKKVFEYYSCGNWKNKGTSVCRSNSIRVEVADKYVINKIMTVINNKSILKKVIDNINKNKSSKLQPTIDELERITNEISKLNSKKNKNIELFEDGILDKDELSTRVKSINDDIDKLKYREQDLRQEVQLAEGEPIPFDMVKDIMDKFKEVFLNMSTSQQRKQLIHLLVSQITMNEKREVDSIEIQINDDVITYLMKDELPKLKGNSSFFHLLGMNNINLKIAI

SEQ ID NO: 3320 - protein, 527 aa, unidentified
  source 1..527: note = uncultivated organism
MITEEYKVGIYLRLSREDERLGESGSISTQRDLLLNYIKDNNLIFVSEYVDDGVSGTTFDRAGFNRMIKDCETKKINMIITKDTSRLGRDHIEFGFYVERYFPEHGIRYVAVNDGIDTANNSSANDMLVFKSAFNDMYVKDISNKLRSSLYVKKKNGQFVGAYAPYGYNKSIDDKHKLVINEEEANVIRRIFHLFASGLSVSKICDILTNEKVPTPSMSKNMNIGQNNLHYGIWSTRTINDILKNSNYIGNLAQCKQKKINYKSKKRVRNRQDNWIIVENAIPKIIDDDLFNLVGNMFKSNKNRIKGKGITDNLLLRGLIYCKECGHTFGFRAQYQNTQKYGKVCRIYGNCNYWAKRKNQGVCTPHNVKYNEIEEVVVSELKNMCNKYIDLKKLEDNLKNSNKLQVNIDKCNAQILKLENSNKILNKKIDACYNDKLDGNITLDMYKRAYNNFINEIKANENKIAEYKKEIYNIENNKTQDDKSLMNTIEKFLSMENPPRSLVASLIDRIEITEDKTVDIYYKFKLV

SEQ ID NO: 3321 - protein, 559 aa, unidentified
  source 1..559: note = uncultivated organism
MKKIRCAIYTRKSSEDGLEQEFNSLDAQREACAAFITSQKNEGWVLVPDAYDDGGLSGGSLERPGLQRLMADMRSGKIDRIVVYKIDRLTRSLADFAKIVDVLDEAGGSFVSVTQSFNTATSMGRLTLNMLLSFAQFEREVTAERIRDKIAASKKKGLWMGGNVPLGYVPDGRTLQIKEPDAQIIRTIYDLYKQHGTVRDVKEQADRLGLKTAIRTLSSGRLKGGTPFSYGHIYHILTNPIYAGRIRHKANVYPGQHPALIDPAHWDTLQDQLMGRSATNRAGKERGQGRGGRKQISLLTGKLFDETGDRLTPSHTKSAKGHRLRYYVSHRLIRSKGPKDPSGWRLPAPELEALVAKLISKHLSAPAVMANIVSDTTTEETAAIAKRLTEIAGSEVDGHSEIRSQIILLAQRIQIAPGGIRISISENGLAVFLDVDPERVSEEYLEIEAAFQHRKRGVETKLILADEASPRDETMFKNIAKAHRYFGMIRSGKTYAEIAAAEGVSRHRIQKLVDLAFLAPDVVRDVFVGSQPTGLTTEWLLRHAIPVLWNEQREMFRAL

SEQ ID NO: 3322 - protein, 566 aa, unidentified
  source 1..566: note = uncultivated organism
MPDTENIITVAIYARKSKFTGKGESIENQIQKCRKYMVNFLTREKDDGRLDAKTGIRFIEYKDEGVSGKNMERPMMKKLLSDMEGGGIQKLVCYRLDRVSRNVKDFAELFEILTSLGVEFVSVSESFDTANPMGRAMISMSSVFAQLERETIAERIVDNMMALAKTGRWLGGKTPLGYVSKKVEHCDESGRKRSHFRLVEVPEEVEMVGLIFAMYLRLGSLTKLETYLLNKDILSRNGKPYGRYVLRAILSNPVYCTADSRAYQYLFKNSYGIYAEEALFDGEHGLIAYNKNNNRVRGQRVNDVKDWIVAVGEHKGLVLSELWIQVQEHLKRNAGLSYRYPKRIGALLSGMLRCGSCGSYMRPKGGRTAQDGQIRYYYQCECKERSRGQKCKMPNLSGNVADEMVVNRILALKKQFVTEYSCLESVFHKLEKNSFRETEQNFLKRQMEENEKQTGKLLDALGRSKNEATSDMILAKIDEMNQRQEKLKKQCEVKKENNLMDTDGFHCELLAADLLSLNKAAWNLLSPSTQKDILRKVVREIVWDGKYATIYLFAQSNEPVQRILNF

SEQ ID NO: 3323 - protein, 523 aa, unidentified
  source 1..523: note = uncultivated organism
MPKVAIYCRLSIEDKNKPASDNSQSIVNQKSMLRDYCHERNWEIYDIYCDDGYSGIDRSRPEFNRLLSDCERGVIDIVLCKDQSRFSRDTIVIEQFINDKFLEWGIRFIGVTDNADSDSESYSTMRLFTSAYNEMYVKDISTKIRRTLAHKREQGQFIGSFAPYGYQIDSADKHHLVIDEETAPVVRLIFEMYANGEGYRKIVQKLNEEGIASPTEYKRLKGSKYVNSNAESSNARGLWTQSTIARILKNEMYTGTLVQGKSHHISYKNKKRKKVDKDDWVRIHDAHEPIIDADTWSRTQERLNSHTRVGKGAQELSPLSGKVRCAVCGRPMKRNVYYNKAKTIKYYGLQCATYKTGAMNCPNKATISGLVLEQKILDELNTIIDNYCQTDSIQLTDIHTEQLNTLKKKLSALNDRLSSAKERLVKMYKDKLDGVISDEDYLLFRESLSDEEKALSVQISEVTNKIAECQSQQKNTIEPKALIEKYTHFERLDRNIADEFIEMVEIGVKDENGEREIHIHWKI

SEQ ID NO: 3324 - protein, 517 aa, unidentified
  source 1..517: note = uncultivated organism
MADVKVIPPREKTPVTLRVAAYCRVSSDSADQKHSYAAQIRKYTEEIGGHDGWKLVDIYADEAVTGTRMDKREDFNRMMSDCRKGRIDKILVKSVSRFARNTKDCLATLRELMSLGVTVYFEKENLNTETLTTELMVSVSGALAQQESISIGQNQRQSYKRRMERGEFITCKAPYGYRLKDGKNLEICTEEAAVIRMIFARYLAGTSTEDIAGELTAMGLRTRDGKEQWNVFSIAYILRNEKYIGDTLCQKTLATDSFPFVKKRNEGEKDQYYVNVTHPAIISQDDFERANRLLQRRSAAKGKAKQYPLSKIIYCGQCGSIFSRKETKSGYVTWACRTHNYHAQDCSMGRIPEAEIYAAFARMYNKLKRHEDIIHKPALAQLRDLNDALQRGNPAMLAVNRAIAEESERSYKVNALRAKGLLDAAACSAKLLDIEAKLTELRRERRRLLKNEDIEEVVDTLRQTADLIHSGPERLERFDEVLFADLVEKITAESTTRLLFRLYGGIELTEVCREVRR

SEQ ID NO: 3325 - protein, 546 aa, unidentified
  source 1..546: note = uncultivated organism
MVIFIYSRKSKWTGRGESVENQIAMCRDYIQRNIDGAGESDIIEYEDEGYSGKNTNRPRFQEMMQEIRNGGCNYLVCYKLDRLGRNLADLANLVETLNKLNVSFISIKEQFDTSTPIGKAMLYFAGVLAQMEREQIAERVRDNMVMLARKGRWLGGNTPLGFTAESEERVSVNGKSKKSFQLAVDETELQTVRFIFKEYLEKQSLMGIVKYFLSHGIRTKRGNEYTTTAVRDILANPVYCTADQEGYQYFWDLGCQVCMEQEEADGTCGLIAYAKTSSARYKNKSNSPEKWIVARGRHPGVISGQDFSKTQNLLAENSPKGEGWRKPQNPVALLSGILQCSCGHLMRPKNYSSKQVTEAGERKFSYLCPYKAMTHGEKCAMPNIQGNTLDSLVCREVLRYTEENSSICRILKKGIGQAKETKGSKATAESFLVQEIQNRKKEMQNLVSVLAKSGGEGAFVRQIGQEIQNLDKECALLEQERAKLREEGESIQGSGQQAELLFPQISSFCNLFNALTVSEQREYLRMVLDKVVWDGEAAHMFINGCH

SEQ ID NO: 3326 - protein, 578 aa, unidentified
  source 1..578: note = uncultivated organism
MEDKEIAIKNDSRKYAIYSRKSKFTGKGESIENQVELCKQFLNTKFEGIAENEILIFEDEGYSGKNTNRPEFQKMVKAIRNNEIKIVACYKMDRISRNLSDFVAMYDEFQDYNVEFISKNDNFDTSTSMGRAMLQITMVFAQLERETIAERIRDNMRELAKSGRWLGGTTPTGYKSTQITGSVTFDGKERMAYKLDIIPDEAKTVKLIFSKFLETKSLTQVETYLMQNKIKTKNGKDYTRFSVKSLLTNPVYATADKTMLEYCNDKGISVYADENKFNGQYGIMAYNKTAQTVGKANKIKDFSEWIVAVGKHKPLVSSKDWITIQTLLSQNNSKAYRKPRSNVALLSGILHCSKCGAFMRPKLTQRKNADGELIYDYLCETKEKSKGAICDCKRVNGNKLDKAICDEIKKLTFDQSEFTTQLNSMERKLTDSVKEYRNNIASLEKALNKNNKDIERLIESITSSDNSPADNLIKDKINKLSEENEKIENQINENRIAIDNQNLSDLNLEILKSTLEQFSTTFDEMSIEQKRVALRTFIKRIEFDGEDIQVYMNTDEEFEINNEEVSANVKEPLRVDSE

SEQ ID NO: 3327 - protein, 540 aa, unidentified
  source 1..540: note = uncultivated organism
MKRLRCAIYTRKSSEEGLDQAFNSLHAQREACEAYVLSQAGEGWAASPALYDDGGFSGGDMNRPGLARLLAEIDAGQIDVVVVYKVDRLTRALGDFARIVERFDKAGVSFVSVTQAFNTTSSMGRLTLNVLLSFAQFEREVTGERIRDKLAASKSKGMWMGGVAPLGYDRPTDLTTRALVVNEVEAETVRRIFCRYLELGSVHRLVSWVREQGIRSKAYTTLKGQDRGGAAFSRGALFYLLRNPIYRGEIVHKDRRHAGAHPAIVDADLFAQVQASLASHIGERRVRVVKSGASPLSGRLFDACGVAMSPTFSQGRTGRRYRYYVSSTLQQGGSAPQDGVTRRITSAALEALLSERLQALLGEGLDRSVASGALVRVDALPDSLALTFKASLLPHGKVDPQAAFAATEKRLRADERLWCDPGQPEHVRLSIGVSPRLAGGRTRYLGVRGHRATASVRRDPVLIRALRTAHVRTADLLDPATAIAPVTSQYERNLLRLTCLAPDIQRAILEGRQPEALTLQQLILGDLPTDWASQRRALGF

SEQ ID NO: 3328 - protein, 541 aa, unidentified
  source 1..541: note = uncultivated organism
MKQKNYIAGLYLRLSQEDERQGESVSIDNQRTILRKYAEDKGFEIHDEYIDDGVSGTTFDRPEVQRLLDDAKTGVINTIIVKDLSRFGRNYIEVGQYVDYVFPAFGIRFIAIQDNVDTENRDSGAMEMMPIMNVFNEWHAANTSKKIRAVLRANAKEGKYHARKAPYGYVKSKGEKKIPIIDEEAANIVKRIFEMRASGISPHKIADTLNAEGIMNPSRYCLEKYGIVGRRDNVGLWSFCGVNSILQNPAYLGHMVQQRDGTVSYKNHKRYIKDESEWVIVRNTHEPIITQELWDKVREVEKSVAQGRKTKRGYTHPLSGFLYCADCGGKMKMNSIVRNGKVDLNFNCGNHARLGKSYCFSHFIQAKDLEAIVLEDIRDMARRVVLDEEKVREEFLQHNAELAESAIKSAQKELKSKCRRQEELSRLMQVAYEDRVKGKIPEDICIGFIEKYSAEQKTLKAEIEAIEEKVVQTEMAKQSVDDFVSNVKKYLDVPELTREMCYELIDRIIIGGHPKHTGKEREIEIVYKVDIASVLRYKLNQ

SEQ ID NO: 3329 - protein, 521 aa, unidentified
  source 1..521: note = uncultivated organism
MIRSTTEGAETNTIRCAIYTRKSTEEGLEQEYNTLDAQWDACESYIQSQKSRGWITIPTHYDDGGFTGANTDRPAFNRLMSDVKAGFVDTVIVYKVDRLSRSLADFANMMEIFDKQKVAFVSVTQYFDTSSSIGRMTLNILITFAQFEREMISERIRDKIYRSRVKGKYMGGQPVLGYDVIDKKLIINDHEKFQVRKIFDIYLNNRSTREIVDLINGWGWTTKRWQTKRGHMAGGKPFAPQIIYTILKNPIYIGKIRHNKNVYEGEHEAIVDPDIFASVQGLLKKNSNNLTNTNRKQFSSILNGILICSHCGSKMMKTYTSRPNNIYSYYICLKVVKYGRRACANPSVPSTKVDEFVINHIKSLSRDPKLIAAFLDEFDHQKASKVSGVNGEIKVLTVKLAQHHLEKERIALDRSLSKFDSLDNIANNIEAVSKQLRRLESQRAALDSTEMNAGEITVILNQFFPVWDKLTIKEQFEIMDHIFEQIFWDGKQKSMDFQYSPLGLKLLYDRKVLQDESLQAN

SEQ ID NO: 3330 - protein, 513 aa, unidentified
  source 1..513: note = uncultivated organism
MPQVTLISPITKQSVAKKRVAAYCRVSSASADQQNSYSRQVRTYTKLIESRKDWELVEVFADDAISGMSAEKRPDFQRMLQMCYQHKVDLILTKSVSRFARNVKEALEIVRQLKRLGIGVQFEKEGINTLSLGDEMLLNTFTAIAQEESKAISQHQRNSISHRMDRGEYVDNNAPYGYRTQDKKLVVYEPEAEIVKEIFKAYLSGQSTEEIARNLNARGIPTKTGKERWRSKQIAYMLSNERYMGDCLYQKTYRDTTVPFKQYKNRGQEDQFYAKGTHEAIIAPEIFEQTKQLLLKRHADHSRTVCFNIYPLTSRIRCAECGSIFYRKVTGGCIKWVCSRHKNDFAACDSNYYSEERIYDGLVAMVNKLRFGCIDILGTVIGKLELADTLYKKNNTLAAQISQTIAELNSKRLMLEQLHAKGYLAPEVYESQLRALNIEINEKKQTRLSTFESRIQDMLEKVRKLKSLIWEIEEPLETFQDTLFAEIVSDITINRRDEMTVTLLGGMRFTEWI

SEQ ID NO: 3331 - protein, 560 aa, unidentified
  source 1..560: note = uncultivated organism
MVEAKNIGGIEQAPRVGFYTRISTDEDHQKYSLGAQSERLEAFCRAQYGDDWRLHKIYRDMESGIHMNRPGLEEMIFDAEARAFDVLLVFRVDRLSRKVRELAQMVDELAKHGVILKSITEPFDTANAAGKMMLQMLGVFAEFEHATIVERTKVGMEKKAKSGKWVGGVVPYGYQLDPEKGLVVKEEEAIVVRKMFQMYAFGRQGVHTICHMLNEAGYRKRTGHAWDKRVILHIIKSPVYVGKVRWRDAIYEGTHESVVSEVLYDKAKGILKDRAESLSGRRFDNGDERLLAGVIKCSRCKSHMVGVSTHKKDRRFPYYLCSKRWNTRECDQDYIRADHVEATILQDIKAMFRDEPFIARVREEANKRLVAAKPDLEKEIAWLENQMTKAQGAIDRYFDAFETGTLKAELCSEKVGDLNTRLVGLEAEKRDLETRRARLELPSIDREMLTALIDNFDQVIAAGTNPQKKHLLRRVVKKVLVHDRNTTEVWYALSPPPSVHTPRDLMAESAIRRHFGTLSSAEIDELAEGVADLIVSFLKGTGTAAAGDSKRKGVGDEKKA

SEQ ID NO: 3332 - protein, 522 aa, unidentified
  source 1..522: note = uncultivated organism
MVSTGEKNKAAAYCRLSREDGDKPESDSIINQLHAIEDFCKRNSEFELIDTFADDGYTGTNFDRPDFKRMLAQIEAGKLDCVIVKDLSRLGRDYIDVGFYLERFFPSKGVRFIAINDGVDSGRGAYDMLLPLKNIFNAQYAKDISNKVKSAFRTKQSRGEFIGAFAAYGYLKAPADRNRLVIDSAAAATVQRIFRMAAAGAGKQSIADTLNADGIPSPGEYKRLMGTKYRNSSEETQTRRWTYAAVDKVLHNKVYLGDMVSNRRSRATMHGKEQSNDPSEWIVVEGMHDAIISHELWETVQAQIGRNARTSAKTGTSDLFAGFLYCGDCGSKLTKTTWNKDSMYCCGAYQRYGTDACTRHYISEREIYRIVLQDINKVIRCVKNIREIAEQSRAPDLTQSLGEKEQKQLEAALDRVRGLKQGVYEDYKDELLSRDEYLRYRADYDAQERTLEVQLEAAKRRTPPADISARPWVNRLLQHRELDELSRVIVAQNVKSIRVYENARIEITYRFSDKLGAIIERY

SEQ ID NO: 3333 - protein, 544 aa, unidentified
  source 1..544: note = uncultivated organism
MTFASQSPGALPKHAVVYLRVSTGRQAVGDVSIPSQRELTRRFCVAQGWEVVDEYIEPGASATDDRRPVFQRMLEDARSGERRFDVICVHAFSRFFRNGAEMELTIRRLNKQGVEVVSVTQPTGDDPSQQMMRQIIGIFDEYTSKENGKNVSRAMRESAKQGFWNGATPPLGYRIVEAERRGSKVKKRLAVDPVDAETVRLIFKLYLEGAGTSGPFGVKGVAVWLNSQGYRTRSGATFGVGPVHNILTNRAYATGKWPYGRRNSRTGGLHNTSNIIEIDIPWIIPMDVFEKVQARLTSNNPKVTPARVVNSPTLLTGLAVCATCGAGMTRTGTRRRHRSYSYYSCAGCQQKGKSVCSGRHISMAKLDSLVVENIKDKLLQPERLSHILEALMERKAARNEGVAARQRILEAELSQVGEKLARLYGAIEEGVVKLDSDLTERIAVLKERRNVIESSLGRIRVQAVNAAQLTPERIADFGALMRRRLDEGDVHARKAYLRSVISRIEVDDDKVRIIGEKAALADVIAGRSRAAGDVRGFVRKWRTR

SEQ ID NO: 3334 - protein, 553 aa, unidentified
  source 1..553: note = uncultivated organism
MSSPATRVALYTRVSTDMQAGKDEGSLDTQEARLRAFLLSRPGEHEVRTVFREEGASGKSLDRPALQQLMRAVERDEVDLVVVTRLDRLSRSLLDFYELHRLFEKHTVRFVSLNETFDTSSPVGRAMLKLVLVFAELEREQTADRTRQAMQARAERGLWNGGSPPLGYDSQGNGHLDINAHEAELVRLIFDKYLELRSAPQVAGWLNEQGHRQKRFTSRRKGETGGKRFTPASVRLLVKNRLYLGEITHKGEVFEGQHDPIIERDDFDRAQNVIEGNAKGRRGPPLRAQHDYPLTGVAQCACGYALTSSAGTGRGGKTYFYYRCVGLQKNVDHPCEVRQVRAELLEDAVFSVVREAARDPQLLAEAVEEANRMARDTVDPLRQRVDGLRRELAEVEAEGQTTLRQVLTSGVSNSDLARSLLADIEARRDGLRAALATAEGELAGKEAEQLDLELVTQAIQGFDSAFEHLTAAEKREFLQLLIHKATVHPDHVEVALYDGRHANRYLQQATRNGVLIGPRVGESQNDNGHEPVQRFVAGEEWLRLLDLNQRPSG

SEQ ID NO: 3335 - protein, 519 aa, unidentified
  source 1..519: note = uncultivated organism
MSSKHIAKPAVNKNYRCAIYTRKSTEEGLQQEFNSLDAQREAGELYIRSQKHEGWECLDAQYDDGGFTGANMERPGLRRLLADIAAGKIDCVVVYKVDRLSRSLLDFARIIEIFDRHQVTFVSVTQSFNTASSMGRLTLNVLLSFAQFERDMISERTRDKMRAARRKGRWIGGKPILGYNVVNTKLVIDPLESLRVQDIFNLYLEMKSTLQVARLLNERGWRIKEWTTKKGKTIGGGEFNKNKVTAVLTNATYIGKIEYEKQLIPGLQEAIVTQDVFDRAQDILKQNSRMKKDMQRSRHNALLQGMLRCAACDCGMSHSYSKKGSKLYRYYVCHKAQKQGWDSCPSPSLPAAQIEDFVIDQIRLVGQDPGVVRDTLAQTRIQTQTSVERLKKEKNALERAILGHYERLNQTIADGANESAFADIQDQIREKEQRASEIVDEMTSNSSLLIDESDVQDALGRFDEVWAVLTPAEQAKAIHQIVDSIQYDGHSKELSISYHPFGIRTFNQEHQSNVGAATC

SEQ ID NO: 3336 - protein, 555 aa, unidentified
  source 1..555: note = uncultivated organism
MDSLKIAVYARKSVSTEKGDSISNQIETCKNYAVSVLGADKSQLTIYQDDGFSGKNLARPQFQKMLSDIESGGYSHIICYRLDRISRSVADFSGLVKELQDINVHFISVKEQFDTSSPTSKAMMYISAVFAEMERETIRERVIDNMTALASTGRFLGGKAPDGYIKQKVDTTDLTGKKKRHNILVINKERAAQIQDIFQKYLDWQSIKRIETYYLQHSVYNHTGHPYSCISLRRILTNPCYCRADEKAYNYFKELGCKIMMPIEAFDGSYGITAYMRHKMIINKQNKKQTADKPIDEWLIYVGFHKPLISSSDFIKTQEIISKRRFFTIRKPIGTNGILSGMLKCKNCGSFLRPSNVTIDKNSYYNGKRFYYICENKSKSARHNCNIKNIRGDKFDFEIISQIESLLCNTFEIAKTLNKLKNNRTKYSTDTETTKKILNAEIIKKQQSVSSLIIKLQSADEVLQKYISKQVNDIDKEIQELNIKLENIDKQNFLINKEKIKPKKIDTIINDIKSETLLHQIKEPEDMLVIRCMLKEIIDTVIWDGETAIINFKKL

SEQ ID NO: 3337 - protein, 550 aa, unidentified
  source 1..550: note = uncultivated organism
MARRIRCAIYTRKSSEEGLDQDFNSLDAQAEACAAYVTSQKAEGWVLVPTRYDDGGLSGGTLERPALQRLLADIEAGLVDQIVVYKIDRLTRSLSDFAKIVDRLDAAGASFVSVTQSFNTATSMGRLTLNMLLSFAQFEREVTAERIRDKIAASKKKGLWMGGTVPFGYRPDGRSLKIDEAEAPIIRHIHDLYCQLGSVGAVAEEAENLGYRTRARPSVSGTRAGGTPFSRGHVYQILTNPLYAGRIRHRDKVYPGQHPAILDPAAWDALQERLAAEAARSRGHANAAERSPLVGKLFDETGDRLTPSHSQKNGKRLRYYISRRLVTDKRQKHPDAWRLPARDLETGIARILRDYLMKPTVLTDLIRDLSAAEIPGLQEKMQHVANNCDPEGSADLWAPLLRRADLEQGSILLRLDRKVLTERLGIAADRIDSAARQISASFQMQRRGVEARIVLGAAVPQVDPVLAKNILMAQRWYVAIKAGASFGDLATKEKTTTSRIQQMIGLAFLAPDILDQVAAGRQPVAFTSEWVKRRQLPARWDQQRQIVGGL

SEQ ID NO: 3338 - protein, 533 aa, unidentified
  source 1..533: note = uncultivated organism
MSRTQSITTPRVRCAIYTRKSTEEGLEQEFNSLDAQREAAEAFIVSQRHEGWTVMPQHYDDGGFSGGTMDRPALERLLQDVENHRVDCVVVYKVDRLSRSLLDFAKIIEAFDRNGVSFCSVTQQFNTSTSMGRLILNVLLSFAQFEREIIGERIRDKVAAAKRKGKFTGGTPPLGYDVDPEKTRLVINPDEARLVRHIFKRFAEIGSPLTIADELNKKGITTKAWMTKKGVFRQGNPWNKAHIYRVLYNRTYLGEVTHKDKTYPGEHEAIVTKDLWERAHSVIENNKRHRSQHVRAKAPALLKGLIRCGACDTAMSPVSTGTAHKNYRYYTCGRASKTGHSNCPVRSVPAGDIEGAVVQQLRSIFRSPEMIAQTYQATRELEAEELGQLRAERTELESRLTELKQAASRLLDSGSSDSETNDQIRRTNDEFIDTQRRFRDVDDEIQGMEARLVSERDVAESLRRLDPIWDELFPLEQSRIVQLLVERVTINVDGMNIRIRGNGLHSLVAEVRGHVLSAAEGTARQHERSHIQC

SEQ ID NO: 3339 - protein, 505 aa, unidentified
  source 1..505: note = uncultivated organism
MPFTLHDMSTTSNKPSRMDQYVRVSRVGGRSGESFISPDLQRDQGVAWAASRSVEIPMIHEDLDQSGGKLDRPGLDALMARIRAGETDGVIVSKLDRLSRLGVADALRLVEQITEAGGSIAALDLGLDPTTPFGEFGMTIMLALARMERRRMSEAWDHAKTRALDRGARMGPTPFGYTRDDDGLLVPHPKWARVVKRAFKLAADRGVDAALDYLHKQVPAYPSAGRPGVRRKRSANHRTWNPFTVRRLLRNRTYIGETRYGDRLVRDSHPALVDRVTFERAHPGEERPKRRPAAVFPLSGFATCANCGEVLIGARAGVTPDGRGKRAYRCRASLASWKGERCGASTNVLADLLENYLVERIKQAYEQGGTADVAASVADTDDTFEDVQRELEAAESEVERFAADPTAAELLGEAAWTAALRTRTERAEAARAAYREHVDAMRTADIVIPPIELLDSLAPEELTTVLRSVFQSVRVSRGRGPLSGRVELTFHGEPLAGVAARQDAT

SEQ ID NO: 3340 - protein, 514 aa, unidentified
  source 1..514: note = uncultivated organism
MQNPQLNIPTAKPVPPVFIAGAYTRISSDGRPDDSSIENQIKIAEDFIAKQTDIKLYKVYMDVGISAFAAMRPGFEDKLYDIESKTINCVIVKDISRFSRDFLEAGDLLQKKFPVWGTRFISINDDFDSLYSDATKMQMALRTLLAYEYSQDLSRKVRSAIALSHSTGTYTPPRLPYGYKTVRTKEIVQWHLDEATSKIVEAIFDSAAKGESTYSIARDLNAQSTPAPQSVYWTPGSVLRILKNEVYIGTFITGKTRSNFMTGHKVEPIETDKWIRHKYHHPPIVDDIKFYKVQKELEKHVATVKERAKRDDFFCGILYCGICGRKLKQKKAGNGAIYYVCPRKDESSSCSNKARNAEKLKKLVYEHIRNKIDEVQAYREKMLVYEQTPYFLHWLKEQNRQLEALRTESERQMEILMHVHEANSLKGRNKVVDAQELFRHLTLVRKNLSDNISAIERSTGRYWQDESSKAAFLQPFMKYVDSSCITQEMVQTLTEKILVNAEGVDIAFKKLLIL

SEQ ID NO: 3341 - protein, 529 aa, unidentified
  source 1..529: note = uncultivated organism
MAETHAALKGWELVSIYEDAGVTGKKEDRPGLQALMDEAKMGEFDVVIVRDLSRFGRSARDLLNNAKSLMDHGIIFVSLKENIELDNSNPYSQFLFQILSAVAELEHSMIYERMRDAKMSKWREKRMFNGTPPIGYAWNKQTHVIEVIPEEAAVYQRIVTEYLDLGKSIRDIAIGLKRDAVPTRLGGNWSVTAICQFLRNPAYYGIITATARQFDGNGNIVSSEDIVYEAPPLISKSRWDEIQNRLESARQRSGRPIVGAKQFLLYGMLRCGECGGKIVPRWGAKRADDSKPRYYACHWRGCGKNQRELAGREKCSLPMIPAEKLEGYIFWNHLMMRLGLNKETYYVPALELGNWDRKIETAQQKLEQLQDQMKKKRIALKNVDSLLEDPDFDANTFKGKRNGILAEIHVLNQQIEDAASEIERLNQLLEEEDLLAKFAKDKQGALKEAHKRLVTLPDEGKQRLLRGMLAGPIVIKHPSPEAKLDDGPLMAWLDFSFRFNPTILKEILNDGTSNENRQSAYNGHGRYAP

SEQ ID NO: 3342 - protein, 541 aa, unidentified
  source 1..541: note = uncultivated organism
MARKSRKNVETVAILEPKRVFYNAAAYTRLSSDDKIKPGDSLKNQYDIIENFVAAAPDIRIVETYTDNSATGTNFDRPAFQRMLSDAQSGRINCIIVKDLSRFGRNAIDAGYYIEKYLPALGVRFIAVTDSFDSNNDDGGILLPLKNLIAESYALDISRKCKSVQRQNIRDGRFVGRMAPYGYAKDPEDCHHLVVDPEAAAVVRQIFHWAEDGMGAGEIVRLLNENGVLPPSRYKWEKGLITNEKLLGKRYWEKRAVAGILADQVYIGDMVQGKSRTIRGKETLTAPSEWVCVENTHEPILSRNQYKRVQDLLKQAAQRDAAVRSDAVPYSSAVFNGKVFCAHCGHPMHRHRQNKDGIYWYRCESQWKYHKGACYQVSVKEAELKTAVMDVLRENAASISGGTSYLERESGGAMSEVCEARLREISRQLQSNGRYLKSLYENMVSGVIMTEEFTSMKADYEAKIEALSRQADELRQQRREREAAIHEANDMAYAVSRAVHESKLTAEVVDKLVEKILVSRDKSFEIQLHCCDGFEEVKQVG

SEQ ID NO: 3343 - protein, 557 aa, unidentified
  source 1..557: note = uncultivated organism
MMKKPINKVYRASIYLRLSKEDGDVTTGSKNESNSISNQKSLIMDFLKDKHNIQVVSIREDDGYSGVDFNRPSFQLMLEDIKKGIIDCVIVKDLSRFGRNYIEVGRYLEKLFPMLGVRFIAINDNYDSLNTDTAHDIVMPFKNLINDSYCRDLSVKIRSHLAVKRKNGEFIGAFACYGYLKDPENKNQLIIDTYAGPIVQDIFKMKINGYSQYRIADILNEQGILSPMEYKRSMGVHFETSFKVNPKAVWSAKAVSRILTNEVYTGVLVQGKQTTPNHKVKVRQAVEEKDWIRIEQAHAPLIDSYLFEIVQALLERDTRTSPKADSVFPLAGLLYCGDCGQPMVRKTTTYSLKNAGDFPDKKYAYFVCQGQSNDKACSWHRIREKELLDAVLQAVNLHISNVLNTEKALEDIEAAPSVQFFIQKYEGHIEKKEVELAKAEKLKVGIYEDLKDGLLDKAEYLKLKQEFDQRIQDANGAIRELRKEILALSENHSKHYAWMDYFKDFGALKELTRWAAAITINRIFVYEDNRIKIVFNFEDAFEQAQELLQGLQVKEVE

SEQ ID NO: 3344 - protein, 550 aa, unidentified
  source 1..550: note = uncultivated organism
MVDKPIRVAIYARVSTQEQAVEGTSLDYQAEQLTAYCQAQGWTITGKYVDPGFTGKDGERPGLKRVLRDAGLGLFDKVIVFKLDRLARNLRLMLEIEDKLKSKGVSLHSVKESLDTSSAIGRTVFQVLGLTSEWERDAIIERTRSGRIQRYKEGRWAGGKPPYGYSYNKDTKKLVINETEARVVRKIFEKYNSGSSLGAVADMLNRDGIKPRYKTGKGWRPTAIRQVLINPLYKGMQIVNRHLHISDIRKVDMSKAITISVPAVVSEQTWEQAQKHLDDHKRVRPMRDEQWLLQGLITCGLCGLSYQVLEQSSNRYYRCRGKLKIRHLDGSPRCTNKNLKAKCLEEAVWSRIEEIVNDPNKLQPMIEETIKDLKIREEELQASLLPINKRLGDIANQKSRLADEFVIKNMNPDKFKKLQSDLDKEQARLRSLQSDIDPEQITELETTQSMLRLWESQLNAMKWNPENEDGSMVKLAERPHKLALNIIGLGDKGLTDTLGFPATKREILDKLQVKVIVFPGRAEVKAVFPIAPIYFGQKCTSNLGEGELFF

SEQ ID NO: 3345 - protein, 525 aa, unidentified
  source 1..525: note = uncultivated organism
MTKKIRCAIYTRKSTEEGLEQDFNSLDAQREACESYIKSQKHEGWSILTKKYDDGGYSGGTMDRPAFKQLLQDIENDEIDIVVVYKVDRLTRSLMDFSKIIEIFDKHNASFVSITQHFNTTTSMGRLTLNILLSFAQFEREVTGERIRDKFEASRQKGLWVNGATPYGYTKDEHHILQPQQPFADNVKFIFEEYLKVKNVIKLKESLNQKGILSRTGKPFPKSNLYRMLANKVYLGKIPHKNKVYDAQHLPIVSEELFNAVQNLLLLNATERKHTTNAKVGTLLSGLLYDDKENLMSPTYSKSGNKLYRYYISQALKDPSRYERGEITKISAGEIEKYVKDDLTKLLQDTLFIQKYLENYSIEQQTSILNTMHEFSPDKVFIRTVIKRVDLNLNLIKIRYNINYIIQYFATLAFNAKFTYTPEDEQIYTREQNVRISLTPQKQNKIIIPGKANYDMKLIQAIVKSFWYNKLGAERRLPPEARNGNNKRLRKLRFLPPEIIESIMNGTQDPELNVKKLIAMAEARI

SEQ ID NO: 3346 - protein, 502 aa, unidentified
  source 1..502: note = uncultivated organism
MTGTAKPARRVVAIYCRKSTEEGLDREFNSLDAQRQSCEQFAASQSHEGWVVSPERYDDGGFSGGTTDRPALQRLLAAVEAGDVQIIAVYKLDRLSRSLNDFVGLLQKLDAKQVAFVSVTQHFNTATPMGRLMLNVLICFAQFERENTIERIRDKVAATKRMGRWCGGTPSLGYDIAPGGRRLVVNQPEAEQVRGIFALYREQRSLTATLEQITARGWRTKARTSASGRAHGGSPFRKSSLAHLLGNILYTGRICYRDEIIAGEHPTIVDLATYEAVQQQLASQARSGGAETRTRHHALLRGLLACGPCGCGMTYCYSRRGAKLYGYYTCARSRERRAESCPMPSLPAAEIERLAVAEIAAICQDRTLADGVIAEAGAQHDAAVVAIRTRLTDTKALAAQAAAAAQRDPGDGSHMALLRQADSQVAAARIALIAAEAGDPRTPGARRVLARFEPVWAELAPLEQVRLLRSLVERVTIDGHAGKLAVTFRAAGIAALANRSVA

SEQ ID NO: 3347 - protein, 538 aa, unidentified
  source 1..538: note = uncultivated organism
MDKKKVRCAIYTRKASEEGLEQDFNSLDAQREACEAYIKSQMHEGWILLEKQYNDGGYSGGTMERPAFKALLKDIENDKIDIVVVYKVDRLTRSLMDFSKIIDVFDRHETSFVSITQQFNTTTSMGRLTLNILLSFAQFEREVTGERIRDKIAASKKKGMWMGGKVPLGYIKEDKKLVIHKEDAKRVQMIFDKYLELKSVPKLMQYLKENEIKTKTDKYFSKGQLYHLLVNKVYIGKITHKDKVYEGEHDAIISEEIFEEVQKLLYENKVDKTCGTKCSANSLLAGLIFDDKNNLMTPSHSNNHKRRYRYYVSTALKNYNDGEVGTISKIPAGEVEKFVVETTKEFLQDKEQVQNIISEYKISKQNKLIYTAQNIKDYSEPKLIRAIIHKIIISKNSIEITINANSLINVLNALTSNQKIIVPDRNEKFNPITITKKIKITQPSRNDNILILNAKEYNTPEPNPYLVNAIVKSYYYHKQIRNGKTIDDLQTEEGLKDSKYIRNILNLKYISPELTEQILTGTQSKDLSLNKLIEKYKF

SEQ ID NO: 3348 - protein, 587 aa, unidentified
  source 1..587: note = uncultivated organism
MSRDQQAALRCAIYTRKSSQEGLEQSFNSLDAQRESCEAFISSQRHEGWRAMPTRYDDGGYSGGTMERPALKRLLDDIAANKINVIVVYKVDRLTRSLADFAKIVEALDAKGVSFVSVTQQFNTTSSMGRLTLNILLSFAQFEREVTGERIRDKIAASKKKGMWMGGLVPLGYNLEGRKLVPNPKEAELIVKIFSLYLELGCVRKLAERLDRERMRTKVWRTRTGASLGGVVFARGALYHLLRNQLYLGEIRHRDQWYPGEHESIVPRVLWDRVQAQLNSNLKKRRSRVREQASSLLTGLVEDEHGTRYTPSFTVKRGRRYRYYVSQLAIKNRVSEGVGPMRVPAQELENRVMEKLLAFLKSDADVFDALNLADESPSVASRLVTAAKHLAMRLPSMSSQGLGELLASFVWRITLHENKIEIKISSKELHLLLEGRGKISSASFPVKNPVAPSDLINLTVEAKRKRCGGEVHLVVPPRSNVSREHPKLPLIKAIARAHGWYEKVVQGKAFDMRSLARDAGLTERYVGKVFRCAFLAPDIVEAILAGRQPHDLNFDKLCQNPLSWVEQREQLGFSPANTRRPRSSLVQ

SEQ ID NO: 3349 - protein, 518 aa, unidentified
  source 1..518: note = uncultivated organism
MSRTTANTPITFRCAVYTRKSTEDGLEQEFNSLDAQRDAGEAYIASQKSEGWVCLPDHYDDGGFTGGNMDRPALQRLLADIEAGKVDCIVVYKVDRLSRSLIDFSKIMDVLERHKVSFVSVTQQFNTSTSMGRLMLNVLLSFAQFEREMISERTRDKIAATRRKGKWTGGMPLLGYDVDVRGGRLLVNEEEAARVREIFELYLDRQSLITTAAELDQRGWTTKRWVTKKGRQMGGKPWGKNSLFKMLTNRLYLGKITYKDEIHEGEHAAIVDEEIFERTQRMLKRNGRTGGAHVKNRHGALLKGLVRCVTCDCAMAPAHTVKNGSKVYRYYCCTNAQKRGWHVCPTPSVPAPELERFVVEQVKVIGKDTDLLAETLAESRRQREEAIGKLEVEKRTLERELHRHNNDLRKLAGKDGLATDRMADIQDRIRIAEQRATEVREQIIALSRELVDARQVGEACSLFEPLWETLSAREQARILHLLIERVDYDGPNGKVAITFHPTGIKTLADELNRQEVTA

SEQ ID NO: 3350 - protein, 524 aa, unidentified
  source 1..524: note = uncultivated organism
MKEKLGDAKRVGIWIRVSTEDQVKGESPEHHERRARLYAEAKGWNVIEVYRLDALSGKTVKDYPETKRMLKDIHNGHITGLIFSKLARLARNTKELLEFADSFRECDADLISLAESIDTSTPAGRLFYTMIAAMAQWEREEIAERVAASVPIRAKMGKPLGGQAPFGYRWQEGKLLVDAEEAPVRKLLYELFREHGRKKTVARLLNEKGYRTRNGSAFSDTTVDRLLRDPTARGVRRANYTISKDNKKAWTLKPESEWVLLEVEPIVPEELWHECNAVLDTARAKGKRKTRTTKQLFAGVAHCHCGRKMYVPSNTPKYICYGCRNKIPVEDLEAIFHQELRNFFFSPEEIAAHLEQTNDTIKKKAELLETLERERKKLITEVDKLYDLYQSSMIDKHGFGAKYHPLAERQKQLENEIPEVQAELDVLKISHLSQEEIVTEARDLYSRWTTLPYEERRRIVETITERIVIGDGDIEINLFYAPPVSSHGGTSSQPGGSGGSAPPSTSLDHGKRATQLQGFIAATS

SEQ ID NO: 3351 - protein, 551 aa, unidentified
  source 1..551: note = uncultivated organism
MPVVRIGTLTRRSTDDEHQPYSIEAQDTRLGSFIQSQEGWELTRKYTDDMSGSTIDRPGLQRALADARLHRYDILLVYRVDRLARSVRGLAQVLDELDKAGVIFRSATEPFDTGIPAGRMMIQMLGVFAEFERATIIDRVVAGMERKAARGGWNGGPIPFGYSINRETGFLEIEPGEAELVPIIFDRYANKREGSRAIANWLNERGHRPRRGGLWSFRSVLTILRNRVYVGDIYFRDSWHAAPHPRLVAPELFEATQALLEERGESHARRATNSTEYLLGGLLVCHSCGHRFLGTAAHGRSQRYRYYTCYKRHRYGLRGCASPRVDAEELDRAVLAALATTFENQRVLDDAITEFLARADAARPQYQEELNAVVAEVRRTEAAIDRYLQAFESGAMSEAVCGPRVEAHTDKIRALRMRQEELTAAIEDQQTSPTPAALAEIRAMLSEGLDDDAPIPRRKAVLNRLIAEIRIESPAAIYPTFKLPMEHLRDQTVRPLFRVVGRGGLEPPTSAIPRPERCAGPFGELAPRQGSGAALFGLSLISQATLIATTH

SEQ ID NO: 3352 - protein, 534 aa, unidentified
  source 1..534: note = uncultivated organism
MKRVLCLYRVSTLKQVDKQDDIPMQRRECLDFINRMDDWKFYDERMEKGVSGYKVSANDRDIIVEIREMAEQKQFDVLLVFMFDRLGRKEDETPFLVKWFIEHNIEVWSTREGQQKLDTQVDRLMNYMRFWAASGESEKTSIRVKAAHSQMTEDGVWRGGTCPYGYKLVHMGRTGKKNRPLYDLVIDDLTAPIVQEMFELIVRQGIGTLRTANYLNQKYPDPDKIWTAQTVRGMIRNPVYTGRMHMNDIISEPIERLRIVSDDDFQFATYAIAQRIPRKYTDQRASEDSSVPKNATKASVYGAYLLSGILYCGHCGKKLVGGYHTKQMATHAYHRPIYRCYNGEVLAKNCDGQRTYSGRKIETAVLTIVKDYFATITGTINQVWEQKAKQILRTGNKNRIKSLKATMERLCREQEGLKKEVVKAISGESDFDRSLLKTLLDENKVAQQETEEALQQAIHDNAFEEEQVKKLEYHFRSVIDWAEQFDHVPVDTQKMILARLIERIDVRKGYQVAIKFFVSLEDFFGTSLENAESA

SEQ ID NO: 3353 - protein, 1281 aa, unidentified
  source 1..1281: note = uncultivated organism
MDIKDRANWTHTLWEPLDKMKQSPLHSKKEGIRVAAYCRISGGDTNFRSLENQVSYFSNYIYKRKNWKCIGIYIDERKSGATMSKRPGIQRLIRHARSGEVDLILTKSIARFSRNTKEILEVIQELKETNTVIYFDREGIEIFRGNSSLMLETHAAMAQDFIENISNLVKFTYRKRLNEGRPMFGDMYGYDYVSPLEKDKVKINEEEAKVVRLIFDEFINGATYADISRLLNESGIKTKKGKSYWSGSIVRKVIQKIEYTGSKVAMKRSKNLLTGKVSEKDSTQEKFLITDTHPAIISVRTFEEAQKRVGIVSVEHKNKLKSTKNSLRNRMFCGRCGSKIQRQGPYNFICKYSEASVNLCDAERLKTFDPNAMVFRALFRRMMGIEIIVMKHRNKISYEIYDELNRDSKKLEIEFQEMLNELKNILEEVNENDHFEFHRLRLFTKLEIAGIKQDFEEVDRLKKEYKNFENKASKIEEDREYRMLALSWLKNVCTIEGFIKNASIDILRAWMFNIIVYSRTAFEIEWIDGEVTVIEEKEIEKIKKRTLVRNQEREKYQKLNILKSSQLQEISNNNIKLADYEFIIERKEANSMSIQTAEKNVCGEDYSDKDIKADVIKLADGLSIKDLGNLKKNILKNKFEIMQKNENRKLKVAAYCRVSTHLEEQKLSLQTQLAYYNFKILSTPNWEFAGIYADEGLSGTKTEHRDDFNRMIEDAKHHRIEMIITKSVSRFSRNVLDVLEIVKMLNELEPSVSIFFEKEQIRSDDPHATMLLSLMATAAQEEVQSLSNSITWGIQSLAKRGTISRITDIYGYTIDKDRTWRIVNEEASVVKMIYEFYAEGYSIYQIIECLKDKDITSPTGKAYWDYNTIRAMLRNEKYIGDYEFQKFYTPNEIGAKSRVNDGKVPKFYIEKHHDPIIDKQIYEDVQKRIEMNKKELSDEMKKGGTAGRSSYYKVFTCSECGHLITRYKSNTYDSKEGSQWRCVNSSKNVGSSCEGITLTEKYIDYNFFKVLLKIKKNKKFKHMVEIYLKKVDLSIEEIKDKKRLEKEMKLKNQQLYEAVDTELQKDGKNTKLINQITSDIIELRNQQQVYVKRLEKLAEDRKRLENLIKFCEKLQHISFENFHNMRPRINPGESLYLTSKNARNSSYMNIEGEDRFPEDCFNEYVLSGSIAIDGKIKYKFADEIKFGIDMTYKDYQKEFNNGKEKIQFEELLKSKEVQIMKTFCTEKKSPKEIRAHLGIKSKVSFDKRFIKPLCAAGKLKLERGKAVYEWWYTWSDDSSRK

SEQ ID NO: 3354 - protein, 575 aa, unidentified
  source 1..575: note = uncultivated organism
MARRVRRTYKEAIESIKPVVPEQVLEWQTAIYARLSIENSGKDDKGESIEGQIEICKEYVEEHPYLHLVDVYCDNGWTGTNTNRPEFQRLLNDINRGKIKALVIKDFSRFSRDYIEAGNLLENVFPFMGVRFISVADNYDSFETDGSAESLLIPLKNLINSYYSKDISKKVSTAVHTKQLAGEHIPSMIPYGYIKSTTREYRFEPDPETAANVTRIFQMRIDKVPLNHIANTFNNEGIPSPGKLRYLRGQTSDKRYETSKWSAQLIKQILRNPTYLGHLVFGRMPTALYLGKPNYQYEPDESKWRVLENMHEPLVTQGVFDKAKEMEIEGRKAWEERLEKSKEYRESNPPVLKGFVYCGECGSKMRYHRYRPDQKLSGTYECPNYKYKKCGGTHSVSQDKLKEVVWNVLSDQLHIFCDFDELIQKLNHSDSATKQQAIYKEEMQSILVKIKNRQGKRERLYEDFTEGILTPEEYQYMKQQFDNEYQELNAQYNSLQIKQQRLRKALSDKNEWYLHMQMIQQSKEVDESVLKAMVDKIIIHQPALKERRIEVKLKYQDALAVLLSAYEELMGGEAK

SEQ ID NO: 3355 - protein, 533 aa, unidentified
  source 1..533: note = uncultivated organism
MARTKRNIPISSPSQAIWRAALYTRLSREDGDKPESDSIANQRALLEDFAARQPDLQVISQYSDDGFTGTNFQRPDFQRMIADIEAGKINCVIVKDLSRFGRDYINSGRYLERWFPEHGVRFLAVNDHIDSENGPYDMLLPFKNVFNEQYARDISNKVKSAMQAKQKQGAFIGAFASYGYRKDPEDHNKLLIDPCAATVVQRIFDLYEQGNGKIRIAKLLNEEGVPCPSEYKKLNGERYHNGQKLGKTTYWTYATIHRMLKNQMYIGNMEQGRAPRQIMHGRAKQLDRSQWTVVEGTHEPIISRQQWDRVQVLLAKDTRAPSFEQNVSPFAGFLRCGDCGRAMSKTNHPGGIYYCCGSYKRYGSTVCTRHGISQQELEHIVLDDLNKIIQAVGDLKALAEEAIPKKKLRSLQAEQEHIRGNLERIYHLKKSAYEDFRSGLLTQSEYLRYKEDYTRQEEALSAQLAQLKQEQPENIFNRPWMISLLEHGKLTELDRTTMAETVKEILVFEDGHIEMTYLFSDELGILDEPGQDG

SEQ ID NO: 3356 - protein, 572 aa, unidentified
  source 1..572: note = uncultivated organism
MTVERKRVFHCGVYTRKSSEEGLEQSFNSLDAQGEACQAFITSQRHEGWRVVPTKYDDGGYSGGTMERPALQRLLDDVKKGKVNVIVVYKVDRLTRSLFDFAKIIEILDAHRASFVSVTQQFNTTTSMGRLTLNVLLSFAQFEREVTGERIRDKIAASKRKGMWMGGYPPCGYDCRNGKLQVNAAEADIVRMIYRLYLKLGCVSELKKSLDQRRVRSKVRTSKTGRRFGGFPYSRGALYQILNNRVYLGEITHHDQNYAGEHKAIVPRELWDKVQTRLRSANQGRRLGTLTNSASLLTGLLQDRHGNRFTPSHTLKSGKRYRYYVRRALGKNGSTDQTPVSLPAHDIESQVLSRLELFFGSEKEVVDSLTLPGESPTRIHKLLASASKLFSKWSSVAPSDQWNLVRNTVKRIVVYEDKIELLLSKPELYDLLEGERPGKACHPGNQEEAESVQLDIHGMTRGYGGKTRLMILSGHGKEESPRPVTPLLKALARAHEWSTQVIAGEAWSHRALARRTGFNRRYVDRVFGCAFLAPDIVEAILNGSQPPDLTFEKLTRKLPTDWVEQRRQLGFS

SEQ ID NO: 3357 - protein, 505 aa, unidentified
  source 1..505: note = uncultivated organism
MDYTGRLDAIYARQSVDKADSISIDSQIDFCKYELRGNAFREYRDKGFSGKNTDRPQFQHLIQDIEAGLIARVVVYKLDRISRSILDFSNLMELFQKHGVEFVSSTEKFDTSTPMGRAMLNICIVFAQLERETIQKRVTDAYHSRTRKGIRMGGRTPYGYTEEPFVIQGITTKRLTADPEAAENIKLMYAMYSQPQTSFGDVARFFSENDILVNGKSLFKTTLSELLRNPVYVQADMDIYDFFKNNGAEIEGDAADFTGLTGCRLFRNKNIASKSKFHLHDKILVPSPHEGIVPSDLWLKCRKKMISNQTYQPARKPRQTWLAGKTKCGRCGYALMSRNNGDMVSYMRCRKRVESKGGCPGCGTIRTHDLEQLIYQSILEKLREFKSLSGHSVIPSNPKLTAAKVELAQVESDIEKLVDSLIGANATLVKLANRKAEELESRRQSLVMIIADLSAAEMPSAKLTKIYGHLDDWENTSIDDKRRVVDSLIAVIRATSVSIEIEWKI

SEQ ID NO: 3358 - protein, 624 aa, unidentified
  source 1..624: note = uncultivated organism
MEETDLKSKKNVAGIYIRVSTEDQAREGFSLGEQEEKLRQLCKYKDFEIYKVYKDAGISAKNMKDRPAFQQMLEDMKAGKLNYIVAYKLDRVTRSVRDLEVLITTLEDYHCYLVCERDDVNTSTANGRFFVRMLTVLSQLEIEIVSERTKFGLNGAIKSGHIPGKCPFGYYRDTDKTLKINNSTKDLVIRIFEMYLEGKSYQAIANILNSEKINSPTKKKWIDSTIDRIINNKIYIGDYERYRLDNSKETEVFMNVAPAIITRAMWEEVQKQKEKNQRSYCRNRVYIFFQKLICPTCGSIMTCKGAGGSKAKYLYYHCDNCNLYYNESEIENCLIDYILDLVEYDYHINKYFYPILAEKKNDETKEIEQEIKKYQQQKDRLMDAYKAGILKMEDFAEDYKVIENKLSILENKRLDALDLYKESYNPQHIMAERDIEREKLTDGQMYKDILLSLWTMKTKEEKQELISKFIESAILKKDENGGFVLEKINFRSTFIEQIDKLYNKGVVDIPKRVERGGNVEDIRMSVNMNKAQLNDYLEKLKEELDIEYMDLGEYYYHDDKFDEEYDNKNPSVEFKNKVLEFKIKNNRKIIRAVSLHEKQNFLAKPCAKIRLGLVTRIPSKKNLK

SEQ ID NO: 3359 - protein, 600 aa, unidentified
  source 1..600: note = uncultivated organism
MQKNDDCIAIYSRKSKYTGKGESVGNQIELCKEYIRNNFGDEYAQASVVFEDEGFSGGDLNRPDFKRMMKAAHERKFKAIVVYRLDRISRNISDFSGLIEELAGLDISFVSIREQFDTATPMGRAMMYIASVFSQLERETIAERIRDNMHELAKTGRWLGGTTPTGYTSESVMSVTLDGKTKKACKLKLIPEEAQTVKLIYELFLEFDSLTNTEAEILRRRIKTKTGKDFTRFSIKAILQNPVYMIADKDAYGYFSAMRSELFSELAEFDGEHGILAYNRTDQVKGKATVYLPPDEWIVSVGQHPGIIPAKTWIKVQQSLERNKSKGYRKPRSNEALLTGLLFCRCGSRMYPKLTKRMSADGEPVYTYVCKMKERSKKSLCDLQNLNGNVIDTEIIGQIKALTEDISSFISLLERSRKIYSVSGEQPEEKLARLRCEQADNEKKITALVDSLAEMGESDARYHVTKRIEELHISSLELDSHIAQLEGVTALNTLSDTEFDAMRQKLADFNCGVDDMTVEQKRAAVRNVVKQIIWDGQNAHVLLFGVSKADIAYPEPQNLFFEESCAEEAFSHTCFDGREDGSKNPALLCETKTHWGEDSK

SEQ ID NO: 3360 - protein, 563 aa, unidentified
  source 1..563: note = uncultivated organism
MPQSAAALTPKSAIYIRVSTQYQVDKESLQVQRRELIAYSELVLNIRNHEVFEDPGYSAKNTDRPAYQSMMSRLRTGEFSHLLVWKIDRISRNLMDFTAMYTELKKLGVTFVSKNEQFDTSSAMGEAMLKIILVFAELERQMTAERVTAVMLSRASIGKWNGGRIPYGYSWDKETQTFSIDEEEKNIILLAYDLYEQKQSMLEVCRILNAKGYTTRNNNKWNPVTLHKIFTNVWYTGTYRYNVHEDGRGSSKRASDEWIDIKDHHPAIISEQRLLAIQYRLQKNRRGGHKKGDTYIRKSIHTYAGLLVCGNCGNNMTASKSRRRASGVRPSVYGCSTIRKNHVGCDNKYVFDMYLSDFIFSLIHFLLEAQENGNEYISPLAAESAFLKKMQPFEIKHISGIYEYLQARISFRAPQNYEYPTDKGPAPSDAAISTLRDRKRKSELALARLKSLYLYSDNGLPEKDYIIEREKILSELKEIERALCNVTVTESVSKQEFVSTASEFIMTDKILNYTPGSAEKVMLTVDEEVIKHFIQTVIKQIVVTSGKITKIIFQNQIAIDISY

SEQ ID NO: 3361 - protein, 501 aa, unidentified
  source 1..501: note = uncultivated organism
MKKVRCAIYTRKSSDEGLDQAFNSLDAQREACEAYIRSQRHEGWKLLPQRYDDGGISGGTMDRPALQALLAELKAGRIDMVVVYKIDRLTRSLADFARLVERFDATAASFVSVTQQFNTASSMGRLTLNVLLSFAQFEREVTAERIRDKIAASKKKGMWMGGVLPLGYDKTDGGIVINKGEAETVQTLFKTYINVGSVRKLKDYADTEDLRTKQHVSASGRVTGGKPFTRGHLYQLLSNPLYRGKIKHRDQVYDGLHDAIISEALWVRVQEKLANNRVARKTRKSAANPSPLAGRVFDENGRSFYAHHARKGQRRYRYYVSSDETVRLPAHELEQAAFNALIHRPNIRQQSADGVTSQRETLEQIDRLVVGSNELEIHLAGRENAHPVRVPFTQRRRGVERKLVLENASVSPKVDRALIRRVVKAMDWLDAIKAGRAISEIAAEQNVSPSYITHNLDLAFLSPRILEAISGGRQAPHISAYQLSKISIPVNWDEQDSIFLS

SEQ ID NO: 3362 - protein, 587 aa, unidentified
  source 1..587: note = uncultivated organism
MIENPRILAAVRLSVLRDETTSPERQRDVISHWANGPSVMGRIVGWAEDLDVSGGIHPMKRAKLGPWLTSRAHEFDVIACQKLDRFTRKTRHFAEMVDWCKDNGKILVFISEGIDMSTPMGRMFGNMIAAFAEGELDTIAARAQAAVITRKDKGVWIGGVEPFGYTLTPLPGGGKGLCRDNTYAPLGREVINRLFEDWSPYRVAQDLNRRGVLTWRDHIRATHPTNPKPPKGIKWTAQAVIAIVTNPTIAGYYTYKGQLVEDDEGSPIMITQKALESPSDPGDKGTAIATPLEWTRLTQRFTTDRDKTKAVPSKSELAGVGRCGGCQTSMTLSRDERGEPGAYSYYVCGHAKTGSCDYKTRIRQALLEEVVSDAIMNVIGHLPVYSKAERPGASARADLSAAQRRMETLEADYLSGRYDGEGQEESYWKMHKAIAGKITRLRREVEEFDRGPQFIPTGRTYAQEWAGKDSDQRRIFLRTHNVRAHAFRGAVDWSDETIIVEFGDLAEMARVAGVDLGGVDTYRYDYQAPVGASGAPLAAAEVAAIVKARRAMEAHPANAEEKEIVKARRAMELERARGRRLAGAAAN

SEQ ID NO: 3363 - protein, 500 aa, unidentified
  source 1..500: note = uncultivated organism
MFQQMMKDAKAKKFNTIICYRLDRISRNIADFSQMVETFSGLGIDFVSIREQFDTSTPMGRAMMMIASVFAQLERETIAERIKDNMLQLSKTGRWLGGNTPTGYKSEPIEVTDRHGAVKKAYKLIPAENEIELVKLLYDKYIELDSLRKLETYCVQSNITSKNNNSLSRFALTNILTNPVYVKADKEVYEYLTENDYEIYSSEEEFNGINGIMTYNKTNCTTKKNKARDTSEWIMAIGAHEGCIPSAKWLRVQKTFERNRSKGFRKVRNSECLLSGLIRCGQCGSPMRPKAGRTKSNGEATFVYMCETKEVSKKAKCSAKNINGKLLDNTVIDEIKKIASNKSGLGKELRANIALIDETRGNPAHEIKRLEEKTAGNTEAISNLVDSLTQYKESAAGKHIINRIEELEQENNSMKEKLLSLKEELSSSQTDEANLDTVRRTLSSLTYLIDSASVVEKRDLLRTIIEKITWDGENISIALFGSANQEEEIIELLPSGDACR

SEQ ID NO: 3364 - protein, 550 aa, unidentified
  source 1..550: note = uncultivated organism
MEKYKKIVRMLLRVSSNQQLEADGDLSIQRKLVKEYITSHSNWTLDTKEYFEGSKSGYKNSVTERDVLQQALQDAIKKEYDVLVVYKDDRIGRRMWEIGAYVMQLKSYNVDIYTVKDGCISPDTDDIMGQMMLALRYGNAQKSSSDTGMRVKDTAQKLVQQGKFMGGKAPYGYELVLSGEISKHGRALKKLKVVKEKAYIVKYIYELAYTKDYGFQKIAKILNLDEYYSKYAPNDYWKAGTIRSILTNPVYTGYVAYKRRERVGGKYYKINDEDWIKSETKNESIAIIDEDFWNEVQRKRKLRSKAYIKKINSEEYNLIKKNDGILPLIDVAYCGYCGVKLTNGNSYSYWKIKETGEKRASKKANYKCQNTWKGVPHKDNVKVQLFPAEKIESIVFSEICKYLDELLKNINLSEDIIKIENTEYEKLNNLLSSYKDELSKTQKGISVMEEHIPDAMTGEYVLSLEQLASAIQKHKNKQNEIKEKINHIKEQLDTIEKSRNNIDALKNDIPQWKDIFMSADKESKRVLVNKIVDKIFVKKEEIYIIYKIKV

SEQ ID NO: 3365 - protein, 533 aa, unidentified
  source 1..533: note = uncultivated organism
MDSHSSDSKEKPQIKCAIYTRVSTSEGLEQEFTSLDNQRESAESYIQSQKSQGWIHLPERYDDGGYTGANTDRPALQKLIADIKEDKVNCVVVYKVDRLSRSLLDFSKLLEFFDQHKVTFVSVTQHFNTNSSMGRLTLNILLSFAQFEREIISERTRDKISAAKKKGKWIGGCVPLGYDLDKITHRLIVNPAEAKIAKELFELYLEERTLLSVVKIANEKGYRTKIRHLADGKTGGGVKFTTTSMLKILNNTHYIGKVRYQGILYPGEQEAILNEDIFMCVQEALRRHPDKPQIRKPTGKKIALLSHILKCSACNKSMYYSHSVKHGKLRYSHYVCSNAQKRGYQDCPTKLVNVGLMETKVVESLRKLTKDKKLDPKEWDTCNLEEKRKILQNLVQEIGYNGKEGILEITLNDKKKPYRLEVSKDELKHHPVPPRHQPMETVPQLRQNLLLAHQIQGLIEEGTAKDLKQVAGWLNMSHVRICQIMGMLFLSPKIQEEILLSNDKKIFEIPEYKVNEIAKELGWSKQKEVWGIF

SEQ ID NO: 3366 - protein, 554 aa, unidentified
  source 1..554: note = uncultivated organism
MRQNTLNKTSDKNRTAIYVRVSTMKSSQKDSPEHQVGVCRDRAIQENLDVVEDYIYEDRDTGTTITDRPAIQKLVKDAQHGAFDIVIFASLSRFARDTGDALNLKRKLVDALGIRLISIDEGYDSKKDVDELKFTIISAVNQKLSEQISYSSRRGKRQSALKGNFTGSIPPFGYKKQLVNDKKVLIPDEDSKYIVQKIFQLYTANKMGEKAIVDYLNKKGIPSPKKGKWGITSIQRILQNEAYIGRNAFGKYESVKVFTNVNDTTERKKKQIQKDPSEWQRAHEPQTHEPIIDEETFMKAQEIRLERGGGERGGVRNRKNVFAKMIVCKQCGSAMVSMKSKNGKNLADGREYRYLVCSRRRRQGDAGCTNNFWLPYYSFRDDLLEELSNRLRSITSAEQLLERFKDNIQINTYDIESEIKRLEKNIDENRRCILELRKEKMRGAFRDEEQYEYEKRHYEQEIQGWENRVHNLKQELQKKADLTQLYEEVMDSLDELLDLDYDNFDELHLTLKKLIARIEVSQDKQIYVMTTFGIQLDELSINGISEKTIVGGTK

SEQ ID NO: 3367 - protein, 549 aa, unidentified
  source 1..549: note = uncultivated organism
MFLRKKSTYMGCDYLRLSRDDGDKAESDSIQNQRELINDFLKKHPEIKKVQEYIDDGYSGTNFDRPNFKRMMAEIEKGHIDCVIVKDLSRLGRNYIEMGKYLERIFPMYGVRVIAINDNYDTANESSDADQIVIPFKNLINDAYCRDISMKIRSQLDVKRKNGQFIGSFATYGYMKDPKNKNHLIIDEYAANVVRMIFNMKLEGYSAGTIADHLNESKVLTPMEYKRFCGLNFNGGFQISTDPIWHPNTVTRILKNEVYLGIAVQGKNRKINYKVKESRPIDESKWIRVPGSHDPIIPKEIFDTVQNMLRLDTRTSPKKTQVDVLSGLVRCGDCGQNMIRRCSTKKEKTYYYYHCSTHKNGEGCSSHLISSDKLQDMILWQIRQQVELLVNAEMVLSAADNLPNETFQVKFLNEQTCKLRAEIERYEDLKTKLYQDLREGTVAQDEYKDLQERFNRKLIEAKSSLVEIEEKKARLTLKGLCEQQWLKDMKEYRNIMVLERKIVTALIEKVVVYSKDHIEIIFRYADEMEIVIAAAEAQAAREEDRRTAV

SEQ ID NO: 3368 - protein, 560 aa, unidentified
  source 1..560: note = uncultivated organism
MARVSRKQTAAQSVTAPFSGRIYQTALYLRLSKEDSGYDSSDSIKMQEYLLQQYVNTQPDMVIKKTFRDNGATGTNFERPGFEQMMDAVRQREIDCIMVKDLSRFGRNYVETGYYLEKIFPFLGVRFVAVNDGYDTLKNASGDDMVVSMKNIVNSLFAKDISKKTGTALRRKQEKGEFIGSWTPYGYLKSPEDKHKLVIDPETAPVVEDIFAWRMEGLGYGEIAKRLNEREILCPTMVRFLKGEFKKEAPATVSKRWTAAAIKHITGNMVYAGHMAQGKQMRSLCDGIPNEKQDQQDWMIVRNTHSPIIDEATWDKVQEINHANSEKSRNRRQLPKTENLLVGLVYCKDCGRTMARYKNCSKKGHIRYTYCCRTRKASKGMSGCTLKSIGEQELFDIILKSIRAQIAATVKQESLLKRLKAQPEYQAETKRLTASLNEVQKLLSQNTLRRSALFESYSDRIINDGEYLYLKQQYNTQAAELLSRQEQLLASQLIHTKTLSPENSWIKTFQKYDGMECITRDMVLELIRHITIENRSNVHIVWNFKDEYQALIQYTMGVGI

SEQ ID NO: 3369 - protein, 514 aa, unidentified
  source 1..514: note = uncultivated organism
MAMVTRIDPYSQLATGRKLRTCAYCRVSSNSADQLHSYAAQVKYYTKAIKERSEWEFVDVFADEGITGTRADKRPEFQRMIKLCNMKRIDLIVTKSISRFARNVPECLEYARSLKRIGVGIIFEENGINTLRMGDELMMTTFSAIAQEESMAISQRLKHMNRERMKRGEYVAGTAPYGYRQVDKKLVVYEQEATVVREIFSAYLNGCSISEIVRDLRSRGIPKKNGDDHWNYVTVTYILTNEKYMGDTLFQKTYKTETLPFTKVKNTGELDKYYAEGSHEAIISKEVFHAAQALMAKKAEYFGRRTPATPYPLTRKIRCSACGAFFVRRASKTNVVWSCYKHIESKDQCPAKRYSETQIYGAFMRMFNKLFYNSKAILRNTLYQLDFVMTYKRKNDAQSAEYNQKTIALLEKKHMLEQLRSKGYMPDALFLSQTKAIDKELDEIRVDKAILYDTRLENTYSEIKKLISIIEDYGQEMVTFDEDIFDAIVTKTVITPDDEIRFTLMGNISFTERL

SEQ ID NO: 3370 - protein, 515 aa, unidentified
  source 1..515: note = uncultivated organism
MTAIYARQSVDKADSISIALQIETCRTALPPEEPTELYADKGFSGKNTDRPAFQRMLSDVQAGRIQTILAYRLDRISRSVHDFTGLCQTLSECGVQFRSVTDGITLDDSLSGTVMAQILMVFAQFERETIQRRVTDSYFGRAKSGLYLGGLPPFGFRKGETVWNGRRTACYVPDPEQAAQIPMLYETYVRDGESLGTLSRHLTAAEIPTRTGGAWSTLSLGRLLRNPAFVRADAAVFQYLSGKGATLNDPLSAYTGVHGCYCYAPRSPHGGSSRKFTDLSHSFVTLAPHEGLVDAALWLEAQRKLDRNKALKNSGAGTHSWLSGLMKCAKCGYAITVVPRQDGGHYINCGGRKLGCCPGRSRTMTLEEIEGATEPYVLDFLRHLEHASACEKRTPPAEAVQLENQIAAQERELERMTQNLALVEETDVVRLLAGRIHAAGQRLDALRRKRDALLYSAASPDLDAGFSAVLNEWQRYTIAEKKQIAHAILSRVTVSEDVLALTFLGDADQISTSCV

SEQ ID NO: 3371 - protein, 520 aa, unidentified
  source 1..520: note = uncultivated organism
MGAADFDVPTGPRKKTLRCAIYTRKSTEEGLEQTFNTLDAQRDAAEAFIRSQRQEGWVVVSDKYDDGGFTGANMDRPALQRLLQDVREGGVDCVMVYKVDRLTRSLLDFSRIMDVLDKHGVSFVSVTQQFNTTSSLGRLTLNILLSFAQFEREMIAERTKDKMSAARRKGHWVGGRLVLGYDLSDKGAALLLNNDEAVRVRAIFALYLEHGSMMPVVQELNRRGWRLKEWTTRKGTIAGGKPFAKNRLYNLLTNMVYVGKVQYGGQVYQGVHEAIVDPTVWQTVQDRLRYNSKTGGRQIRNKYGAVLKGILRCASCDVGMIHTYTQKAPNKLYRYYVCVNAHQKGYNQCQTRSVSAPVIEQAVVDQIRGVAANPDVVADVVRQLDEQRAVGLEGLEREKQVIERELQRLGEETAGLLRMPGKLTTDRMAELQDRVAVLERQLRDVRDQLAEAVGQTVDAASVRKTLQEFDGVWSEMTPREQEKFVKTLVDRVTYDGATCTVTVGFRTAGIRQLCVEMESK

SEQ ID NO: 3372 - protein, 574 aa, unidentified
  source 1..574: note = uncultivated organism
MEQIKKDKKIYHAAIYVRLSKEDGDVDSTNKRESNSISNQKDLIKYFLKDKEDIVIVSERVDDGYTGSNFNRPAFQMMMEDIKNGIVDCVVVKDLSRFGREYIDAGRYIERIFPSLGVRFIAINDNYDSIENRSQVDEIMIPFKNLINDAYCRDISVKIRSHLEVKRKNGEYIGAFTPYGYKKDEADKHKLVVDTYAASIVKEIFRMKLSGMNQTAIANLLNAQGVLSPMEYKHSIGINIQDNFKKHEQAEWSAMSVRRILENEVYIGTLIQGKRSTPNHKLKVMRLRPSDEWIKIENSHEAVVTKREFAIVQRLLGLDTRTSPNEETVYPLSGLVVCGDCGALMVKRDVPAGGKVYSYYICSQNTQTKACSTHRIPKAKLEEVVLEVLKVHIENILDIKRIIEYIGVVPFQELDIKALQKRKDAMEDEAERCEELRNFLYEDFKEGIITKQDYAELRGGYTEKIKKAEQAIRNIELQIQEIIEEKSEKYKWLGYFTEHQNIKELTRTVAVELIEQIKIYDKKTIEVVFTFDDCYRLVLEQMKELGCTVTESTNGRVYIEGKEVAKDGKKIKEN

SEQ ID NO: 3373 - protein, 511 aa, unidentified
  source 1..511: note = uncultivated organism
MEFAIYSRKSKQTGKGESIENQILICKKYIEARFGTKHQIHIFSEEGVSAKNKERPQFQNMLLWAQQKKLDYIVCYRLDRISRNVGDFAQLVEQLSKWNIAFICVQEQFDTATPTGRAMMYMASVFAQLERETIAERVKDNMMHLAKKGYWLGGTPPLGFISKRAVEKEHSFCYLEQNEFEMMTAKKIYMLFLEYCSVSAVKRKLEEEKIFSRQNKPFSLIGIKEILSNPVYCHADEQAREYFLKQKATVTFSKEECSDIYGLLAYNKRNYAKKSAPRQKIEHWIVAKGKQKAIVTGKQWIAVQNILQRNKPNTQQQKTENEYALLSGILYCQKCGSKMQAKKRRNQQKGIVFDYICKAKLQKKCTMQNLSGNQTDEKTEKLLLQYISEKNCFDEIYKKYQNNTFSQEIKQCQKGILHCQRQKENYIALLGEQKANDILIKEVNQKLMQLQNQQNMLQKTKTLLQQNQWLQTDTISFFSLWKELSIKQKQEAIRFLIKKGIWTGEEVWYYL

SEQ ID NO: 3374 - protein, 565 aa, unidentified
  source 1..565: note = uncultivated organism
MTNRRRCAIYTRKSSEEGLEQEFNSLDAQREACEAFIKSQQHEGWVCSRDHYDDGGISGGTMDRPALQRLLSDIGDGRIDVVVVYKVDRLTRSLADFAKIVEIFDAKGVSFVSVTQQFNTTSSMGRLTLNVLLSFAQFEREVTGERIRDKIAASKKKGLWMGGLVPLGYDLTERSLVINPAEAETVRKLFDLYRELGTVRRLKKVADELGLVTKRRHGSSGRVTGGAPFTRGHLYCLLRNPIYVGEVAHKGVTYPGRHEAIIARETFDSVQRQLAGNGVMRRTATNTKAPSLLTGLIYDETGDRLCPTHANKKGRRYRYYISKRLMHKTTSSTGGWRLPAKALEGVVLRAVCNFLSDGLRVVEALDLDQLRPDRFIRVIGEIATAAGRLKDGPAERHRELLSALVSRISLRATSICIDVRRAGLMELLSDPEVVMAPSEEVFTFVTPIQLKRRGVEAKLVLRAAREPSSSPDQKLITAFADAHRWIDDLAQGRAASLRDLARQYQRDLGEVSRTLPLAFLAPDIVGVILDGRQAVELTSRRLKRIEALPCRWDEQRQRLGFPSES

SEQ ID NO: 3375 - protein, 569 aa, unidentified
  source 1..569: note = uncultivated organism
MKQAETAAVARNAVIYARYSSHNQTEQSIEGQLRVCHEYAQREGFTIVGEYIDRAISGKTDDRPDFQRMISDSRKRAFQYVIVYKLDRFARNRYDSAVYKHKLKQNGVKVVSAMENIGDNPEGIILEAVLEASAEYYSLELAQKIKRGKRESAMKGQFCGGGIPFGYKSAGGRLVIDETKAPFVKKAFEQYAAGVPKKQIIDALNAAGLRNRNGKPFGYTALQVALQSEKYIGVLRWNDIVIENGCPALVDRETWDRVQERIKQNKREGGKNKAKIEYLLTGKAFCGYCGETIIGVSGTGRHGDKHYYYCCRNRRLRKGCKKAHEKKDFLEWYVVEQTVLYVLTPQRMREIAAAVVAQYDNEFNDGKIKTLERQIAKLDRDIDKYTEMLLDAPKSARPRIYEKIEAADMQKSDLEIDLSKLRIANKIRYTEAEIMAWLKLFCKGDLFDMEFRRRIIDTFINSVYLYDDRVIVFYNIRGGKQVSYIDMLDATEGFPGLDDEPAPADSAETPDTKKKPDTVSGVRLLNGVVDSKGIEPSTSAMRKDFENFFGLFSIFLTVSAGFYFICKPL

SEQ ID NO: 3376 - protein, 524 aa, unidentified
  source 1..524: note = uncultivated organism
MRNGRSSALRVERVAPTARLRCAIYTRKSTDEGLSQEFNSLDAQREAAQAYIASQRHEGWAAIPDAYDDGGFTGGNMERPALRRLLADIEAGKVDCVMVYKVDRLSRSLLDFARIMEVFDKRGVSFVSVTQQFNTTASLGRLTLNILLSFAQFEREIIAERTRDKMSAARRKGKWTGGSPVLGYDVDPRGGKLVVNADEAAQVRVLFDLYMEHRSLMTVVRDVNSRGWTTKRWTTKDGREHPGRLMGKSDVYKILTNVIYTGQVNHKGTIYPGEHSAIVDAGVFQKTNERLGHNGVTGGKEVRNKYGALLRGLLHCDACGTAMHHTYTAKGGRRYRYYVCATAQQRGWDACPTKSLPAQQIEDSVVEHIRKLARNPQVVLETLRAARAQSEDGATELRAELQAGERELRRLYADIAKVAATTGNGMRVDRLADLQERIGTIERRMSEIRSELATIDSEAVSEEEVAEALKAFDPVWKSLNTNEQTRITRMLVDRVGYDGRTGKVAVTFRSAGLKALCGGHDEER

SEQ ID NO: 3377 - protein, 573 aa, unidentified
  source 1..573: note = uncultivated organism
MPRKKAGPAPGHSKRKAALYVRVSTKYQIDKDSLPLQRKKLKEYCKMYDIDEYQIFEDDGYSAKNTDRPNFQKMMACIRKGDYTHLIVWKVDRVSRNLLDFATMYQELKERKVTFISLNEQFDTSTPIGGAMLKIILIFAELEREMTSERVTAVMLDRAENGQWNGARLPLGYRLNRETMTPEPDPDEKEIVQLIFDEYEKTKSCRKVARFMQNNNIKLPDNRAWNPALIKNAIHNQIYIGIYVYNKREAHDKFRPESEWIVKENNHQPIISKEQFERCNQIMDKNARSRDVSTIRQTKHIHTFAGKLICNMCGGNMGARKDIALKNGFRPSNYSCARRLNMMDCDNRRGIRETYIGPFILNYVANLAQIQKDFKRIDSPEKMEAALLSGPEFSGVRIKPECLKTTFSILAGKNIRKGAYVPDMGESDGMENQSVDSAGLLERECEKYKNAISRLTELYMFDPDALTKEEYSERKRELTAKIRDIEKRISAANGSEGSGSADLSFIKKASAFLVAQHIASEEHIDYMQLVTDLDNAIIKDFIDQLIDKIFVQDGKIMRIRFVSGLEHEFMYEE

SEQ ID NO: 3378 - protein, 595 aa, unidentified
  source 1..595: note = uncultivated organism
MKKNKPIIAIYSRKSKFTGKGESIGNQIELCKTYIRANYGDEYAESAVVYEDEGFSGGNLNRPDFKKMMKAAHDRQFQAIVVYRLDRISRNISDFSHLIEELGQLDIAFVSIKEQFDTGTPMGRAMMYIASVFSQLERETIAERIRDNMHELAKTGRWLGGTTPTGYVSQSVKSVTVDGKTKKACKLKLVPEEADLIRKIFDLFIETDSLTQVEAELIRQNVRTRRGIEFSRFSIKNILQNPVYMIADETAYDYFIQNEADLFSDRSEFDGVHGILAYNRTDQAKGKTTILNPINEWIVSVGQHPGIISSKQWIQVQHALERNRSKCFRKPRSNEALLTGLLFCRCGGRMYPKLTKRKLPDGKPVFAYVCKEKERSQRTLCDRRNVNGNTLDAAVMEQIKQIDADRDGIMAQLQQSKKCYTGNREEYDTQLAELKAKQVENERKINGLLDTLLTMEESGSKKQITRRIDELNRENDSIAARITELEGLTEESVLSPDEFDLMRQLLSTFQLGIDDMSIGQQRAAIRTLVRKIIWDGEYAHIFLFGAGEDEIEFPDLTDRFASEGEMEEEEPLAEYTDVNYDENVALLSPLSENSK

SEQ ID NO: 3379 - protein, 511 aa, unidentified
  source 1..511: note = uncultivated organism
MTTSLVLYARKSVERENSISCETQIEYCKMMIKPEERGEKVVTLIDNGFSGGNVNREGFQKMMRLVRQGKVSKVIVYKLDRISRSLSDFMKILQEFKDHQVEFVSSQESFDTSSPYGDLIVKILMVFAEFERTSTINRVTQAYAHRSEMGFYMGGRQPYGFELVPAVLHNIKTKKLQPIPSQAEQVRYIFEVYAQESVSLRRLLDLLVAEGKQPLNGSHWTTAKLSTLLKNPIYVKADSDVYDYFDRHGTQIVSDLSLFTGECGAQLYGRTKHDSSSSDWSDLKLVVLSHPGIVESDIWLKCQRKLEKNRQITNSYSNPTSWLAGKVVCAKCGHTMTTIKGKANQNGEVRRYFNCTGKSHKKICTGPKVSIYAEDLENMVYDCIGEKLADLKETGHRARKDDQGALNELKLKLKAVEQAEKHLMDTMLTGGFNEDLLAIANQKATQLKQDRMALLERMDELKSLEQETDTAVNLAKSWKTANYAKKKAVAMIMIHKILIHEDGSMQIVWNI

SEQ ID NO: 3380 - protein, 529 aa, unidentified
  source 1..529: note = uncultivated organism
MRAFIYCRVSTEEQSTDDHYSLEYQEEKARIRVKEKGWQLVKVRKDVGSGKDSNREGYRELLSDIRSRSIDVVVVYKLDRLSRNVKDIYHFLDLIREHRVELVSLCESFDTTTPMGRAMLGVAAVFAQLTRETIAENTRNGMIQRAKRGKWNGGNDPYGYDYVKGGSLVVNPAEAATVKRIFDLFVNRKMSASKIARLLNLEKVPTKTGAEWSVSLVTRLLKNPLVIGKVQFDGKLYDGTHQPIVDLDLYEAAQERLMVHKKVHHRTLTSKFLLSGVARCAKCGCLLQTRHKDASRKFYVCRGNERVSSDRACGGLSKSARILDWIVVQRIREVATSPEMQQMSLEEAQKLLQLELAPSREERDRLVMELDELASAFTKWADRLDRGLIDEEQFRLQNSRLLAKKKQIQERLAELDEAISREDKARADFEAVREVLRDFDRLWEAATLEERQEMVRLLVERIEVSPDEMVLKFKFRPEERIPLPRGLRGKASPLYGSSEEDLLRTPLCVSALRSAAPCGSGRRPKAEGS

SEQ ID NO: 3381 - protein, 637 aa, unidentified
  source 1..637: note = uncultivated organism
MADPRQNNAARTRLRCAIYTRKSSEEGLEQEFNSLDAQREACEAYVTSQRHEGWSALPGLYDDGAYSGGTMERPALKRILEDIRARKIDVVVVYKVDRLTRSLADFAKIVEVFDAHGVSFVSVTQAFNTTSSMGRLTLNVLLSFAQFEREVTGERIRDKIAASKKKGMWMGGLPSLGYDIKDRKLIINEEEAATVRHIYQRYLALGNVRDLQSDLDDAGIVSKTRRAADGSPYGAQRLSRGALYLMLKNPIYRGQIVHKGKAFPGEHMAIIDETLWSQAQRHLEDNRIERRGGQQRGEKSLLAGILFDAHARPMTPTHSVKKGTRYRYYISHHLIVGTDSEKHDGQRIPASNLETLVIDRVRTLLADPVAISNAISAGQLDASAQRRLQDAASALSAGWNSVAAASVHELLRAIVARVQVHPDRIDLDVDAARLARALTDDGNGEPVTASHAVLDRNGEHVIALTIPASLKRTGKEMKFVVEGSANEATVDTSLMRLLVRAQKVGGRVFGAGSPTLDAIAHDEGINPSYATRLLRLTFLAPDIVAAIAAGRQPPALTANKLMADTRLPLEWNPWNRCKSVGKTPRPGGQFDVGINDGLICQAGRRPPERPSSTSHCRSATRGSPLHAPAAAGRRRRA

SEQ ID NO: 3382 - protein, 525 aa, unidentified
  source 1..525: note = uncultivated organism
MSGKVRVIPATLTRFSSKPISAQKKRRVAAYARVSTDEDDQLSSYEAQVSYYSSFIKNNPEWEFVDVYSDEGISGTHTKKREGFLRMIDDAVKHKKIDLILTKSVSRFARNTVDSLSTIRLLKENGVEVYFEKENIYTFDSKGEMLLTIMSSIAQEESRSISENVSWGMQRRFEEGKYSVGYSTFLGYDKGKDGKLVINPEQAKTVRYIFTRFLEGKTPYSIAKELMERKMKTGAGNDKWSTESVVRILQNEKYCGNAILQKTYKRDLLSKRVTNNGEVRKYLVENGHEAIITPEQFEMAQQELESRRKETRQHSSKSIFTSKLICGDCGSFYGSKVWHSTDKYRSVVWQCNNKFKADEKCTTPHLREGVIKNVFIKAINSIVTDKGPALDMMNHLKAKIDNTATLEEKLEKAATTFDEKMVLLQDYISKNAITEKELSDGRYSELEKEYREALAEKEKLQDELTERRRRSLMIKRFIDKVSGFDELFTEFSENLWLGLVDVIIVMDKKKFMVKFKSGMEVPVEL

SEQ ID NO: 3383 - protein, 557 aa, unidentified
  source 1..557: note = uncultivated organism
MKADNSKIYNADLYLRLSKEDGEVTDGSRQESNSISNQKDLIMDYMKAHPEIKVHTIRVDDGFSGVDFNRPNFQLMLEDIKKGIVDCVIVKDLSRFGRNYIEAGRYIEKIFPMLGVRFIAITDHYDSLHSEDGGSEMIIPFKNLINDAYCRDISIKIRSHLEIKRKKGDYTGAFAVYGYMKADDNKNRLVADEYAAGVVRDIYAMKLSGMSQQAIADKLNQDGILSPLEYKKSIGVNLTTVFQTGSRTKWSYVAVTRILKNETYTGVLIQGKRTTPNYKVKTRINKAESEWARVENTHDAIITRNEFELVQEILKTDTRCAPGRDAIFPLAGILFCGDCLESMVRKTIPANGENYVYYVCSRNKKQKENCSPHRIREKELNDTILYLLQDHIREVLGFEEVLQAVDAAPYMELGIAKYKDRIKKKRGELEKAERRKLNLYEDLKDGIITKKEYAQLKEEFDRQAEEAESAIHSFEAEIHLILENRGSRQEWIRRFREYKNIDRLDRNVVVSLIKQVKVYEGKRIEITWQFEDDCERYQQIAGLHEYREADEACVEVV

SEQ ID NO: 3384 - protein, 519 aa, unidentified
  source 1..519: note = uncultivated organism
MHITEITPKMPQKAEKIRLAPYCRVSSDSADQMHSFATQIRYYSEYAKKNPQYEIVDIYADEGITGTEMEKRDELNRLLRDCRRGKIDRIITKSVSRFARNTEELIATLRMLKEFGVSVYFEEQGIDTQQMNMEMIVTFPGMAAQQESETISGNVRWGIKKRMESGEYIIQTPAYGYRLVNKKMEIHEAEAEIVRRIFDLFLQGMGMQKIADLLNAEGIPRKRNGCEIWKMNTIHYILRNEKYMGDAILQKKYKTECLPYRQKRNHGELPKYYVENYCPSIITQEVFQAVQELMALRRVEKSARKDYTLSKMLRCPDCGRAFRRQEIRGKTYWMCGQRAASGSDCKSRRVREDIVYETFTMMAYKLKINRETLLEKLIQRLEYLQSRTSENIERIRQIDKEIADLSAKNLVVTRLHTSGVLGTAEYSMQTSEISNKITELRIERRKKLNEDENDILLDALKSLNDTIKEYEPNGQFDEVLFEQIVEKIIVDESSQLTFHLIGGLTLTEEIKEKGRCKTA

SEQ ID NO: 3385 - protein, 528 aa, unidentified
  source 1..528: note = uncultivated organism
MADKPKALRCAIYTRKSSEEGLEQDFNSLDAQRVASEAYILSQASEGWELLPERYDDGGYSGGTMDRPGLTALLTDIETGRIDVVVVYKIDRLTRSLTDFSKIVEIFEKADCSFVSVTQSFNTTNSMGRLMLNVLLSFAQFEREVTGERIRDKIAASKKRGMWMGGRPPLGYDLPVKDSRKLEVNEGEAQTVRHIFERYLELGSVHALKCDLTANGYRSKIHVTKKGKTSGGQPFSRGALFHLLRNRIFLGQIVHKGEVHDGLHDAIIEQDLFDRVQEQLTANARRVRKRSETRMSKAPLTGKLFDANGEPMSPTFSRGKSGKSYRYYVSASLQQGASPGAEGLVQRLPASAIECIVRNAAARWLAKSGRNLDQVDKIRLATDGIVIELRGIDPVTLSTRLDEGERVLHSDRERCAIHLPLALPLRGGKRSVAHGDRETTHPDPVLIAALRKAHAMLSQKGGLPTMEAGPVSRYDANILRLALLAPDIQRDILDGRQPASLNVQTFRKIDLPLAWSQQRTALGYDATI

SEQ ID NO: 3386 - protein, 574 aa, unidentified
  source 1..574: note = uncultivated organism
MAKQNKPDHNRVAIYIRVSTVHQVDKDSIPMQRNDLVAYSRLMLNTDDYVIFEDAGYSGKNTDRPRYQEMMSQIRTGLFTHLLVWKIDRISRNLLDFSTMYQELKELGVVFVSKNEQFDTSTAMGEAMLKIILVFAELERNMTSERVQATMISRATQGLWNGGRIPYGYSYDRETREFSFREGEHELAVLIHDKYEDLRSLISECRYLNERGFRTRAGNLWNPVSIDKILRSCFYCGDYCYNRLREGNRQTPKDKSEWITIKDHHPAMVSREQKERIIRILNANSKICVQKNMYSSPGKIHIFGGIEYCSYCGRLMHSTSIYSKKDHWRYSRYTCPIKRKYTNTCPNQSVTDLVIGEIFFNYILNLLHAQRDFKNIQSEKQLEKQLIRGSAFSYASGIESSCLHDLYELLSSGVSTGVIYGKGMTVDKQEKQVGKVDELKKDKSRIERALDRLRSLYLFDENTMSEVEYISKRQELLDSLDNVNEQIGLLDADDWYQSISDMEFMQKAAEFLISQNLSGRNYVNYERLARQVGAEPLRAFAVTILDNLTISNGNVSRIVFRNGLTVQFIYKKKS

SEQ ID NO: 3387 - protein, 560 aa, unidentified
  source 1..560: note = uncultivated organism
MEDQEINLCIYNRVSTTRQAEEGVSLDYQLDECKRHIKSIPGAKLTKVYRDEGVSAKEGSIHKRPEFMKMMNRIREGLHKAVVIYKLDRLFRSVKDLTQILEEFKKHGVELISIRDHFDTTSAIGKAVLHLIGTFAQLESDQNSERTKCNMEYAAKQGFCLGGRVVGYNRGEDKILHIIPQEAKLVCKVFQLLIDLGSAGAVLKHLNENGYRMPVYKTKKGITKGGGHFNKQTVISWISNQKYIGKSTFNGEVYEGLHEPIIAQEIFDSANKILDNNRETKHGQKLNSYPYLLKGIFTCGNCGSKLTPKPSGGRGETYHYYCCTKRVHQKTTCSARLVPANPVDDLVLEYIKAVQADQDIINKVTKEANKQAKVIYLSLKEQHKSISARLNGVEGQISNLVEILATDGDGEIQAIKNKIRSLEAEKNRLVHKEAEIRSEKDQMEERLCSSEILINSLESFSQIIEGASRKDLAKIIPLFVRKVEWQTDEHDPTKGLMKIDFFEEFRPEMAEQALWKRNRGGSVNHSAPLCQAKLPSIDMYRTFFIEESKELTFLLNHYSI

SEQ ID NO: 3388 - protein, 555 aa, unidentified
  source 1..555: note = uncultivated organism
MIAAIYARKSIETDKGESIDNQIKLCKEYGAKAGITEFLYYTDEGFSGGNINRPRFKEMIKDAKAKKFSMLICYRLDRISRNVADFSSTLENLQKYNVDFVSIKEHFDTSTPIGRAMVYIASVFAQLERETIAERVKDNMLELAKTGRWLGGTPPLGFKSEVINYVDSNDKNKKMYKLIAVPEEIETVKLIFNLYLDKKGFPSVAHHLCTHHYKGKNGGEFSQGTVKQIIENPVYTYADKKIYEYFKNLGAILCGDFNGMNGVLTYNKRIGGKKTNPISEWIIAVGKHKGIIHSDQWIKCQNINALNAEKASPRSATGNKFLLSGLLVCGECGSGMSSWSRNNPKSGKYERYYRCNLKNRASNRCSSKMLNADKAEELILSNIKGVTIEDLINTYDEIISGSKNMNELMKEEELELEKQIEINNKMIQGLIRKLALLDDDPIIISEFKTEINNLRNQNTSLEKNLASLRILLNNTDLKTDYIDEINNRLENFQKLFECTEDIGKKREYLLEIVNYIVWDSKTAELKVNLFNSNSTIPIGGVRRNRKNLSFENSSR

SEQ ID NO: 3389 - protein, 551 aa, unidentified
  source 1..551: note = uncultivated organism
MEDTKQPKKRIYCAIYTRKSTSEGLDQDFTSLDAQREAAENYINSQKHEGWTILQEPYNDGGFTGANMDRPGLQKLLSDIKNQKINCVVVYKVNRLSRSLIDFAQLLKFFDKNNVTFVSVTQSFNTNTSMGRLTLNILLSFAQFEREIAREKTKDKMSAARKRGQWTGGIAPLGYRVDNNKKLIIDPEGAKMVREIFDLYLKGNSTLKIVHMFNEKDYKTNKIACKNGKTLGGVKYSVARIQWMLRHPIYMGKVLYNGQIYNGEHEAIIDEETFKKTQALLDENHRERKATKNVDCTGLLSRILHCKICGTYMTHTYSYKTKEGRKYLYYVCTNAQKHGHSSCPTRSVNSKSAEDAVIECLRQIFHDKRKRDKHTYRQEINVLCSPAWDTLYPLEKRRILKILLKEVDYTAATKKLGITLADNGLRLEFDADLKQPRPQSKRWLKEKRLTKEPTVRKNLILAYQLQKVFEDGKTTAKQAAVWLNMHEVRVDQIMNFLMLSPKIQEEIICSENQLALAVPEYKLRPIMNEVDWHKQDEMWRELLQNSPSDRT

SEQ ID NO: 3390 - protein, 701 aa, unidentified
  source 1..701: note = uncultivated organism
MVLKTNDTKEKRFVIYTRCSTDDQAQGDFTTLDAQAHHCKNMLDAFNYKLANIGKNGIVNDDGFSGKDLNRPGIQKILDDVNKKKRTFDGIIFFRLDRLTRNPRDLYALIDLFRDHDIDFISVRENLDSSTAIGRVVIGILGLLSAFERELTGERVKASAIARVRQGKWVGGKLPYGYKLVPHGDRLPNGVQPNRIEIDKDMGPKLRVIWELAAQNKSLTKIGVELEKRTIYTCTGKQWRKQNISNIIKNPFYKGYIHYSGEMHKGNHEALIDEKLWEKANRILVAKLPGHKFVKKPKEYKFLLEGLMRCGECGSHMMSCYSGNGKGHKFYYYECGRSKQALGCSTKRISANILDKALIEYFKRASQDQNIINRAIGNAILEAKVKFESLETRIHEKEQALDVLKREAKKLLDLALEGTVTQGSTFKDKMNALESEIATIETDLSKLQAQRRIAQMNANSDEFIHHNLNLAMQLIDTVPAEIQKSIIQCMIKDIVLYNEDKMEINMFLGDSLKENLPVNLLEVLPQKVKRPTQMSEALTANSQSSADSQHWLPGRYSDSGLLWHFTALVTEQTKWNHRIISIVHEGQTPDQARRIRPKPPKTYRNPIFRAKEYARMIESGQAKNESDLARKVGISRIRIWQYTSLLNLNASLVEAVEALGDPMPKRLITERQLRQMLKNPKEQENFTSKLQSTRSYITNSV

SEQ ID NO: 3391 - protein, 503 aa, unidentified
  source 1..503: note = uncultivated organism
MKQFEAIYVRQSVDRPDSISTESQAEICKKEVTDGAEYKVYTDKGYSGKNTERPAFQALLRDISAGKVSRIVVYRLDRMTRSVLDFANIIVMLKEHGVSFASTMEKFDTATPLGHAMLMIVMVFAQLERETIQQRVKDAYLSRSKRGFYMGGRVPYGYTLVKTEIDGVRTKMYEPVEEELKIVRLIFRMYADPQTSFGDIVKWLNENGVRNKGEKAFSRSRLRDIVTNPIYVRADCRIFDFFQSQGTEIADPPEHFIGVNGAYLYSGDRRKRKTVSLDGQTLVLAPHEGEIDPENWLKCRTKCLNNQQSAKPKKATATWLAGKIKCGHCGYALVAKTYHCKTKDDNRYFVCSHKYSAKDCDFGSLDADAVEATVFEEMEKKLRAFRTLQEHREETLDLEVIKVKTRIDQIDREISALLDKVVDANDTVMRYINERVAALDREKRAHYAECERISANVRKNVGELKGYLECWADLSTGDKLTVVDSLIAKIVASEHHLNISRKI

SEQ ID NO: 3392 - protein, 603 aa, unidentified
  source 1..603: note = uncultivated organism
MVRPDPLAKRVGKRTRCAIYTRKSTEEGLEQAFNSLDAQREACAAYVLSQKHEGWNVLPAHYNDGGYSGGNMERPALQRLLADIEAGQIDVIVVYKVDRLTRALADFAKLVEIFDRRGVSFVSITQQFNTTTSMGRLTLNILLSFAQFERELIGERVRDKIAASKKKGMWMGGTVPLGYDVKDRKLVVNPNEAKTVVDIFRRYVGLKSVRSLEKDLAAAGIRSKQRYRPDGTLYGHERFSQGALYLMLQNRTYRGDATHKGNAYPGEHAAIVDQILWDAVQATLAENRIARASGSNSKSPSLLTGRIFDEAGGRLTPTWSVKKGARYRYYISTTLLRGKAEKISNRLRIPAGDLEAIVVTRLRSLLANRGELLDAIGGNNGRRQMKLAPLMERAQQLCSDIDQQDAEQIKSIVTTLVRRVTVHADRLSIEISLPRLSTLLTSSMVDLLNLAPVVEAGPDDLLTLDATAHRQRHGKEMKLLIHDPATTAHVDTSLVRLVARAHDIQNRLNQDPTITVHDIARKESLGAPYIYILLRLAWLAPDIVTAIVNGRQPLGLSAMKLMRLTAKLPGNWASQRTLLGFRGDIASGSPLLRGLSAENAFRR

SEQ ID NO: 3393 - protein, 529 aa, unidentified
  source 1..529: note = uncultivated organism
MSEQKRAAVYVRVSSALQEDGASLETQEEGCRKYAAEHGYQVVAFFREVHTGVDLHERPELTAAREAIRAGEIDVLIAYAVDRLSRSQAHVYIIADEADRYGVTLEFVTEDFEQTATGRFIRSAKAFAAEVEHEKIKERTLRGRLAKVRKGRPLGAGRPPYGYRWRDEDKSGYAVDADEALIVARVFHEVLAGASLRQVAAGLTADGIPTPSGALIRWRQTTIADLLHHPTYAGRAYGWRWQWRKVKVDGKTVKQCIIRDPSEWVELAAGVAPAIIDERTWQAAQQILTHNKESQGRHASHPERFLLRGGFAVCGYCGAPMHAAWRDNGTAIYRCGAHHSKAHPCPQSGSILATPLDEAAWVRVVQALEDDSVIDGELARLQTEDPTQTDLPIVERGLANVSRKQANLLRRMADIDDDGLAEAVKLELVALSTQRQMLQKERERLLERQASWRIGQDRLETLRQWRRTVATRIRSLDYEGKRLALQAVGLQAQVYRYNHEPRFVITLSLPLSPDSGDLSVSSFGRRRRA

SEQ ID NO: 3394 - protein, 545 aa, unidentified
  source 1..545: note = uncultivated organism
MSQKVYRTAIYARLSKDDGDKVESNSIVSQKGLCQEYIQKHPELELVETFVDDGYSGVNFDRPRFKAMEDAIRKGRIDCVLCKDLSRFTRNYIEGGRYLERIFPQLGVRFIAINDSYDSLTGNPQSDSFIIPFKNLINDTYCKDISVKIRTNLDVKRRKGEFVGAYTPYGYIKDPENHNHLIIDEYAGEIVQKIFALFKDGFSIGRIADRLNELGVLSPMEYKLSCGISYDTVFKLKDKAKWSYTSVQRILTNEVYIGMMVQGKQGSPNYKVHVMQPKDESEWIRVEGTHDALISYDDFMAVKTMLGRDMRSTSDDSLENLLSGFVFCGDCGQPMTRKTIPGSGGKKYYYYVCSKNKRREGCTTHSINQKEVESSVLSAVREHINHVLDLADALEYIDRLPSANRVAFNYESIIAKLEEEIEKYQKMKLRLYEDLADGVITKKEYMEFRNQYAKLLEDKQAALDRVQREYKDSCIAGKEIERTWVSMFRQYENIEELNRRVLMALVDKVLIYENHVVEVCFKFGDEFQRSLEYASQYADELPMAI

SEQ ID NO: 3395 - protein, 556 aa, unidentified
  source 1..556: note = uncultivated organism
MSIPVAIYARVSTEEQADNFSIASQLDLLKNYCRSMQYKIYSEYVDPGYSGTTQNRPALQRLLKDASEGKFKLVIVYRIDRFFRSVKDLLLIVDHMDRLGIAFCSVTEPFDTSNPIGKFMLSLLGSIAQLERDTFIERSQLGKLRRAQEGYVVLSNPPLGYDYDRENGQLMINEQEAETVRLIFSEYIKPDNSTISIAKILKALGRPTKKGGKWDGERVYSILVKSVYVGEWVYKSRKTSVKVFVPPIINQTTFNKAQELLKERRNMIHRTNKRQYLLRGILKCKKCGWDMGGTTQYLYKRKSGKKIGKPRSEKHYYRCCKNISAIHYPERELKRCSATWVKGAELENKVLEHLIDILSNPDRLQEAVCSQDNSLENTKKELNQKFKEIEQAISRCDKEKERILKAYREELIELEDLGKEMDRIKERHQNLVRQTEELKLKIAMEDTKIKGIKTLIERYQGINVHDILNAPFKEKREFLMKLVKVIWIDTKEDGSIHLDIECIIPELNSHPPSGGNSTPGNNGTNNRKNGDANSESCTIPPLASHGPPRFPQRYRL

SEQ ID NO: 3396 - protein, 541 aa, unidentified
  source 1..541: note = uncultivated organism
MQPSGAGTTRPVRCAIYTRKSTEEGLEQDFNSLDAQRECAEAYILSQRHEHWTTLTRRYDDGGLSGANLERPALRQLLADVEAEAVDCVVVYKVDRLSRSLLDFARIMEVFDKRGVSFISVTQQLNTRSPMGRLTLNVLLSFAQFEREIISERTRDKISAARRKGKWMGGYPPLGYDPDPVTRKLTLNRAEAEQVRSIFAVFVRCESLADTLEEIERRGWRTKTWTTRKNERRTGVRFDRPALVRVLTNVLYVGEVSHHGQGYPGEQEAIVDHAIWTKANELLKHRKRGRHLRRRKRQGAILEGLLQCAICGRSMGPGYTTKRGRRYRYYLCQTARKGGAKACPGQMISARRIENAVESKLYQLVGQPGGPVVEGGFPVDPAQGDPLEPADQRRLWENLIERISYDHRVEQACVRLKDGGSEGVEFAVRVRKSPFDRRALLPRTAGAVEHLPRATRLMALAIRLEGLLKAGTVQNYADLARREGVSTTRISQIMKLRSLAPAIQEQLLFLTEEADRIQESALRRIAEEMDWRRQVKLFAEL

SEQ ID NO: 3397 - protein, 611 aa, unidentified
  source 1..611: note = uncultivated organism
MKEEKKDAGIYIRVSTEDQAREGFSLGEQEEKLRALCQYKEYEIYNVYKDAGISAKDMEHRPQFQQMLEDMKKGKINYIVAYKLDRVTRSVRDLEELISLLEEYNTYLVCDRDDVNTSTANGRFFVRMLTVLSQLEIEIVSERTKFGLNGAIKVGHLPGQLPFGYKKENKKTVIDESLRKYVERAFDLYMKGKSYQQIANIYNEENILNKKWKDSHFEKMINSRIYMGDYVQYNRIHKKINKEPVIYMNVVDPIIPRYIWEECQLQKEKNQRTYTRDRVYTFFQKVKCPKCGRIMKCKGSGSRDKRYIYYNCEKCHENIREDYVEEAFKTIIYDLLKFDETYNKSFLPLFADKENVNNDNTIEKQIEELNNQKDRIKKAYMSGIVELKDFEQDLKVINERLNNLNKQFEENIKYRNNKTFNPEKVMINRDIEYIFSNTSKDKEFILEEWNFKSKEEKQDFISRYVESVTFEKNPEYKNGIRLIDLKLKSIYKEKIDKLTSIGASEFYLPLIVNEETEELIKTNCPITREQLTKYLKELENYPGLYFKEIEDFCETIDTCNKGVSVMLEDNESIDKIIPILEDEYVRSNNPKFRIGILYSKKIVMDNEIGSN

SEQ ID NO: 3398 - protein, 501 aa, unidentified
  source 1..501: note = uncultivated organism
MKSAVIYARYSSDSQSEQSIEGQLRVCNEYARNNDILIVATYIDRAMTGKNDNRPDFQRMLRDSGRKEWDYVLVYKLDRFSRNKYETAIHKHTLKNNGVRVISATEFVPDTPEGIILESMLEGYAEYYSAELSQKINRGLRESRLKGQFCGGGLPYGYRVENKKILIDEEAAKVVNYIYQRYSIGVIVPQIIIELNEKGVLHKGMPFKAGNIYKILENEKYTGIYRAKDGEIYENMYPRILPQELFDRVKKIADRNKNGRRSQQVVYLLKNKLKCGYCGNNVTADAGTTKNGKVIYYYKCAGKKRKHLDCTLENVRKDFIEETVLNHITKALSSPENIVKIVDELYKIQEEQANEMTELKLLKDQKQKIDLALQNVMAAIERGIISNTTNKRLHELECQQTELERKIIMEQAKSIIMLSKTEIAEYYKKALRLEPQLLISYLVKEIKLYNDYIEVIYNTPIKINPDESRGFSFYTEKTKIAIYDTTTWRYSKKDVVIVSKI

SEQ ID NO: 3399 - protein, 560 aa, unidentified
  source 1..560: note = uncultivated organism
MNTVTSSHSSTGTSQPNPRREGVGLTAGLYVRVSTLNQVERDSLSTQESRLRAYCQANGFTVHKVYTDAGVSAKDTNRPALESLMEDCRRRKIQAVLVTALDRITRSLRDLIKLVDFFQQHNVRFISITQNIDSSSSFGRFMRDLLGLIARLEREVVAERVSGDMRHRALLGKWNGGTVPFGYTTYHRRAEELIGQGIPEDEARKIAGQRVPEPKKLYPDPEEAEVLKRIFETFIQTRSIRKTTHTLNSLGIKTRNGTAWAPSSVHRILANPLYIGRISYGKTRVDLETGKLNKADEAEWSIVKGQHQSLVPEGLFKQAQDILESTRQKPTRAIYTYLLSGILYCGKCGGKMHGYTFRNKGLKRIYRYYKCDNHTAKGTSVCTGMTVPANELDRFVVQTLADLSKDTVFLQDKEKMLAMLREEAQPQKRTEELEKLKRMEKDLDSRMETLLEKLESGLIDDLDFKKRYDKIKARLKENRLSQERISDSGEQESAAYEALNASFEEIPSFSKNWEFLDEQAKAAKISAIVKEIKVRDDKIEIQVYLDLKEVSREVSRRVPS

SEQ ID NO: 3400 - protein, 533 aa, unidentified
  source 1..533: note = uncultivated organism
MPKYQAISYTRLSYTNEKENESNSITNQKALIRDFVKKHSDIEIVSEKVDDGYTGILFDRPAFQEMMEEIRAEKVNCIIVKDLSRFGRDYIQTGKYLRQILPSLGVRFIAINDNIDTLKESCNDLAVSLKTIINDAYSQDISKKIRSVLEEKRKEGLYVASFTPYGYQKSEENKNQLVIDQSAATIVKDIFKMKLDGMSAAKIADVLNEKGILSPVMYKKQNGYAYAKGGYITEDNAKWSATTILRILKNEIYTGTMVQGKKTTYNYKLKNIIKKPKTEWVYVENTHGAIISKQEFDLVQNILFLDTRTAPCQESVYLFSGLLICADCGSRMTRKTVTYKNKKYFYYYCPTGKKGCTSSHMIKEDELVACVLESVKKHISSIISLDNLLNSVEFERMNQSIVQKYGKEITEIEQTAEETKEFKSLLYENYIKGILPKEDYRMLKQEYTQKQEIAEKEISALNEKLEKELWHNRKEWIEHFKKFSNITELDRNAVIQLIQSVKIFDNKQIEITFRYQSEYEETVKLFKAKKEVM

SEQ ID NO: 3401 - protein, 562 aa, unidentified
  source 1..562: note = uncultivated organism
MDAEKKITARMLLRVSSNQQLDADGDLGVQRRIVMDYIKVHDEWELDSEKPEYYEGGVSGFKNSVEDRQALQDILADAKKGEFEILVCYKDDRLGRREDEIPQYIKKLASLGVLVYTVRDGCITPQSHIEDLLNYIRYWHAEGSSIDTSQRVKDAAKENVRLGRNQGGNAPYGYKLEFSGEYSKHQRALKKKVIDSERAEIVRYIYDLAKTSGYGAQKIASTLNSDETMRSMSPNGQAWKSGTVRDILRNPIYTGYEAYNRREKRNGQFIRLDSSQWVLSEECNESIQIISPDLWEEVQELREHRKRQIDTKKEGNGHVQTKTSQYLALLDVVYCGYCGKKLTNGSKYNYWTTKDGEKRRSVVGYYRCQSKQQGELCEGKRTYRADNIEPKVFAFITDYLTTLEDNSTVLAKLAETEKEQKKVVQQNIKGRQKALEQLKKNINVLEESIPLALCGECAFSAEELQEQIRKNKEKKTALEEEIEKMERDLSTRYSEAAEVDKFVLQIPEWKEAFKSGSVDEKRVIVNRLIERIDVWEGKIRINVRVNLKEFLSRKSSYEPTIL

SEQ ID NO: 3402 - protein, 551 aa, unidentified
  source 1..551: note = uncultivated organism
MEKEKKWLPACYCRVSTLHQVDKESIPSQVHMLSKYCEGVLGCKKEDVEFYIDRGRSGKDTNRPQYQKMMDDIAKGKRNIVLAYKLDRVSRNLIDFAKFLETLQKSGAEFISLTEAFDTSSVMGRGMLKLVALFAEMERGITRERVMAVSKDIITRGGHLGAPTPLGYNRDETNKTFTINAKEAEIVKWIFDRALERKSTHYMACKLNDDKIPGKRGGLWTSTTVFHILHNPAYKGLYVWNRASGGTRKQKAKSEWMYQEGVYPVIIPPEKWQAAQDVLASRQRGKASVKAHTEHLFANIITCGECGSSMRYRADRKRADGVTVTIYHCANYALHRGCHNSSYASDVTLAPFIMQYIANMNRLSFSIGSIETPAALSKILLFNLPEGTRIANLNTLFGLYCRANDSQVPANVAMTKMAALKETLEQDKELEKYYRALDKLKDLYLYGESDMSKEEYIKTRAGIESKIAAASQTKQEVQSRISPSLNIDKDKYLPVLRLLNPYVNWKRLVLETSQKLMSEFCHDVLKQVIVDKGKIIKIVFNNDIEHVFTYD

SEQ ID NO: 3403 - protein, 543 aa, unidentified
  source 1..543: note = uncultivated organism
MEFFCYAYGRLSKEDLDKKAESDSIKNQRELIHDYIDRDPELHLVMEGYDDGYTGTSFDRPHVREMLEAVKSGKVNCVVVKDLSRFGREYIESGQYIEKLFPALGVRFIAINDNYDTAHLDNSSSLMLPFKNLMNDSYCRDTSIKIRSHLDVKRRNGDFIGSFAVYGYAKDPENKNRLVVDPEAAEVVREIFARRIAGQSCKTIADELNSLGILSPMEYKRSRGINFKTGYKVHNKAQWSPWAVQRILENEVYLGVMTQGKRTTPNYKVKTVIERPPETWMRVEGTHEAIISREDFQLAARLKGKDTRKAPGTGAVYPLSGLVCCGDCKSNMIRKTSLYGDKTYGYFVCAAHRADKSVCSTHSISEAKLERAVLEGINFHIRAVAELRGALEAISRRPMQKVTLERLDRRLDTLRQELARKQEIRDSLYRRYASGEVSKEDFYDFKRIFTKDCEEAEQAIEVQQHQLDELLANTSPDSPWIIYFQKFGQIDRLERDVLVRLVERILVYEDNRIEIVFQYQAQFEQAKAVAASVANDGKLREAV

SEQ ID NO: 3404 - protein, 511 aa, unidentified
  source 1..511: note = uncultivated organism
MAQMTIIPATKQIRREKIRVAAYCRVSTNKEDQVHSYEAQVRYFSSIYERSQTEQLIGIYADEGISGTDLAKRAEFNRMIEDCRHGRIDRIVTKSVSRFARNTRDCLKCIRELKSLGISIAFEKENIDTARMSDEMMITVMGGLAQEESQSISNNSRWGIHKKMANGTFRHAKIPYGYAKDDETGGLVVNPEQAEIIKRIFDLYINGTGARKITLMLNGEGIPSPTGIKWNQKTILKILSQEKYTGDTLWQKTYNEFMGTKFRSNEGQLPKYYIEGSHEPIVSKETFALAQQMKKQSAPKRFDKNDTPFRKKIVCGCCGHTYAYVPSKRRDYWQCGYRFAIDKPCDNRVFFDDELRIAFTALCDKLHAHGKEVLGRCAAQLDELNALKQGGTVNAAEHYKAIADLREQKHRLSQLRTKNFISQEKYDEQINSINIRLDKLGKDIEQSAENTDSSMDEIEALADMFVAYDGSESAMLEMLNMVEKISVTGDEYIFTLQGGLEFKERIGGYGS

SEQ ID NO: 3405 - protein, 549 aa, unidentified
  source 1..549: note = uncultivated organism
MKEKEDRRYVIYSRKSRFTGKGESIENQIEICRRYIAAHYGEREAEQALVYEDEGFSGGNLERPKFKRMMSDSREIEFAAIVVYRLDRISRNIGDFAKLIEDLGNRNVGFVSVREQFDTSSPMGRAMMYIASVFSQLERETIAERIRDNMHELARTGRWLGGNTPMGYESEGVVSVTVDGRARKAYRLKAIPEELDLIKLIYKKFAETASLTKTDEFLISGHYRTRRGKPFSRFAVKAILSNPVYMIADGEAYAYLTEHKAELFSGRDDFDGVHGIMAYNRTLQRPGRATQEKPMNEWIVAVGMHCGAISGADWVRVQGLLEQNKSKSYRKPRSHIALLSGILRCGHCGGYMRPKLTDRKTPAGDGVYTYLCTTKERSRGRVCNIKSANGNILDAKIIEAVKALVRQNAELAEQISRAGRYIGGEKHEAELETLGLQIAEAEKNIKALIASLERAEGSHAAEYILAQIEELHSEKEALQKRRTELDERLRQCDLTDAEFDAARRLLASTDDCIDLYTVEQKRSAIGNVIHKIVWDGEDVQIHLLPCGEE

SEQ ID NO: 3406 - protein, 549 aa, unidentified
  source 1..549: note = uncultivated organism
MEKIDALYIRVSTDQQVERGESLETQKSRLSQYAKDKGLNPKVYEEAGFSAGSTNRPAYQRLLADIKEGKVASVTVTKLDRISRNLRDVVDLVYETFEDHSVAFRALDQQFDTSTPMGRVMVNMLATLGQWERETVSERVRIDMHHRAAKGKWNGGPVPFGYTTYAFEAKHFEEKGLTKEEALQKARAVCPEEKVLYPHPKQALLIKKIFEMYLEGKSQRRVTHWLNTEKFKTARGETWATSTVSRILKNPVYVGKMIYGKRISLKSSKKIRKRKEEEWIKADGIHSPIIDEATFRKVQEILKSQSREPVRFHSENLLSGLLRCGKCGGKMHGYYHEKNGHAWSYYRCTNHTHKGNSVCKGNSVDKVKVETAVIEALLSFNKSKAFVKMEKALEVFNKKICNKDTPLKEGKEKLEQENKQILKKKSTLLDRLEDETIGNEDFKDRVKKLDETYKTNSEKIQTINDQLGDLGIQEISFNAVYSIINDFSSRWKHCDFQGRRTLLISILQGITYTDPDTPVKVAIYYRSKDPVPVTCLQSDTGSSLRLKEN

SEQ ID NO: 3407 - protein, 527 aa, unidentified
  source 1..527: note = uncultivated organism
MARNSASLAPASASAASVGAKTIRCAIYTRKSTEEGLQQEFNSLDAQREASEAFIVSQKHEGWQVITDHFDDGGYTGGNMDRPALKRLLAAVEARSVDCIVVYKVDRLSRSLLDFARIIEIFDRNGVSFVAVTQQFNTTSSLGRLTLNILLSFAQFEREIISERTRDKMSAARRKGKWIGGHPVLGYDIDTKGGRIIVNPTEAEQVRTIFELYLEHGSLLPVLQESPHRGLVTKRWTTEDGNIRGGKPFTRGSLHAILTNVLYTGMVDHKGVLYAGEHERIIAQETWDRVHERLQHNGSTKGATVRNKLGALLRGLLFCVPCWTPMMHTYTMRKSKRYRYYVCYNAQQQGWQNCATKSVSAQAVETAVLDSIRRIGTDPKLAEAVASEAIDQMAHRRRDLEQECDAHRRSLRQLNLNLAREAADTSVDSGARFDRIVGIQKEIETTERQLVELAAERKSCEQDRVDAEDLRRTLAEFDAIWTSLTTREQEQLIQLLVAKVGYDGRTGKVTVNFRSAGAKELCQAKTQ

SEQ ID NO: 3408 - protein, 639 aa, unidentified
  source 1..639: note = uncultivated organism
MKAGVYVRVSTSQQVDRESLKFQEERLREYCKSQGYSVHKIYREEGVSAKDTNRPRFSELMSDVKAGDIQVVVVTRLDRITRSLKDMIWLLEFFQQHEAKLVSITQNIDTTGPMGRFILNILGAVAQVEREIDSERVSEHMHHRALSGKWNGGPVTFGFVTKERIFNELKEAGKKEDEALGQAAGLCPESKKLYIDEKEAGIVKKIYDYYLRFKSIRKVTHLFNKEGIRTRRGRPWAAPSIARMLSNPTYTGKIWYGKRKTDMVTGKLKKVSREKWKIVVGEHKGIISEELFGRVHSLLRQKYVKPSRAGKAYLLKGLLRCGLCDGIMFAYTYHKKTPKGRVPYLYYRCQNSVQKGDSICRGMNLRGEDIEKSVVETILGLSENGKFLQDRELMMKTYFEELGTVKPEIEEGKKKLLLEEIRLEAKKSTLLEKLEDRIIDEADFTERYEAIKKELELIHDRMAQLASKGGNVDAKKFALQISFDELSNLKKTWPVLNDEGKQLKLQAIIDRITAIKTDDSNIKLTTRIFLDSLNSEKKSGLVEVLSRRGNPEPQSTNFCPLVYTFDIEINPLDFNPRYPKNPRTLGQRIRKVRMDKGLLIRELASQLGVTEDTVINWEVRGIKPEGGNLNKVQDFLKNS

SEQ ID NO: 3409 - protein, 521 aa, unidentified
  source 1..521: note = uncultivated organism
MRFATYGRKSVYSDKSDSVDNQQRMCREFVDFKFPNQIDSFECYQDEGFTGANTNRPGLRRLLADVKDGLVDALVVYQLDRLSRDVRYFANIYAALEEAGVAFLSIKENIDTATPIGRAMMYVTMVFAQMERETIAARVTDNMIGLAKKGFWTGGNPPYGYRRESVVVNGKKHVVIVPVPEAAAYVEGIFDEFLDAGYSLQGMETAFKKQGRRTVNGAFFSTTQLHKILTMPYCVAASPEVWDYYSGLGCKMADEREVWDGSHGVMIYGRSTEKNKRHQVQPHSEWVVCMGLHEPFISPEKWLAVQERFQQNVFSKKKKYPTPLLKGALRCAKCGSLMQVSRKKLAHGRVCSSYYCLKRSRQGVDACDMGSVKCETLDEHVLDVFREIEADPALISQYASEGQPSDCSALLRDLEKKASGIRSRISRLTESLADGSAASKYIVAQIETEDLSLAAVNREIEIAKADQRRSERAGQSAAGRSAEISRLVRSLDGLSAEDKNEIVRSVVSECTWDGSTLFLRL

SEQ ID NO: 3410 - protein, 556 aa, unidentified
  source 1..556: note = uncultivated organism
MRVALYTRVSTEDQAREGFSLEVQKNFLLQYAKSFNWEIFCSIQGKEIYEDDGYSGYIMDRPAFQRLLLDARNKKFDLLLVYKQDRLSRKLKDLLSILEELESLKIGFKSATEPFDTTSSAGKFSLQMLGSCAEFERNRLIERVFPGMIEGVKRGHWQGARYAPYGYTHNKESKKLEVNPTEAKTVKEIFSMYRTGKSTAQIAAHYYELGIPSRQGGKFYTKFISDVLKNKVYLGTLIWNKKHYDTKEKTKNGEGKGYKYVKNDPSKVIETPNAHEAIITQKEFDEVQRLIQRNRTNSVTRFRNNIYHLSGVLKCNECGRNYRGHMSVTSHRTGEKRAWYHCSSKEQYYTKCSNRCVTADSINKQVWEVIDVICQNLHVLEELGDRIKLSSSEPEQCYIEQLEEKEKLLNRNLEKQKGLYEVFSEDKINLDIYKERAELLRNEEKKLKVDIKGIHLKIIEKRNAINLTQLTQDFLTRLKSTPPTQQSDYLLKSFLRIIFKGVYIYNQEIVRLDINQPWKLCYEEGLKWLKTKEIQTKPEKKAKRSYVSFCAPSDAR

SEQ ID NO: 3411 - protein, 520 aa, unidentified
  source 1..520: note = uncultivated organism
MNNDVKIVRCAVYTRKSTDENLSLEFNSLDAQREAAEAYIASQKHAGWVCLDQHYDDGGFSGGTIERPAFQQLMADVEAGKIDCIMVYKIDRLSRSLMDFAKIMETLERNNVSLVSVTQQFNTTTSMGRLTLNILLSFAQFEREIISERTRDKIAAARRKGKWTGGAPVLGYDREKDNRGSRLLVNEAEAKQVRAIFRTYLEAGSMLPTLQAIKKRGWKTKRYQTTEGQWRGGREFDKSTLQKMLTNVTYLGKVTYKGDVFDGEHEAIVDEELFGQVQGLLRRNRNSGGRYVRNKYGALLKGLVRCRHCGCAMSHHFATRGDRRYRYYVCIHAQKNGWSECPAPSLPAKELEDFVVEQIKSLGKDPAVLEDALRATQANLQAEVDGLEARRKEVEARIRQFGREVGKLAPRAGFDEAATRELGHLQARMQDEQLEVAKLNEQIVRLRKRMLDSDELTGAIEAFDPLWDCLSPTHKARLIHLLVDRIEYDGDAEAIAVTFHPTGIRSLTDQPQEDEACQTA

SEQ ID NO: 3412 - protein, 520 aa, unidentified
  source 1..520: note = uncultivated organism
MRSKVETRTEIRCAIYTRKSTDEGLDQDFNSLDAQRESAEAFIRSQQHEGWVAVPDRYDDGGFTGSNMERPALKRLLADIQAGKVDCIVVYKVDRLSRSLIDFARIIEVLERHGATFVSVTQQFNTTHSMGRLTLNILLSFAQFEREVIAERTRDKMSAARRKGKWVGGMPVLGYDVDERGGRLIVNEEEAARVRGIFELYLKERALLPTVQELARRGWGTKRWITKKGHERGGTPFNKTTLYRFLTNAIYIGKVDYKGEIYEGEHDAIVADEVFSRVRALLRENRRNGGSEVRNRYGALLKGLLYCGPCKTSMIHAYTSQDGKRYRYYVCSHAQKSGWDTCPVKSLPANEIERFIVDTIRHIGKDDGLASEVIRQAQAQNRHAIESLRQERAFLEKELGNLDGEVRRLIKSMDQQAGSTKTARMAELQDRIRETEQRATEVREELLKTEGEHIDQDKMAAALSLFDPVWDALLPKERVRVMQLLIERVVYNGPNGKVSVSFRPAGIQALAFEAETAKRR

SEQ ID NO: 3413 - protein, 572 aa, unidentified
  source 1..572: note = uncultivated organism
MNSTPNKTNLRAAIYLRVSTDEQINGYGLTVQEEKLKAFVNFSGYTLEDKHIYRDEGFSGALPASERPGASQLFADAAKREFDVIIVYRLDRLYRKASYLLQAVEEFNKDKIAFRSVTESFDTTTPYGKGMVGFLAVIAEMEKDTIRERTTNGRISAAKDGKWVTGVPPYGYVVIKKTKKLKIVPEEAKWVKLFFRWIVDDRLSLREVQKKANEMRIPVPRRKVSKKETLKVWHKRTIGRILTNETYTGSAFYRKYKRPFNNLTSLIDESLLREKSGWIEIKVPAIIPRETFEACKRQLLKNREFSKRNQKRSYLFSKIIYCGNCGFKLFGGYQPPRKDGNNGTKYYHGLCTKTEVGTTQRCSACEQVAETRLTPVWDKIKEILKKPELTLERLRKYNGEKVKKDDTEEQVAQIDKSLTALALKRHRLAQIYSEDEEIDHESYKKSLTECRAQEDQLRQDKMRLERKLLDRKGIKKMSELIETQYQRLAKKLDNLTYDEQQEALRLLVKRVIVYPKKAEAEVELSFNAEKQANSHGLAALVGVASPVLWDKNANVGLTISKGNELLRDNNIG

SEQ ID NO: 3414 - protein, 564 aa, unidentified
  source 1..564: note = uncultivated organism
MPQRAGTTAHRSPRSAYAIYTRQSRVRHDITLSSCDVQFDICRDFAEAVMPRGCTWCGSRYDDPGQSGERFDRPALQALLKDIEAGGISHLIVYRLDRLSRRLADTVRVFDILRRHHVDLDIVTAPNLGESASDQFMLNMLASFAEFEHGLISERVRDSVRARRRGGRRLSGKPPFGYDLDKATKGLIVNDGEAHEARKFFRLAADGQTPRQIAEYATKRGWTTKTHISRSSGKHLGGNPWTARQILELLRNPVYAGCLRGETGGQRPGDHPAIIKPEQFDEVQSAIAARRPATRKRQSLDLPFKGKVFCGECGRVMSPHVVHNRQKPHIRYVHYRCRSQAGGRPPCKGVSVPAEQLRIFILDVLRDEDELAHDADLSTEARQALLSAVRLIDEFRVPDPYLAIGDIIERIVFNRDAIRVVFSDPALQDLLDGPPCEPRYPLAAKCLVGHRPERCRTAWFSPRNPSPRATSHVTDPGHYAPRGFLERLLLTGAAMLTNGVLGLLALRKQVGRSAPPALTVPVCAEKGGGECTPANPRGHTRGRTAARGSSGSPRLTPSPCSNAP

SEQ ID NO: 3415 - protein, 584 aa, unidentified
  source 1..584: note = uncultivated organism
MPAKGRGGNLPSAASSGGFRRCAIYTRKSSEEGLEQSFNSLDAQREACEAYITSQRHEGWRALPTAYDDGGISGGTMDRPALLQLLRDIRARKVDLVVVYKVDRLTRSLADFAKIVEVFDANGVSFVSVTQQFNTASSMGRLTLNMLLSFAQFEREVTGERIRDKIAASKRKGMWMGGVPPLGYDIQDRTLVINEEEAQTVKYIFEIYVTLGAVRPLQEQLDAERITSKRHTSAKGNSYGGRPISRGHLYRLLQNRLYRGEVVHKDKTYPGQHEPIIDQDLWDRVQAQLERNRIEQKAQQTTIESSLLVGLVTDQAGERLVPTYAAKNGKRYRYYVSQCLITGTRNDAPHAIRVPAADLERLVSHRFCRWLTSPAELIDALAPAVPATKHPAIIAAAARLATTWNVTPTINRRDFLRAVVDRITIADTGIEIAIRPLALAQHLLGRHSNSTAVGTNPDPDQQHPTILTIDAQLCRTGLAMKLVAEGPEAIPQPDPTLIRLLARAHAMRKELETGHHDSIDACASAMGVTSSYISRVVRLAYLAPDITAAILDGRQPANLTAARLAQTSELPLAWSEQRRVLGFA

SEQ ID NO: 3416 - protein, 512 aa, unidentified
  source 1..512: note = uncultivated organism
MFANSLQPGPVKIAAYIRWSTDEQGSGTTLAIQRERLQKFVESQGWELRDELTFVDDGCTGASLERPALARLRDAVQAGQVDCVVVYKLDRLSRSLLDTVNLVRREWAGKAVLISATEHFDTASPLGQMIFNLLVSFAEFERSLIRERTLAGKRQRARQGRNAGQRYPFGYRRADGGGWSLEGYDEAAGRLTGPAATVRRIFENFLGGLSLSAVARLLNGEGVPSPGGSVWRFGYVARILDNPCYAGIYSYGEVEPSAVGAIPPLVSPEEWEAVRRRRGGAAGGERRAPRGNYLLSGLARCGRCGSPLAGSQGKTRRYYVCMGRVQRRSCDCAAMDADSLEAHVVGELLGALPPPASGALALRLQAVVAERTRVLHGALALAAREARRNRRLEEQFLQGEVDARRYAELAQRAEQAVIAAEGAVDSARKALAAAERGASANGQVRPCDGWAALALEEKRRLLREGVERLTAHRGSLLEVHITCRPSVGATRLLEEGCLRQILQELAEPPHNK

SEQ ID NO: 3417 - protein, 695 aa, unidentified
  source 1..695: note = uncultivated organism
MNGGNGKSGNGNGAIRGIDPPATGVKPPLRCAIYTRKSTDENLDSDFNSLDAQREAGENYIKSQAQEGWLALPDRYDDGAYSGATMERPALQRLVADIEKGRIDILVVYKLDRLSRSLLDFAKFIEFLEQHKVTLVSVTQSINTKDSSGRLLLNILLSYAQFEREVITERIRDKVAAAKRRGKWMGGTPPLGYDIDRPHKRLVINNDELPLVRHIFRRFLQLGSVTALMQELNGKGLRTKAWVTVKGDKRNGVPWNKSHIYRLLNNPIYIGRVQHKGKTFPGEHEAIIEKSLWDEVHKKLAEGSRIRGNRSRRKTEALLSGLLRCGHCGTSMGVTFTKKNGRTYRYYLCLKANKSGYDACLVKAVAAGEIENAVLQPLRAVFRSPDMVAQTYRRIERAEREKREMLVVEKERLENELVVIQSNAARLLHSETSFASEELEKLEEQRGELETTMSAVTAELDDLTNRPSTLADVSRELSTLDSIWEHLFPAERERIMKLLVEVVTIFEDRIEIAIKPEGLRAVADELSVQADDKPSTERTPTSTRTRKMKDSPPKSRITHLDSSSPDLVERDGSLVLVIPMQLKRRGGRKEIILPQGFKNQTGPHDSPVQKPLVLALARAHQWKEHLEAGRFATVGALADAVGLDRAYVGRVLNLTLLAPDIVTAILDGREPSGLSLDKLLKPMPGEWGEQRLALG

SEQ ID NO: 3418 - protein, 505 aa, unidentified
  source 1..505: note = uncultivated organism
MDKQVQVIRATKHLNDDDVIRVAAYCRVSTDHEDQINSFLAQMQYYNDYIRGNDRMRLVDIYADEGISGTDMKKRDEFLRMLKDAKNGKMDRILVKSVFRFARNSLDCIEAIRELKSNGVSVYFENDNIDTEKMNSEMMLYIKSAFSQSESLSHSRRVATSVRMRMENGTYLGGAVPYGYRLNGRELEIVPEEAERVRTVFRLYLSGIGKISIAKYMQQTETGDMVWGLGRINYIIDNERYMGDYMMHKTYTPNVLPLRNRKNRGEEARYYYENAHEAIISKEDFENAQRIKRDKTTFFSGDRDNKSFFTQKVRCRKCGWVFRKVNGVDYELWACSRKGVSIDVCHSPKLKKEELESAFIRMFNSLQENRKKVLDDTISLLQSLKIKCNMGNADLAEIDAELALLATQNKAYADMYATGILDQVTYSEKVDRIKGKIADLRSRRLKVLNADEEERCIEGLRELKRNLETMPHSITEFDEALFTEIVDVIFVEQDGSIAFKVKGDL

SEQ ID NO: 3419 - protein, 544 aa, unidentified
  source 1..544: note = uncultivated organism
MPQKIYKTGIYARLSKEDADGIESNSIQSQRAICLAYIESHEDLELVDTYIDDGRTGSNTDRPGFQRMLADMRSGRIDCAVSKDLSRFSRNYIDAGNYLEKIFPAMGIRYIAINDNYDSMAPGAGSDTITLPFKVLVNDIYCRDISIKIRSSLEVKRKKGEYVGGFAPYGYKKAPQDKNRLLVDEDAAEVVTMIFGMFKDGTPILKIADRLNASGIPTPMDYKRIQGVNFQTAFRIRERSGWEYVTVKRILSNIVYTGVLVQGKRGTPNHKVRCVRPKEEADWIQVENAHEPIISCTDFETVAELMRRDTHCVSGSDRHSLFSGFLFCGDCQASMTRKTQKRGGKQYVYYNCGGNKRTRQCSPHSFSEAKLADIVFHAIHDQIEVVLHLDEVLRFIDTLPQQNRRAFSYEAQMTRLEEEIQRYKKLELGLYENFVDGIINKTEYTDFRENYRGQIEEKQAALLRLKREQQDAAAMGSQNRAWVQVFAQYENVQELDRRLLVALVDKVFIYEDKRVEIVFRYRDEFEKAMEFAKGHAGCQIPAAG

SEQ ID NO: 3420 - protein, 526 aa, unidentified
  source 1..526: note = uncultivated organism
MADAAIYIRLSEEDRDKRDNDSESIINQRNMLTEYAGERGWNVYKVYSDEDYSGSDANRPAFNRMIADARDGKFKVILCKSLSRFARDVSMVETYINGLFLEWGVRFISLADYADSSQKGSRKNIQINSLVNQWYLEDLSENIRSVMTHKKKQGQFTGAFAPYGYIKDPGDSHKLAVDPEAAAVVKRIFQLYLAGYGNKAIANHLNDSGVPCPSKYRLMKGYKSNRNGAEAMALRWSDHTVWHILRNPNYTGDLVQCRYGKPTYKSKSVKEKEPGEWVVAEGTHEAIVSKEDYERVQAVKAGRGLRNRNAGVNRAVSNVFAGAVKCKLCGRSLVLSGSGKQNNGTRYLRCAGRKSGVAPCRCAMVKYDLLTQEVAKRIQALIRRYCDFGRLEKDTRRSRDFSGEAAALKKAGEKNLFEQKRIDSALSDAYLDKSDGVITGEEFAVISARLKIRREDLAKESAYIQGQMEAIASLRDAESKLDRMMARYQGLTGLNREIVNAFVETIYIGERDRQTNDFDLEIHWRV

SEQ ID NO: 3421 - protein, 549 aa, unidentified
  source 1..549: note = uncultivated organism
MKLSNQTFKAAAYLRLSKEDADIQKSESDSISNQKALIRNFVKDNSDIEIANFYVDDGFTGLLFDRPAFQQMLSDITAGRINCVIVKDLSRFGREYINAGKYMQQFFPAMGVRFIAINDAIDTYKNNDHTQAVMLSVKNLMNDNYSRDTSIKVRSVLEIKRQNGDFVTNFCAYGYRKCADNHNKIEPDEFSGKVVQDIFKWIIEGFSLYKIAEKLNDMGIKTPMDYRLENGERFYTNFKKNETSVWSHNIVKRIAENPVYIGTLIQGRTTTPNYKLKKNVVKKDMEEWAIIENNHEPLVDERTFYIVQRLLSLDMRTSPKQDKVYTFSGLVFCADCGAPMIRKTVPGKEKSYTYYVCSENKKNKTCSSHRISENILEKRVTEALRDFIDELIIADEVINKADNSAFNRIDLKKMQERINKNLSEIEKINFDIAELYSDYKGGMFTQKDFLIIKKEFEKKKAAAENAVLKIKEEIENSKQANADNPALIEEFKQFRNITEITRNIAVRLIKQIKVYEDGSLYLELDCEDHLCKYMQKAEMIKQLSMREAI

SEQ ID NO: 3422 - protein, 622 aa, unidentified
  source 1..622: note = uncultivated organism
MARNMNRRQITALYERLSHDDELQGESNSITNQKKILEDYAAQHGFTNIVHYTDDGISGTRFDRPGFQRMISAVEEGQIAVVCVKDMSRFGRDYLQVGIYMELLRKNGVRLIALNDNVDTDKGDDEFAPFRNIMNEWYARDTSKKVRAGFQARNLAGKHTSSSVPYGYLKSESDKNQWVIDPVAAPIVRRIFQLTLEGKGPYQISKILSDEHIEVPAFYHQKLGIGLWQTREIKNPYIWSSSTIVHILTNPSYLGHTCNFKTRKHFKDKKSHYVDQDQWTIIENTHEAIIDQDTYDKVQQLRSGIRRYPDGWGETHPLSGLLYCADCGSVMYIHRVNNGKRIPQFTCSNYSKLPVGSRCPTQHRVNGEHVMILVRETLKEIIRFSEEDEAAFEKLVKDTVAAHQSAEAKNSQQRLTECKSRVEELEKLLCKIYEDNALGKLPDKRYQMLSNQYEAEEAALDSEIRKLQAEEEKQKKTTYSASRFMGLIRKYHDFEELTAPMLIELVDRVLVHERDIKGCPDSPQTIEIYFNFLGKLELPGSDAEPTPEEIEMEQKKAAARARRREQYRRRVESGKAAEYYERTKAARKAKMDAEKEACRAEDREKGIYYFPNGPKAKKTGGR

SEQ ID NO: 3423 - protein, 516 aa, unidentified
  source 1..516: note = uncultivated organism
MTAAAAPARRRCAIYTRKSTSAGLEKDFNSLDAQRGACEAFIRSQPGWELNPEAYDDGGFTGANIDRPAFTRLLADVDAGKIDIVVVYKVDRLSRSLLDFAKLMDRFTKAKAAFVSVTQNFSTADAMGRLTLNVLMSFAEFEREMIAERTRDKIAASRKRGKWTGGRIPLGFVVREGKLTIDEHEALTVREIFATYLEHRSIVRIIATLKERGWATKLYESREGKIRPRRAWTKDAVLRVLRNPLHAGLVQSGGVLFPGEHEAIVAPEEFRRVQELLGRPRCGLPPRALVPGYLLRGRLYCGACSTLMSPASTRRGNREYRYYRCLKRDKEGSTGCTGGPMPAKGIEDFVIERLRHTLANGGLVSEVVGAMRERVAKTTAAHTTEKQLLVEKIAQASSRVRNLTAQAEEGTVIGHGRTVLHERLEERGAELMALQERLDRIERELAQLEDARVEANWLEQTLAEFDAVWEVLTPENQTRLVRAVVDRVVVDEATGSVRMYVADLSCAEVQGLAESA

SEQ ID NO: 3424 - protein, 503 aa, unidentified
  source 1..503: note = uncultivated organism
MNNRIDAVYARQSVDKVDSISIESQIEFCKYELRGGSYREYTDKGYSGKNTDRPDFQRLLSDIEAGQIAKVVVYKLDRISRSILDFARLMELFQKHNVEFVSSTEKFDTSTPMGRAMLNICIVFAQLERESIQQRVTDAWHSRCQKGFKMGGKTPYGFRTEPYVMQGIKTKWLVIKPDEAEFVRLMYEMYLDPRMSLRDITRTLTSQGMKTYHGRPLSRATLSVILRNPIYVMADLDIYEFFKSQGTEIVNSPEDFIGTNGCYYYQGKGNNDNKHTHLQGQTLVLAPHEGFIPSDIWLKCRKKLMASQSYQPARKARNSWLAGKIKCGRCGYALMAAHSQGRLYFRCTTHNENDSCPGCGTIRTLEFEAFVYGEMLKKLNEFKTLTGRTKAAKANPKLTAKRLELAKVEGEIDKLVESLTAAGATLVSYVNAKIEELDAQRQMLTREIASLTLDTIPPAQMEAISNYLDKWDTVDFEDKQKVADYLITRIRATSESVEIEWKF

SEQ ID NO: 3425 - protein, 621 aa, unidentified
  source 1..621: note = uncultivated organism
MDNEEKKIAGVYIRVSTEDQAREGFSLGEQEEKLRALCKYKGFEIFKVYKDAGISAKDMKNRPAFQQMLEDMKNGLINYIVAYKLDRVTRSVRDLEVLISTLEKHNCYLICDRDDVNTSTANGRFFVRMLTVLSQLEIEIVSERIKFGMTGAIKAGHIAGPCPIGYYRDTDKTFKIDNATKDIVLRIFNLYLEGKSYQTIANMFNEEKILFPEKKKWTDAVISRIINNRIYVGDFERYKNDNDKETEVFMDVVTPIITRAMWEEVQKQKENNKLAYCRDRVYIFFQKLVCPNCGNIMVCKGSGGEKKKYMYYHCQECKVYYREDLIEQCLIDYILDLVEYDYHVKKYFYPILAEKKDDESKKITEEINKLQQQKDRLKKAYMNGILEMEDFSEDYKLIEEKLSILENKRIDSLDFDKENYNPQHLMAQRDIEREKLNEHEMYKDVLLKLWTMKSKDEKQSFISKFIDTATLKKNKDGSFEIEKVNFRSSFIEQIDKLYDKGIVDIPTMIEREGKLEDVKVSVNMNKNQVEDYIENLKKELDIKYMDLGEYYFHDDKIDENYDTKTEVAKIRKSAVEFKIKKNEKPIRMIAIKQYKNFLAKPEGKINLGLVTKIVPKKKHNK

SEQ ID NO: 3426 - protein, 577 aa, unidentified
  source 1..577: note = uncultivated organism
MDRAPGNARRTIRCAIYTRKSSEEGLDQEFNSLDAQFEACAAYIASQKAEGWKLLPERYDDGGISGGTLERPAIRRLMADIDGGRVDMIVVYKIDRLTRSLADFSRLIDRLDAADCSFVSVTQAFNTSTSMGRLTLNVLLSFAQFEREVTSERIRDKIAASKKKGMWMGGMVPTGYDVDPDPNARGLIVNAGEAGNVRTLFALYDKHECLSTVASKAEAQGIRSKHRTFASGKQYGGAVLSHGAVHKILTNPIYVGRIRHKLEVYDGQHEAIIAEDLWVRVQDKLQAHAARPRVRDPVTKALKQPDQKSTLAGKLFDETGDRLTPSHSRRNTESGHKRIRYYVSRRLMKGAADDPSGWRLPALKLERAVCGAVASHLDEVGEKLFCDPDPIAIYRAQDALGRVRARLDARDGETLRVVTQTVRVSPNRLRIDLNRVGLAQALDIAPSALAEDQLAIKTGFELRRRGVEIKIITGQFERAPDQTLINAIAKARQWLTEARRGVSLAAIGRRYGWTDSPIRQRVRLAFLSPDITEAILDGRQPPELTLQHLLTHPIPLDWDAQARVLGFSGRTFPCSNQ

SEQ ID NO: 3427 - protein, 518 aa, unidentified
  source 1..518: note = uncultivated organism
MRSLNDKEIEFLKKLLTTKQKQHGITKLRTAVYNRKSSEDEKQTSIETQYDECINFIDNYDFLELTEKFQEDNVSGMFTDIRTEFNRMLDKVDNGEIDVIVVMKLDRFSRSIEDASRSIKRIQQANCILIAGDINCMPNTPSDGLFFNLMTALNQYYAQRSASDIMASECNNAKKGLATGLVPYGYKIVRPEKKDPPQIFINESEAPAVRLIFKMIAQGNSYNQVIDELDSQAYRTRKGEKFCKSTLNSMLKNEKYCGNIIYNRIGGKRKKHRVLIEQFDEIRNEGAIPPIIDKELFDKVQDILTQKSVCRPKRNISTYILTGVLCCKNCGKPMSGSLTGSKRIRNYICPCHTKKGIEHCDTKDINADKLERAIKLTLTDLINAYIAKTNIPLKDIKGIYENYTKDKTNYERKITDFDNTIKKLVLLSASTTDNVLIEEYQKQVKECNTERQRLQAKKTAKEKAINQLSAILCGKNKIHTTIPTNKIFNNVNISRQLVQLLIDKIHIDNNEIKIQFKT

SEQ ID NO: 3428 - protein, 590 aa, unidentified
  source 1..590: note = uncultivated organism
MRDEDTTQLKVAIYLRVSTDDQAKNYGLDMQEDSIKAYIKSKGQFPDGREKMVLAGESYIYRDDGISGTFDITDRPEFARLVEDVTKSDKLPFDIVAVYKVDRFARRLKVLLNIIDFFEKHKIKFLSVHESIDTSNPFGKAILGIMGVIAELELETIKQRTTDGRTKAIMSGKFMGSPRYGYKKDVNKKLEIFNPEAKYVKQIFDLTVFGNKDPKEIADYLFNNKIISPDISAIKNKKRKGKSKKINDDYFWRSDTVKDILKDEIYIGKYYYNKTLKGKRVPKEDWKISPYKYPRIVEEPVFNKAQEILRDSANKILLSRKRKDTHLYLLSGLLKCDYCSNNKNNLHTWNGDRKESPKGSGNYGYYYKCGHKNTSKYSGTCPTIPVPAEQIEAYVIAFIKNLFTNPEAVYKYQNNLRSTKIRKINLVRTREKLIKNINQAPQRQENLKEQHEFGIIGTKKELLDKLRTIDADIKRWNEELSETDKVLGKYELSIGYVKSFYDYAKKYKNILEDTFNHKEEVYKLIHSLIDSIVVVSRPLNPKFDKISGRKKLNQQIPESVRIVFKLPRSLMFELVKQETTTKFGVKTDAL

SEQ ID NO: 3429 - protein, 528 aa, unidentified
  source 1..528: note = uncultivated organism
MSRPTDDKKPKALRCAIYTRKSTEEGLEQDFNSLDAQRESGEAYIAAQKHEGWVCLPEHYDDGGFTGGNMDRPALQRLLNDLDAGKVDCIVVYKVDRLSRSLIDFAKIMDVLDRNHVSFVSVTQQFNTSTSMGRLMLNVLLSFAQFEREIISERTRDKIAAARRKGKWVGGRPILGYDIVSNANGGRVAVNEDEAAQVRQIFDLYLHHRALIPTIRELDRRGWRAKQWTTKKGHTRGGRRYTKEALYRLLTNVAYIGKVRYHDEVYPAEHPAIVNEALWHRVQDAMRHNGRNGGTGSGVVRNKYGALLKGLLHCGPCGCGMMHTYTAKGSRRYRYYVCMNAQKRSWENCPTKSVPAAEIERFVVDRIRAVGQDNKVLARTLEQARKQSREGLDALQAERRRLERELGQHSADVRKLMDQAGTPGESPTAARLADLQERIRVAERRATEVREQIIALSEKVVDEKELARALSLFDPVWNSLSPGEQARVMHLLVERVTYDGAEGKLSIAFRPTGIKALAEEVHAGGMEN

SEQ ID NO: 3430 - protein, 578 aa, unidentified
  source 1..578: note = uncultivated organism
MSDPGERALSMPRNKVGRRPRRICAIYTRKSSDEGLEQEFNSREACEAFIASQKHEGWIASPTPYDDRGLSGGSMERAALKQLIADIESGVIDIVVVYKVDRLTRSLADFAKLTELFDRHDASFVSVTQQFNTSTSMGRLTLNVLLSFAQFEREVAGERIRDKIAASKRRGMWMGGNPPLGYDAVDRKLVINASEAETVNHVFQRYVSLRSVAALKRELDRDGIVSKVRQLKDGRQFGGRPLSRGALYLLLRNRLYRGQIAHRGKVYDGQHLPIIDETLWEQAQKRLERNRRKRISGANTPSQSLLKGLLFDRRGNRLVPTHANKKGRRYRYYVSASLLRGEKPAQGLRIPASDLETVVSGHLNEKLRDAGWIKECFGQGLAASEIKTLISGAQQAAKRLQVSSGAALAERYQALRSMLGKVEIDETRIDVTINLPGLAKDLRQLTDLDLAQPPEPDAETIIVEAHLLRCGKQVKLILGDVNTETHHIDKRLVTAITNANTWFEMLIAGKVTGISDIAKKAHVSAPHVSRSISLAFLAPDIVEMILEGRHPITLTPDRLKRACPLPLDWSEQRALLLT

SEQ ID NO: 3431 - protein, 638 aa, unidentified
  source 1..638: note = uncultivated organism
MQLALFLLGGILMEALEQLVHANKKMAGIYIRVSTEDQVREGFSLGEQEEKLKQLCKYKDFEIYKVYKDAGISAKDMEHRPQFQKMLEDMKAGKINYIVAYKLDRVTRSVRDLETLISTLEQYHCYLICDRDDVNTSTANGRFFVRMLTVLSQLEIEIVSERTKFGMAGAIKAGHIPGSCPLGYYRDKDKVCRVDHSTKDIVVRIFNMYLEGKSYQTIANILDREKVLYQEKKKWTDGAIKRIIHNRVYVGDFERYKYDASKETELYMDVVEPIISRAMWEEVQNQTTVNQKSFSRDRVYIFFQKLICPECGNIMTCKGSGGEKKKYVYYHCTKCKTYFREDLIEECLIEYILDLIEYDYNVNKFFYPILAEKKTSETEKIEKEIKLLNEQKDRLKKAYMNGVLEIEDISADYKLIDDKLAKLESQKLDALDYDKEIYNPAHLLAQRDIEREKLTEKGMYKDLLLQLWMQKTKDEKQSFISKFIDTAVLKKNDEGEFYIDKINFRSSFIEQIDKLYGEGVIDIPSKIEADGNIDDVKVSVNLNNKQLDEYINEMKKELNINYLDLGEYYYHDEHFDENYDTKTEIATIKNKAVEFKLKKNEKAIRMIAIKNRKNFLAKEEYKMRLGVVTKVNKNRSKK

SEQ ID NO: 3432 - protein, 535 aa, unidentified
  source 1..535: note = uncultivated organism
MNDSTRLIGSGADRALIYCRVSTDDQQDHGTSLESQQAACERYAADHGYTIQPEHIFSGWESARGWRDRRMLRRALDVVRSGEVDVVICYAVDRLSRRQAHTAIIAEIISEENHCRLEFVSETFEDSAVGEFIRNAKAFAAEIELEKIRERTVRGKYTRAKAGKIHNHGPEMYGYRRDKVATKRVIHEAEADTVRRLFRWIGEDGMSVRGVVRRLNDEGVPAATASRVTTNDPDRVPRWGPGAVHRMLREPSYKGEAFAWRWESRGNHKQPHLRPKDEWLPLPEGTAPAIVSQELWQAVQARLATNKGDATRNATRSYLLRGLMTCRVCGRSMWSSPERDRRVYRCSSRDTRHGACGGQRVPAEPIEAWVWGEVRDLLQHPARIQAHIDRLRQSGGTATMEADREALQRRVAKIERQQEGLMRQLRESGGEGRLWELGQAEIAASEKERQQQLAAIEQVSTQIAEQQAAVVHLDSLAAYCATVSSNVDRLGFDDRRTTLEAFDVRIIANGIDRQQWRLDWSPPDGVGVGVTSPTC

SEQ ID NO: 3433 - protein, 546 aa, unidentified
  source 1..546: note = uncultivated organism
MKKAAILIRVSSEEQVKGNSLDEQEKKGKQYIKLNDWSYYTTYRDEGIGGDTLERPGLQQMLKDAEAKKYDVLVVYKIDRLSRSLKNFIEITEKLKSYGVEIKSVTEPFDTSNPIGKFMIQMIANFAEYERELIKERVYMGQLASMKNGRWKGSPPYGYDLKDGKLVINSKEAEVVKRIFKLLIDKDPDQRMPLIKIQNIVNSWKVETKLAHSKRKRSSPTFWDLAYIHQLLTNPVYTGFTYIGKYTRNPNPMGRPKKILRPKSEWIPYHSPPIISKEDFEIAQMELKKNAEFALRKSNGQETMINKILYCQSCGRKYSFYRSNKFKKPKIIYFCQGRKKRKTDIRCPSKSIMAWRIEDPLWEALQKMITHPSFAYREIKRNLEKEFNIEKVKKDIKVKESLLNSLNAQYERLVDIYIKGGIDEEMYISKITSLKRQKETVTRELFELKQEILNEDQVKKRLQKLREAYDKMIKNIDNLTYEEKCKITKLLVQKVETDGYETATAYCILPDLPVVLHHDQRVDNESKPIRFKFTFKLRPNIWAHSN

SEQ ID NO: 3434 - protein, 524 aa, unidentified
  source 1..524: note = uncultivated organism
MKLAVVYARYSSEKQNDQSIEGQLDVCQKYAAQNGLEIVDTYIDRAMSGTNDNRPAFQQMLADCAKPVPWDIILVYAIDRFGRNSIEIAVNKQKIKKSHKTLISATQRTSENIDGTKNLDGILLENMYIGLAEYYSAELSQKVRRGFHENRKKGLFCGGSIIFGYRVVNKRVEINEDEANIVRYIFDQYAHGRQAKDILNELTARGIGRRNKPFPINTFYSILHNPKYIGVANLSDGAYTNIYPPIIPKELFEKVQMILEKNKRGSRSRDTDYLLTRKCICGYCGRNIHAETGTARDGTVRHYYKCDGRKNHHDCQKSVVRKDDLEQLVLQITRDIIGTSENIELIADGVMEIHEKRLHDHSVLNLLLAERDKLQKVVDNIMKAIEQGILTPTTKARMEQTEQKLSDINVQINAEQCKLQSQLKREQVIEYLKHTVWQKPQLMIYTLIQKIVLYDDKIEIYYNYADPMKADASPADEHRLFFSINGSNLLCSVSPHQNNPNLGEDPKFGLFFTRDSFRIIIRFE

SEQ ID NO: 3435 - protein, 519 aa, unidentified
  source 1..519: note = uncultivated organism
MKKVTKIEENKSPKAAGKKLRVAAYCRVSTGSDAQAESLEAQITHYENYINSRSDWEYAGVYYDEGITGTKKEKRPELKRMLADCKAGKIDFIVSKSISRFSRNTTDCLELVRKLLTLNIPVYFEKENINTGSMESELFLSILSSMAADESLSISENSKWSIQNRFEKGTFKISYPPYGYDWDGEQMVVNPEQAEIVKQIFASALAGQGTSAIARKLNEDQVPTKKGGHWNATTVKGILRNEKYTGDCLFQKTYTDSRFNRHANHGEKNMYLAKDHHEAIISHEDFEAAEKMLKQHAREKNISSDSEKYQQRYTFSGKIICGECGGTFKRRTHYTAGTSYIAWCCNTHLSDKDSCSMQFIRDDDLKLAFTTMMNKLVFSSKVILKPYVEGIRDGSSDDSFHRIQELTTQLAKNTEQREELQKLTAQGFIDKILFNTETNKLLSQADEYRKEIEALNNSVSSDVSKVTAATDLLHFAEKGEMLGAYDGELFEKYVRRIIIKSRTEFVFELKCGLALTERI

SEQ ID NO: 3436 - protein, 505 aa, unidentified
  source 1..505: note = uncultivated organism
MSNQKILGYARVSSEEQAQHGISISAQRDILNGYAAMNQTTIEIFEDPGYSGKNMNRPAITRLMDRCRAGGVSAVVVWKLDRLSRSLRDTLTLIEDLFQPRGITLVSVTESIDTSTPSGRMMLNLLASFAQLEREQDSDRVVMAHKHLARDCKYLGGHVPYGYAIDAEKNYQLDPATAPMIRHAFDLYRARAGYSAILEYLNAPDRLPLFRRKSPFTKQVLFSLLSNEIYSGVYVRRLGADPRHRVTSPETIRVPGGVPALLTPDEWHQVETIRSENKTSHALYTARTVYPLSGLVFCAVCGKRMPLNHGGKSRSGEPERYYTCRNRCVKPARLENAEKALFSALEYYNQHETQLRRACALANDYSAGADLGNSAQAAKLEKEIQQNNRKTARLIQFIEEHGVSAPASMLQELTALEQRNDSIRKQIENLSKPRARYDADKTVQAVRAVLANKKTPPEQLQQLIHAAVFRVRVHPDSYEIILAWHTCGGDEPPQYVCHAVTRPIR

SEQ ID NO: 3437 - protein, 522 aa, unidentified
  source 1..522: note = uncultivated organism
MSRRLRCAIYTRKSTEEGLDQSFNSLDAQRDACAAYIKSQAHEGWSATKVIYDDGGFSGGNMDRPALQRLLADVDAGRVDVIVVYKVDRLTRSLADFARIVEILDRAGASFVSVTQSFNTTTSMGRLTLNVLLSFAQFEREVTGERIRDKIAASKAKGMWMGGVVPLGYDVRERALVVNPTEAALVQHIFVRYLALGSTVLVAEELRRDGLRTKRWTSRSGREIGGCMFWRGAINHILKARIYRGEIEHKGKVYPGAHQAIIDLSTWDAVQAKMRGAAPTEARARFHKSTQLLTGIIFDDAGNRMSPSHTSKKGRRYSYYCSAAVLRDKRGQPGAIQRLAAFFADDAVIAAVGERLRPSWCADQPIRMRVREAVLRVTVKSSGIVALVRAEAISDAGDNDEPFAIIASGTLRRRGNAIVIDRANAWQAPKLSSSLIRAVVLARQWADDLATGKVASAREIARQHGLCHLYVGKLLPLAFLAPDLVQCLLEGRQPRGLSISNLLAAPLPLSWAEQRARFHQGI

SEQ ID NO: 3438 - protein, 575 aa, unidentified
  source 1..575: note = uncultivated organism
MIIHYNHERGDNVKNIIVNQIDYRRTVATPKTLSSPADTSPHRHRRETHTIRAAPKEAPKLRVAAYCRVSTDQDSQETSIENQKDHYERYIRNNPEWQMAGIYWEVGVTGTKTEKRPELNRLMEDCRAGKIDLILTKSISRFSRNTTDCLQLVRKLTSLGVRIVFEKENIRTGTMESELLLTLFSSMAEEESHSISSNSVWSVKKRFASGTFRYSKAPYGYELHDGTFEIIPEEAAVVREIFSRVLAGEGTPSIAKALNERQIPTGTRTRSGEPGRWSAAMIRGIITNITYTGDVLMQKTWHDREYRCLRNYGEKAQYYMDDHHEPIIDKKTFELAGHAHRQRGREKGNIPMEDRRKRDNPHSRRNHFSGKFVCGICGAKMRRVAQYTASGTRWHWSCMAHLEDRSACPMKRVSEQDLEHAFCTLLNKLHYASVLLFDDYLADMQANIMVGDLPATRLYRQKILDNAAVREEISQNLSRGLGDPARYWQKLLELSREEAELKEEITRIWNSETGLDSIIRLKNDAARFAFSPDDADIAALFAGNVDCAAVTAEKEAVFYMKCGFTFREPLVRERR

SEQ ID NO: 3439 - protein, 554 aa, unidentified
  source 1..554: note = uncultivated organism
MTSKRQIRCAIYTRKSTEEGLEQDFNSLDAQREACEAYVVSQKSEGWVASREHFDDGGFSGGTLERPALKRLMKEIEAGKVDVVVVYKIDRLSRSLMDFAKLVEVFERRSVTFVSVTQSFNTTTSMGRLTLNVLLSFAQFEREVTGERIRDKFAASKKKGMWMGGCPPLGYDIDNRKLVVNATEAKTVNLIFRRYLDLGCVRALRDDLADRRIVSKVWTSTSGRAHGGTPFDRGALYCLLKNRVYIGETTHKGKSYPGEHKGIVARELFDTVQERLGSLRRRTLGKTSVPQDAPLAGLIFDDRSTAMVATYSMKPDGRRYCYYASRHADGSSSRAISRVPAAAIEGLLATTLGRLGLSSVDREDSADLRSLVRRVEVGSDDVVLRLDSAAALRRSRTGEAAGFSQRDLIAHWRAKVGADAHLVEEKEQFVLTLPVRARFRGGRASVLSTSGTAPSRLPEAPLIKALAKAHRWRAMLEAGEVGSVEALAVRLKQERKHVNGILNLAFLAPDLTKAILNGEQPPGLRLAHLLAADLPLSWTEQRALIRHGMPNSIP

SEQ ID NO: 3440 - protein, 545 aa, unidentified
  source 1..545: note = uncultivated organism
MQKIQCAVYVRKSTEHGLEQEFNSLDNQELACKSYIASQTFQGWEYSQTYSDAAISGGTMARPGLKQMLEDIKAGRINCVLVYKIDRLSRSIYDFKRMMKEVFEKHDCNLVSITQSFDTSTAMGKLTLNMLLSFAEFEREVASERVKDKMRATKAKGMWVGGNAPLGYDLKFGKLVPNEQEVPIVTKIFETYLESTGLIDCRNKLIEMGITGKRWITKKGEERGGNKMSCAIVERVLKNQIYLGKLPNKSTNEMFDGQQPAILDKDLFDRVQQKLSDKNNHKNSPYTRGTPLLFQKVFLPDGRWLKNRTGRRPPRNYRYYRLDKVSLPAGDLENIVRDLIHKFLNSDMTKLPDEKRLAFKQGEYSDELLKVMIEKIVYNDHKINTFIKVGNIDYLKNFQKQDYMNSANDPMEYYITTDGEYAVIETPLYLSTGTCLNQRHGGLEVELLTMDDNTQMLIKALSYGWKYKRDYENGVGIKTIAKNEQRDQRTIYKYLNLAYLSPRIITDIMNNKIPTGMNLQKLIQLASKYDEFKNQEQAFYDSDSK

SEQ ID NO: 3441 - protein, 512 aa, unidentified
  source 1..512: note = uncultivated organism
MHKSKILKCAVYLRVSTHKEEQKSSLHYQKEMFIEYVNNNNWTIYNFYVDIDSGTKSKRPALIKLIEDAQAKKFDVMVAKELSRFARNIELAHKIKRVAQENNIHIVTLDNAINTLEDNISTFGIFAWLYENESQATSRRIKYSKKKRAMNGHFVGSYAPYGYNCVNGKLVVRNDITPIIVKRIFQEYIKGNGFDSIARKLFYEDIASPSQIAKKSNSSNRWSGSSIRCILRNQHYTGSLVQSKTETINVTNTKRRITTHENLIIIENTHEPIISKEEFNLVQDLMSSRKRARPKQSIHLFTSVLHCADCGKRLIFKQNRRGYICSRYNKLGRKACPPHLIIEENLNKMIINDLKKFVNILSNKKNINFMSNELNKYKLDVENKLINLKKVETSIKEQKLNMMPLLLDNTISKEDYRLFISSKDKELLDVSSNILKLQESLKENFDTNILSELKFLEKNITNLTQFTPELVNRLLKRIDVFEDGNINITYRFSSSFLTKLKEKNESLHLDSH

SEQ ID NO: 3442 - protein, 571 aa, unidentified
  source 1..571: note = uncultivated organism
MNKQSPSIKRCAIYTRKSSEEGLEQSFNSLDAQREACESYITSQQHEGWTTLSSQYNDGGFSGGNTERPALQQLINDIKAGQIDVVIVYKVDRLSRSLADFVKIIDLFDHHEVSFASITQQFNTSSSMGRLTLNVLLSFAQFEREVTSERIRDKIAASKKRGMWMGGVVPLGYDIIDKKLVVNNVESKIVNHIYERYMKLGTVRKLKEELDAEGYISKQRNKDQCRGGGKPFGRGTLYALLKNPLYIGKVAHQGKLFEGQHATILDADLWDEAQTLLNENRQDNQSRNSVKNPSLFAGLIVDDNDNPMSPSHTRKGNIRYRYYVSQAVLQYREADAGSVLRISANKIEGPVIKRLMQWLQMPDKLLNAFSHLNLSAKKQTTIIQNAKKAVKNWGELAPANKIAGLNIIIKKIQVGYESIDITLSRTGMFQYLLSTESDNETSNNKINDEFILSIPTKLKRCGHETKLIIADEYVSDSNPTTTLAIQNALKKALIWNQALTTGEVSNMAQLAKQENVTQRYIAHLIKLAFLAPDIMEAIMKGNIPPKLALDRLKKGIPLDWKVQRLEFGFTL

SEQ ID NO: 3443 - protein, 531 aa, unidentified
  source 1..531: note = uncultivated organism
MPAYKEIRPNAVAIYIRWSTDEQTEGTTLETQKERCSLYLRSQGWNVTDEFIFIDDGYSGGSLDRPALSRLRQMVREGRVDCVVTYSLDRLSRSVADTVTLVQSEWLAKCVYRSASQPISTDDGNPTGQLIFNILASFAEFERALIRERTHSGHVRRAKEGKYPGGKKPPYGYRRDGKGSLVIDSVGEDGTLQGAAAVVRQMFEMATTGPLGQGPSVIARALVEEGAPSPTGGPWWMHVVARILQNPVYCGHLVYGRLPVNPAHRRDKTAPHRLRGQKPLVELEGVVPAIVEVETWNKAQQLFRERSQICRKGLQSRNRSLLTSIARCKCGGPLSVFYDRVKTRYYRCTRNFQSADGCGYVPGMLNADKMEQAVVKAIKERYGSPELRRAAVIMAKAERESGEHQANCQRAITEIDRRLQEIDADLARVRRAARRGEIQLATFEELRIDAETERQELQAERAEREKALEQVRTIETSLSDWEALMVQVDMWDDLEVNSQRDILYGLLRSITMYRQKGSNDAPEIDLVWETP

SEQ ID NO: 3444 - protein, 504 aa, unidentified
  source 1..504: note = uncultivated organism
MPAEPVKPLRCAIYTRKSTEYGLDQDFNSLDAQREACEAYIKSQASQGWQLQPQHYDDPAYSGGNLDRPALKRLLNEIQLGRVDVVVVYKIDRLTRSLADFAKLVETFDAHSVSFVAVTQQFNTTTSMGRLTLNILLSFAQFERELASERVKDKIAASRRKGKWTGGTAPLGYDARNKKLAVNKSESQTVRTIFQQYLEVKSFGRLVRELDRRHIVTKLRDTKDAKYRGGIPFTYGPLAHLLKSRIYLGEVHHGGKWFKGEHDGIVDRGTFDRVQQLLKENGAQRGNKFSDSGALLKGKLFDDKGNRMGPTFTSKKGVRYRFYISTALRGRKEMAGSITRISAAEIEDIVESEVRKKLNMDDTAVNHVFEHVQRVTIASAKIQIVLANADSAERPIEIGWSPKPKSHAQIEHANSVTNADPKLVGAIARARGWLDQLSNGKYASIEALAAAANYNPKVIRLGLRLAFLAPEMTEAALAETADFRLQHIPKTLPLSWRDQRLAID

SEQ ID NO: 3445 - protein, 632 aa, unidentified
  source 1..632: note = uncultivated organism
MQYDIENYKRRPRTVAFYGRVSTEHEQQLSALSNQMDWYIKLAQNNPNWHVVARYIDEGITGTQMKKRPSFMQMLEHAKQGRFDLIVTRELSRFARNTVDALNATRELKQYGVEVYFVNDGIWTMDGDGEVRLTIMASIAQDESRKTSERVKAGQKISREKGVLYGNGNILGYDRVGKTYVINEEQAATVRRIYELYAGGLGEQGVADTLMAEGRKDGGGGCTWTASKVSRVLRKPTYKGYITYNRSHTENFLDHKRVNHAEKDYTLVKGDFEPIVSEELWNTCNELRTKRAACLMDSSGRKHAYGKSFPQNKWTKILYCDCGAPMRCEGIDKKANGILNMRFICSATKRIGRKTEKRYGVPCPNPYASEWKLELMAREVFRTVWKDRRTDVLKTLRAVNTYLGVNKTDTEAEQLMSQREVWNRAYDALALERVEKRLDFAEFVTKSNEIAAHIAEIDKALTELSHTAEPVNRFDVEKIGAVLSEKIAYPEGKIDPDALKNYVARIIKSNNRYVWLLSLAERLQPEQAQKIAMMQMVTYNGNEEKPASGKTEIPDMEFLRRGQNGFILNATRYRRARLTERLFASGTALPNEPIPLLQFEIDYPMAYQYQKEQGSATHPGRWQNLEVEVYLI

SEQ ID NO: 3446 - protein, 562 aa, unidentified
  source 1..562: note = uncultivated organism
MEHGNAKVRRCAIYTRKSSEEGLEQDFNSLQAQREACEAFIRSQASEGWRLVPTAYDDGGYSGGTLERPALQHLLGDIREHRVDVIVVYKVDRLTRSLADFAKMVDIFDAHGVSFVAVTQQFNTTTSMGRLTLNVLLSFAQFEREVTGERIRDKIAASKRKGMWMGGVAPLGYDLQERRLVVNASEADTVRAIFRRYLKLGCVRRLQSDLARRGIVSKVRISRKGTRSGGKVFSRGALYALLSNPVYIGEIRHLHERYPGQHEALMERKLWDRVHERLRNQAVRRGGQRPRQAPPSALAGKLFDEGGEPLYVQGTAKGARHYRYYVSRALVRGSEDHRERGWRVPAPELEGVVRAVAEQLLADRAALAEAAEAAGIEASRLPGIFTVAQGWSDRLRLATEAAAALGQLTERVDLTPEGVRVALRVPLPSEQSGSAGRAQELVLMRFGALRLRRRGIEIRLVLDDTVPPGRVDRTLLKTVARAYRWADDLFAGRAQSVGEIARREGVSDRYVWRLIRVGFLSPTIVEAIVEGRQPAELTASALSQRLDLPALWQAQEQAFGLA

SEQ ID NO: 3447 - protein, 502 aa, unidentified
  source 1..502: note = uncultivated organism
MNKTAVIYLRVSTEEQVENFSLDTQEEICRREAEKRGYTIIDVFREEGRSAKNISGRPILISLLEYCRKNKQKIEAVFVYRIDRISRITADYLAIRKKIAEQGVTLISSTEPTGDSPTEKLVETMLAGFAQLDNDIRSERSKNGLRARYLSGKLVTGQCPLGYSVVSSYAVKDIKNWDNMKKAWDLMATGTKSLREITKIMNYWGLRENHRGRIYILRPTRINTLFRNKFYMGYLSSKTYKELIRGQHVPMITEEQFYRVQAILNGRNSCLPLAKRNHTNPDFPLRRLIKCSVCGQGLTGGWSQGRHQKYGYYRCSSNGCHSTSIKLETMEQALISLLKQITPTKENLNLFTAYMFKNFHNRFSRLQKMKQSADVEIERLKDIRKLLVEKNIVGVYSDEVFKEQNSIIEEKMTISQIAKEDATIDSYNIDEVIIFIRTLLADLGETYKKASQSQVKVLLGSMFPSGLSWSYNGTLNHELSPIYTRINTFSQTSVSSSADGGT

SEQ ID NO: 3448 - protein, 538 aa, unidentified
  source 1..538: note = uncultivated organism
MKETPRFFAYCLKSFRTPVHHMETKLYAALYIRLSVEDGDGAESGSISTQRKILRHYAEEKDFTIYGEYVDDGYSGTNLDRPAFQRMLQAIEAGHINVVITKDLSRLGRNSARTADLLDEYFPAHRVRYISVTDGYDSGHLNSGAVLAAPLMMAMHEMYARDTSNKIRSALRAKMQAGEFIGSFAPFGYEKDPENHNHLVPDPIAAPLVQRIFLQAQTGKTPTQIAAALNSETIPSPLDYRHSKSGTLDAASSVSWQAATVRKILKNPVYLGHLTQGKTSKLSFKNKASISAPKSDWVVSENTHTPLIEPNCWDTVQHQLRLRTQPRTKGFVNIFSGIARCADCGAGMSTVGARSRNSVATLACGAYKLHGKQACSNHHIPYETLYNTVLQALNSVLKQYDAEQLMRQILPALNKAATMPFRKQDHDRLHEEKKQLIHKIEQLYDDKYSGRIMPEYFEHLLAQYKKREKAICHALSNPPLYQRAFSLDCLLEQLHDLLQPSTLNARTLALLIDRITISQGDYSSKTAKMQRIDIYLRF

SEQ ID NO: 3449 - protein, 516 aa, unidentified
  source 1..516: note = uncultivated organism
MADLSEAIYVRQSKDKKDSLSIKGQIDLCRHECSHPESALIYEDKGFSGKNTQRPGFQSMLKDVKEGKISKIIVYRLDRLSRSIIDFGQLWNELEKNQVEFVSVNEKFDTATPMGRAMIYIIMVFAQLERETIGERVTDNYYTRIRQGNWPGGPAPYGMVNVKIKKETGGTVPSLDYTDEFEVVKEIFYRYALEDISLGMIASDLTERGIPCKKRAAWDNVALSRILHSPVYVRADQEIYYYYKRRGIKRFSNAPEDFDGTCSAHVVGKRTGNVRKYTNLQNHVISLTNFPGRIPSEIWLACQHKLEQNRQVGNAGKGKHSWLTGLLKCGECGYSLTVRKWKDKKYLYCSGRGNLHICSKKSFHQKPEEIEYEVQKELEKILEECNREQLQMPDGEKEKQRQQEIQEINEKISRLLGLMAEASEISMKYINQELEALDARRTELMEAYSLLDNSPPAPLGACITGCPDGYKYPDRKRNDQGIIFGQLEFEQKKLTAQAFIEKIKVYDDSIEITWKI

SEQ ID NO: 3450 - protein, 516 aa, unidentified
  source 1..516: note = uncultivated organism
MDGKKQIKRCFIYVRLSTEDQHRRAEYSSLDSQKKVCKAYIASQEPNKWRYVKAFSDLSSGGNTSRPGLYELIDAIKSDKVDIVVTTKMDRLTRNIKDFWTLYEIMQKHDCQFVCATQELNSTTAHGRFFINILMSFAEFELETIRERTRAKMLSQAEEGLWHGGRPPFGYERDKDRKGLLIPHKTELVVVKKIFDLFVKLGSPAAVAKEINKLGYRTKSKHRVKFSKWTITYILSNPLYIGQTSFREKIYKGKHKALVQKRRFELVKKMLEKNKLTRTSPMQNRYNFRLKGILKCECCGSTMTPSPAKSGKYLYYRCTKVSKYSKEECKVRRIGARAIEEAVVQKLSSLGTDKKLVKEAVKKANKLSVQQTTIMKKDLQGMRRRSKEVESSIDNLIKYIEKHGALTKSGKSKLEKLEGEKEVLSNDLQKLIFEIERQKNYQIDSELLIRTLRDFGGIYNELSPEEQSQLLHLMLQEVTLSEDSIKLSLYPLGDSGKSLEYLLERPEFSESDKKRG

SEQ ID NO: 3451 - protein, 574 aa, unidentified
  source 1..574: note = uncultivated organism
MQKESKLNKKAALYVRVSTNMQIDKDSLPLQKSDLANYAKYALDIPEYEIFEDAGYSAKNTDRPRYQQMMARLRTGEFSHLIVWKIDRISRNLLDFAAMYEELKRLGVVFVSKNEQFDTSTAIGEAMLKIILIFAELERKMTSERVTAVMVSRANNGQWNGGRIPFGYAYDKVTKIFSINEKEAATVRAIYDKYEETHSLLQTCKFLNENGLSTRSGIAWNPTTARTMLSNPFYIGNYLYNKHDLSKTNYRLKTNRRPESEWILVEDHHVPIVDRERWESVNNQLKANRRSNKDGPRTYTRVNTHIFAGILICGKCGSQMCATIDRERDNGYRPSIYLCSRHRRFNDCPNKYISDIVVGPFILNYVANIIKAQNNFGATTSLETFEKKLLRGDVFSDVKGIDKAGLQEMYDMLRAGKFGTDIYEPKNVTIDDTAINERDLLLTEKRKKERALARLKTLYLYSESDMPETEYFIERKTITDELEQIDARLEEIEKNASASFSISDEDFIAKASYFIMSQQLLTKRYVNFDTMIRKIDTKIIKDFVNSVIKKIVILDGKILSIRFKNGIEHKFLYE

SEQ ID NO: 3452 - protein, 589 aa, unidentified
  source 1..589: note = uncultivated organism
MNDTGQIVIYSRKSKFTGKGESIENQIEMCRQYIRLHFGEKAANGVLVYEDEGFSGGNLERPQFKKMMAEAKEKKFQAIVVYRLDRISRNIGDFAKLIEKLNGMKIDFISIKEQFDTSSPMGRAMMYISSVFSQLERETIAERIRDNMHELSKTGRWLGGVPPTGYQSESVSSVTIDGKTKRACKLKAIPEEISLVKLVFDKFLETGSLTKTETYLLQNGYTTKNGNQFTRFTIKGLLTNPVYMIADEFAYTYLKDKNVDLFSDESEFDGVHGIMAYNRTLQQPGKANQIKPMEEWIVSVGKHEGTIEGATWVKVQMLLERNKSKSYKKPRSNVALLSGLLICGNCGDYMRPKVSQRVNTKGEPIYTYLCSTKERSKSHICNMKNCNGNILDADVIAQLKSLSEDHSDLFRQLERSKRVLMGDRQEYDNEIAQLKSKISENDNEIKGLVSALGKASGTPAEDYIMEQIDELHTKGESLKRRLAELEELTSSNAWSEVEFDLLAQMLATFKNTVDEMTVEQKRAAIRAIVKQIIWDGKDAHVVLFGSDYKYEFPETPIGIGEIVSKNGEKENFNGAAEGGDAEPLREYSK

SEQ ID NO: 3453 - protein, 519 aa, unidentified
  source 1..519: note = uncultivated organism
MKPVAGKQLRCAIYTRVSTEHGLDQEFNSLDNQREAAEAYVKSQAHEGWRPMRDRYDDGGFSGGSLERPALQRLLDAIRARRIDVVVVYKVDRLTRSLADFARLVELFDAHGVSFVSVTQSFNTTSSMGRLTLNVLLSFAQFEREVTGERIRDKIAASKRKGIWVGGTVPFGYALQDRKLVVDDAEAATVRRVFARYHVLGSLPALQRELREGGIVTRQRPMRSGGTRGGVPLTNGPLQHMLRNRVYLGQLNHRGQSFAAEHQPIVDAELFAQVQAKLDANRNSQTGRRQHGAALLGGLLFDDRGNRMGPSFAIKNGVRYRYYVSAALVQGRKSEAGSVARVAAQEIETVVIEALAASGQTLPDPITKDQLASLLDRITLMPGRVELRFKAGDDGSAEPITVDWSPQPSRRKRAIIAPADEATARPIRSEARSRLLAGIAQARGWLADLMAGTVSDLDTIAVRETINPRSARMTLSLAFLAPDIVQAAADGTLPRGFGLSRLTDLPPSWDEQRRVLGIG

SEQ ID NO: 3454 - protein, 535 aa, unidentified
  source 1..535: note = uncultivated organism
MKPLRCAIYTRKSTDEGLEQEFNSLDAQRASCEAFILSQAGEGWTLLSQHYDDGGWSGGNMERPALKSLLKAISEGRIDVVVVYKVDRLTRSLMDFARIVERFDAHGVSFVSVTQAFNTTSSMGRLTLNVLLSFAQFEREVTGERIRDKIAASKARGIWMGGNLPLGYDVKDRKLFIVEEEAELVRYIYTRYQKLGSVLPLVKELDASGHRTKRWTSSKGSVLGGCRFSCGAVYHILGNRIYLGEIVHKGKAHKGEHPAIIDPELFDAVQAKLAANRVKRVKRKEKASAAPLTGKLFDADNLPMRPTFGHGRGKRIYRYYVSETLLPAGQTAQSHNRKGMRISALRLERILGSTLLPLLPTGSDAETVFKAIARIRVRDTQLRVRFELSALLGEDEINDDVLDRALQIDATSSIDGHHLIITIASTAVRRGSAFSTPDHIIDDTERRRLLADLVRKSHKLLAKLNASPLHLEDHIGMTAPINEWGRQRVAIGLFAPDIQRMLLQGKAPPHITPDLLLSSDIPMDWDEQLRMFGMG

SEQ ID NO: 3455 - protein, 532 aa, unidentified
  source 1..532: note = uncultivated organism
MPSSPRRCAIYTRKSSEEGLDQSFNSLDAQREACEAFVMSQASEGWTALRGQYADGGYSGGNMNRPGLQALLADIEAGRIDIVVVYKIDRLTRSLADFARIVEIFEKHDCSFVSVTQSFNTTGSMGKLMLNVLLSFAQFEREVTGERIRDKIAASKAKGMWMGGNLPLGYDRPKPGTRALVVNADEAVKVRHIFTRYLELGSVHILQRDLQERGVLSKRHVTAKGRTIGGLPFSRGALFHLLRNRVYLGQITHKGEVHDGQHDAVIDVDLFTQVQERLDAQVRRRGDKADRRNAKAPLAGKLFDAADEPMCPTTARGKSGHAYRYYVSASLQQGARPADHDRVQRLSALEIERVVGEAAGRWAPRIGDPFAIVDKVRIVENCVQVALPAARASSIAANLAVGETILDRCADAITILLPIRFASRGGSRKIVPAISRPPQPDPVLIAALRKAHAMLRTERGMPLMDTAPGSPHDRKILRLAFLAPDIQRAVLDGRQPLHLNLETLKRFDIPLAWSKQRQALGFEGAGAPCSDD

SEQ ID NO: 3456 - protein, 506 aa, unidentified
  source 1..506: note = uncultivated organism
MKIGDAEQVVDGALYTRISRDPEGLRLGVERQRDDLEDFARRSGVRVVGRYEDNDIGASTRSRKRRPRYEQMIADAAKGGIRVIIAYTSSRLTRRPRENEDLIELAERHGVQFRYLRSPSFDLNTADGRNIARILAANDAAESERIAERVSRAARQRAEDGGFHGGSAAFGYEQVTDAAERVTAWAPHPVHAQWLREAATRVLAGESLYGICAEWHRAGRRTGNDAVWRPRTLKRALLSPAVVGMRAYAGELFPASWEPVLDREVWDRLQTMLTDDGRMTRPWPGHDTRRKYMLSGLVFCRLCGKTMGSMTKSSGGPHAFFCSTIATGGCGKTRIAMEPLERWVHAAFLEALTDVTLAPPTSQDGAQDEDAVIRGAILTDEQALEQVNSDYYDQELKKHEWLRQRARLNDRIEANRARLSDQTARIARGHLPAPGEIARLWPDKDNAWRRSMLAAVIERIDIDAFPAGMASTLTRRKGESDTELTERRAAHLATVHERRVSITWRA

SEQ ID NO: 3457 - protein, 532 aa, unidentified
  source 1..532: note = uncultivated organism
MAKEKLRCAIYTRKSSEEGLEQDYNSLHAQRDACEAYIRSQVGEGWTALKTAYDDGGISGGTMERDGLKRLLADIAARKIDVVVVYKVDRLTRSLGDFARIVEIFNKHGVSFVSVTQAFNTTTSMGRLTLNVLLSFAQFEREVTGERIRDKIAQSKAKGLWMGGNPPLGYDPKGRALEVNETEAVLVRHIFNRYLELRSVGLLWAELNAEGRTSKAWVTTKGRQMGGLPFDRGAISHILKNPTYIGMIPHKALVHPGNHTAIVDRDTFDRVQAELATRTRKLNLNSAQPDSGAMLKGRLFDADGVAMTPTVSYNKSGQPFRYYVSSTLQRGKKTVGTPDAIRRAPAKPLETLIRQIATRLLPHKSDATATIIRVEIHPQAVHIGFDPKTIAPSSRERDLAFDAMAACVEAEERWDSDGKHWWLRITRRLKFRGGRTSFTRDGVKAVQIDRALAAAVCKGHAILDRCSDTQGRLHQAPSDANERILISLAYLAPSIQAAVFEGRQPEALTLEALKFRPLPLAWDDQVRLFDLT

SEQ ID NO: 3458 - protein, 534 aa, unidentified
  source 1..534: note = uncultivated organism
MAGKTMTDGSMALQEKRCRVITIEATEKPQDIKLRVAAYARVSSSSDDQLNSFAAQNRYYTALISGKEIWTMVDIYADEGITGTSVEKREDFQRLLADCRRGLIDRVLVKSISRFARNTKECLEALRELKLLGVSVYFEKENIDTATMSGEMMTTLFASFAQAESESISGNMRWSYQKRMEDGTFLPSSLPYGYALRDHKIAINEEQAEVVRKIFLDYLSGINMTSIAESLNLAAVPKRANNSDVLWHKTAIRYILTNERYTGDSLWQKTYMSDTFPPVMVRNGGEKKMYLALSTHPAIIPKEQFEAVQQLLHQRGKRCSDSRMDSPFTAKLFCGQCGISFRKKHCHGDLYWCCRRHSQDPSACPGGNISDAEIRQAFLRLYYKLKHHGEPMLSQMLTELHAIRNRRMLWSLDVIEMNKQISDLTSQNQMLAKLKQQGLIDPDIFIAQRNELTEQLRAAKLKKERLLVSDGDDIIDQTQELLDILEAGPDFLDAFDAELFGELVDKIFVDNNEQIRFRLKNGLELTEAIERTVR

SEQ ID NO: 3459 - protein, 507 aa, unidentified
  source 1..507: note = uncultivated organism
MKCAIYARVSTEEQAKKYSIPAQLDLLRSFAQINNYEIFKEYVDEGISGTISDRPQLRELFNDAERGYFKIVLVYRIDRFFRNTLKLLSAVDKLEKIGVAFKSITENFDTTNPTGKFMISLLGSVAQLERDTLIERSKMGILKSIKEGHYMASTSLYGYDYNRQTKKLEINSYESEIVKLIFKLYQEPFSSELKVAAKLNQSNYHTRKGTQWTITQIHRILNHPGYYGKWSYGKDPERITIDIPPLIDKILFDNTQKLLRERKLCPSIRYEHDYLLSKLLYCGICGRKMGIKRGKRIVKTNNKEYGPYDHKYYYCFGHRSKKKCSMKCIKKDEIDSLVWEEIKKYIKNPALIKQAIEENCRQDKDKSVSFKRDLIKIASKIERLELEDEKILRLYRKDIISEEKLRSQMQDIKVENQILNQRKREIETQIESQKYLEIRLNALEKLINKIQNNIDNLTFKGKRKIIELLINKVFVQENGRIFLEVILPSFSSNLFTGQGECNVRNVC

SEQ ID NO: 3460 - protein, 517 aa, unidentified
  source 1..517: note = uncultivated organism
MPTPTKKLAAKHGLPNPVLKTAIYTRISRDKTGEGLGVERQEDACRSLAAAKGWAVDENWLLVENDASATSDKGRPLFRRLIRGMESGEVKAVVAYRLDRLVRRLDDLSTLMLAAKENNCVIATVSGELDLTTAQGRGNAMLFGVIAAIEADTVSERILNKHQQLRAGGANAGGGKRPYGWDPTRTKQIPREVAVIRGVGARLVEGESLRAIAHDLNQRAVPTVSGGPWLRDALRDVMTRPRHAGMIVHRGQLELDPGGRPVVAKWEPIFTREEFEKIQIALQARASLGTDTRYAALRKHLLSGSLTSCGICSGPMLGAQTAAGVPIYRCVNGQHLARNRDLVDAHVLAQVVQFGLAHPVKVEHWTREQTADLSDQIEQVRDRLAALEDGFVRAGGDAAMLARMSTALQDQLVALESERVDQITFQTGEAWAQLDLSSLLSRSASLLPGSTRDKPDPAADAVKASAIEQQRAALRLYIDKVLILPTERRGRGFDESAVKIVYRDPNRLRWSGQIEAR

SEQ ID NO: 3461 - protein, 604 aa, unidentified
  source 1..604: note = uncultivated organism
MEERKIAGIYIRVSTEDQAREGFSLGEQEEKLKQLCDYKGYEIFKVYCDAGISAKDMEHRPRFQEMLQDMRNGKINYIVAYKLDRVTRSVRDLEELITQLEKHNTYLVCDRDDVNTSTANGRFFVRMLTVLSQLEIEIVSERTKFGMVGAIKSGHLPGVKPLGYKNDANRKTIIDPATAPIIKRVFELYLQGKTFLQIANIFNEEKMLNKKWRDCTIEKIINNRTYMGDWEQYKYIGKKEGKEPIIYMNVVDPIIPRYIWEECQAQKVINQRTYTRDRVYTFFQKLKCPHCGRIMKCKGAGGKKKKYIYYNCDKCHENIRETYVEDAFRVLIAELIKFDNEYNELFLPLFADKEMLVDKSDIEKEIIQLTKQKDRIKKAYMSGVVELDDFKEDLKVINEKLDNLTTQLEKDKTLNSKNNFTPEKVMAKRDIARIFLEANQDRNMFLNQWDLKSKEEKQEFIAKYVESLTFENDKSKPNKIKIVNLKLKSIFLEKVNRLSDIGATEFPVYLITNNKTVRVNVGYPLKEFQIKEYLEELNKYHATNFHIIPSLTFTITDLPDEIKFDLEPNEKVFRVIPIVKDIDNPDDIHNKLKLGVVTSIVKTI

SEQ ID NO: 3462 - protein, 525 aa, unidentified
  source 1..525: note = uncultivated organism
MKRMVAIYARVSTEHEAQLSALDNQVQYYDEILAKHPDWILYDKYIDEGITGTSTKKRKNFMRMMKDAEEGKFDLIITREVSRFARNTVDTLQETRKLKKMGVEVYFTEDNIWTFNDEDGELKLTLMATLAQNESKKTSLRVKAGMQIAFQNGIIMGTGNILGYYKVDKNRIVVDEDQAEVVRFIFREYINGKGTTAIANELGKRGMVTATGLTRWSASYITRVLRNPFYCGTIIYRKQYVPDYLEQKRVKNNGNVEQVIVEGEYEPIISKEDFEKAQMILDSHSKVIKEGLRQGKGVPKNIWSKKLICECGSTFNRRTYHKNEYGTTYSYDCYRRKNSRDKLCNVKGIQEWKLERMAEHIFTCLTHDKENREELTKILMEGVKIEEREEKNINNEIKRYKNLIEDENTKQNRILDMYLEGTIDASTFEGYHRKTESKEKIIIKSLDTAKASIQCFLESYDYEDAIRNAISIGGDSDTIAAITGGMAASYYGIPNDIYTKGLLYLDDYLRNIHNEYLKQTGLKLK

SEQ ID NO: 3463 - protein, 522 aa, unidentified
  source 1..522: note = uncultivated organism
MEMRKNVMVIPAVKKYGNTVTKDEVKKLRVAAYCRVSTDTDEQATSYDTQVAHYKDYISKNPAWKFVGIYADDGISGTGTKKREEFLRMIDDCMAGKIDMVITKSISRFARNTIDCLKYIRQLKEKNISVIFEKENINTLDAKGEVLITIMASLAQQESESLSKNVKLGLQFRYQQGKVQVNTKWFLGYTKDEKGNLIIDPDQAKVVKRIYREYLEGKSYAVIAKGLENDGILNGSGKKRWWDSNIHQILTNEKYMGDALLQKTYSTDVLSKKRIKNDGAVPQYYVENNHEAIISKEIYHEVQAEIQRRNNIVDEQNNHYGYCCKYALTSLMFCSECGAPYRRITWNSAKGKEPVWRCRNRLKKGGNYCLSPTIHEKDLHAVIVRAIKEAFGSDDKIMETIKQNVNDVIGDELEANPEACEEKLKDLQDQLVKCVNTGEDYGEIAEQIKRVKTIMDKALENKGDQDEHATQNQTTQQYIQKHINDLLEYDDSLVRKLISRIEVNSHSIVVEFKSGTRIEKYL

SEQ ID NO: 3464 - protein, 520 aa, unidentified
  source 1..520: note = uncultivated organism
MTSEIRKEFRCAIYTRVSTEHGLEQEFNSLDAQREAAEAYIKSQRHEGWQLIRTTYDDGGYSGGTTNRPALQKLLADIRERKIDIVVVYKVDRLTRSLADFAKLIELFDAHDVSFVSVTQAFNTTTSMGRLTLNVLLSFAQFEREVTGERIRDKIAASKRRGMRMGGPVPLGYDVKDKKLLANAKEAMQVRLIFERYLDLGCLTKLANDLRDRGIRTKRSVRPGGKIRGGIPFTKGPLAHLLKNRVYIGEIVHKTDHFPGEHEPILDKSLFDKIQAALSSRRHTKANVRINSGSLLLGRIFDDRGNRMSPSSTKRRAIRYRYYISSVLAEGRKEEAGSVCRIPASEIETLVIGAIRSHVKSCPKDTTDRAVLERYCEKVVIKQGSVELFLKHPTDGQISSISLPWTPQPLKRKRELILPSTKSDRPTRPIRAETRARLIEGIAKGRLWLNELISGTSASTQEIAIRERCSERSARMTLSLAFLSPALVKSAIEGTLPYGVGITQFIEPPLDWNDQLARLR

SEQ ID NO: 3465 - protein, 515 aa, unidentified
  source 1..515: note = uncultivated organism
MPQVHVIEPVHNREPAKLRVCAYARVSSDSSDQLNSFASQVRYYTNLITGHSDWTLVDIYADKGITGTSTAKRVEFRRMMDDCRKGKIDRILVKSISRFARNTQDCIAALRELRQLGVTVVFEKEHINTSTMANEMLISMMSAFAQEESVSLSKNMRKGVQMRMKNGTYQASSAPYGYRLEKNGTLVVEPDEAEIVKRIFEEFICGKSTALIACELQKEVISKRYGNPVWTKKGIVYILSNEKYIGDELLQKSIATQAFPFRRRLNDGQAKQYYKEMSHEPIVSRETFHYAQDLLAQRRSLFGHAQKRHTSIFSKILICGYCGSLLYHRLSKKQKVWICAKHLQNADDCPLPPIPERELIESFHKLVYKLTIPTCSILNTYLTQLKRIQRCAAACPEEVTLLHQRITQLLEQSRTLSHLKARECIDSAFFIAQSNAIQQKLVAAKDQLARYRESDSVKEQIEQTVQLQTALASIELFNDDNSTAYITKVVTAITIYTDHAVFHLTNGLKLEELRP

SEQ ID NO: 3466 - protein, 565 aa, unidentified
  source 1..565: note = uncultivated organism
MGTKAIKQFVIYSRKSKFTGKGESIENQIELCRQYIAAHFGADEAENALVYEDEGFSGGTLERPQFQKMMADSHQEQFAAIVVYRLDRISRNIGDFAKLIEDLGNRKIDFISIREQFDTSSPMGRAMMYIASVFSQLERETIAERIRDNMHELSKTGRWLGGTTPTGYESESISNVTVDGKKRKACMLKMIPEEIVLVKLIFDKFLETGSLTKTDQFLLAGQYRTKRGKTFTRFAIKGILSNPVYMIADEDAYRYLVENEADLFAEKELFDGKHGVMAYNRTLQKPGKAHQERPMNEWIVSVGKHQGVIPGAQWVQTQKILERNKSKSYRKPRSNMALLSGLLYCGKCGDYMRPKLSNRQNAAGEPVYTYLCTSKERSRSQICNMKNASGNILDAKVMDIVKDLGKNSEAMARQIAQAKKKIGGRLAGYDAEAARVRGQLANNENQIKALVLSLGKAAGAHAEKYILEQIDELHEKGKSLQNRLEELDAMTRQHDLAGMEFDTLRQMLSTMGESMEEYTVEEKRAAIRTLIRKIVWDGENAHIYLFHHDGAASAGSQEPLREDSK

SEQ ID NO: 3467 - protein, 522 aa, unidentified
  source 1..522: note = uncultivated organism
MIFAIYGRKSVFSDKSSSVDNQFRMSREYIQSRFKNADNILEYSDEDFTGANTNRPGLQQLLSDIDAGAVNVLVVYQLDRLSRDVKDFANIYSDLEQKGVEFISVKEQIDTTTPIGKAMMYVTVVFAQMERETIAQRVSDNMLGLAKKGLWTGGNPPYGYLRENVIVDGKKHVTIVPDPVGVQFVQKVFDDFLSEGGSLQHLETVYKNKGIKTQTGKFFSTTQMHKILTMPYCVQATQEVYDFYEAKGCIMDSDSPREKWDGTHGVIIYGRSTEKNKKHQLQPPECWTVCLGFHEPFMDAKKWLSVQEMFTRNKFDKTMKYDVPLLKGVLRCRCGSIMCVSRKKKASGGVSSWYYCLKHMRQGEEACPDTHAIKIDLLDEKVIEVFKNIEADQELIDRYSIQYDAPDINVGHIQKKIASTEKKIRKLAGTLATAASSTAAKYIVEEMERLDAELQSYHAELRTAAIEERKNLEYKKEAQERARMIADLIKNFDSFTSIEKNEIVKAVVRECVWDGETLSLCL

SEQ ID NO: 3468 - protein, 563 aa, unidentified
  source 1..563: note = uncultivated organism
MDCRKDGVDIMKKTREILHIYSRVSTQGQENDGTSLASQLDMGIKRAKSLGMGWEHHNEKAASSSKNDLDNRPVIRELLARVSEGDVKHIYVYSIDRLSRNQNTAVFIRETLRKAKCTLYTNTNETNLESHEQNLLFGIISEIAQYENLLRKERLNHGKRVKARQGYWMGGPTPFGYKTNNSNKLILDKEQSKWVERVFKWYSEGLSPKDIKHKLDGNILTNRGKPIWSYGSVEAILRNSHPNGSYVYYDKKIPCPRIVDKETWERVQVRLTEKKRLRGNQVKVYSYPLREIMYCSHCGSQMTGRSQKYSVSRTLISYNCPTHSRKWKESSVRGDWTRGKFCQNNVSMEFRRTELGVWETLVNILRLSHQQRETFKKAVLGAKNRSEKTKINLIGRKTDEIARIRNSISLLEEKIAENEVQRISKRDQANRFDLLIEKITVEIERLSSSLIENENELFALENDNLWIDWVKDYQSNMDKLLQTPESERIGVIKNYVKRIDVTFNSETRSHTLKLQLKLPLINDNFEWKNETRKSNGYRIQVGEIESKLELNNQVRNLRKVGEC

SEQ ID NO: 3469 - protein, 528 aa, unidentified
  source 1..528: note = uncultivated organism
MKKLRVALYIRVSTEEQVREGYGLVFQLSNLKKEIERNEDKGWVFDEKLVYQDEGVSGTLQHRPELDRMMNDVREKKIDIILVWKVDRLFRNTKLLLEIVEEFGNYDVNFKSTTEAFDSTVPAGNLIFQIFGALAEFERKLIITRTTEGKISSAKDGNFVGGGIPFGYKIVEKKAIIEEDEAKWVRRIFTWFVEFDYSAEKIADILTKRKVQSKTDRSKKKKKRTANPKGYWNASVVRKILQRTNYIGVYYYNKHGKDKHGNTVVNPKEVWIEFACPTIIDRKTFEKAQERFRESKRLSNSAKNLYLFSGKITCGECGATYTGYTSSKKTKNYRCGKNNPTKNSTKCSASQISEQILENAIWSQVKDLLQNPKQEVERLVQEYNKNEYYQTLVADKTNLEKRIQDEKFARKRVKEAFRDGIYTNEELKEELAIVDGNLDNIGDELNTTNAQLQTEIEKEERILSVEELSKEYHKKLNNLDYENQRFICQKVIKRILIRGNDINLELQIPRNVQDKGINKSKHRDGGAR

SEQ ID NO: 3470 - protein, 588 aa, unidentified
  source 1..588: note = uncultivated organism
MSADRKPVMRCAIYTRKSSEEGLEQSFNSLDAQRESCEAFISSQRHEGWRPVATHYDDGGYSGGSLERPGLKRLLADIAADKINVIVVYKVDRLTRSLADFAKIVEALDAKGVSFVSVTQQFNTTTSMGRLTLNILLSFAQFEREVTGERIRDKIAASKKKGMWMGGLIPLGYNLEDRKLVPNPKEAELVSKIFTLYLELGCVRKLAERLDRDKIRSKVWITQTGARLGGVAFARGALYALLRNRLYIGEIRHRDQWYPGEHEGIVPRSLWDRVQAQLNSNLRRRRNQVRERASSLLTGLVEDEHGTRYTPSFTVKRGRRYRYYISQLAIKNTVSERNDLTRVPAQELESRVIEKLLAFLKTDAEVFDGLGLSGERPGVASRLVRAAKQLATRLASMSSQDLRDLLASIVWRITIYENRIEIKTRSQELRQQLEGKGMIKSANVPVQNAAPPSDLISLTVEAKRKRCGGEVHLVVPPSSGVPREHPKLPLIKALARAQGWYEKVVQGKAFDMRSLARDAGLTERYVGKVFRCAFLAPDIVEAILAGRQPQDLNFDKLVQNVPMSWAEQREQLGFSPLYRCRPRTSSVQ

SEQ ID NO: 3471 - protein, 537 aa, unidentified
  source 1..537: note = uncultivated organism
MRIFIYSRKSVYTGKGESIENQVEMCRQYIASRIDGGRDAEITVYEDEGFSGKNLDRPRFQKMLADSKKQKPDYIVCYRLDRISRSVGDFAPLVEDFISRDIGFICIKEQFDTSTPMGKAMMYIASVFAQLERETIAERVRDNMLMLARTGRWLGGPPPMGFLSEKVEEVIVDGKVKTSCKLKWNPEEITVARTIYQKFLELHSLSGVSKYLIRQGIRSRTGKYYSVIGIKEMLKNPVYCMADEDARDYFLAQEADVCFHEAECSDRYGLLAYNKRDHSKKGAPRQEKSAWVVAVGKHRGIVSGKDWVAVQNILEVNRPSNPEPKTFNDYSLLSGVLRCKKCGARMFSKIRANNPDLYDYICSSKLRGGSSVCDCQNLGGKEADDDICSFLLDYMDEDSKIFELLENLRARIQKEDTVNPLTEVETQIVKCNREIEQFISSLSQPNISPSLIVHINSRVSELDEQLKGLQAQKKHLQAVLDYLTDADLQLHVLSQMLAYFRENFQALTIHEKRELIKLLVQKIEWDGENCDIFIYGE

SEQ ID NO: 3472 - protein, 515 aa, unidentified
  source 1..515: note = uncultivated organism
MLKAGIYCRLSVEDKNKPKSDESQSIQNQKSMLTAYCIEHKWEIYDIYCDDGYSGTDRTRPDFNRLIHDCENGHIDIVICKDQSRFSRDIIVIENYINDKFLEWGVRFIGVADNADSESEIYSTMRLFTSAYNEMYVRDISAKIRRTLAFKRENGQFVGSFAPYGYKTDPSDKHHLVIDNEVSSNIRLIFDMYVQGNSYRKIVQELNDRNIPSPSAYKRLSGSKYINSNAGAYSLWTQSTVSSILHNEMYIGTLVQGKSHHISYKNKKRKKVNKNDWIRIPDSHEAIIDNETWQRTQERLASRTRSERNSHELPALSGKVRCAVCGRPMKRNVYYNKSRTVRYYGLQCADYKTGAMKCPNSKSISGKTLENEIIYKLNDIIKKYCQKDKINLFNAEKIPELEKQLEKLKMKLKTADIRLTNTYRDRLDGIISENEYNIFHNALISEKHDITLNIDNLTDRIKNLSAEKTDTGKIIEKYTHFTELDRIIADEFIDYIEIGMVTEKNEREIFIYWKI

SEQ ID NO: 3473 - protein, 578 aa, unidentified
  source 1..578: note = uncultivated organism
MARKKLRCYIYTRVSTELQIDGYSLEAQKERLKREAKHRGMQIVGEYSDEGKSGKNINGRPEFKQMLADIKSSKDDVDYVLVFKLSRFGRNAADTLNSLQYMEDYGVNLLCVEDNIDSAGAAGKLIISVLASVAEIERSNIQEQTMAGRKQKARDGKWNGGFAPYGYKLVAKDGEKSKVLEIDDTEAELIRLIYKKFLEGMGIGNVAKWLNENGYTKKIRQNGSVSLISAAFVKGVLDNPVYAGKIAYGRRKTEKIEGTRNEFHVVKQDRDSYKLYQGQHEAIIDEDTWYRAQAKRMKNAFKREKTHSLEHEHILSGLVKCPKCGASMYGVVNRKKKKGSDEFYTDMWYYLCKNRKMVSGHLCDYKKHIRQEELNTEVLQLIQFVFGGENDLKKHMLQRLESEDVMSELLEEKERLAKEKDKLESKKSKLLRRIAELDIDDKLYDDLMKTYRESVNEVNEQINIMENQLYQNNLAIENAEGENLSTEVYKRIIDEMLDNIDDMNDADKKTLMNLLIEKIEIYPEKQKDGRWIKSVQFKIPLNIDGKAVDTLFFDDEEDTENSLPTGKHVETVVLLSRK

SEQ ID NO: 3474 - protein, 594 aa, unidentified
  source 1..594: note = uncultivated organism
MQTTTSPTYSVNKKQKRAAIYLRVSTDEQAEHGTSLETQQEFLKKYCETNSYLLSSEHIYIDGGVSGNLPTEKRPAMNSMFESAKAKEFNVVIVYRLDRFARNLKNTLVAVEQLKELGISIISATEQFETESLSGELMFHMVASFAHHERRLIAQRLQTGRLRGAKEGKWMTGVPPFGYRVEKETKRLTVDEKEAEVVKKFYEWLVYEKCSLREITKRAIEQNLPTPKHKTTRGKSRVGGRWYKRTINRILVNEVYTGQFYYNKYKRPFQYLNAVVDEQYQRPHEDHILIKVPPIISSDLFEKSIQQLQDNRRFQKRNEKRVYLFAGLIYSGVSGRKLQSGYQTPKKDRTTPTLGKYYHVYAPDIDRKPTDSDKNNPEGQCAESRLIPIWDTLVAILSDPKNVIPQLEEYTFKTSSVLKVKKELTQLEKQFETLLVKKQRIQEVYLEAQMDKDEYNSRMKQVRKDEKDLTIQKQKLSQLLLKQDEQKDRDKIIQSLYGTLRARLHNVTYEEQQYILRLFVEKITLHHKNGYAEVAFKFPLNTNVPTSAPASMTEDRHMRLVLHVKIISEHQRRVQIIKSNPKMYKINESLLVKS

SEQ ID NO: 3475 - protein, 629 aa, unidentified
  source 1..629: note = uncultivated organism
MQCKTSHIHLETKYLNKLKKYKADPAECANLVYQYRYSLIPGTTITKTFRGINHKILVQEDKIFLYNDKIFTTLSTVAKEITGIKISGPDFFGLNKRKNVIIKCAVYVRKSTEHGLKQVFNSLDNQEQSCKAYISSQAFNNWEYTKNYSDGGISGGTMERPGLQEMLSDIAKGIINTVVVYKVDRLSRSILDFHNMMKYFDKYNCNFVSITQAFDTSTSMGKLTLNMLLSFAQFEREVSSERVRDKIRASKAKGLWMGGIPPLGYDIKDKKLVINEAEAQKVKTLFEQYLEFQSVSALTEFAELNGIWAKKWQTRSGDWRGGKPITQMSMHRILRDKTYIGFISHKANGTCARGTHEPIISDELFNAVQTALQNNTNNKSKALRSPNLLAGKLFNNIGIKFTNQRNSGKNQKTKYYYASKGFYLPAPQLDAIVLGTFAKFLDSDLSALPPESKDAIKRIDWTRMTYDTKRNLIQSITKKVIYSNEKLIIHISLDPMRWLEFTSEVYINEATEPMEFITSKDEVIITVPVILRKYATTRIDKDAKTGVLSITDNNHLIVKAFATAWRYKELYERGVGMKQICNQEHISPRQLNRYLDLAYMNPIKINEILSGFSNHKVNDLFKIASENQL

SEQ ID NO: 3476 - protein, 531 aa, unidentified
  source 1..531: note = uncultivated organism
MANEKKPVKWVAIYTRKSTDENLGGDFTSLDSQREYCESFIKSREAEGWRVFPVDYNDPGFTGGNIDRPGMKKLMADARVGKFQVVVTYKYDRLSRNTKDFLHVLDIFDKHGIVYVSVTQPIDTSSSVGRLMRSILVDFSQFERELISERTRDKRSAMAKRGKWSGGQPPLGYDIEVDTKKLKINAVEAKQVRLLYETYAKTKSLSQTAIVLNKEGLRMKRWTTREELLRGGRRFNKGNLDYVLRNPVYIGKIRHKGDIHEGEHKGIVDADLFQRVVRQLAANGKKNTSPNQDKHNFMLRGLVRCGACGQQMTPNFAYSKGRKYFYYKCVSVNKLDKSACPTKSAPARELERLVLDRLAFLGKNKTVVDQVVERARRMTGSELPAKKQDKVRLIAEIGRIESEVGNITNILAAQGQAAPQYRALMDKLGQVQGRREELEKQVQKLDYDVIELETRQIDAEIIRRNLENFSLSFPRLSPQNQKELLALLIEEIIYDTQASKMKLTLRPLPDLGFEVVGDRVSFDERLNWLRD

SEQ ID NO: 3477 - protein, 526 aa, unidentified
  source 1..526: note = uncultivated organism
MEEKVKKTIIRCAIYTRKSTSEGLDQDFTSLDAQRESAENFIKSQKSEGWQILPSRYDDGGFTGANIDRPALKKLINDIKDGQIDCVVVYKVDRLSRSLLDFVQLLEFFEKNNVAFVSVTQAFNTNTSMGRLTLNILLSFAQFEREIISERTRDKMAAARKKGKWLGGRPILGYDIDGDKRSLIVNPKEAKLVREIFELYIKERSLLTVAKILNKRGTLTKRCITKAGKILGGIPFKNTQVHFTIRNILYTGKVCYKGELYNGVHEAIIDEDTFNKAQDILAENKIERKPSNNEKAPGLLKDILHCKACDTVMFHTYTSKGNVKYRYYVCMHAQKHGYETCPTRSVSAPAIENAVVECLKKIADNPKEQKETVESLNKQLSNEIKSNVAQQGEINSQIRGLMDKIGEAKESLKIKAGSSKASESELNRLKEKLQDKEKLLSEARIKKLQLEEKLLTQQELKDALLVNTPIWDTLFPQEKRRIFKLILKQVDYDARNDKLGLTLNEKGIKFLNLLLDPNKQKGLANE

SEQ ID NO: 3478 - protein, 526 aa, unidentified
  source 1..526: note = uncultivated organism
METKRVYALYRVSTLKQVEKDDIPMQQQACRAFCRQMGWEMVREYKEKGVSGYKKSAEERDAIKDLRAAAERKEFDILLVFMFDRIGRREDETPLVVKWFVEHGIEVWSAQEGQQKFDTRADSLINFMRYWMAEGESEKTSIRTRTRLGQLTEDGIYTGGGRPYGYDLVHKGRVNRRNKPVYDLMINEEEAEIVRLIFRKYVYEGMGAQAISHWLTDQHITKRDGKGFPNTSINRMVKNILYTGVIKNGASRSQQIPELQIIDQETFDQAQRIMQDRTLARGEVPLNIRGDSLLAGKVYCGHCGGVLCLTTSGGRRRKSDGTLSPARVRYSCFYKVRHKNECDGQSGYSRDKLDSMVDNIVRRKFQEIKAVSKGELLSAQRQQQQAALQVAIRQLTTQVQAKQREQEDLKREAIRVIRGESKLTDELLSELIETNRGQLQEMGAALNAKNEELRKLLEGNQALEAEYDRIMSWADLYDQCPIGTKKMIISTLIKSIRVFRGYRVEIRFNISFGELKRYQERNDEAG

SEQ ID NO: 3479 - protein, 612 aa, unidentified
  source 1..612: note = uncultivated organism
MKRKVTPETDDRRVVIYARKSKITHKGDSIANQEEYCKDYARLHLNLSEDYEFEVYEDEGKSGFYSDRPDFQRMIHDVERRKIKAIVCYKLDRISRKMSDLTNMIDFLNKYDCALLISSNNLNTKDSNSKMMIQMLGMIAEFERDIITERIQDNLEELAKDGRWMGGIPPTGFTTERSKTGRGKNKNAFTYLVPIPEERALVEHVFEVFLETRSYNQTAQRLNEEGYRTKMNADFTTLAVKDLISNPVYCIADEYSYNYFLDENCNMYGDKEEYDGFHGISVYNRTTQTKEESDDSTFLNPEFSRYTIRKEKDEWIVAVGKHEGFILSTRWVAAQKLKDDIADKYNRPHRATNALLAGIIYCPLCGKKLSVVSESNRYTHGKPRFKYACPNAVRKGACTYQAVRGVELDEYVVSELAKLKEEDNQYVKLIKAEAKKLKASDKNEQDILTLKKDIEKLEQDIMLQVKNLRDVSDALRPYVQADMDNMAKEIADKKKKLQKLDAIEKQRSDQYSDLSKTLEIAMNFERMTKDEDPEVIVSIIRSIVERIIVTQEGKDSNVHLFLKGQPGENYDDFFADSDTLIDAESRSDELCDSEGCRKLHSYVCRSAIKKRV

SEQ ID NO: 3480 - protein, 543 aa, unidentified
  source 1..543: note = uncultivated organism
MATSSSVWPRRIELPADKRERDTRTLASSRPAVRCAIYTRKSTDEGLDQSFNTLDAQREAAEAFVNSQRHEGWTALPQKYDDGGFTGANMDRPALQQLLGAIESGDANCVVVYKVDRLTRSLLDFSRIMEVLDKCGATFVSVTQQFNTTSSLGRLTLNILLSFAQFEREMISERTRDKMRAARRKGKWIGGNLVLGYDVMPQGGGLIVNNDEALRVREIYRLYIEYGSLIPVVQELDRRGWQMKAWTTREGRSAGGSPFTKTTLHNMLTNTIYAGKVEFEGKIYAGEQERIVDDDTWNRVQETLNRNGRRGGRNVRNKYSALLKGIVRCASCDAGMIHTYVQKKNTLYRYYVCVKAHQRGWNKCPTKSVSAPTLEGAVVQHIRGICRNPAMLGEVMRQIAEQHAGRRSGLEKEQTAAEREVEKLANEIKGLAALVNAPGAAARSAIDRLADLHERAAVLERQLAQVRRQLRDIDAERVDATDLQRALEHFDPLWEHMSAWEQEQFVHTLVEQIRYEGTTGTVTVGFRSSGIRSLCQHAAEQQS

SEQ ID NO: 3481 - protein, 510 aa, unidentified
  source 1..510: note = uncultivated organism
MAYCMYLRKSRQDLEAEAHGEGETLLRHEKMLVEMAGRMGLDVAPDGIYREVVSGDTIAARPEIQRLLQDVQDGKWQGCLVTEISRLARGDSIDQGIVMQTFKYSRAVIVVYPGQIYNPQNDFDETALEMSLFLSRQEYKMMRRRMQAGRAASVREGHYVGGKRPYGYQVVKIKGNKGYTLQQIPEEARIVRQAFSWYLYDGLGATAIAKRLNAMGSRTYNGCLWDAGNVRHMLFLPVYAGFVQWYKREERPAIIDGRKIKTRPFSERYILAKGLHEPIVTEEEFQRVRQIAESNRCRPVAQRYAIQTPLAGLIKCSFCGKAMIRHTSAMGVFCSCRTPGCPCSSAPYDVVISAVLDALRGWVLSFGDSPAPAPRPAASPVDDAVAIAQNAADAARHQLDVAKNMLESEVYSIEEYLERKRVLTEKIASAEAEASSLRSKASAMSTEDAIRAILPQVRAVLEAWPHTSSPQEQNVLLRSVLSRIDYTKTHVCNRYENSRDFLTISLYPLL

SEQ ID NO: 3482 - protein, 592 aa, unidentified
  source 1..592: note = uncultivated organism
MSRDQKTAMHCAIYTRKSSEEGLEQSFNSLDAQREASEAFIASQRHEGWRAMPTRYDDGGYSGGSLERPALKRLLDDVAANKINVIVVYKVDRLTRSLADFAKIVEALDAKGVSFVSVTQQFNTTTSMGRLTLNILLSFAQFEREVTGERIRDKIAASKKKGMWMGGLVPLGYDLEGRKLVPNPKEAELVSKIFTLYLELGRVRKLAERLAREKIRTKVWMTRTGARLGGVAFARGALYHLLRNRLYLGETRHRDQWYPGEHESIVPRALWERVQAQLNSNLRKRRNRVRERASSLLTGLVEDEHGTRYTPSFTVRRGRRYRYYVSQLAIKNMASEGVGPTRVPAQELENRVIEKLLAFLKSDADIFDALNLADESPAIASRLVTAAKQLGARLPSFSSHDLREQLASFLWRILLHENTIEINISRKELRRQLQNGSKIIPADRSDAKKTFAPSDWISLTVEAKRKRCGGEVHLIVPPNSGVSPEHPKLPLIKAVARAHSWLERVIQGQVFDRRSLARDAGLTDRYVSKVFRCAFLSPDIVEAILAGRQPRDLNFDKLCQDLPLSWSEQRERLGFPPANTHRPRGSLGSIDP

SEQ ID NO: 3483 - protein, 519 aa, unidentified
  source 1..519: note = uncultivated organism
MATGNGLLAGSRRSTIRCAIYTRKSTEEGLEQEFNTLDAQRDAAEAFIRSQRGEGWMALPERYDDGGFTGANMDRPALQKLLQDVRNGFVDCVMVYKVDRLTRSLLDFARIMEVLDKHGTSFVSVTQQFNTTSSLGRLTLNILLSFAQFEREMIAERTKDKMSAARRKGRWIGGIPMLGYDLSDKGAALVVNDDEAARVRAIFDLYLEHGSLIPLVQELHRRGWRMKEWTTRKGTVAGGQAFAKNRLYNLLTNMVYVGKVEYGGQVYEGQHEAIVDPEIWQRVQDRLRYNGKMGGRQIRNKYGAVLKGILRCGSCEAGMIHTYTQKAPNKLYRYYVCVNAHQKGYNQCQTRSVSAPVIERAVIDQVRGIAANPAVVDEVVRHIDEQRLSGMDGLEREKRVMEKELQRLGEEIAGLVRMSGKMVTDRMADLQDRATVLEGQLRDLREQLAEATGQTVDPTGVRKTLREFDGIWSEMTPREQEKFVKTLVERVTYDGATGTVTVGFRTAGIRQICAEVAGK

SEQ ID NO: 3484 - protein, 519 aa, unidentified
  source 1..519: note = uncultivated organism
MENEFRREVFVLKPTSKEEKEKAKLRVAAYCRVSTDSEDQVHSFIAQVKYYTDFIRGREDMILVEVYADEGITGTSTKKRDEFNRMMRDCRAGKIDRIYAKNVSRFARNALDCIEYVRELKKLGVSVFFENDGIDTESMNHELVLYIKSAFAQEESLSNSKRVRRSNQMRMETGTFTFLNAPFGFRIEDDTLIPIPEEAQVVRQIFRYYLQGMGFGKIAQELNGQDVPGKPWGKERIRYILNNEKYIGDTLHQKTYTPEELPFRNRRNRGEVDQYYVSNSHESILDKDTFAAVQEMLKKNLEKEAMKAAPQKYFFSGKIFCVDCGWAYKRRVQNNIVYWVCSKDGTAGQRCCTHPLSEEVIGRTFCNMYNKLRQHENELLKSTLTRLVELKAAVTKTRSEVIDIDEELVKIADRLAFYTEQYEAGIIDDGIYNDRTIADRKKVSELRTRRNKLLADDEDEQCIDELRQLILYLESQPKAILSFNENIFNGVVERVTVEQDKLCFEIKSGILLKEAIAWN

SEQ ID NO: 3485 - protein, 539 aa, unidentified
  source 1..539: note = uncultivated organism
MRAVIYTRVSSREQIENYSLSAQRQACEQFISQRGWEVVHIYEEPGRSGKSAVRPAFQQMMADAAAGRFDVVVVHKLDRFSRSVLDTMVYLSKLNDAGISFVSSTEQFDFTTPIGRVMMTMLAAFAQWYLDNLAAEIKKGKQERFRQGDWNGPLSFGYTTTERLRTRLEALGNDHRRGRVSDEVYSEQADLIEDQLERYDHLHDTAALPCPFDGPGVVLAYRRYATMEYSDSEIAALLNEHGFVVVRGKRVNPFSESTVRDMLCNRFYLGEVSWSNGRKGRASKRDRTWQDGNHDSLISQELYDRAQYVRRVRAQRYYRRQPQQTKHYPLSHIIIDECGIRWRGNWTNGRRIYRQRQERSKMKSCKTTVKSAHAEKLEAHVFEVMRELRIPDDWLEDVQRQRQQSVTVVQDHKSITARLDRAKKLFIMGDLSEGEYTELRDTLRGQLENQTVTVEPPTVEEATVIAGVFQDIDYIWTIATGEERTELARMLFERIDVVDGEVKKIMLTRVASALVFGAVSPDGEDRIRTCGPTFGRTTA

SEQ ID NO: 3486 - protein, 563 aa, unidentified
  source 1..563: note = uncultivated organism
MGNIQQVKKIYHAAIYVRLSKEDGDVAELGKGESNSISNQKSLIRDFLRNKEDIEIVSERVDDGYSGSNFERPQFQLMMEEIKKGIVDCVVVKDLSRFGREYIDSGKYIERLFPALGVRFIAINDHIDSLEDGRDGIVVPFKNLMNDAYCRDISIKIRSHLEVKRKNGDYIGAFTPYGYLKDEKDKNRLVPDTYAAGIVKEIFRMKLGGMSQTAIANHLNDHGVLSPMEYKHSLGIRIQDNFKTHEQAEWSAMSVRRILENEVYTGTLVQGKHTTPNHKVKKLIEKPEEEWVRIEKNHTPIVTDRDFALVQKLLGMDTRTSPYETEVYVLSGLAVCGDCGAPMIKRDVPAGGKVYSYYICSRNSATKECSTHRISREKLETLVLQILQVHIANILDMKRILEYVNVMPFQELDIKELENRRDAKEQEILRCKEMRNLLYEDLKEGIVSKEDYAELYEGYNDKRKKAEEAVRTIQQEIKDILESKTEKYQWLDYFTEHHNIEQLTRTVAVELIDKVKVFDKKHIEVVFQFDDCYQSLLKQIGRVGCNVSTEDNGRIAIERKEVV

SEQ ID NO: 3487 - protein, 563 aa, unidentified
  source 1..563: note = uncultivated organism
MPEEAVVPNGRKVKRIAIYTRKSNDENLTNNVTSIDSQKSCCRSYIEIQKVNGWEECQETFDDPAESGKSLKRPAMQRLLKRVAEGKIDGVIVYKLDRLTRNSKDFHYLLELFEKHDVAFISSTESIDTKSPQGRLMTAIMVQFAQYDRELDVMRSQDFHLARARKGLWSGGLPPLGYDIKEKMLVVNEKEAALVNRIFNMYLKYQSTIRVAQELNQLGLNRKEYETESGRPFGGKPYDMDGVLRILQRKVYIGFITNSRTKQEFPGQHKPIVDVALFEEVQKLIAARNHRGGEVHYAANKYGVLLKGILTCGECGHAIVPTFRKKKNTVYLYYKCLSTYSGKQHNCTIAPLGARKLESFIIEHLAAIGWDRPFLEQVTADAQKLAKTNIGPLDKERHEIEGQLKTIQGELRELVNVVKAGSSSSEVAEEITRLEEAKRGLKGRILAIEAQESHSQKAVYDVDVIQATFQRFALFIYKMPVELQVKILRLLVDRVTIYKDRVTVSVSETPVGEIQKVLDEKLIFGWCGLPERQGAKDKNKQNNHRIAVVELDKKWRPQRDSNP

SEQ ID NO: 3488 - protein, 510 aa, unidentified
  source 1..510: note = uncultivated organism
MTRVCLYTRISTDEENQPTSLHSQRERLEAFCTAQEGWRIVAHEEDRSTGAKLDRPGLTQALELARAGKIDLLLVYRVDRLSRKVRQLAQLAEELDRLDVVLRSATEPFDTGSAAGRMMLQMLGVFAEFEHATIVDRVSAGIERRAKEGKWATGRLPFGYRRNNRKDVIPDERTAPTVKRIFELYTSGRLGTAAVARQLVDEQTAAPPAGWQPATVQLVLQNEAYLGRVLWRGQSMPGLHEPLVDELTFQRAQRLLRERGEDMALRRSNPGDYLLSGLVRCGRCRRAYVGASARGNGGLYHYYACSGRQKLGRKGCDGERIPRDQLETAVIHQLAALYRDGTLIRDALDAATAKAQQSQPALEERRRALAEETRRAERALVRYYAGFEAGELDPKRFEARVSALEARLDVLREQDADLAQQLAPQAATLPDAAELAAVADNLETTIATAEPRQAKALLRLLIKHLRVNARSEILPTYRIVTPAVCALPSSVGGTGLEPVTPSLSSWCSPN

SEQ ID NO: 3489 - protein, 533 aa, unidentified
  source 1..533: note = uncultivated organism
MTDGRRTEGSLALEEKQPRVIVIEARERPEAQKLRVAAYARVSSGSDDQLNSYAAQVRYFTSLIVGNEKWTLADIYADEAVTGTSAEKREDFQRLLADCRRGKVDRIITKSVSRFARNTRECLETIRALKNTGVSVYFEEQGIDTANMTGELLTAVFAGLAQAESESISKNMRWSYQKRMQSGSFNTCKYPFGYRLKDGTLEICEPEAEIVRMIFNRFLSGEGCEAIAEQVTATGYATRDNKPYWQRSTISYILRNERYAGDALLQKRYSTDTLPYQKKLNQGQREQYLVPNSHPPIISRETFDAAQSLIQNRAAKIATWQTEILPLSGRVICGNCGAWFKKKRCNGKTYWVCRTHHKNITECSITQILESEIYDAFLRMYHKLKLQGGALLKELISNLTKIRDRQMLWSVDIIELNRRICDIMDQDRQLSELNSLGLADPDFFILHRNELAEQLRDAKLKKERLLDAKGDNTLQQSIELSEALDAAPDFLDAFSGEWFDELVNCVVIESNEMLRFRLKNGLELTETIERTVR

SEQ ID NO: 3490 - protein, 738 aa, unidentified
  source 1..738: note = uncultivated organism
MKTYEKDPEKIFEPGSRGDSRGNKADSLQLGENRQDSQNKKRQDEQLSDLYRKRPKETQKNNRERVVGNAGLLDKKETQKIIKVALYARVSTEEQKENFSLAGQIELLRKYAKDNDCEIYDEYIDDGYSGMSSDRPRFQRLMEDAKQGRLQMILVYKVDRFFRKNLSLLSAVDELQKTGVSIRSITEPFDTSNYLGKFVLSLFGSIAELERNTFMERSKMGKLRRAREGYYSGSSPARFGYVYKKETKKIEIYEKEAEAVRLVYELYNQPDSSITKVTKKLRVLGYKTKEGNLMREDVVHDVLRDTIYIGRWYANRHDSQTGKLRPKEEWIEVGVPKIVSEEAFLKAQEYLNTRRNYSKRNAKYHYLLQGMVKCGDCGNTVAGSADKQFQTKNGKNYGPYFKLYYRCTHFVKNKYEKLVKCRLRYIQGDKLETAVWDKVGGIFQDSNLVEKAVSGKDDVKLKNKETAQKEIERISLLLEGLKKEEQRILEAYRQNIISIEQLKEQMDSLKKNRETLERTTQDLTAGLNETDRKAEIKQGIDYIEKIKQGIKKFNYETKKQILRLLNTSIKVNVNGIIDIDCFLPKIPSAFGTGFLPSFESARPTSCQLNTRNYIRLHFEARLPYKGQLVKTNFNRRNYTTIYVGLTPALARKLGDLARKGGKTESEILRRILDAYFQHIKRKGLIYEPLRKTPPVGLKVLPRTIRKDQDKRLRELTEKSGRKISELVRGAVENFTEDS

SEQ ID NO: 3491 - protein, 528 aa, unidentified
  source 1..528: note = uncultivated organism
MKPRRPAAPTRRRAAIYTRVSTTSGLSQEVTSLDVQREACRVRITQEPTWEALPHSYDDGGYTGANTDRPAFQRLIGDIRAGHVNVVVAYKLDRICRSFTDFAKLVELCEEHDVVLVSVTQNFNTGDIMGRLLRNLLAIFAEFERELIVERTRDKIAAARRLGKWTGGLAPLGYDIVQKKLLINESEAVVVRELFALYLEHRSVLRVAQELARRERTTKKRVPSERERARAPGEQPAQRRGPHTAEEWSKDMVIRVLKNPVYAGLIASGEDLFPGEHRALIDRETFDRVQHILEENAGRPAMPGRNPDYLLTGRLRCGACGAAMTPASTKKGNRVYRFYRCVTRDKMGKEACVGRPLPAAEVERYVVERLRDVGTNERFTVEVTKGLEDRLAAERDALTAESSRLTGPIARLQAESKQLLESMALMTGLAKQQVDEKFEATCRELDELRQRASEVERQRAVLRDTEIHAAWVTQVLGDFDELWKVMTPENRRRLLAASVQSVVVDAAASTMRITFADLWPETPVGACA

SEQ ID NO: 3492 - protein, 602 aa, unidentified
  source 1..602: note = uncultivated organism
MSIAIYSRKSKYTGKGESIENQVEMCRTYALTHLGSAELDFLYYEDEGFSGKSMERPQFQKLLRDARAHRFSTLVCYRLDRISRSVVDFSALVELFRSLGIGLVCIREQFDTSTPMGRAMMYIASVFAQLERETIAERVRDNMMLLARDGRWLGGTPPTGYQCTERSEMIVEGRKKTAFLLKDCPAELKTVQTIYQAFLHQHSIAEICTELCAQGLSTRRGNPYSAATIRAILTNPVYAASDLSIWNYFTALGADVCFTPNTENAPGLLCYHKRSGISGAEQRCEPAEWIVAKGKHTPAVSGAEWVQVQKQLFKTHTETQRRIPQNSYALLSGLIICGKCAAPLYAKSRSRQKEYDYICRTKLRKGSSACLIANLGGKLADRAVTAAFTSRSLLPELLNRLESYRNELLQQLPQKAMFDLGSIDAEITRLIDCIAEAPPGDRSIPHLRRRIAELDRRRSIRLTELSPSAANQTTVLAPEDEKKLGAALTHAMPYHPIPENTFPVAPFDQAKNSTEEQNPPAVSKPLSSLAVSPHDSIHVFPKISHLPDSPEALWNSMPEPLQRELLGQLLECVEHRPEGLLLHCKPGASCLFHELPSCSQTD

SEQ ID NO: 3493 - protein, 559 aa, unidentified
  source 1..559: note = uncultivated organism
MGIKKSKELGMKYQIWNEGAASSHHENLTNRPKISELLFDIEKGNIKHLFVYNNDRLSRNDQTQFLIKNAIIKNGVMLYTKDGTYDLNNPTDKLLKSFLDGVAEYDNAIRAERTRLGKLYKVRHGGWYGAPPPYGYEIVDGKLSIHPDEGKTVKTIFKLFNDDISIAEIKRRLDKQGVTARRGGLFNTGSINKLLQNTHHIGYYTYTDKKSGETVEVSCPSLVDETVWNRVQERRQKIFQRKGQNNRTKRFYLLRNLMYCGECGSQMSGRIKESKNERHYFCPNKTRNWKKNKPTEETRYKRGKVDGYGCDMNRSLNIPITDEFVWNSVRKVVSESSTLKEGFKKEVLHSKYANEEEIKTELKNQKTKSKRWMTELQQIQSSIADVETNNLLRKYDAEVYEKIVGNLNAELDKTKEEIEQTRIRIKELGKEQKWLDWVQKYADKVDELDTYSNEQKKEYLDGIIDRIEVRLDQETKDHHLDIIFRLPLVGDGIEYVDKNNKSAGYELVDGDKTTTTTVSHELVNTMSVDARRLGRKQEIAKKKEMNQLTPKPHNNITVE

SEQ ID NO: 3494 - protein, 508 aa, unidentified
  source 1..508: note = uncultivated organism
MTPLPWLCYRRVSTAEQSLSGVSLDQQETSCRAYAAARGWTVADVITDAGATGRNMDRDGAQRVLAALKAKEVAGVIIWRLDRLTRSVRDLVHLLEIIGADAGLVSVTESLDTTTPMGRFVIHQLGSVAQLESENTGERIRASMAHARSKGYWMGHRQPAGCEVVPDGQRRRLVKGPDAEAVMTAWPAVLAGASLREIAERFREERIHLPAATCWTPAVVRSLLLSPQVTGILVDAATQAAVRQALAERMAPGRRGKARLAGAAALQASPLAGLVRCPECDLGMVQVSARGAAGGVYRYFRCTGRARRICTAKEIRVEPLEQEVLAKVAEALRDGGDYAAFVVSEAARARSTLDAARTERGQLTSERDQLAGRIAQLTLGTQIGTTAWNMAMLALGKEVERVDRRLAEIAGQEAVAQVDTMNLEQVLDNQRQGAGRLLDAPAEVQAQVLQGLVYRVRPLAEALDLELYAPESAGSYKGRAKYSQPHGLRTIRVRMPRGRRERAQAQRR

SEQ ID NO: 3495 - protein, 529 aa, unidentified
  source 1..529: note = uncultivated organism
MISVCAIYIIAIYLRLSKDDEIDDESLSISNQRMILKDYIYNLFGSSVEIYEYVDDGYSGMNNLRPALTKMLEDIQSGKINCVIVKDCSRLARKNSLISYYVDELFYEENIRFISLLENFDNTIDLDTEKLMLPGFFNEYHVKSTSKKVRATKESLAKKGLFTGGFAPYGYIKDPNDKHKLLIDPYAADIVKYIFNEFLNGVGLLKICNSLTERGVKIPSEYKGMNRGLKSNHYGIWTTKTISDMLHNPTYAGNLTQHREKAKNISSKKKVKRKRDEWIIVPNSCPPIIEQEVFDQVQITWNKNRTSKRENHQQLLSGFMFCKECGHTIGIKLSKWTNKDGKVKTNYICDCNYYRRNYKYRNCTSHKMNYKILEEKVLNQIKVMCEKYIKTENLENVLKNKDRTQNLINELKASINFKNKSIENIKNKDKNLYEDKLSGFIDAKTYLEFKEKFYKEINLLRDDIKNIEDKLYQLNNKIQNKDSRYTAIINEFLSMNSMTRDMLAQLIEKIVIDENLDIEIYYRIKPLLV

SEQ ID NO: 3496 - protein, 561 aa, unidentified
  source 1..561: note = uncultivated organism
MLKTLDKNYKAAVYLRLSKEDGDFSVSTDKKESNSIANQRKLIMEHLKHYPDITFVQEFCDDGYTGTNFDRPGFQKMIELVRLGQIDCVIVKDLSRFGREYIEVGRYIEKIFPALDVRFIAINDNYDSAKAEQAGNEIIIPFKNLINDSYSRDISAKVRSHLDIKRRNGEFVGTHVLYGYLRSEENKNQLVIDQTAAKVVESIFRMKMDGLSPTQIAEKLNKDGVPSPYEYKQLAGIKYNTTFKRQAQTDWSAMAIYRILKNEMYTGTLVQGKTSSPNYKVKNRTMKDGADWTRVENAHEAIITPSTFDIVQKLMLEDTRSPSGNEAVHLFSGKIFCQDCKGSMTRKRTYSAGKEYVYFICTANKQNKKVCDRHQIKEQAVYDAVLAVIQAQVELALDLQLALEQLQGISWEARELERIQHRIERQEEIITHNKQMKTAIYEDFKTEIISLEEYNIFKTEFDKGIKEAKEAIAHLNSNRNQVRSGLTEQQSWLAQFQKYKNIQELNRRVIVHFIDRVEISNDKEVSVVLNNADQFQAIMEFLKQYQETDKKKVISLVREVG

SEQ ID NO: 3497 - protein, 545 aa, unidentified
  source 1..545: note = uncultivated organism
MSKRAAVYVRVSTDEQKERGYSLPSQVEACTTYAMQLGFDVVGVFQDDVSGMVDISQRPGGGELQKMIARREIEAVVIYDIDRLSRDLINLLVAVKTWLACGLELYSRDVGRIESYIDILLVFKGLQGGTEHKKIIERTNRGRWRKASEGKAVGSGTPPYGYTYSDGELTPKEPEAGVVRLIYKLYVEGDETGRHLGVLDISRRLTEVGIPTPSESKGWKTKRKRLTGQWDSTSIFTILKSETYCGVLRYGKFIGNRGRGGMRPESEQIKIDVPPIISRETWQAAQEQRAKNARLLAHKTKHPFLLRGMAFCECGYSLAGSRNNYRCLRKYQNSSPCDEPPVKTALLDGLVLEYVYNLIKDPATFEQNLRKAQALELTQAQPKQDELGAIIELIKQAEEDAEEIAQTIKGTRGIVRKKLEQDSEEVDARYNALCARRDALTNALSETKLNEDVISDMLEFRADVEAGLSNPTIEGLRAWFELLGVRVVVGGGMATITCRISPEKVCTPLITSKNSRILLRLLPLQRRLDLKRRAFYLFVTKTGER

SEQ ID NO: 3498 - protein, 523 aa, unidentified
  source 1..523: note = uncultivated organism
MNYMVGVDKQKVAVYIRWSTEEQGDGTTLEVQQEACRFFIQSQGWVYREDLVFVDDGWSGGSMDRPGLARLRAAVAEGLVSCVVVYKLDRLSRSVLDTVNLVLQEWEGVCSIRSTREPVDTTNPAGSILFYMLASYAEWERSTIRERTMSGKIKRAQQGRNPGYAMPYGYTKGEEPGQWVIDSSEAAVIRRIFREYISGRGIHLIAAGLNEDGVKPRRAAFWRGETIYKMINNPVYTGLLRYGLSALTTRAQRKHLGKFRVFFEEPRYASVEGAVPVIIPREEWERAQRVRESRGATLGTRARGADFLLTGIARCRCGATVRGDDRKGSKRYYRCANHKLRSIVGCDCGLISAAILEDAVLGRVRAALEPSSRELLVASWREDTTRQAAEASAELERLRAELAQVEKARARVTSDYRKGELPARIFAGEIDRLDREAERLKGALAGLAKEVKRLEAADWSLGDLEEMAAKLDAWEWLSPEERKQLLRHFVARCVVYRERSGRGVGQPNGNPVEVELELRKVGV

SEQ ID NO: 3499 - protein, 578 aa, unidentified
  source 1..578: note = uncultivated organism
MRLLAVVRLSDLTDETTSPERQRKKIEDYARLQEHEIVGLAEDLDVSGAISPFARPQLGPWLNRPDEWDGLIVAKHDRLTRSLLDFLTLYKWLAERGKTLIWIEPPLDFTTPFGKAMANVLITFAELELAVISDRIREAWHSLREAGKWPGGSVPFGRVPVPAEPNGWRLAPDPAYAPVVAEIVRRYLAGHSFHMLASWLNEQGIPASRDAQRLRKGKPVKGTGWTPAVVRKILSSPSLAGNVLWKGEPLRDRDGLIVRIDPLVTQVDYERLQVALKERAYGRRTNASKLLQVAYCALCSTQLYATSVKSHADDAKVFRYYLCQNARSGGTCGASRVTAAYLEDLASKLFLELVGGQEILERVFVPGEDSSADLAAVDEAIEHLEGQYASGAVYRGAAGAERFAALMSRLDERRARLAAQPSIPARFDYRATGRRFADRWAEEDDAGRRQLMVEAGFQLRIARTAVPPAEREAAARQLNVVATARQLNNRAANLRYMATKTTKPGRMTMLETELAAVEAERRKLRSVRRFNEVVSFALDEDLARRAGLAAAGKPVDVPDLGEAWEQALAPLRAALAED

SEQ ID NO: 3500 - protein, 576 aa, unidentified
  source 1..576: note = uncultivated organism
MTAKRASVLIRVSTEDQVDGTSLADQERLCRSLIEARSWAFTGRVYADEGVSGTVENRPALTEALRDAAKGEFDVLVALNLSRLSRKQWISAKAIDDLAELDVAFVSVQESFIDTTTSAGRAMAGVFSSFAQHDRDSIVEKTARGQRAKGEAGLWPGGHPPFGWRLDGHKRTAQPVPDERERQVLAEAYRLLVTQRLNAFQVAARLNDAGFKPRKADAWNPESLRRVLANESLATGVLTWGAPSSGGLYPRSHKTKVKRDGTPRYGEPIHIELPKPPFSASQHRAIVRALASRSNRGKAASPISRPLTGQVFGACGMPYYGVTIKGKAPVMRCTGRRHLAGEAKCTCSQVAWEPLESRVWAAVVGFLTDPARLEAMARQYLKLPAEVGDGAQDITLLAAVERQIEKLERAQANAARELLLADNPAPIRDALAQVERDLEGLRERREGYRALTSSAQAKGEALRDLAALAERARGNLDRLTEDQRRQVYEILRIRVDMTGEIKADRHRVAHPDGLSVSGVLDPRLWGDEGRGGGSGGGNGDSGPRPMPSFPAPSNSQASDDGRCRVRGTAGGHHALG

SEQ ID NO: 3501 - protein, 523 aa, unidentified
  source 1..523: note = uncultivated organism
MDRPTKKLLRCAIYTRKSTDHNLDLEFNSLDAQREACEAYTKSQAHEGWRLIPGHYDDGAFSGASLDRPALQLLLSEVQAGKVDVIVVYKVDRLTRSLADFAKLVELFDQHSVSFVSVTQSFNTTSSMGRLTLNVLLSFAQFEREVIGERVRDKIAASKSKGIWVGGSVPLGYASVNKKLVVIPEEAETVRLIFRRYLEVGSIRDLVEDLDRKEIRTRRLTLATGKTRGGIRFGVGALSHLLRNRFYIGEVSYKGKIHPGEQAPIVDRELFEAVQAKLVAGANARQLKLRASPTILAGRLFDDRGNRMTPTHTNKRGARYRYYVSHPILQKRNNEAGSVSRVNASDIEATVIKAARGHLEVRGSVLGHNHLTDQDLIAHSVERVILKPQAIEIRFATPEQAEEPGEQAAVVLSVPWNPIGMTAVKGLLHTPASKTLMTAMERDALLTAIAKARAWIEDLTEGRVTSFADIAKREGKVERHIRLLAPLAFVSPSLVTDIVDGVAPVPPITSLAKRLDYCWSRQL

SEQ ID NO: 3502 - protein, 553 aa, unidentified
  source 1..553: note = uncultivated organism
MTQKPAIRCAIYTRKSSDEGLDQAFNSLDAQFEACAAYVASQRHEGWKLVPERFDDGGLSGGTLDRPALQRLLAEIDAGRIGMVVVYKIDRLTRSLADFGRLVERLDAKGCSFVSVTQAFNTATSMGRLTLNVLLSFAQFEREVTAERIRDKIAASKKKGLWMGGSLPLGYDSHPDPQRRELVVNPAEAAVVQQLFGLYAEHGNLRQVEIEAARLGLRSKAVVSASGRPSGGSLFTRGRLHYLLTNPVYIGRIRHKDVSYLGQHPGIIDEGLWDSVQAKLLAAKARPRGKNATPTEARLLTGKLRDETGDALTPTHTKRRGRRFTYYVSHRLISGGVDPTGLRLPAEALEAAVRQIVVAHLRKAAAGHDLLAKPDASTAASVGMRALALAEKAEADPSFLGTIIASGTVGHGYLHLILADSTIAAALGVPVEAISAGLLTLTAPFALRRRGVETRIIAGDTLPAPDPVLQRTLAEAHDWARALREGKPLSEIATDTGRSEPFIRSRIPLAFLAPRIQAAILEGRQPVNLSVAELIRTDIPMAWDAQDRLLGLS

SEQ ID NO: 3503 - protein, 567 aa, unidentified
  source 1..567: note = uncultivated organism
MNKKRVRILLRVSSHQQLDADGDLGIQRQIILDDIKNHPDWILDTKEYFEGSNSGYKNSVADRDVLQDAYKDAQNHEYDILVVYKDDRLGRRMWEIGGYIMSLKGLGVDIYTVKDGCISPETDDIMGQMMLALRYGNAQKSSADTGMRVRDTAMKLVTQGKFMGGKAPYGYVLQHSGEISKHGRALKHLVIRPEQAEVVRHIYHLSLSKEYGSAKIADTLNTDERYRHLAPNDVWKSGTITSILTNPIYCGYTAYNRRERLGNRTHRLDSSEWILSAKPNPDLVIIEEDMWTKVQEKREQRRRKYTKSPDNQDITVISRNDGMLSLVDVLYCGYCGRKMVNGSKYNYWTIKGTGERRTSKIPIYKCQNAWQGVPHNRTKQYRADRIEPIVYQVLADYINHLLKNEDIVEAIKKNHLIEKQRKEQDLIIEQKQLEKIRHNITILEEHIPDAMTGEYPLSLETLARSIDSQKNKEQKQRNMVQKKETDLQNSFFASKDWEDLKSNIPTWRELFFQTDTPTKRVLINKLIERIDITKDRIVIRFKGSLNESLHQSQSRMDDNGVVPKQGL

SEQ ID NO: 3504 - protein, 645 aa, unidentified
  source 1..645: note = uncultivated organism
MKEDKKICGLYLRVSTEDQKREGFSLKEQKLHLEQLCKYKGYEIYDYYEDAGISAKKGNYRPEFERLMKDVKDKKINTVIALKLDRICRSIYDWENIMTHLENYNADLVCANDEVNTTNANGKMITRIMMSVSQNEIERTSERTKIGLAGAIKEGHIPHVSPLGYKRDNKKLVPDLTTKDVVIRIFELYHSGESYQKISTLFNKEEVLGKTNWRDSTIFAILQNEIYKGDFVHGKRTKHPTYYTNVVEPIVSKELWEECQLQKKKNSRSYQRTLIYLFLQKLKCPKCGRIMGGKATKKKGKDYYYYYCTDCKVNLKESIIENYFNDFIAELVEYDTVVNQFFLPMIKQKFDNPKDTLEKELKESRSKLERVKNVYINGVFRLDEYEKEKNKLEEIVTNLKFKLHENVVCDELKFTPQDILVKRDIDTINKFKYPDEYKEYNVEWKDYSRETKADLIMRFVDEIDLSMNGSHINVDEVRFRESICKPCNELYNQGYIDRLTFAMYGNISGYIRYSEYLPEDKVCEQVFRLRQFYDVGYYEATYNTETKIFHFMGDEDIQAIIRVFPLKDYKNLDPNYENETYDFGVLYIKHDDGTFLVDKESVFYTIPDVVTSNVISSKEEIPIKVKPADMYFLDDEDEEDSSSDI

SEQ ID NO: 3505 - protein, 542 aa, unidentified
  source 1..542: note = uncultivated organism
MALYPEKIYNAIGYFRLSKDDGGKRESDSIANQRKLIREYAATHNDIIIVKEIWDDGYTGTNFNRPGFRAVMDAIEAGEADCVIVKDLSRLGREYIETGKYLEMVFPDKGVRFIAINDNVDSDNHGQGDDILIPVKNLINESYCSELSKKLRAQFRLQRRNGEFLGAFASYGYCKSVEDKHKLVIDDYAAEIVRSIFSFKMQGYSQQAIAGCLNKMGVLPPSEYKKQMGLQYQSGFKTSSQAGWTVMTVRRILTNTIYIGELVQGKRGTPNYKLKKLKERKREDWAVVEHNHEPIVDALMFSVVQKMLQRDTRTSPNTETVQPLAGVLFCPDCGRAMCRRVVTRSGKKFYYYVCWNYKNKHNCTSHSFSQDKLEEAVLHAIQGQIAMIVEIEELLQQVTSKDLLAVKLKRVDKMIDQKDREIEGFERFRTKLYEAMTDGLIDREEYRKMREKYTKQIEAAQRGIQELEQQRRNLEEESTPGRVWMEQFLKYRNLTALSREVVVSLVDRVYVHENKQIHIDFNFRNEVAEMLDLLRAARKEAV

SEQ ID NO: 3506 - protein, 631 aa, unidentified
  source 1..631: note = uncultivated organism
MENLDNPFSEEKKIAGIYIRVSTEDQAREGFSLGEQEEKLRQLCKYKGFEIFKVYKDAGISAKDMKNRPAFQTMLEDMKNGLINYIVAYKLDRVTRSVRDLEVLISTLEKYHCYLICDRDDVNTSTANGRFFVRMLTVLSQLEIEIVSERTKFGLNGAIKAGHIPGKCPIGYYRDKDKTLKIDNTTKDVVVRIFEMYLEGKSYQTIANILNKEKVLYPEVKHWIDSSINRIINNKIYMGDYERYKYDNDRETELFMDVVPPIITRAMWEEVQKQKETNQRAYCRNRVYIFFQKLVCPTCGQIMTCKGTGGKKSKYMYYFCDTCKLYYNEDEIENCLIDYILDLVEYDFHVKKYFYPILAEKKDDGSKKIDEEIKKLLQQKDRLKKAYMNGILEMEDFSEDYKLIEEKLSTLENKRIDALDFDKENYNPQHLMAQRDIEREKLTEHEMYKDVLLKLWTMKSKDEKQSFISKFIDNATLKKNKDGSFDIEKVNFRSSFIEQIDKLYDKGIVDVPTMIERDGKLEDGKLEDAKVSVNMNKEQLEDYIGTLKKELDINYMDLGEYYFHDDKIDENYDTKTEVAKIRNRAVEFKIKKNQKIIRFVAIKQFKNFLAKPEGKLRLGVVTNITSKKKHK

SEQ ID NO: 3507 - protein, 535 aa, unidentified
  source 1..535: note = uncultivated organism
MLNRCAIYVRKSTEHGLDMEFNSLQNQEESCKAYIASQAFNGWKYHKTYTDAAISGGTMERPALKQMLDDMARGLVNTVVVYKVDRLSRSILDFHNMMRYFEKYGANFVSITQSFDTSTSMGKLTLNMLLSFAQFEREVSSERVRDKIRASKAKGLWMGGNPPLGYDVVNKKLIPNGVEAANVRTLFEKYLELQSVNALTEYAAAHNIYAKQWTTAKGITKGGRPIAKMSMHRILRDRTYIGQIVNKTDNTVAPGEHSAILPNDLFDRVQVALQNNANNKSETHGSPNLLTGKLFNHNGVRFTNQRTCGKNKTNTHYYATKGFYLPAPTVGEIAIKTIVQFLDADLSALPSATADALKHINIQNAPYAEKKTFVQSLVDKTIYSQDKLIFYLAPDIAKLQPFATDNFINQNSEPMEFTINDSHIVITVPIILRKYVNTVFDKSKNGVLTVTDNNHLILKAFATAWRYRELYECTGDTKFIAKSERVSPMTVYRYLNIAYMNPTKVNEIISGRQICTIDELFNSHSLDCDLRSNIN

SEQ ID NO: 3508 - protein, 546 aa, unidentified
  source 1..546: note = uncultivated organism
MLKKSITYQAAVYLRLSREDGDVADGAKTVSNSISNQKELVMDYLKSHPEITVISTYTDDGFSGVNFERPQFQRMLSDIREGKINCVIVKDLSRFGRNYIESGRYIEKIFPMLGIRFIAITDGYDSINDDMGSDMIIPFKNLINDAYCRDISIKIRSHMDIKRRNGDYIGAFAAYGYLKDEDNRNHLVIDEYAADVVRDIFTMKICGVSQQGIADKLNADGILSPLQYKKSIGIDLNSSFAKGMKPKWSYNAVTRILKNEVYTGTVVQGKCTTPNYKVKKRVHKDAAEWIRVEGMHEAIISRNDFDIVQEILLRDTRVAPEQSEVFLLSGMVYCADCGEPMVRKTVPSGDKRYFYYVCSGNKHNRHKCSSHSISEKKVITTLLESVRTYVDRTMGLAETLQIVNDAPAKKPEVIKQDDRIDALRSEMETCNKRRKNLYEDFKDGIISREEYSIIRGQYEGELNEIQLSIMRLTEEKERILNNQTGKQEWIDEVLKYKGITELKRNMLTMLIKRIEVDSSSGIKIIWRFDKQMAAIVKALMTIKEAV

SEQ ID NO: 3509 - protein, 555 aa, unidentified
  source 1..555: note = uncultivated organism
MAENEKKLRCAIYTRKSTDEGLDKDFNSLDAQREACAAYVQSQQHEGWTLLPEFYDDGGHSGGTLERPALQQLLADVKAGKVDVVVVYKIDRLTRSLADFAKIVDVLDEAEASFVSVTQAFSTTSSMGRLTLNVLLSFAQFEREVGAERIRDKIAASKAKGMWMGGSLPLGYKAVDRKLVVIPEEAESVRKIMRRYLEADSIKALVEELGRDGFVSKRHISKRGNAKGGNPIKRGALKHLLSNPLYVGEVRHKDKTYPGLHEAIVEREVFDAVQEKLKDQTSHGSSAGPMRRKALIAGMIFDDRGRPMSPTHTKNHGRRYTYYASNMNDDAEAPALRLPASEIEQSIRRAIARWLRTNANMRGLAASRSADEKKRIFARAERLAFGIETLPVGSAGELIKEIKLQIIVNENEINGSFQPAAALGFADAEGTAQIEAKFSIAVDRQNYGHEARMRLQPSEPNHTVRDSRLVELLGRAFAARDELQEMDEEAVQSIKTTKLRHFQRLARLSYLDPTIIRSILDGKQPKNLSARSLWRMGDLPIRFADQRSALGFPNS

SEQ ID NO: 3510 - protein, 562 aa, unidentified
  source 1..562: note = uncultivated organism
MSTNHPSLNCAIYTRKSSDEGLEQSFNSLDAQREACEAFVLSQRQEGWRALDTHYDDGGYSGGTMERPGLKRMLEDIEKKRIRVVVVYKVDRLTRSLADFAKIVERFDSMGVSFVSVTQQFNTTSSMGRLTLNVLLSFAQFEREVTGERIRDKIAASKQKGMWMGGVPPIGYQGHERTLVVDESGANLIRNIFNLYLTLGCVRQLKHELDTTGIATPHRTSKSGRPHGGQIFSRGHLYRILSNPVYLGQISHREKVYPGQHPSIIDKALWDAVQAKLASNMQGFKQRQSVPSESLLAGLLFDAQGLRLIPSHSQKKSRRYRYYVSESLITSVRAKATDGIRLPAQELETLVVNSLRDWLFNSDAVLDGLNHPDPSAIQSILAQAQRTAVTMQEQTEERHHAVHSLIHKVIVDQEAVRIHIYPQALLNRGTQNKTSNALSVELSVPVQVRRCGLAMRLIIQSSNQQQCQNPDTRLIHLISKARDWLERLTSGKAKSVMEIAEAEGVTNSYVTRVIYRSFLAPNIVRAILAGTQPPSLTLDKLKQNLPLPINWDEQKKLFGFTD

SEQ ID NO: 3511 - protein, 525 aa, unidentified
  source 1..525: note = uncultivated organism
MKRVMCLYRVSTKGQVDPQDDIPMQRRECIDFILRQKDWKFVGELMEKGVSGYKVSANKRDAILEMKAKAERGEFDVLLVFMFDRLGRREDETPFLVQWFIEHGIEVWSTREGQQKLETSADKLVNFIRFWQASGESEKISVRVKAAHKQMTEDGKWRGGPCPFGYKLVYNGRIGKKNRQLYDLTIDETTGPIVQEIFELYGRVGFGALRICNYLNEKYHIPNKVWTRPSIMTILKNPMYTGRMHMNDVRSEPIENLRLVSDADFEAVQEAIKSRIPRQYNSQNEVVLSSDQETKTAVYGASLLSGLIYCKHCGCRLVGTYCAERKKSGQRIRPIYRCYNRSIPAKGCDGQTVYSANRIDNAVEEAIAGIFSQIQDEIHAVWKSKDHRKIRTFGADKLETAEKNLEKLEEQKRGLEHETVESVMGNGKYDVDVLTKLIQENKSALEEAKAEVERLKALYGKNNKEKIKIYETEYQQVLDWREVFDNAALSEKKLILTQLIERIEVNKNYHITIYLKGMENDFLVA

SEQ ID NO: 3512 - protein, 546 aa, unidentified
  source 1..546: note = uncultivated organism
MSKPTRRRAVLYCRISRTTEESVSLERQRRDLEKLCELEGWDVVDVITDDGKSGTKDRAEATRALDMLRSGTADTLLVWAFDRWSRQGLRAVADLIEVMRERKSARFYAKKDGLRSDQPAWRIIASVLAEVAAMEAENTSARILAARAAHLSKTAPEEQRFLGGRAPFGYRPVPNPHGPGKALAVDEYEAHVVREVAARLVAGETLTKATLWLDAEGVPTPQSPARRARQAGAPMDGLHRGAWRVTTVRNLWRSETLIGRTTQKQPIRGADGQPLIGADGRPKYETRTVVDDAGLPIQRWEPILDFDTYAQLQARLPQVGRVQPRRTVSWLTNVARCAGCGGKLYAQKVRRRGEEALYFRCAQKGYVLEPCTAPATVRVDRLEEYVEAAFLRAAGSHPELERVERVIAPDVAQEARDVAQAIQDTLSAMGRDGADLPTLSRQLEELKTRRTALRELPSSTEVELRPTGRTLAEVWAELGDDLDGRREHLRQVVTGVVVKRTARNGTRAPLDAERVRLVWNADHGFELDEPAALPESASGALKIRLR

SEQ ID NO: 3513 - protein, 528 aa, unidentified
  source 1..528: note = uncultivated organism
MTTATSQRSRRAAVNGTVGEHGAPTPGPRSIRCAIYTRKSTEEGLNQEFNSLDAQRESAIAYIASQKNEGWQCLPEKYDDGGFTGGNIERPALKRLMADIETGKVNCVVVYKVDRLSRSLMDFARLMELFDRKGVSFVSVTQQFNTTHSMGRLTLNILLSFAQFEREIISERTRDKIAAARRKGKYALGKPILGYDYVPYPPPFTGRRLVVNKAEAERIRRIFELYLEARSIMHVADECNARGWSTKTWTTTAGRVVGNRAFDKTIISRLLRNPLYVGKVPHNGAVYDGEHEAIVDDDLFRRVQNQLKLAAERGGASVKNSTGSLLGGLVRCKGCGCAMCPSSASKKRPDGSRVRYRYYVCSNAVKRGRKHCAAPSLPGPALETFVIEQVKAVLVNDLSMRAVVARALDLLREAAELRVAERARLQNVLERLSGEEQTPATLREVERVRRTLTALARQIDLDADRLIDEDEVVGAVEAFDGVWGAMTLAEQAEFLHVVIATVEYDGQSQNVSITFHPGAEASDKSALP

SEQ ID NO: 3514 - protein, 515 aa, unidentified
  source 1..515: note = uncultivated organism
MPQVKIIQPIAEQAKKLRVAAYARVSSDSTDQLNSFATQVDYYTNYIQSNDEWEFAGLYADEAVSGTTANKRSDFQRLLADCRAGKIDRILVKSISRFARNTIDCIQTVRELKQLGIAVEFEKEDIDTGNMGSEMLLSILGSAAQEESLSISKNLKWSYRRRMKSGDFITSKDLLGYFFQNNTLVPNPKEVPIVKYIFNSYLSGKGMEEIAEELNAANLKTDKKPSGRWHSTMIKYILSNEKYIGDSLVQKKFTPDELPLRQKRNNGEISQYYIQNSHPAIISKEIYEAVQELLQQRIEQHAPKQKMEKSPLSNIMQCGLCGSAFHKHKSNGEICWFCYQHRKGKTLCPMGILYEKEVYMAFLSIHNKLLDNKDFILKAMLNQLLELQTKVISTKADIVEINEKISELVTQNHSLARLQTKGCIDSAIFIERSNRNNQKIEELRRELRQRQEPDSISNAIEGTQLLLDLLESAKPMLKFEPSIFQSMVKQITVYQETICFQLANGMILEERRTQS

SEQ ID NO: 3515 - protein, 592 aa, unidentified
  source 1..592: note = uncultivated organism
MSEYTRYALYGRVSSMRQKEDETIEMQQDALRAYAKLHNLNVVGEYYDEAQSGTLPFVDRPEGRRLLEDAKAGAIDAVLFYRTDRLGRSAFEGLRICRQLNDLGVTLRSISETYDTATPIGKFIFTQMLSVAEMELSSIKQRMNDGKQRKISRGLASAKGRVAWGYIADEKTGKPVFDTRPYWGEKGRADVVRFVFQTLYDNPEMTHQKAAEHFKALGIPCAARHGWDYRYVRAMVTNTSYKGYRVYNEQSKIYKPVTVSFPPIVSAEMFDAVNAASIRRRVCVPHQAPRFKHKYLLNNGLVRCGQCGHTYSGFYATGSVGRYYGCNGKKGRKRINWMGNEPCTYARSVPASWLENIVWNECYKVLTDEDYVRKVLAEYYKPKEEKKSAVEKEELEKQLETATKERGNLIDLCLKNIITQDDLANRLPALDKRIAYLRKLLQGIKKEPAQNRPIEISNTLTNLRTLRLDLAKADDWDTKYKIIHALVHTVTVSTNKANNSIGVHIDLNLGANGLGKPCTAASLSSEIHSKRYSSVSTTTSFVVTLFSVPPILRVCRIYGEGHPRHNGCCQHSVMHFVFHNLTPFFDCVMIVT

SEQ ID NO: 3516 - protein, 514 aa, unidentified
  source 1..514: note = uncultivated organism
MLVSPEKYNCALYCRLSNEDELDGESNSIKNQRDILERYTKENNLNVYGVYIDDGFSGTNFDRPDFQRMIKDIENKKVNMVIVKDTSRLGRDYIEFGNYIERIFPQNQIRVVCILENYDSEIDNGVADTLPFRAVMNDMYAKETSKKIKATKRKNAEQGLFMGRYAPFGYDKDPNDKHKLIINEECANIVRKIFDLYLAGNSALQITYILEEEKIPTPSQMMKMDKQSTRWYREVICRILQNEIYIGNMVQCKKRKINYKLKKSIDLPKEEWVIVENTHEPIIDKEKFYAVQEVIKSRESTRKKTLDLLLRGLVVCKECGKKMSTTVDSRGNHTRYLRCASYASAPKLHLCTPHIMNYNKLENAIISEIQNICKQYLDKNKIKKIVDIQNREIELELSNKKDKEKTIREIKALEVQIDNIYEDKLKKIISEVDFARMYNKKIYERDKKKEHLKELENTTFDKKIVDYEKIMAEFLNKDNITSYMLTSLIEKIEIDNDKNVTIYYKFSPLNNVLS

SEQ ID NO: 3517 - protein, 536 aa, unidentified
  source 1..536: note = uncultivated organism
MEKKADKEKLLIKCAIYTRVSTSEGLEQEFTSLDNQRESAESYIQSQKSEGWLISPERYDDGGFTGANTDRPAMQKLIEDIKAHRINCVVVYKVDRLSRSLFDFSQLLEFFDQNSVAFVSVTQHFNTNNSMGRLTLNILLSFAQFEREIISERTRDKMGAARKKGKWLGGCVPLGYDLDKENHKLLINSEEAKIIRELFDLYLKERSLLGVAKTANAKGYKTKIRKLAEGKQRGGVKFSSTSIEKILKSAYYTGKVRYQNVLYPGEHERILDDEIFMKVQDALHTNPAKFKPRKPIGKNLGLLSHILRCRACNSSMYLTHSVKHGVLRYSYYACLNAQKRGYQECPTRLVNAGLMEAKAMECIRKLTDDQKLKPDVWESSTLAQKRLALKSLVKEIWYDGGTEILEIVLNSTQKSHAFNVSKTELKYHRVTPKERLIQSEPQLRQNLLLALQIQDLIDKNKAKDIKEVSGWLNLSQQRINQITSLLFLSPRIQEEIILQNNPCLFEIPEYKLRNITNELDWDKQYVTWQKLIQKTN

SEQ ID NO: 3518 - protein, 513 aa, unidentified
  source 1..513: note = uncultivated organism
MTPVNVTVIQPTIIIDTTRIRVAAYCRVSSDSSDQLNSYMTQIRYFEKAISESEDEEFVGIYADEGITGTRIDKRNEFLRLMKDCRRGKIDRIITKSISRFSRNTKECLTCVRELTELGITVMFEKEGIDTAEMSDEMLITIMGGLAQEESTSISQNLQWSIKKRMQNGNYIASSVPFGYKLKNNKLYIDKNEAEIVNQIFDDFLSGKGAKKIAQEYNKKSLENGFRWCSSTIQYILTNEKYIGDSIWQKTYTPNTIPFKSIINKGVIDRYYITNTHKAIIDKFKYEAVQQLVISKRTNNYTAEIYPLSLKIKCGNCSTTYRRKKCNEKVYWVCRKHTENLEDCPSKQIPELLFYSAFMSLYNKLKQNHNTLLLPLLIQLQDLKNKKFNCNINVIEINKEIAKHKEQIHVLTRLKTKGFLNESKYLEQSGEINTKIHKLTNEMQKITRCDDEDELIDQIKEIASMIEGGPELISEFDEVMFESLVEKIIVNNQTELEFHIYGGLVFRENIYYI

SEQ ID NO: 3519 - protein, 591 aa, unidentified
  source 1..591: note = uncultivated organism
MKNKKRIAIYSRKSKYTNTGDSVGNQIELAQEYIKTHYPEDEYKVEVEIFEDEGFSGGNIDRPQFQKMLKIERENPYDVLIAYRLDRISRNIADFSNLMNELTKLHTDFVSIKEQFDTRTPMGRAMMFIASVFAQLEREVIAERIRDNMIELAKTGRWLGGQTPTGFDSEKYEIVDIYEKDNDNILTKKKKKACKLIPNVEERKTIEIIARKYLEIKSLTGLETYLIKHNIVSRTGVYFCTSRLRAILTNLVYATYDEDMKGYLEKKGITIYTEPGREVAEGRYGLISYNKMDGDKNSRDMSDWIIAVGLHPGYIKGIDFIRIQELIEKNSSKRYRAKCKNEALFSGLVKCKECGSYMRPKATGNRKGDNGKRRYYYTCELKDRSKGTKCQGANIAGIAMDNLIVEKLKEVLVPSSEIYKELKKMSISKIKQDSNEEIEMLNKTYNRNLEAIKNLIEKLKFMDVEVTPLVNDELKKLKKENEEIQEKIERLQKEQKNSELKRTSESKGAELILDIINNCLNNFDELDLKMKKDILRIFIKDIYGNGDKVEVNILNTKLEESTKKLFSESIEESNFKNYTGVAIRTGKQLLQ

SEQ ID NO: 3520 - protein, 517 aa, unidentified
  source 1..517: note = uncultivated organism
MLTIGIYPRKSVYRDNSDSVQVQIQLCKDYAGIIYKDQEIEFHIYDKDEGFSGKNTNRPSFRQMMQDVENNLLDVVMVYKLDRISRNVQEFSAMYEIFQRHNVSFISVKESFDTTTPMGRTVMYILAAFAQLERENTSERVADNMLALGTSGKWTGGKCPSGFKSIRQKCGDKEHSFLVIDPETIWLPKLLYKLLLDGYTITAIERHCRDHGIKSQTGKFLNTSQIYGIITNPVYCQNNPEAWYYFHDVGCTLPDLKLFDGTKGLIGYGKTKTGSASQPRQKMSAWTIAVGIHDPVIPASEWIAAQKRLGINKQFRSAKHEAGILKGVLKCSCGSRMDVRTYYKNNIRFSYYYCANMARQGRTVCDSDYVRIEKIDECFLQKLRNIKLNPSGFKTLHLSGTERKPETIRLEIKKLEESIHNLTNALTQAMDSPAASYIITQISDLDKQKTVLDGELRKALLDSATAKSAEETEKEIYNNICYLLDNFDNIDYTGKNELIRKTVKNCIFDGESLRIIF

SEQ ID NO: 3521 - protein, 513 aa, unidentified
  source 1..513: note = uncultivated organism
MEPVDVSLLQNVCIYLRKSRRDLELEQRGGEDTLARHRAILLADAHRWGLKISAIYEEVVTGDTIAERPRMTQLLHEIEAGRWDAVVCMDVDRLGRGGMRDQGILLDAFKWTSTLLLTHDRIYDLRRETDEEAMEYKAQGARFEYRMIKRRLARGREASVREGKFIGHTAPYGYVRVKLKKERGWTLEPQGPQAAVVRELFLRFADGESPASLAKHLNALALPSPGGTTWTPAAVRRILSNPEYCGLIRHGLRKTVKVFSGGALKQSRPRALPAQIALYPGRHPALISKEVFDAAAQRLQAQKPTPGPKPQGMANPLTGLVYCGLCGRAMIRRSYGGKRPDALLCPNSTCPTVASYLHEVEALLLEGLRHWLGDLPLVPVPAEKSDALTRQRTALERERAAVAAQQIRACELAEQGIYSPELYRSRREVLERRAAALAARISVLEREAQGAPRFSPPPELPLLDVYALTDIAEEKNHLLKALLQKAVYHKTRRTRQKGGSDLTLTLYPRFPAR

SEQ ID NO: 3522 - protein, 508 aa, unidentified
  source 1..508: note = uncultivated organism
MERVAMYLRKSRADLEAEKKGEGETLTKHRKALFKFAQQQNLNVIEVYSEVKSGEKLIHRPEMQRLMDDVENGKFDAVLVMDIDRLGRGNMQEQGYILNTFRASETKIVTPTKTYDLMDESDELMTEIQTLFARQELKIITRRMQRGRVQSVEAGNYIGTRPPYGYEIVKEGKSRWLVPHPEQSKVVTMIFEWYTDDTSKIGTAKISNRLNEMGLKTYTGISWAPSSVLTIIKNEVYIGRMQWKKKKYDTTAEGRTTIARPKEDIIDAKGKHEPLVNEEMFAKAQEILKGKYHVPYQLVNGISNPLAGLIRCAKCGYAMTLRPYSRQESHLKCPQKECDCRSSKFEFVENAVVSALKDWLKSYKLEIGKNKPSNRSERNAELKQMAVNSFAKEREDLELQKGRLHDFLERGIYSEDVYLERSQGLAIRMDETNKSLERAEQELTEELNRETKQNNIIPLITNVIKLYERSTDQGKKNTLLKSILEKIEYKKESHQRNDEFEIELFPKV

SEQ ID NO: 3523 - protein, 525 aa, unidentified
  source 1..525: note = uncultivated organism
MNKPPKTVGKSAIRCAIYTRKSCEEGLELEFNSLHAQRESAEAFILSQQHEGWVCNPELYDDGGFSGGSLERPALNRLLSDIEAGKVDCVVVYKVDRLSRSLMDFSRIMETFDKHQASFVSVTQQFNTTHSMGRLTLNILLSFAQFEREIIGERIRDKIAAQRRKGKWAGGHPVLGYDVDRSTPNSKLVINAKEAIRVQEVFNLYVTLESLTPVMQELSKRGWRNKQWQTKSGAQRGGRPFDKPALHTLLTNPIYAGKIKHKDLMFDGEHEPIIEQKTFDSVQAMLKAHGRGKGNGLTNKYGALLKGLVYCGACNKAMVHTMANRETKRYRYYTCLKAIKNGWDSCPSKSLPAAELESAVIDQIRCIATDKRLIQEVIDKSKKTVEAELAELQRQLQNYKKQLARDHAEIQRIGAMANPNDPTLSRLADLHDRIAKTEPELHGLRSRMNKLQVMQLADEEVRTAFGDFEKMWHTLTMREQAKLVRVLVERVEYDPSDTSLSVSFHASAIQSLSGEGVVETIEVSA

SEQ ID NO: 3524 - protein, 535 aa, unidentified
  source 1..535: note = uncultivated organism
MAKGAIYIRVSTVMQLDKESRGVQRNDLIRYCNDILGIPDYEIFEDAGFSAGSTDRPDYQKMLQRIRAGEFTHLLVWKIDRISRNIINFTDMYQELQALGIAFISLAEQFDTSSIVGQALLKMILIFAELERHNAAERSKAVLLSKAEAGEYTGFRIPFGYRRDSETKEYSIEETEAHIIRLIFDMFDQGTTIYAIAKHLNSLPLKERVKKKWQMPTIERMLTNIFYTGALRYNYRSYTSKKERVINAEKDLVLVENNHPAIITKKQFERCQQRYAERKDTVYHVRKPLFADLLVCNAHRIPLLWQKENTRKFSSPATYSCPYCAQNTFTDEEVGNFVLNYILNLLQAYRQVSPSTSPLTLKRLLLRGKDFEGIKTLINTEEIKRSLLSGGGSAKEDIQDKQRKLKFELQMKERELERLEPYGTDSSDVPNVQIDQLKSTIERLSVELQQLENSVGTQAIPQVDYLKKCYDFYVQHNLYHLSDIGFSDCFKNIPFYDFKHFFQDVIAGIYVGCGKIIVIEFSSEQEDRKNHRFGI

SEQ ID NO: 3525 - protein, 518 aa, unidentified
  source 1..518: note = uncultivated organism
MNVRKIEPNKIIVKPKLRVAAYVRVSTDKEEQQDSLENQKAHYESVIKSNTDWDFAGIYIDEGITGTSKENRTALLKLITDCENGKIDFIITKSVSRFARNTIDCLELIRKLSKLGVSIYFEKESINTGTMDGELMLTILSSLAENESISISQNNKWSVQRRYRNGTFKLSSPPYGYDYKNGRLTVNSEQATVVKRIFSEALSGKGAEKIADGLNADGIKPRKSDQWTSTTILGMLTNEKYTGDAVLQKTYTDDNFKRHHNHGEKDMVMVHKSHEAIISSDEFNAVRELLRQRGDEKGIVTGKGKYQNRYPFSGKIICSHCGNHFKRRTHSCGSRKYIAWCCSKHIKDSSKCSMQFIREDDIHQAFITMINKLIFGHKFVLKPLLRSLKARNDADNMAQLLELDKKLSDYAERYQALTNLLAQGSISTSVYKEHVNELRAEEDNLKETKKVFSRCMNDGMAAVKEAAELTKWAAKADMIDSFDETLFIRFVDSIIVYSREEIGFKLKYGLTLKERLVD

SEQ ID NO: 3526 - protein, 581 aa, unidentified
  source 1..581: note = uncultivated organism
MPKLQITEPNKIPLKTEDDKPHRVCAYCRVSTDDTDQKNSLVAQKQFFEKYFNLHTNWTNVGIFADEGLSGTSLEKRDDFNRMLFEARHGGIDIILTKEVSRFSRNVQDLLNIVEELRSKGIYVWFLTDDINTESDNYREKLSQSATAAELESLRTSRRVRWGQQQQMQLGVVFGRKEMYGYNIVKDENGIQHFEIIPEEAEVIKKIFEWFASGEGTHRIGRRLEQQGITTKRYKNGWSNTVILRILRNEKYVGDLAQGKTYTPDPLKHKKKYNTGQSYRFYITDHHPESAIIDRDLWNKVQTILEEKAPSEEIKAKHSNRYWTSGKVYCGLCGGRYVSYVKKQKNTPYRAWVCFENHQRGNYKQITLGTGETALVGCNALRVNDRVLKTAVHDIITAYIIPYRETLLNEMKKEIAELSKPKDNTKQIQKLQTALERKQGEISKLTLAWSGGSVPDIAYYSSIGTLNKQYEDLQAQLRKLQEQGNSASAEIQIYTEYIEQLESVLSLSENELNEAFYERVTKQIFVYPLNLLEFRLSFIPMPIYMQYKTSGRGNDYTAEFSILSKEQFAELLEKAPKNEFD

SEQ ID NO: 3527 - protein, 524 aa, unidentified
  source 1..524: note = uncultivated organism
MATAQDNLARKQIFIPALQSEAVVLRVAAYCRVSTDSEDQLNSFAAQQSYYNDYIRKHDNWQLAEIYADEGITGTSAAKRDDFQRMLLDCRKGRIDKILVKSISRFARNTKECLEYIRELKDLGISVFFEEHNIDTRMVTSEMLTAVLASCAQAESESISKNMKWGIRTRMEKGVYTAPSVPFGYRWEKGTLAIHQEESAYVRWIFSEYLSGRNTEDIANELKIRSISDPVLTARKWSYQTIVNMLKNEKYIGDCLNQKTYMTEELPRRCLRNRGEYTQYYVEDAHPAIIDREAFVEVQALLQMRARGHVQHTVQTSPMAAKIVCGKCGSGFRRKQTSGRYVYACRTRLSDIDACDMLQIREDEIKDAFLRLYFNLRNNRQIFTYLLKNLYTIRNRQMLWGADIIELNKRISDIISQSHKLTVMQKSGNVDPDIFIAKSNQLAEQLRQAKQQKERLQHQEDDGIIEATQQLLEAINAGPAMLESFDEELFCELIDKVIVESNTKIRFRLKNGLELPETIERTVR

SEQ ID NO: 3528 - protein, 500 aa, unidentified
  source 1..500: note = uncultivated organism
MKENCVLKKRVGIWIRVSTEDQAKGESPQHHEARAREYAKFNEWTVVELYDLAGVSGKTVMENAEAKRMIADIKRGHITGLIFSKLARLARNTKELLEFADLFRQHSVDMISLQEKIDTSSPAGRLFYTMIAAMAQWEREEIADRVKASIKIRAKLGKSLGGAAPFGYQWKDNKLSVHPVESPVRKLMYELFSKNKRMKGVARLLNQSGYRTRNGSKFSDTTVLRLLQDTTAKGLYRSNHTYRDGKGKLVPKPESEWVFSPVTPIVSEALWKECNDAMDARKAQRPLGRKPVHLFAGLLYCGCGQKMYVFSRSPKYVCPKCRNKITVQDIEGVFHDELHDFFVSQEKIKAHLESANQNLADKKNRLEAHNRQIEKVRTEMRKTYQLYQADQITPEGFGKIYKPLEDQERALTAELPKLQAEVDAIEMRQISAEEVFAEATGLYRKWPQFSQDEKRRIIESIVEKITLSGDTIDITWSYLPSSEELTKRQRNLSGSSPRRA

SEQ ID NO: 3529 - protein, 517 aa, unidentified
  source 1..517: note = uncultivated organism
MAGRRIDTPTARCAIYTRKSTEEGLDQEFNSLDAQREAGEAFIASQKSEGWICLPERYDDGGYTGGNMERPAFKRLMADVEAGCIDCVVVYKVDRLSRSLLDFTRIMEALDKRGVSFVSVTQQFNTTSSMGRLTLNILLSFAQFEREIISERTRDKIAAARRKGKWSGGRPILGFDVDPRGGRLMVNEDEAGRVRAIYAIYLDRESLIATIKELDARGWTNKQWMNKKGRESGGAPFNKHSLYSMLTNVLYTGHLTYKDEIHDGEQPAIVDDETFRRVRQMLKRNGVAGGAHVHNKFGAVLKGLINCVPCGCAMIPTHTTKGDRRYRYYVCAKAQKRGWHTCPSKSIPAGEIEKFVVDQVRGIGRDPALLAETLGAARAEAKARIKELEAEKLGMERELKRNNAQMRALAGVAGADGTAIDRMADLLDRIRGVEQRLAAVRDELATLGRELVDEKEAIRALAAFDPVWETLTLREQARVLNLLIQRVDYDGDKGTVSVTFHPTGIETLSREMAEENA

SEQ ID NO: 3530 - protein, 565 aa, unidentified
  source 1..565: note = uncultivated organism
MTTATRSRIRCAIYTRKSSEEGLEQSFNSLHAQREACEAYIASQRHEGWHTVATEYDDGAFSGGNMERPALHRLLADIAAKKLDTVVVYKVDRLTRSLADFAKIVEAFDSQGVSFVSVTQQFNTTTSMGRLTLNVLLSFAQFEREVTGERIRDKIAASKRKGMWMGGNVPIGYDLKDHKLIIDPVGAEVVRKVYDAYLRLGCVRKLKEYVDRAGLHSPVKTSIKGRKTRGGALSRGTLYHILSSRTYIGEISHRGEIHAAAHEPIIGREVWEKAAAKRDENRVTRHTRYNRPNGCVLMGLLFDVQGNRYLSTSSSKKGRRYRYYVVTTYRDQQPFQFPRLPAHEIEQLVFARIRAFLDSPEELLSACQRTDKADLRLVTAAAQCKLLWLKSKTQKESGEFLRSIVKRIVIKPDEITIEIDVLTLLNTLTERKSSAAAAKAGQQNGAVMQLTTPFRMKRRGPELRLIIPGNQQSETSPVPALVKAVARAHEWAERIFSGEISRIEDLVAETGFTHRYISRALRPAVLSPDLVGRILKGQQPTDLTVRKLLAGFPLDWESQRTSLDG

SEQ ID NO: 3531 - protein, 543 aa, unidentified
  source 1..543: note = uncultivated organism
MAKQTENNVGIYMRLSQEDMREGESLSIENQKMLLTKFVRDKGWTLVSEYADDGYSGTDFNRPGVQKLLADAQSGKINIIVVKDLSRFGRNYIEVGRYVDYIFPMNNIRFIAVSDNVDTAERNSMALEMMPIVNLFNEWHSSSTSKKIKAVYEAGAKQGKYFAAKAPYGYVRSDTPNHTPVIDPETAPVVKRIFDMRTQGMSSLRIASVLNKEGILCPSEYYYQQTEKENTLRNRHLWCRTSIEQMLRNPMYLGHMVQLKVTSVSHKNHKQVKKDESEWAVVENTHEPIITQEIWDRCREIDNERSTGRVTKQGIVRPLSALMYCADCGFRMKNTSRNDSRKSDGSRMQFYICSTYSNYGKESCSAHYIEGERIEQIVLDDIRSMLQLVSKDEDKARKVFLSRKQKNIDHQTTADNDKLCTAKKRIAELDKLMQSAYEDKVSGEMPASVCVKLLEKYESEQNALSSQVQEIESRLLTMKQDKKDVEEFISRLRKYKGVEVLTREMCLELIDSVTIDEYHKGKTERDIHIYYKFIDKGYSDKPE

SEQ ID NO: 3532 - protein, 550 aa, unidentified
  source 1..550: note = uncultivated organism
MPKTKTVYRTAIYARLSKDDGDKVESNSIASQKALCEEYITKHSDLELVETFVDDGYSGVDFERPAFRRMEEALRNGRVNAVLCKDLSRFSRNYIDGGRYLEKIFPLLGVRFIAINDSYDTLKENPQSNSFLVPFKNLINDTYCKDISVKIRTNLDVKRRKGEYVGSYTPYGYRKDPEDKNRLIVDEEAGGIVRQIFSLYKDGMSVGQIADRLNELGIQSPMEHKIRSGINFETGFKTREAAKWSYTAVRRILANEVYIGILAQGKRGTPNYKVHVVQKRDESDWIRVEDAHEALITYDDFMSVRTLLGRDTRVAGAGTDTECNPFSGFLFCGDCGQPMIRKVVPAKNKKYYYFVCSTHKRHEGCSPHSISAVELERAVRNAIATQVQNVLDLSQTLDYIEKLPSSNRLVLGYEARITKLEEEIEYLNKMKLRIYEDLTNGLLDKQEYADFRQQYRAQIEDKSAALDRIKREKKDALVSDDTEKVWVALFRQHENIGEVNRRVLMALVDKILIYEGHALEVVFRYGDEYRRMSEFVERHGDLLPQKAREV

SEQ ID NO: 3533 - protein, 513 aa, unidentified
  source 1..513: note = uncultivated organism
MTVQGKEVKIIKPKTGDKEELLRVGAYCRVSTDSDDQLNSFFAQVQHYNDYIRENDSMRLVEIYADEGITGTSVDKRDEFKRMMRDARNKKLDRILVKSVTRFARNALECIEAVRELKSCGVTVYFENDNIDTARMNSEMILYIKSAFAQGEAMSASKRMQTSVRMKMADGTYVTSSAPFGYRLVDNVLVIEPNEAEIVRDIYRLYLSGRGITVILKYLQSERAPGLNWSENGINYILRNERYIGDSLWQKSFVPNILPLRQQRNKGELPQYYCENTHEAIISKEEFESVRALMKSRSNYHKPPNKHREFLSGKICCRQCGWKYKRRYKAGELRWTCSRKGKDIRDCHAPQLSDNEIREAFVRLFNIIKQNERTLIVETITQLQTLKTKINSGNNAILEIDEELMSLSQKNATYGELFMQGVIDHTLFVQQTDVLNQKIYELRTRRSKLISEDDDEKCIERMRELRKVISSSGYLVSMDERLFDSIIETVYVEQDGTLTFRLKCELEFSIKRR

SEQ ID NO: 3534 - protein, 560 aa, unidentified
  source 1..560: note = uncultivated organism
MKNTNLVYDTGAYVRLSKDDLDIDGILKSESNSVSNQRDILREYIRSHSDLELYDIYVDDGFSGKDFERPEFQRMMEDIEAGKVNCVVVKDLSRFSRDSMEATEYQKRIFPRKNIRFIAIGDGFDSLTATSIERNLVLPVKNMVNEDQLVKTSQSIRMSQELKMKSGAFIGSFATYGYKKSEADNNILEIDDYPAGIVREIYDSKICGMSMDGIAKMLNSRGVLSPMSYKLENGEKYNTGFAVGEHPKWSAQAVRRILMNEVYTGTMVQGKSSTIGFKSSKRKKNEDGTDFCVRVENTHEAIISKSDFATVQRLLKFEGRWKDGGDVSIFNGVLMCGDCGTPMIRRTYKNKDGDKRVYICKTKNVGKGCTRHAIEEERLCEIVLQALKVYVSGCIDYSKLIDKVRQYQLSFDHINDYDANMKRLREEYNLVSSDLAAFQSDLAAGIITQEQYEKYTKKYQKKLADISASMEESERIVKSLLTDGVAAGTKLEELKRTMRIKELDRKTLLKFVECIWVFEDSEVRLQIDFKFRNEIPALESMKKCYEDAEFKHRCEAWEVV

SEQ ID NO: 3535 - protein, 581 aa, unidentified
  source 1..581: note = uncultivated organism
MFEDNRKYAIYSRKSKFTGKGESIENQIEKCRSFLTKYPDAIEENILYFKDEGHSGKNTKRPDFQKMMAAIEKGEIKAVVCYKMDRISRNLLDFVKLYNTFNENDVSFVSTNEQFDTSTPAGKAMLMIIMAFAQMERETIAERIRDNMFSLAKTGRWLGGITPLGYESVKITAKKDFDDRERTAFKLSIIEEEAEIVRLIFEKFIEFNSLTRTETYLTQNQIKTRNGKDFSRFSIKSILQNPVYVVADKTSLEYCKNLEMQVCSDKEKFDGKYGLMVYNKTHQEDGKANKTNDYKDWIVAVGKHEPIIDSKTWIKAQKLIKQNSSKSYRKPRSHHALLVGLLYCGKCGAFMRPKLTQRPSPSGGFIYDYLCETKEKSKGKNCDCKRINGNAIDSEIVKYIKSLTYSETALKKHIRKMKNSISDSTKEYKDNNRRLEKENINNERIIERLIKSIGNSGENTAADRRIKSTINELQEKIDTNLIQIEENKKAIENQSLTEDSIENLTNILSSFAKTFDSMSVEEKRIAIKAFIKRVEFDGDENFNVFMNGDEDVSLEEIFSNEAQKEPLREDSERDTDAFPRS

SEQ ID NO: 3536 - protein, 540 aa, unidentified
  source 1..540: note = uncultivated organism
MRIAIYSRKSIFTGKGESIENQISMCHEYISSKLGKDVEIIVYEDEGFTGKNTNRPEFQRLMKDIKNKQIDRIVCYKLDRIGRSVAQLSNMFEMLDQYNCSFTSITEQQFDTTTPMGRAMINIASTFAQLEREQLAERVRDNMLQLAKTGRWLGGQSPLGFTPEKVIYIDEEMKERTLMKLTPYEEELNIIRFIFKAYLEEHSINEVTKQLNVKCVKGKNGGNFDTTQVRRMLRNPLYVKSDESTHKYLNDIGTNVYGEYNGNGYLTYNKKKQTTIGRNVEEWIVAVSNHKGIINSEKWLKVQIVLDKNKSKQSIRLGTGNSNNACLSGVLKCAKCGSNMVVKHGHPSKFNAYKKYDYYVCSNKQNKYVDRCDNPNIRVDILDSIVITEIKAYNRELLIDELTKSLTINDITLENKQLKELHTQIKERKLASSNLVKQLSLAPNDDVASIIMNEISSINNEIKELKSNLNNIEWNKNEIVNLELIINSLKHFNENIDAIDDISKKRILIQSIVSKILWDGDNYKTKVKILDMEDFQKNNN

SEQ ID NO: 3537 - protein, 572 aa, unidentified
  source 1..572: note = uncultivated organism
MFKDSVNKENIAVMYLRLSKEDGEKTESNSISNQREMINSYAKKNQFTIVGEYVDDGYSGANFDRPNFKEMIKDAYDKKFDTIIVKDLSRFGRDYIEAGKFIQRIFPENGIRFISVNDNYDSKSADMNDTHLILPIKNFINDSYCRDISNKVKSSQKIKREKGDFISAFAPYGYKKSDENKNKLVVDEQAAPNIKNIFDMKLKGYSSKAIADELNHLGVLTPRKYKESQGFKCNGFQNIKGGNWSAKAVNRIIENEVYIGNTLQGKSITLNYKNKKQIEKEKDEWIRVENTHEAIISKEVFAIANTMLKRDLNNSRGKDKIEIFTGMLFCKECGSSLIRRTVKYKEREEVFYICSKYNKEKSCSRHSIKEDTLIKAVSKIIKTYIEFNEKLYSKVQRIDINRNLKDKQIPILKREKAMTEELLSSLYLDLKEDVISKEEYQLFRKNYMEKLTKLDESIQYRLKRQEDTKYKIDENKSWIIDINRYKNLSEIDRLSVVMLIDKIFISEDKTIDVRFNHTEELFLLEEMTKVDKSKFKNNIIAKKSISTNGKSKAIPAAMNKNLVNAESEVYYG

SEQ ID NO: 3538 - protein, 543 aa, unidentified
  source 1..543: note = uncultivated organism
MNEKKIYRCAIYTRKSSEEGLEQDFNSLHAQRESCEAYILSQKNEGWRLVKTHYDDGGFSGGNMNRLGLKRLLADIELGKINTVVVYKVDRLSRSLPDFAKIIEQFDKYNVSFVSITQQFNTTTSMGRLTLNILLSFAQFEREVTGERIRDKIAASKKKGMWMGGFVPLGYDLKDRKLFINLKEAKTVQYIFHRYLELGCVRLLKEELDKNEFRSKTHGSKGGLPFSRGSLYKILSNPIYIGQIRHKEVCYPGQHKAIINLNQWEQVRKHMSEGRERHENRSVASPHCPLRGKLFDALGKRLVPVHVTKKGRRYRYYISDDLRENPKRASSFGWRLPGHELEQTIQSLVKNILADHIQIQTALAEGGVGTYLISSILSEIEQILPYPEDLISRFVQRVEVSSDGVSITISLQSFLKEGETPQDVNITRDIPMKLKRRGIEMRLVLGNYERREVDKTLLCAVARAHKWFLSLTSGEMKSFAEIASKEGVDKSYVSRIIPLAFLSPQLVESIMEGRQPVNLTLEKLTKQIKIPLNWQEQHKLFGI

SEQ ID NO: 3539 - protein, 528 aa, unidentified
  source 1..528: note = uncultivated organism
MADRKRCAIYTRKSTDEGLEQDFNSLDAQREACGAYILSQAAEGWEQVDEHYDDGGWSGGRLDRPGLKQLLADIEANKVDIIVVYKVDRLTRSLADFAKIVEILDEKQASFVSVTQAFNTTNSMGRLTLNVLLSFAQFEREVTGERIRDKIAASKKKGMWMGGPVPIGYRVEDRQLLLEPTEAATVRMIFERYVELRSVPQLVEEMANRGVRTRRREYRDGKVRGDIPFTKGPLASALKNPIYTGKIRHGELVYDGQHEAIITQQLWDQAQAVLQANGQDRLLGKKAKNPSFLAGRLVDPDGSPMTPVHTTKKARLYRYYITRFKAGEDTGQPWRVPAGDLDRFAACLVVEWRSATSMTADIGKLEAQAGLAGRFKHLTVAEQRGILIEHALVFALHEDSITLSSSKIGGSQVCAKLPPRLVTHGQDRKLAIPPYGQAAKEADPVLVKLLAHAQSAHRMVLEGSVEPSVAHFGKRHLWQLLRIGWLAPNIVSAIVDGQQPIGLTGRRLLRAANLPLGWAEQRAFLGFA

SEQ ID NO: 3540 - protein, 554 aa, unidentified
  source 1..554: note = uncultivated organism
MNKINCAVYVRKSTEHGLEMEFNSLHNQEEACKAYIMAQSFNGWGYFRTYEDGGISGGTMERPGLQTMFEDIKEGKVNIVVVYKVDRLSRSIMDFHRMMEEFKKYDCNFVSVTQAFDTSNSMGKLTLNMLLSFAQFEREVSSERVRDKIAATKAKGLWAGGMPIIGYDVVEKQLVVNETEALIVDEIFKKYLESSNMLEVCVWLKERGIATKKWIARRTKQVMGGREIEVSYLHRMLRNPVYIGKISHIAAGKVYDGKHTGILPPELFQAVQDKLGRHYEKNAQRKEYTYSKCLFKKNLFDEIGNIFGITSSKKERRRFYYYFNRNGYSLPMGQLDEVVLENTQKILEMDLTGVLPEDIKENLKFIPSFNPDAIKVLMEKGICAKDEKINKINVYIPIEKLAEYATNYQRDIGFIRKKFLRNDGSVSLSSDKKNLIINVEFILDNSKSTRLRASCAKNIITVSKMNETLVRGIAYGWKFAKEFEQGKTAIKLEKETGMQKRTVYRYINLKYLSPKIIKDIFENKNPQNMRLVELMDLADKYLNFRDQECAWNNK

SEQ ID NO: 3541 - protein, 509 aa, unidentified
  source 1..509: note = uncultivated organism
MTRVCLYTRISTDEENQPTSLASQHERLEAFCKVQEDWRIVAHHEDRATGTKLDRPGLQAALDLARQGRIDQLLVYRIDRLSRKVRQLASIAEELAKLDVTLRSATEPFDTGSAAGRMMLQMLGVFAEFEHATIVDRVTSGIERRAKEGRWPNGRIPFGYARNENKELIADERTAPVIRRIFKWYAGGRLGAAAIARRLDSEQAPAPARGWQPNIVLWVLSNSAYVGRVHWRDQTFPGLHEPLIEQATFDQAHALLKERGENLAMRAASRADFLLTGLMRCGRCRRAYVGMSAKGNGGTYHYYACSGRQKLGRKSCDGERIPREKLESAVLSQLRTLYRDGGLIREAITQAAASSDTDRAALIEQRASLGKEISRAERAIDRYHEAFEDGDLNPARFKERITALDARLGALRDQDQVLAQDLAADAPAVPDTTALHAVADNLDQLIARDEPERAKALLATLIVELRVNSRSEILPTYQVGVPVVCAPNSSVEPTGIEPVTSCLQIGRTA

SEQ ID NO: 3542 - protein, 521 aa, unidentified
  source 1..521: note = uncultivated organism
MQNVKYKVAGYLRLSKEDGDKEESDSIVSQKGIIENKIKELGNEYELFDLYIDDGYTGLNTDRPNFQRMLKDIENGVVNSVITKDLSRLSRNSFEANYYIEIYFLEKNIRYISILDNVDTYVKNSNNDMIQFKTLINDWYSKDISRKVRSGVWARKEKGLYLGAKAPYGYSKSKENKNKLVINNEQSRVIQKIFDMFDDGITIKNIAENLKEQKIYCPDYYDFGGAKSGDYNWRAEAVKRILRNKVYIGHTEYGKKINLSYKSKKVKCIPREDWQIVENTHEPIISKEQFERIQTRLDFRKKTKHKKYSWLLNGLVVCKQCGTKMTIKVIRNKEGEISQVKIFCGNAVRKSNKTECDRKFKAINEDVVNKIVISNVEEKLNKVINNEKLEEIITNQYNQAGTKVFDDNIQILQKQLEKTEKTISSLYEDYKNGILETDDYKRFYKTEGEKRVNLKSQIDNLVKQKESRPIISEEKLLSVVRKLSNIKEWDREKLSEIIYNIEIDKENNIYINYKYDVLSMV

SEQ ID NO: 3543 - protein, 558 aa, unidentified
  source 1..558: note = uncultivated organism
MKTALKIATAVIVAIYCRLSREDNRNDVSMSITNQQAMLENYAIGKGWTVYKVYIDDDVTGTTFNRPGFKEMMNDIENGKVNCVITKDLSRLGRNYLEAGRHRELFDEMGVRYIAIHDGHDSIDNSSYNITTPIKEIVNEMFAAETSRKVRSTKKLMAEQGKFANSRAPYGYMKSQTDKHVLVVDENVSQNVVRIFELYLTGMPARAIADVLNRDGIIPPNEYFCSTIGKPNPFRNNKNSWGSGSVMNLLKNPAYYGAISNGKRSVTSFKNKRIICRSFDDWIIIEGTHKPLITKEQWEEAQRIGSKNKRETIRRSADGEVSIFAGIIKCADCGGNMIFNHKERKAYTDEFYRCSTYQQKGKNVCPPHKIDYDVLYEAVLTDIQKYAVLSMKDEKKLIDRILKANDAFKDKNISRYEKNIRESKNRIKEIDGILQNLYEDKIAGEINADTFKRMAAKYESEQTKLIADVEQMELELDECHRVQQDLTGWIASIKECLKVDALTRAIAVELISRIEVSETYDADGEKTLDLNIFYKFGLTGSTHEKQRKIEPFESVLAR

SEQ ID NO: 3544 - protein, 521 aa, unidentified
  source 1..521: note = uncultivated organism
MTSNRNTSPRQTVRCAIYTRKSTEEGLQQDFNSLDAQRESAEAYIAAQKHEGWVCLPDHYDDGGFTGGNLDRPAVQRMMNDIKAGRINCVVVYKVDRLSRSLMDFARMMETFEKHQVSFVSVTQQFNTSHSMGRLMLNVLLSFAQFEREIISERTRDKIAAARRKGKFAGGKPLLGFDILAGPGGSKLVVNKAEARRVREIFELFIECISLIPTVRELNKRGWHNKTWTSRAGKAMGGRPFDKPTLYRLLCSVVYLGKVTHGEHVYAGEHEAIVPQDLFDRVQSMLRRNKNVGGKHVGNRHNALLKGLVRCVHCGCGMSHHFTTKNNVTRYRYYVCNNAQKRGWSSCPSASVPAPAIEGFVVDQLREVGRNSAMFRRVLHATQEQITTAIDELKTQRGQAEDRVRAIHAEIREIAPRAGAMGEAADRLAALQDDLRVAEREVTRFGSQTINLERRLVNDEQIAQAIESFDPAWGSLGPTEQASVVQLLVEQVNYDGANETVSVVFRASGLRSPGGKNEEAA

SEQ ID NO: 3545 - protein, 538 aa, unidentified
  source 1..538: note = uncultivated organism
MQNMKTKWCAVYTRKSTDEGLDSAFNSLDAQYDACSAYVKSQVGMGWRLVDKKYDDGGYSGGTMNRPALTELLKDIEAGQIDIVVVYKIDRLSRSLCDFTDLSKLFERHGVSFVSVTQQIDTSNAAGRMMLNILMSFAQFEREMTADRIRDKIYASKKRGMWTGGPTPYGYVLADKQLKVDPEAAEAVRMMFRRYAATGSSLQVARELNESSCRRADGQSWQPRMVLSILKCRVYTGKLEVKRTGEVFDGIHEAIIDDALFQTVQKALAANVKTDGRSKRHAMLAPLKGILRCGTCGGAMTPVFSNYKGSKKRRYVYYRCVKDAKRADGDCPIKNIAADTVERFVYSQLGKVLRRDDVVALVTGGDAVKRVDFMEATKDMDDFWARMNPGERERLLRLLVRDVRIWPDKVVILLALDGDDSRIEIPCRLQTNLGRQHFVVEEPEPTHDTPALAVPKALRQTRRWLELLASGTYRDKKKLADALGFNGSYFGKMLRFPFLSPVIVEKIRRNEIPDVSVTKLMNLTSPVWAEQHKALGID

SEQ ID NO: 3546 - protein, 747 aa, unidentified
  source 1..747: note = uncultivated organism
MRAAFYARVSTDMQAEEGKSIAAQLTEMRELAEKRGWQPVGEFIDLGYGGGDMDRPELQRMLDVAEAKGFDVLVVHELSRLSRSLHDTLLIFERLGKLGIGFVSVKEPNFDFSTPSGRLFLSILAALNQYYLEILRQHTAKSKHQRAREGLYNSSIPPYGYRHVGDKDTPPEIDPREAPAVRMMFEEYASGNYSYQQIADMVSDAGYRTRAGRRFSKDTVADILRNRFYTGKVVYHKKHRGEPPEVYQGQHEAIIDEALYEACRQVREQRHRSPSTFQRGRQAYLLNGIACCDVCGRKLRAQSQGTHRYYREMSRSRGFDDCPSAQVGVRVDSVDEQVGRIFRLLTLPPDWQAELERMLDREDERDRLRNARQRLLGEQRRLRQLYIKGYFGNEIGAFEREYNRIQRELDALPIDDLPAIQQAARTLKRLSEVWDNADLEDRRDLIRLALREVRIDVTQGRVMALVPWPPFIPLLRQVEALLEIETGVFIPLWPPEVASEMGPDPVLDPILKPPEMWTDWPFIAALPYEASRRITPTLSDFLKARRKAGQPVQVIVDVLHPPFPRLRVDRRKWDVSIEFINLPQIKPALPYENSTVSFLSTPFRLQRSADKRAWVEEAARVLEPGGWWIFTDVMPHSMLGHWLYQYFPKARDFDLGKTLDPSALYLELGRAGFQVRMSRQVYYQAVSVGAACDIAEQRSGIPQLAALPDEVYRAGYGNLMDLRDRRGREELLASQICTVQVVARKIQ

SEQ ID NO: 3547 - protein, 511 aa, unidentified
  source 1..511: note = uncultivated organism
MKCVIYARVSTRREEQQNSLQNQIALAESIAREQGFTVVGRYIDNGISGAGMKNRSQILQLVEDAKKKKFDVIIAKSVSRLGRNPRNSMEIADQLERVPIRLILPEDNYDTETSKSRFMFNLKAILAEEENAKLSERIKLGLQSSAKQGKRRVSLPPYGYMVNPVTKQLEMDEVAAPIVKDIFKLYLHEGWGMFKISNYLLHKGIPTPRATTGAANAGTKWHQNSIKGILNNEVYTGKLVFHREETTRTLAKSELYKERRKIESDKHIVIENAHPAIISEDDYKAVQELMQRKGKHKSNGKESLFSYIVKCPDCGSGMHFKPDRRNGAYVCGGYVKFTSSYCSSHIIEEHALLQTVKNDLRALIQDRVKIEHLYGIAEEKANALQSSTIKELKRVDRELVQLDKRFDRLLSLHVEGAISTEQFKQQNERITQQQQDLANKKAELQLALEAKKDLNEQLQTFRKEVKRFVNLDIEDEQVLKQILQRLIHKIEVFEGGKIKIHYNLSHPLPSN

SEQ ID NO: 3548 - protein, 519 aa, unidentified
  source 1..519: note = uncultivated organism
MAAANGNLTTPRRSTVRCAIYTRKSTEEGLEQEFNTLDAQRDAAEAFIRSQRGEGWVALAEHYDDGGFTGANMDRPALQKLLQDVRDGLVDCVMVYKVDRLTRSLLDFARIMEVLDKHGVSFVSVTQQFNTTSSLGRLTLNILLSFAQFEREMIAERTRDKMSAARRKGRWIGGIPMLGYDISERGGALVVNEDEAARVRAIFNLYLEHGSLIPVVQELDRRGWRMKQWTTRKGRLAGGGQFTKNRLYNLLTNRVYVGKIEFGGEVYEGEHEAIVDPEIWQRVQDRLHFNGRTGGRQVRNKYGAVLKGILRCASCDAGMVHTYTQKTPNKLYRYYVCVNAHQKGYNQCPTRSVSAPAIEQAVIEQIRGIAANPGVVDRVVESLGEQRVVDIETLEREKRLIERELERLGQELAGLVRTGGKLAVDRMAEVQERAAVLERKLREVRDQLAEWVGQTVEVADVRRTLREFDRLWAEMTPREQEKFVKTLVEQVTYDGRSGEVTVGFRTAAIKQLCKEATGK

SEQ ID NO: 3549 - protein, 560 aa, unidentified
  source 1..560: note = uncultivated organism
MKDVMQLYHVAIYLRLSKDDGDISFSDSRKLESNSIHNQRELLISYLKEHPEMELYDEYKDDGWTGTNFDRPDFRRMMEDVRAGKVNCILVKDLSRFGRDYIECGKYIEKIFPQLGIRFIALNDGFDTQSSSSTDSIVIPFKNLINDSYSRDISIKVRSNLEVKRRQGEFISNFAVYGYKKDKENKNHLVVDEYAASIVQDIFKWAIEGHSPGSIALRLNQLGVLSPMEYKKSQGSKYKSKFKTGAQAKWSHVAVRRILQNEIYTGTMVQGRRTTPNHKTKKFIYKDQNDWVRVEGTHEAIISRPQFDLVQQILQEDTRANAENAAVHPYCGRIFCGDCGAPIVRKTTVSDGKRYVYYVCGANKADSHTCSKHSIREEILDDAVLVTIQRQIEIALDMDAALRQIETLSWERTELRKIEANIEVQNQIIQKNNNLRLGIYEDLQSGILSREEFMTLKEEFSSRIAAAKKVIDQLISSKSEIQHGLSKQQSWLAQFREYENITAITRRLIVSLVERINVYEDSEIEVVFRHRDQFAHIKEFLENQEGKSEKIQIFPQLEVV

SEQ ID NO: 3550 - protein, 670 aa, unidentified
  source 1..670: note = uncultivated organism
MMKKQKRNNEDNRGVAIYARKSRITNKGDSIGIQFKQCAEYAKRELQLDDDYNFMEYEDKGLSGYYSDRPDFQRMLHDIEMGKIRAIVCYKLDRIGRKTSDLLRLLDFLEKHKVNLLICSNNINTASGVSKIFIQIFAVVAEFERDTLTERITDNMMELAKDGRWLGGNTPTGFTVKRVKTGIGKNKSAYSYLESIPEEKAMIQKLYEIFASTRSIKKTADKMNELGYRTKIGSKFNTSTTRLLLKNPVYCVADEIAYNYFYENSGGLCAELSEFDGQHGLSAYNKTDQEKFEDADSTFISPKFVQLMSAKPVSEWIISVGRHEGFIPSQQWIDTQNMLNSIAEKYNRPHRKTNALLAGLIYCPHCGKRLRVISESNQWTNGKPRFKYVCPGYRAGECTFRAVDGVLLDEFVVKQLSNLSDEDSEYFVKILNQKASDIFKSSQNEQELIELKKKKAQLETAISNQVKNLRESDENLKRFIQEDVKGLTDELSEIEKLLQKLEDSRQSQMYAVRDIEEIKERLLSFEKYAKDAQPDVLVTLIQSFVERIYIVDENDERYCHIFIKGCTKEDYDEFFRATGYISGAGETGTITSKLPLCDSDECCKDYVIFAIPTHMNQTIYIIFLEWSPPCFFESVTRPQVYSTIKGVLFLHHQHKPSLNHAPSAWFSIYK

SEQ ID NO: 3551 - protein, 534 aa, unidentified
  source 1..534: note = uncultivated organism
MRTTQQTYNAGIYCRLSVDDGTQSESMSIGNQRHMLTDHATRNGWRIADYYVDDGYSGVNFDRPDFQRLINDIEAGKINLVIVKDLSRLGRNYILCGQYTEIYFPERNVRFIALNDGIDTLYSNNDIAPFKNILNDMYAKDISVKIRSSLQAKAKRGEYLGACDPYGYLRDPKDKHHLVINPEVAPNVYRMFELCVSGYSLKKIADLFNREGILSPADYDDWRNHESEKGEFQSKYKWVGSVVRQVLKNPMFVGHMVQCRKRSQSYRTQKIVLNPREDWIIVENTHEPIVSQDLFDQVQKALEGRSKPIKSSGEPQIFSKLFFCAECGRTMAHHRRDNVYGNYFSCGKYRVEGAAGCSSHNILYEKLYKTVLDDIKHNIALFQADEDKALQRVIAIKCADEQKRLADAKKALTTAQKQQGEQDAKIKRVYEDNISGKLPDSLFTTFLASYEDEKAALQARVSALQGEIAQLESNKKDVSFFLKLIRQFANIEDLDRQALTALIDRITISEDDQQVNSRNKEQKITIYYKFVGAI

SEQ ID NO: 3552 - protein, 522 aa, unidentified
  source 1..522: note = uncultivated organism
MIQPALPLAQAVRCAIYTRKSTEEGLEQAFNSLQAQREACEAYVASQRHDGWTVLPTPYDDGGFSGGNTDRPALRRLLEDIEAGKVDVVLCYKLDRLSRSLADFVRLMEIFEAHSTSFVSVTQRFDTKSSMGRLTLNVLLSFSQFERELTAERVRDKIAAAKKKGKYVGGRPVLGYDVDRERRRLIVNAEEADLVRRIFQRFLQLASCRLVARELNRQGHRTKAWTARSGKKRGGSPWNKSYVHWTLTNRRYVGEVMHQGQAYPGEHEAIIDRRMWERVHVLLGENRRYRATQTRKKTAAILKGILRCGSCGKPMAPAQTTARRGRRYQYYVCHAASKNGHDTCPVKSVPAREIEDAVFDYLRALFADPEMVARTFRATETQATEERRTLTQEKAAIEKRLDGLRKMIGRLVRTTSGKAVGALAEELRRLNEEYAEAERQLREVEVQIDGQSGQPAERDVAAALRTIDPLWKELFPAEKERVVRLLVESVTVRPDGLSVRLRPGGLTALVAEVDGTDTEATV

SEQ ID NO: 3553 - protein, 524 aa, unidentified
  source 1..524: note = uncultivated organism
MNKSNGKQAVDTPTVRCAIYTRKSTDEGLELDFNSLDAQRESAEAYIASQKSQGWVCLADRYDDGGFSGGTVDRPAFQRLMADVEAERIDCIVVYKIDRLSRSLMDFARIMETLERHGVSLVSVTQQFNTTTSMGRLTLNILLSFAQFEREIISERTRDKIASARRRGKWTGGAPVLGYDRMRDNRGTRLVVNEEEARRVRAIFAKYLELQSILQTVHWLDARGWRNKQYTTSKGVPRGGKDFDKSTLLKLLTNRLYIGKIVHNDQCFDGEHEAIVDEDLFGRVQGQLARNRNSGGKYQRNKYGALLKGLVRCRHCGGGMSHHYASRGQRRYRYYVCQTAQKKGWSSCPYPSLPAGELEQFVVERIKEMTGDRNLLNDVVTRAGEQLNRETQDLAQRRKLRENRARRISEDINDLTRSPAMHATPGAAAELARLQDELVEVEKEIGDLNRRIVDLQHRMIDEDELTGALEAFDPMWDRLRPDERARLIHLLVQCIEYDGANDEIAITYHPAGLQAFAEMETCHA

SEQ ID NO: 3554 - protein, 542 aa, unidentified
  source 1..542: note = uncultivated organism
MIPKQTEYKVGMYLRLSNEDERAGESLSIENQRKILSNYISEQGWTLYDEYVDDGISGTTFDRPGVQRMLDDAKNGRINLILCKDLSRFGRNYIQVGQYTDYIFPMYNIRFIALTDNVDTANSESTGMDMMPIMNVFNEWHAANTSKKLRAVINSNAKAGKYRTTYCAYGYFKGDDEKNTPVIDPQAAPIVRRIFEMRAEGKKPKQIADALNAEQILTPMDYLYQRENKVNPHASVHLWSSSIVLRILGNPIYIGTLALMKTTTVSYKNHKRIRKDSSEWLMRENNHEPIITMELWEKVREIEASVSRGKRDKIGELAPLSGLLYCDSCGSKMRQVGSANRKYMAYMCGYHNRFGKGCCTTHYIRRPLIEQYILMDIQDMIEKATDEEKAKEEFLKRKHGVLDAQNSSDKKRMQKATSRIAELDNLIQTVYEDKVIGKIPEEVCISLLEKYQAEKKSLQAECAEYKKRSEMQQQDEKDVDEFIARLKSYAGATELTRQMCLDLIEYVTVDDLNKDDKSRPREIHIYYKLIDKELDNKHNALM

SEQ ID NO: 3555 - protein, 517 aa, unidentified
  source 1..517: note = uncultivated organism
MAANVTYIPPKAAKPETLRVAAYCRVSSDSSDQLHSYATQIKAYTEQIGAHADWELVDVYADEGLTGTRMDKREDFQRLLADCRKGKVDRVLCKSISRFARNTKDCLAALRELSALGVTVYFEKENIDTGTLTSELMVSVSGALAQQESISISQNQRMSYRRRMEKGEFITCYAPYGYDLKGQELVINEEQAAVVRYIFQQYLNGCSVERLAHDLTQMNVPTGFGQSKWWDYPIRYILKNEKYVGDTLCQKFYTTEHLPFINKMNHGEREQYYIENTHPPIVSREVFQKAQALLEKKSAKNVTHIAHILSLKICCGRCGTSYIRRVSLNGFATWVCRKHDRKAVDCSNGRIPETEIYAAFVRMYNKLKENADIILAPALKQLDDLETAMQRENPAMLEINRAIAQVAEQSHNISKLQTAGLLDADACAAKLSSIQTKLTQLRRERRRLLEHDDIEDAISRLHRTADTIKSGPEQLDTFDESLFEELVERIIAESQTCIRFRLWGGVELAEKVRRAKR

SEQ ID NO: 3556 - protein, 551 aa, unidentified
  source 1..551: note = uncultivated organism
MKAKEFYNVAIYLRLSRDDEDIDGNKAESNSISSQRDMIRSFIRKQDNMEIYDIYVDDGWSGANFDRPEFKRMMKDIEAGNVDCVIVKDLSRLGRDYIEAGRLIQKTFPAFSVRFIALTDHFDSLTADYNETSLVVPVKNFVNDSYSRDISGKVRSHQKVKRENGDFIGAFAVYGYKKSEDNRNLLVPDDYAADIVRKIFAWKIEGYSNLAIAELLDDLGILSPMEYKKMQGEKFQTGFVTGVKTKWSAVAVKRILTNENYTGTLVQGKEEKVNYKVKKSVMKPEEEWTKVQEAHEAIISMEDFEIVQDLLKIDTRAGAGEKKSHIYAGILFCGDCMEPMIRRVNRYKGKETVSFICSTKNKGGECSRHTISEADLNHLVLTGLRQQVSLFLNKSKVLNAIEQMEINFEEVAAFDKEIEKLHNEQDKYLTLRAGLYEDLKKQIISEEDFKNFREIYEQRYQELQQAIHNQEETIKKLFKSGVTAGINLERMKNVMQITELDRVTLISFVKRILVYEDKRVYLELRYKELFSKVVMLADYVEAGHGLRGEAV

SEQ ID NO: 3557 - protein, 558 aa, unidentified
  source 1..558: note = uncultivated organism
MEENKKIAGIYIRVSTEDQAREGFSLGEQEEKLKDLCKYKEYEVFKVYCDAGISAKDMEHIPKFQEMLEDIKKGKINYIVAYKLDRVTRSVRDLEELIGMLEKYNCYLVCDRDDVNTSTANGRFFVRMLTVLSQLEIEIVSERTKFGLNGAIKCGHLPGIVPLGYKKDGNKKTIIDETTKDVIKRVFDLYLQGKSYQQISNIFNEEKVLNKVWYDTHFEKIINNKIYMGDYVQYKRIHKKVQKEPITYMNVVDPIIPRYIWEECQLQKEKNQRTYTRDRVYTFFQKVKCPHCVSIMKCKGSGGKKKKYMYYNCEKCHENIREDYVEQKCLELILELVRFDNEYKKYFLPLFADKENVVKEDTIDKDIENLEKQKQRIKKAYMSGVVELKDFEEDLKAINEKLEILNAKKEEKQEFISRYIESITFVKDKKEKYGIKVVDLKMKSLYIEKLNNLKDIGACDIPLSLVINDKETLIPLSTPIERKNLDKYIEEMQKEIDIKLYDNLMYENKDDCKIVTIEMDSNEKPYRIVPILEENNIENIENRINLGILTAPVYTISN

SEQ ID NO: 3558 - protein, 576 aa, unidentified
  source 1..576: note = uncultivated organism
MKKDNSKQEYITRVAIYARVSTQEQAEQGYSIDAQLEMLNNYCKENNKVCFKEYVDRGISGKSIEGRYQLQQMLLDAKAGLFDEVIVWKINRLARKQLDLLKIVEELNKYSVTFRSYSENFETETPMGRFALQMMGSVAELERNTIVDNVRMGMRQKAKEGKWNGGIVLGYRSVSIGDETSKNKERGLEVVPEEALIVKKIYTMYSEGKGLKAIANQLNHEGYKSKKGIHFQVNGIRDILHNPMYIGKIRFGKNSNSHIKGRGKDNNYIIAEGKHDPIISEDLWNKVQALYEEKSGKPPTTFHGSFPLTGLVRCPVCGAGMVAHRSKRKHKDGTYTVHRYYACGNWRNKGSSVCNANGIRADYVEDYVYNRINEVLLSPYILKDVVNNINKNNNSKIQPLQEELNQINKQLSSFNEKKKKCFALYEEDIIDKNLFKERLDSLKSEEEVLYKRKSSIETSLNTEVTASIQYEYVKNVLSNFRDNLKYSSPEQEKTFLHLMIDNIIITKDKKIENIVLKFDENIQELFSKPTPRESSDTEDSPLNTKEITNYYPSFMVRFTTINPKPPISLLQQNYSH

SEQ ID NO: 3559 - protein, 537 aa, unidentified
  source 1..537: note = uncultivated organism
MTRAAIYARVSTVRQAERDLSLPDQIAQCRRWCERHGIEVVQVFTEPGASALDEDRPVFQEMIYTAKRPDHPFDLIIVHSLSRFSRDALHSELYIRELRKAGVELVSITQEIAHDPSGEMFRKLLNIFDEHQSRENAKHVHRAMLENARQGFWNGSRPPFGYRVEVKERRGNRDKKVLVIDESEARIVRLIFDLATGAHGRPMGVKAIATFLNERGILRRGRRFTTGGVHEILTSTNYHGTHYFNRTDTRRGRQRPPFEWVKLEVPAIVDEQTFTAVQAFLQSRAPKRVPPRIVNGPTLLAGIARCGHCGAALVKSTGKGNGGSYNYYYCSRRLKEGPLACRGARMRMDKLDNIVLGEVARRVLNPERLKAMLDAYVRTALEREDRNRERLRQLQQDHKETEAGIARLLELVEKGLFEAEDASLRERLVNLRFRRDELAQEIKDLQKRLVQAEPTLTPEKVGQIAVMLREKLYQGPPDLRQAYVRLILNEVSVDGREIRISGSKALLARAAAKGLGTTSPSVLSFVREWRTQEDLNL

SEQ ID NO: 3560 - protein, 540 aa, unidentified
  source 1..540: note = uncultivated organism
MNSRQQIYNAGLYCRLSVDDLNAGESGSIQTQRAMLTDYCRQNGFHIVDYYIDDGVSGTSFDRPGFQQMISDIEMGRINMVVTKDLSRFGRNYYEAGRYMDKFFVEKGVRFIATQDGVDTIRKGFDISVPMRNIINDFYARDVSQKTKAAKETRAKQGMFLGSKAPYGYIKDPQNRHHLIVDQEAADVVRKIFKMASEGSGYNKIARTLRAESVMNPSSYYKQKNPEYDKQEHFKIQCQWHVTSVQKILENPVYLGCLVHGKVETLGVEGKRIKKDPDDWITVDNTHEALVDMETWTLVRNHLSKKRRERKTGETQMFAGLLYCADCGSALSFSAVKRKTKSDGGQYKCWYYMRHGKEYCTAHYISLDQITEIVLTDIRRHAGLAAKFKEQYLYRLQQTAAEKEEQNLKRELREAQKMRKRVASLDGIIKNLIEKNALGKIPDERFYDLSAEYEREQKELKDSLTSLESRIQQAKEDVHNAERFVGLIAKYTDLQKLNSKILHELIQRINVHEKQVDAEGNVTKAVEIAYNFVGYMELEI

SEQ ID NO: 3561 - protein, 573 aa, unidentified
  source 1..573: note = uncultivated organism
MQLKEHDSSIDTQLRAIRRRAEYEAEVGNPPWEIIEYREEGRSAKDTNRPQLQRLLSDSRAGKIDLVVVTRIDRISRSLMDFFDIQRELSDHGVDFMALDDHYDTSTPGGKLTLRVMLSLAEYEREQTSLRIKGKTHDRMREGLWFGGVIPLGYERHPTDRTSLAINTEEAKIVKLIFRKFLEIRTVRGVAKWLNDHNIVRPRNGSPFRVQAVSQILQNKIYIAKRDYEGEEVSCNWRPIIEEKTFRDAQKILAANRVEVPKGRPSSIIPLLESLLRCPCGGMYGVVSGTSKTGAVHHYYSCRNKVKKPGSCKQRDIPVEVVEEFVLDEVRQIALSGERIADAVRRANAGKDAELAKLKEDWNLAKNALGQKRAVINRLVDAIAMGQGSKALADRLAVEEAALVDLEARTLDLKTRVQALESRTLNAAIIEAGYRELAYSLDKALTAGQREEVRRLLKGIVEVIDWVPSPEDPRKGKAILQLWALPGVQKNGTPDQSGQGFFESSNMVEQTDRFTNSLTFESSWDFTPADSYALIRKAALKGGTQAEVASSLGISVRTVRRALAASPQVRKSA

SEQ ID NO: 3562 - protein, 518 aa, unidentified
  source 1..518: note = uncultivated organism
MIKVASYCRVSTGSQDQANSLESQQRFFREFINSHPDWDLYDVYADEGISGTSTKNRIQFNRMMQDAHHRKFSLIITKEVSRFSRNLLDTIAYTRELKALGIGVIFMNDGFCSLDPDSELRLSIMGSIAQEESRKTSSRVKWGQTRQMEQGVVFGSSLLGYDVVNGKLTINPEGAEIVRMIFHKYGVEHKGTSRIAKELRQSGIRTFTQNPNWSSSHIIKILHNEKYAGDLVQKKSITPDYLTHARKYNRGEEALIIIRNHHEPIIERELWDLVQHELQERSTRSCRASAPSNKHILSGKLICGQCGARFVSRQKARKDGTSYMRWVCCTAATHRSASGCDIGKTIRDALAMELVTASLRRIPADYCWIMRNLVELLTAVVRGTEGLTESVIGLNRLLHQTIRKKETLMDAYASGLIRQEELIPMKNQYDDRINQLRDQIQANTPPPEYDNTDLCGSLESQVQSILNCNPTEETICKALVKKLVIQKDGTVSVHFNHIPQIFHYQLRYHSRPPETECN

SEQ ID NO: 3563 - protein, 538 aa, unidentified
  source 1..538: note = uncultivated organism
MIYARISQTADDVDKTANQVAELRALAASNGYVVADIFEDDDVTAYQGKAERPGYVALLAALSEGRFEVVMATEPQRLTRGSATELDALNVALVRAGAVLHTRAAGVQDPATPTTRALMQIMDTIGGLEVAIKTERQKARNRADRAEGLPPKGVRPFGWEAERRPVAPDVAERLGWDTSQGALYVPVRESEAEIIREAYRAVMDDDVTLWDLARRWTAAGVKTDKMGGTRKDRARPGETRAVPAVWVASTVRQVLTRPRNAGLLVSGGAVLPVSRIEPIVSRADWDALCARLASRAEAVAPGPGPKARSLLAGLLECACGERMHATISYSQRKGGPRNVYRIYRCRNAATDKTRKHSNMQESMADDAVIVRVLQRIAEGDLQTPDDDDVTAALTDVAERIADNSRRVEHVRELTVDPDTTRDDLAYYRGQLKSMHAERELLDAERDRLTAQRAEGGALAEFVDVWQSIPDAARSHGGEATGIEVLSLVAGYMAWGDLGIEKRREIVRGLFRVRLPLGGRGASRLEFTPLGTREAVTAP

SEQ ID NO: 3564 - protein, 526 aa, unidentified
  source 1..526: note = uncultivated organism
MIATNDKSKPIRCAIYTRKSHEEGLEQEFNSLDAQREACEAYIASQKHEGWKCAPGRYDDGGFTGGNMDRPGLKSLLADIEAGLVDVVLVYKVDRLSRSLMDFSKLVSLFEKHEVAFVSVTQRFDTTSSMGRLTLNILLSFAQFERELCGERIRDKIASAKRKGKYVGGRPLLGYDVDRDKMRLVVNDTEAKLVRHIFDRFCRLGSCMLVAKELNKQGHRMKAWTSRKGKPMGGGAWKKTDVHHLLNNRRLLGEVVHKGEIYPGEHEAIIDRKIWDRVQRILAENRTSRANRTRSKTTAILKGLLRCGCCNAAMGPTYTTRRGKRYHYYVCHAAGKKGYDSCEVKSLPAGQIEGVVFTYLREIFADPEMVARTFRATRAQADGERKALARQKAQLEKRLSKLRKAIGRLVRATDGEAEGVLSAELRALNDEYSEVEGQVQEIDAQLDRQEDLPTECDMAEALRTIEPLWAELFPAEKERIVRLLVETVTVRPDGLTIRLRPVGLVTLASEVAPEAIEEPEREEATT

SEQ ID NO: 3565 - protein, 557 aa, unidentified
  source 1..557: note = uncultivated organism
MNQATLRCAIYTRKSSEEGLQQGFNSLDAQREACEAFVLSQQHEGWKVVPTFYDDGGYTGGNMERPALKQLLLDIDKKKVNVVVFYKVDRLTRSLADFAKIVEQFDAKGISFVSVTQQFNTTSSMGRLTLNVLLSFAQFEREVTGERIRDKIAASKAKGMWMGGRSPVGYRGHERTLVIDGESAALVRYIYAKYLKVGSVRELKKTLDSEGRLTPQCTSKSGRAYGGCAFSRGQLYNILSNPIYLGQLRHKDQVYPGQHPAIIDQDVWDAVQSHIDNNKQGNIMRQSAPSMSLLAGKLFDEQGNHLHPSHSQKQSKRFRYYISAPLKSGPRKEAEDGIRISAREIEAIVINHLKYWLIDHAGLIERLSPEANEVQALTVRANTLAEKLSGRLQDQYTALKSLMIKAVLDANEIKLELNIEPLTNKSSPSIHLAIPAILKRCGHSMRLLVGCPKQSHRHTNDLKLINSVIKSHDWLNLLIKGKVKSLQEIAGKEGVGGSYVTRSIYRAFLAPDIIRAIMNGTQPAHLTIDFIKRHSPLPLDWNEQRKLLRCEPLVPLN

SEQ ID NO: 3566 - protein, 574 aa, unidentified
  source 1..574: note = uncultivated organism
MGRVSKRIASTAGTPVISKKAASGDRKRYKAGIYARLSADSNERKSESIDVQEEIARKHIERLNQSGQEVIDIIECYRDLGKTGSNFDREGFKRLMQNIRLGDIDCVVVKDLSRFGRNYLEAGNYIEKIFPFLGVRFIAVSDGIDTGDKGNDTKQMSAAMAVEIKNLVNDMYAKDFSKKAKTGLKQRREAGSYVGGPPPYGYKAVWEGKVRRLVPDENTAGIVKHIYQSFIEKESYKAVTDDLNRRRLNPPAVYKQTGEVFCPPGREYKGWDKSAAERIIKSRTYAGTLVQGKTSITARDERNRIHKQEDEWVVRENAHEALVSVELYRKAQETRNRIEKASASHRHQTEGVPIGENIFDHVLYCGVCGRKMTRHSYVKTYADGHKGRMEDYFCLDGGQTKTVVCPESNRISKQELTGVLMPFLRTEFAVYLDKPKRFGEAGKEQISSAIARSEKEREELRRRVLRLEEESTGAYMAYRDGKMTQKEYVGFKMEQEERLRELKKQEKELEESRRGMEKVQEKYLRAVRSLLKLKDTGELTMEMVDSLIEKIRVYPGKRVEAELRYTNEMLEGWD

SEQ ID NO: 3567 - protein, 514 aa, unidentified
  source 1..514: note = uncultivated organism
MAEVQVIPPKAARPDTLRVAAYCRVSSDSADQLHSYAAQIRAYTQAINAHDGWDLVDIYADEGLTGTRMDKREDFNRLMADCRKGKIDKIVVKSISRFARNTRDCLATLRELSSLGVTVKFEKENIDTGTLTSELMVSVSASLAQEESISISKNQRMSYQRRMERGEFITCKAPFGYKIVNGKELEIIQEEADYVKWIFDSYLSGASIAWIAQQMTKTGLTSPDGKSAWQMSTIAYLLTNEKYMGDSLCQKTFTSAFPFIQQNNCGERDQYYVEHSHPAIISKNIFEKAQRLLHRKGERTGFQRESSPLAHKMSCGCCGSTLVRRFSRSGYTTWVCHKHDRKAADCPNGRISEGNIRAAFLRMYHKLRAHDGIVLAPVLKQVDTLSDALHRGNPAMLAINTAIATTSEQSYHLTKLHTAGLLDKATLSAKQAELNAKLTGLRQERKKLLCNEDINEQMNTLHLTIDAIRNGPETLSSFDEALFTKLVDRIVVDTQGIIHFQLYGGLEFQETLEA

SEQ ID NO: 3568 - protein, 521 aa, unidentified
  source 1..521: note = uncultivated organism
MKPRKATPETAKSIRCAIYTRKSTDEGLDQAFNSLDAQREAAEAYIASQKHEGWTCIPDRYDDGGYSGGTIDRPALRRLLADVEAGKVDAVVVYKVDRLSRSLLDFSRIIGSLDEQGVTFVSVTQQFNTTTSMGRLTLNILLSFAQFERELVSERTSDKMSVARRKGKWIGGSPLLGYDLDPNGGRLLVNEAEAAQVRGIFDLNLETESLLDTARELNRRGWTAKRWVTRAGPERGGKPFTKGTLFALLTNATYVGQVEFHRTIYPGEHAGIVDEAVWQRVQRRLRRNGRAGGQAVRNKHGALLSGLLRCVPCDSGMTHTYSQKGDRRYRYYVCSHAQRHGWETCPTKSIPAGEIERFVVDRIRAIGTDPGLTAEVLAKVTTETQVHADALARERKALERELARWAAEVRELVGSLPRPNGRQSAATARLVEVQDLTADAEARLAEIARQEATVAAGGGTSDDLVEVLRRFDPIWETLSPREQARIVHLLVEQVAYDGAKGTVAVTFRPGGIRALTEEGTA

SEQ ID NO: 3569 - protein, 591 aa, unidentified
  source 1..591: note = uncultivated organism
MKKINQTTSGYKIGIYVRVSTEEQAENPEGSIKSQEHRLREFVKHKNSFEHFGEIVEFYCDAGISAKDTNRPAFQRMMDDVRSKKINMILITELSRLTRSIRDFANLVEMLDQLECQIYSLKDQFDSSTAVGSFSMFLMANLAQFERKQIGERISANFLSRAKRGLYNGGSVPLGYKVSGNRDGRLEVIPSEAETVREIFKTFLTEGTLSSTTKTLNKKKIHLVRRKEGGGQPRTGVVMLETLYKMLTNPVYIGIRVYQENGKECQVKAQWEPIINEEIFKRVGEILKKNKSRKKASPKRWPYLLSGSLYCQCGHRMSGKSAHGNGGKIAYYDHAWTAKIENVTAEKSKRCDPQRVLAEKLEPIVWKAVKDFLLVPEFFTEILLEAQSQSEINTPKQDIDRKQNKIYEINMQLDALSERLGLLPKSVNPKHVFDQMERLSVQKDGLEKEVMELKRNNEKENTAVGMTDFNQFKAVIVDLLENESDPVVKTTIIQKLVHKIIVKSDEVEIFFYVGEKYYKRELAIAGSRTLPTAVTDTLKSAITQTTPEKRHTSALPVFHGNPKTSEILNLKPNFFYDAGSNSLKNGRGART

SEQ ID NO: 3570 - protein, 503 aa, unidentified
  source 1..503: note = uncultivated organism
MKAVIYARYSSDNQREESIEGQLRECTAFAEKEGITILRHYIDRAFSARTDDRPEFKRMIEDSGKGLFDAVIVWKLDRFSRSRSDSAIYTNKLRNNGVRLISATERIPDGSGGILLESTLVAVAEYYSAELSEKVIRGMTENVLKGKFNGGAVPVGYKISDEGYFEIDEIKAPLVREAFEKYNSGATITEIRDWLQSVGIKNSLGNDINYNNIHKLLRNRRYIGENKSGDTVTYGTIPVIVPRELFDAVQYKLEKNKKAPAHAKAEEEYILTTKLYCGHCGTYMCGESGTSRNKTKYKYYKCMVAKKKGTCKKKTVRKDWLEDLVVKTVWKAICDDDLIEAIVFAAMELQGKENTGVPLLETKVKELDEAIENILNAIQQGIFTKSTKERIEKLEAEKEEFEIRLNNEKMERPLIPEEFIYRWLRRFRDLDVTLLEHRKMLIDNFVNSVYLYDDKIFIGINYIDRVEEIKFSDLEQCSDIKTGREPKQKDIQTGVLFVLVLFI

SEQ ID NO: 3571 - protein, 519 aa, unidentified
  source 1..519: note = uncultivated organism
MITIGIYPRKSVYRDNSDSVKVQVQLCKDYAGIIYKDQEVAFKVYDKDEGFSGKNTNRPSFQEMMRDVKTGQLNVVMVYKLDRISRNVQEFSAMYDIFQQHDVSFISVKESFDTTTPMGRTVMYILAAFAQLERENTSERVTDNMQALGSSGKWTGGKLPSGMTSVRRQIGEKEHSYLLVDKSTIWRPKLLYQLILEGYPITKTERYCRDHGIKSQTGKFLNTSQIYNIITNPVYCQNSIEAYFYFKDRGCTLPDQSLFDGTKGLIGYGKTKTNKSSSQRRQEAKDWSIAIGIHDPVISASDWIAAQKRLGINKMFHAPKHQTGILKGVLKCSCGSRMDVRTYIKNDIQFSYYYCADMARMGKQHCNSDYVRIEKIDRCFIKQLQKIKLDPTILNRTKNHNITLQSADDIKGEIKKLQGFIANLTAALSQAMDTAAAGYIIKQISDLDEQKAKLEGDLRNALLKEAQTKDAAKTEQQIYDNICCLLDNFDHIDYNGKNELIRKTVKKCIFDGNSLCIIF

SEQ ID NO: 3572 - protein, 560 aa, unidentified
  source 1..560: note = uncultivated organism
MTTRRRLACAIYTRKSTEEGLEQAFNSLEAQREACLAYVTSQAGEGWTALPRFYDDGGFSGGSMQRPALQRLLADIGDGRIDVVVVYKVDRLTRSLTDFARIVEAFDAMGVSFVSVTQAFNTTSSMGRLTLNVLLSFAQFEREVTGERIRDKIAASKKKGMWMGGVVPLGYDARNRSLAVNPAEAETVKTLFDLFLRFRNTRLVKGEADRLELRTKARPAESNPKRKGGGSFQRGHINKVLTNPVYVGEILHMGTRHPAAHEPIIDRATWEAVQAQLKQNAVTRRNGEMAKAPSLLAGLLFDEAGDRLSPSHANKKGRRYRYYTSRTTRPKRRLPADALERVVLEGVSSLLADAHRLSSMFRASSAMQARHLQEHLRSAKELGESLSKASATSQRAILLELVTRVVVADQKIAIILQRDALLSRLGIPDDEHQSGSAEKLVIDLSVAFRRRGVETKLIVGEAGSAVTAPDSNLVSLLVQAQQWFAELRADGKLSVNTLAMRHRVDSGDMSRILPLTFLAPDIIEAILDGRQPPELTAARLKRVKELPLSWHRQPEILGFV

SEQ ID NO: 3573 - protein, 657 aa, unidentified
  source 1..657: note = uncultivated organism
MDELFCSRKNKKCVIYIRVSSERQVQGYSLEGQKRYLKEWAEFEGMTVLNIYVEPGKSGKSISGREVFQRMLDDIATKSVDADFVVVFKLSRFGRNAKDILNSLTFIQRYGVNLICKEDGLDSSTSMGKMMITILGAVAEMERENILTQTYLGRTEKAKQGGWNGGFAPYGYELVDGKLERKEDEAAIVELVFDKFVNEGMGYSTIAGYLNKQGIPKLPSKNSHGTAFVDWNTGQIKRMLDNPVYTGRVAFGRTRLQKIEGTENEYRRVRADDFILSDEIAHEPIVSEELFEQARVKRKVTSTTGCPLVGRNSKHLLSGILKCPMCGSAMYSDTVMWTNKNGKRMVRRKYQCGHYAKAKNGQCKKNAILADWIETEVIQYTKLLVKNKQFAEDVKKQIGQKMDVSEIDIEIAGYNKSLKKLERSKANLEHDIDNIASDDKNAVRKRNDMNKRLNKIYEEIYSIEDLIEECEMKKTSVEQEALTQENVYKLLLVFDKFFDKMNKEDQRKLIEAMISEIHLHPKETWKDGGNPIKEIKYTFMASNDAMEALRENSPSVETVVLLSTQKTKRRINIVIDTDSLDLTRAEAKATYEQIKAYIMEKHGVKVSNLYIAQIKRKCGIKLAENFNLPKSEDAKQPVCPAEKEEYIIEALKHFKMI

SEQ ID NO: 3574 - protein, 620 aa, unidentified
  source 1..620: note = uncultivated organism
MEGWLGKRQEAENPGITVLPPPCRRVSSAWRAACSQKRNNSMIMNAKTDNTNKKKRYVIYTRCSTDDQAQGDFTTLDAQAHHCKNMLDAFGYDLAKIGDKGRINDDGYSGKDLNRPGIQMIIDHVRKKAPFDGIIFFRLDRLTRNTRDLYWLIDLFREKEIDFVSVRENLDSSTAIGRVVIGILGILSAFERELTGERVKASAIARVRQGKWVGGMLPYGYRLIPDGEPLPNGRQPHKIVLDEKIVSHLKVIWEMAADNRSLTQIGLELHRRGLKTLNGKEWRRQVISRILKNPFYKGYIQYSGEYHKGNHPAIVDEKLWERANKILSARLPGHNFVQKERFYEYLLAGILRCGDCGSHMVCNFSGGRDRRKFFYYECSRSRQALGCKASRISATTFDKAIIDYFRRAAKDRSLVIKALGDAMLESQAKLEKIDADLKEKESKLNGFRHQANKLLELAMGNTVTKGSTYKDKMTELETEIAKLEDEIDKLQAQKRVASINACSGELVYRSMNFAIQHLEDAPPEAQKNLIHALIKDIYVYSDRLVINMYIQEPLEGILPTEIASTNEKRPTEACKALVPTASLSAVSDSCQHWLPSQDSNLETVVQSHVCYRYTTGQYGK

SEQ ID NO: 3575 - protein, 578 aa, unidentified
  source 1..578: note = uncultivated organism
MTAETKPRVAIYSRVSSEEQANEGVSIEAQVAALKAYAKSMGWGIFDEYVDGSFSGGTDDRPAFRRMLDDARRKSFDIIAVCKLDRYFRNLRLLLNYLYELEHLGIKFVSTQEGLDTSTQYGKFAVQIMGVIAEFERGRIGERVRDARRYMISRGNWAGGRPPYGYRWLAGEKKWEIVKEEADIVRRIFHMYVEENGSIEGIAKTLNNEGSLTRDGSQWRFSTVRLILTHPGYKGEHQLGINMPPLIDGTMWQRAQDRREEARSLLRDPKGWLLQGMVSCGECGLGLKCVQKRDSDYRYYACRGRIERKLNTDEAKRCKLSYVRADKLESAVWTRIKDILSDREKLADCVNKAVEDLEAQKKRVGADALAINAKLEAIRAKKERLGIAFADGTVNESLYKEMLTTLKKQEANLLKNRHDIDPSRMEDLAALEARIKTIREFLAKGDLVLNEFGIYAVTDHQYLPVGFNAFRESDGKIALGKIEPKQIMVFEAENPIYMWDVIDPPAFYECEDSRKRSNEVVRNIRAVLQLFDIKVFVYSNRVEIKGAIPPQLLGMNDVRETLPAPVISSGRGIKGVGC

SEQ ID NO: 3576 - protein, 523 aa, unidentified
  source 1..523: note = uncultivated organism
MPKVAIYCRLSIEDKDKLGNDDSQSIINQKNMLRDYCRERDWEIYDIYVDDGYSGIDRSRPEFNRLLRDCEAGHIDIVLCKDQSRFSRDTVVIEQLINDKFLEWGIRFIGVADNADSDSESYSTMRLFTSAYNEMYVKDISAKIRKTLAYKREQGQFIGSFAPYGYQVDPNDKHHLVIDAETAPIVRLIFDMYVNGEGYRRIVHELNNRGIVSPSEHKRQTGSKYVNGNAGSSPSYGLWTQSTIAVIVANEIYTGTLVQGKSHNISYKNKKKKKVDKSDWIRIPNAHEAIIDMETWARTQERLNSNARVGKRSQELSPLSGKVKCACCGRPMKRNVYYNKAKTIKYYNLQCATYKTGAMNCPNKTSMSGLVLERKILDELNAIIERYCQIDRIEFTDVYGEQLRQLEAALEKLKDRHRLAEKRIVAMYKDKLDGMISDEDYALFRQNLADEEQELSVRIDDINEQISTCKERIRNTEEQRAVIEKYTHFDKLDRTVADEFIDYIEIGEICENGAREIHIHWKL

SEQ ID NO: 3577 - protein, 516 aa, unidentified
  source 1..516: note = uncultivated organism
MEKKQIRCAIYTRKSTEEGLEQSFNSLDAQRDSCEAYIKSQTHEGWKILTKHYDDGGYSGGTMNRPAFQELLKDIEQDKIDIVVVYKVDRLTRSLMDFSKIVDVFDKHNTSFVSITQHFNTTTSMGRLTLNILLSFAQFEREVTGERIRDKFAASAKKGLWITGATPLGYKKSDDKLIVDQEQSWKIITIFEKYLELKSVTKLKNYLDEENICTRSGKVFSKGNLYHILSNKVYLGKIVRKENTYNGQHEPLIPTDIFNEVQAILYENNFNKTGKERKASNAFLQGKLFDRFGNYFSPACSTGRGGKKYFYYINQGVKQGKFSNKETFSRIPTYEIEKFVQDKITEFISEDKNTLSLIKNLSLNEQEQFLNTLKLKQLDQNLLRPLINKVTISEKNIEILLSESELYKLITGLENKTNMQILHLEYNVKLIQSSRKGRSMVINNSSNCNKTLIDAIVKGFYYNKLILEGKTTAELQTRNARRLRKLRFLPPELIEQIFTGTQDADLTVEKLCNLKY

SEQ ID NO: 3578 - protein, 682 aa, unidentified
  source 1..682: note = uncultivated organism
MAVAIYTRVSTEEQQQRQSIRTQIEFGERYCQLHGLTIHRIYADESISGTVPLERRPEGSQILQDARQKKFDQLLVFRLDRLGRDTRLTLNAVADLEALGVRIRSMTEEFDTATPTGRLMLTLLSGFATHEREVIRERCVAGTLRVAEAGVWLGGIVPFGYRKVGEKRDARLVSSEEPIPGLTMSEADVIREVFRMATADKHSCRVIAERLNSLGVPCAYVRDGRLALRGKRREKTSGLWRPGRIRGLITNKTYMGIHEFGKRTRSGRAVITRSVPAIVTEDTWRKAQGNLRSHILFSPRNSKNEYLLRGLIKCALCGHTYVGIAANRPNGKREFYYRCNAAHSPSIYAGVGRCQSKPVRGEDLERQVWSDIESFLRDPEPLLEQLHARLESDAQDSTGIREQATHIEELIAAKSDERNRILALYRRGRLSDADLDTQLGEIDREESTLGAQLAELQSRLTGADSVASTVSSAQDFLERLRDRLDQPTTWRQKRRLVEVLVAGIAVDTVEECGVRQTRTTISYRFSQPDHPLMIVLPQVHVHGTVVRIPTDPKTVGDHLRRRRLELKLLQRDVAARIGADESSVFNWEGNRGRPQLRYMPAVIGFLGYNPLPEAPDLAGQLVRQRTSLGLTQKEAAQQIGVDPGTLARWERGEREPTGRYTEMVAQFLEESRLRKGRLRQVG

SEQ ID NO: 3579 - protein, 635 aa, unidentified
  source 1..635: note = uncultivated organism
MRRNEEQIAIYSRKSKFTGKGESIGNQVELCKEYVRNMFGEEYVDRCVVFEDEGFSGGNLQRPDFKRMMEEVRKRKFKAIVVYRLDRISRNISDFTGLIDELTKLDVSFVSIKEQFDTSTPMGRAMMFIISVFSQLERETIAERIRDNMHELAKTGRWLGGNTPTGFKSGSVSKITIDGKERKSYKLIPIPEEIEIPKMIFDLYMETDSLTAVEAELLRQRIKTKQGKDFTRFAIKAILQNPVYMVADEDAYNYFMEKEAEIFFPKEAFDGSCGIMTYNRTNQEKGRSTQLLPVSEWIIAIGKHPGFVPSKQWIKVQESLDRNKSKAYRKPRNNEALLTGLVYCSCGERMYPKLSQRKTASGEIIYTYVCKMKERSKRERCNRRNANGNILDAAIIEQIKSLTDHDSSFISQLAKSREFYTGKREQYERQLEELRVEHEMNEKAINGLIDSLGMVGDSIAKPRVLKRIEELTDINRDVENRIHELEGLVNVNSLTDVEFDLLRQMLSMFRTSIDDMSVEEKRAAIRTVVRKVIWDGVNAHVVLFGADESDIEFPDMDDRLAHMDDESGEEEPLEAFADVDYGDFEEENSGLGKTEPSNTSKSRWGEDSKRNSDALSCPAEKRSGCFPVGLHRNRH

SEQ ID NO: 3580 - protein, 678 aa, unidentified
  source 1..678: note = uncultivated organism
MTTTTTPGKAGKRARRITGTGLGPAAGPRRIAIYLRRSTDEDNQPYSIDAQHTALTSYVKSQPGWVLTGTYTDDASGATTRRPDLQRALDAARAGRYDVLLVYRVDRFSRRLSDLLDLLAELDDAGVAFASATEPFDTSTSIGRMLVQLLGVFAEFERETIIDRITCGMAAKASKGKWAGGIRPYGYTINPDTHTLVPVAAEIPHVQEMFRLYTRDRLGTRAIAAELNTRGVTTRTGKPWSGHQIGRILANPAYAGDITHRDITVPDAHPAIIDRQTFTRARDLADARSGPHTQRAASPGDYQLTGLITCPGCGCKYLGTAAHGRGGTYRYYTCFTRARYGPATCPAPRLPADQADTAVLAALAAFYAQDPNLITDAITRASAHHAGGHAGRQAEADAITAQISAKETAIGRYHAAFENGTMDDTTAGPRLRELRDDITRLRARHAELTDTISAPQPPPAATLDHLRGYLPRLLTAHGPAIERKAAIETLIHEIRITDQGLTPVYKIPAPGTPIPGHDTATQTAVRTMGHKVELWGFEPQTSCMPCLTIPSGTVALRRIPAGQAARTVRHRRSQADAVCLRCHFSVAGSAASASPRSAPELPAPCPQAQRGEPSEHYRDRLAAPPPRPARPHRHIMHSLRRAPGCSSSGSSHSLPQPRADPAVIGMTIWSWIEDQRRR

SEQ ID NO: 3581 - protein, 555 aa, unidentified
  source 1..555: note = uncultivated organism
MGGNREKVKYYVIYSRKSKFTGKGESVENQVEMCRNYIALHYGEIAAEQALVYEDEGFSGCNLERPQFQHMMKDAGRREFIAIVVYRLDRISRNIGDFAGLIEDLGNRGIAFISIKEQFDTDSPMGRAMMYIASVFSQLERETIAERIRDNMRELSKTGRWLGGNTPTGYISERVTSVTLEGRRKSAFQLKQVPEEIQLVEMIFNKFLETGSLTKTDQYLLESGYRTKRNNAFSRFAVKAILTNPVYMKADQEAYEYMKEAGVEELCAEKTEFDGSHGIMAYNRTCQRPGKTNQINPMCQWIIALGTHEGIIDGKKWIQVQNILNRNKNKAYRRERINEALLSGILYCGNCGGRMRPKLGRQMNGRGERIFSYVCTIKERSRCHLCNSGNIDGNTLDMMILQQIVEISGETSFLGTELEKARETLRMKKTDADKEVCQLEDHKRQIESDLKKLRESLPRYLGTAMESDITSQILSLHHQADAVQKHLQERCVQSETDNLTGFESLQNRIGEMAGSLEGLPPEQRRMVVRNIIRKAVWDGENVHLYFLCDRKFSNS

SEQ ID NO: 3582 - protein, 523 aa, unidentified
  source 1..523: note = uncultivated organism
MPNVAIYCRLSIEDKGKAESDASQSIQNQKAMLRDYCKERDWDIYDIYIDDGYSGIDRTRPAFNRMLHDCEAGRIDIVLCKDQSRFSRDTVIIEQYLNDRFLEWGVRFIGVADNADTDSESYGTMRLFTSAYNEMYVKDISAKIRRTLAYKREQGQFIGSFAPYGYCIDPADKHHLIPDPETAPVVREIFNMYIGGSGYRKIVQTLNDRGIVSPTEYKRQNGSRYVNSNVDKSNGCGLWTQSTIAAILANEMYTGTLVQGKSHHISYKNKKRKKVAKEDWVRIPDAHEALIDPETWTRTQERRSSRTRVGKRSEELSPLSGKVKCAVCGRPMKRNVYYNKARTIQYYGLQCATYKTGAMNCPNKRTISGLVLERKILEELNAIVETYCQSDEIRLTDIHREQTERLEKRLSALESRRDAAKNRLVSMYRDKLDGVISEEDFRLFRESLQAEEQELSMQTEALRQQLEDCRKRQENAENRSALLAQYTHFEHLDRSIADEFIDTVEIGEVTENGEREICIHWKI

SEQ ID NO: 3583 - protein, 572 aa, unidentified
  source 1..572: note = uncultivated organism
MFKNNLAKENLAVMYLRLSKEDGEKTESNSISNQREIINSYARKNQITIVKEYVDDGYSGANFDRPNFKEMITAAYDRKFNTIIVKDLSRFGRDYIEAGKYIQRIFPENGIRFISVNDNYDSKSADINDTHLILPIKNFINDSYCRDISNKVKSSQKIKREKGDFISAFAPYGYKKSEKNKNKLVVDEQVANNIKNIFDMKLLGYSSKAIADELNHLGVLTPRKYKESQGFKCNGFQNTKGGTWSAKTVNRIIENEVYIGNTLQGKSVTLSYKNKKQIEKEKEEWIRVENTHEAIISKEVFTIANTMLKRDLNNSRGKDKIDIFTGMLFCKECGSSLIRRTVKYKKREEIFYICSKYNKEKSCTRHSIKEETLIKAVSKIMKSYIEFNENLYSKVQRIDINKNLKDNQIPILKREKAMTEELLSSLYLDLKEDVISKEEYQLFRKNYTEKLTKLDESIEYRLKKQEYTKEKIDKNKSWIIDINKYKNLSEIDRLSVVMLIDKIFISEDKTIDVRFNHTEELSLLEEMTKIDKSDIKSNTRKKKSIDISRKSKTIPTVMNKSLVSAESEVCCG

SEQ ID NO: 3584 - protein, 523 aa, unidentified
  source 1..523: note = uncultivated organism
MKKTAEIWNACGYVRLSREDEDKEGYNSITGQTELIRDFLTRHPDICECGMKVDNGYTGSNFDRPAFQEMIAEVKAGKINCIVVKDLSRFGRDHLGTGEYLERIFPFLGVRFIAINDCYDSLHRNAGIDDFLIPFKNLINEAYCRDISIKIRSTLEVKRRSGDFVGSFAAFGYRKDPENRHKLAIDDYAADVVRDIFRWKLDGYSAVEISRQLNRRGIPAPMTYKRLQGLPYSTPFHIKEESDWSAGMVLRILKNPVYIGVLEQGRVTTPSHKVKRFVRKPREEWAVVEDCHEPIIDRREFESVQRLLGQDTRASMSGQAVGPLSGLIFCGECGAPMVRKTVPSGKTRYVYYVCSVHKREKSCFPHELREQALEEAVLNALKQCGWEHIDRSKLLKLMEEEWVQRNGIQKIQTRLEKKEWEIDRCQRLLASLHESLAEGIIDRDEYADLKKTYSNRLGKAEEQSKDIRAELERAMEHSNMRQDWRERLLRQQDMIPLERAVVVSVIERIRVDKERRIEIVFRW

SEQ ID NO: 3585 - protein, 503 aa, unidentified
  source 1..503: note = uncultivated organism
MRNFEGEPNIRRAAIYLRISQERAGTRTYASDAIERQREDCEYTCKWNGWTIVGEYVDKAKSAFDINVERPDFERMLEDYRKGEFDIIVGWKLDRVLRRVGSLVDMIRDAPDVRICTTDLGIIDLTTPDGRHRAIAAANEAEFESARKGERERRANMQHAMQGRPKRAPRRCFGYTDAREVIPEEAAVVRELYAARVAGYPINDLLRAVNGEETTHPLSRLKKAVAGLPEPQRWTRTRMRYCLVNPKYAGFIALVQEPISQGPRRQRTAATLDNLVRDDEGRLVRGDWEPIVDEATWRESARMTRQHLRKSSGRKRRYFGTGIFRCGVCGAPLYVASGSYRCMKKGHVCRLREPIDELVLATVRERLGRSDLAALLPRVDSVRAAEITDELKKCDAELARIRDDYRAGYIDGAFYSEMHGEIEARREKLVEERGKMSADPTGGLLTCDDPVAAFDAIKDDPLRVNRIIDYLMTVTISPRHRGEKRSNGRKFEYIGIDIKWKEH

SEQ ID NO: 3586 - protein, 567 aa, unidentified
  source 1..567: note = uncultivated organism
MDKADNRKYAIYSRKSKFTGKGDSIENQIELCKRKILNSDLNATESDILIFEDEGFSGKNTNRPQFQAMMKKCRQNEIKAIVCYRLDRVSRSVSDFSKLLDELEPNNVSFISATEEFETSSPMGKTMMRIVAVFAEFERDTIAERIRDNMLELAKSGRWLGGTTPTGYKGKELTTSYDFDGKIRKMHKLETVPEEEKIIKTLFAEFLKTTSLTKVETYCINYGIKTKNGKDFSRFTIKAILQNPVYMTADHTAWKYFQSSGVILYAEESAFNGNYGISSYNKTIQTSGKANKMRSRQDWIVTVGKHKPMISSMDWIQVQELLEQNKSKSFRKPKNNTALLSGLLRCRHCGSYMRPKMDHRTKLGSEQRFHYLCEMKEKSRLQQCDMKNAQGNEIDKLVWNKIIDTIENPAAYMEDLAKAKEKISQSNSHYYERLELLKKSRSEKERQIQNYFEQFENETGEITAPYLSERVDALHEKKLEIEQEILEVESKLANKELSKERFDTIAMQLLNYDKIFDAMDIEEKRKALRLLIDRVEWDGSEQTAHIYLFGSEEKLGDLSEPKRGYSQ

SEQ ID NO: 3587 - protein, 566 aa, unidentified
  source 1..566: note = uncultivated organism
MKKVRMLLRVSSNQQLESDGDLSVQRELVKEYVQKNSDWQLDGKEYFEGSNSGYKNAVVDRDILQEALRDAENGEYDILVAYKDDRIGRRLWDVGNYVMELKKYGVDIYTVKDGHISPESNDVTGQIMLAIRYGNAQKSSSDTGMRVKDTAKKLVQRGKFMGGKAPYGYHLELSGEISKHGRALKHLVVDEEQADVIKYIYKLAANKNLGSAKIAKILNVDPQYGKMAPNDFWRAGTITSILTNPIYAGYTAYNRREKLNGRYRKLGSEDWIMASEPDEAIVIIDEADWNAVQRSRQQRRDQYALSAENAESRTVKSSSGMLALINVLHCGYCGAKMTNGSKYNYWVIKETGEKRSGRTYIYKCPLAYQGTPHEKSMVLRADKIEPIVFSAIAEYIGKLQENDDVLEEVEENQQREKRRLKEDLAKEQQELEKIQKDIAVMEENIPKAMTGEYTLSLEYLVKLINEKKEKEKKQQEIVNQKKARLENADVSAEEWKDLRKQIPTWQDVFLNADVYMKRTLVDKLVERIDVRADSVNIRFRINLNEIFPQSRITGGSGTIRYTPGSA

SEQ ID NO: 3588 - protein, 555 aa, unidentified
  source 1..555: note = uncultivated organism
MPSKAKPPPTRPRALRCAIYTRVSTDSGLEQDFNSLDNQREASEAYIKSQAHEGWTLIRARYDDGGYSGGTMERPALQRLIDDVRAKKLDIVVVYKVDRLTRSLADFAKLVDLFDAAGVSFISVTQAFNTTTSMGRLTLNMLLSFAQFEREITGERIRDKVAASKKKGIWMGGAVPLGYRVESRALHVVETEAEFVRMLFRRYLELGSVVRLKSALDAEGIVSPTRASGSGRKIGGRPLSRGNLYWILSNPIYIGRLRHKGLVHDGLHAALIEPGLWDQVQARLASQTPLRRAATKDELSFLVGKLYDDRGNRMGASFAAKGSRRWRYYVSRAVLDGRIREAGAIARVSAPKIETLVTEAVIAHLASRSDSSAGGRNTKARSRAEIPGAIESVTLGAKAIEIVLANTTDSAGGVEAHETERRIVLPWRPGSSQRKREILQPADPADPMPRRAMRTRAREIFIDALADAHCWLDELVCDPAASVAAIAKREHKSERSIRMTLTLAFLAPNLAKSAMDGKLPRGFSRTRLVDLPMLWSEQWRTIGLQRPTAGGAVRA

SEQ ID NO: 3589 - protein, 556 aa, unidentified
  source 1..556: note = uncultivated organism
MEFLKDNKTYNAAIYVRLSRDDGDKEESDSISNQKELIREYLRSKSEIQIASVHVDDGYSGVDFNRPAFLEMMEEIKAGKVNCVVVKDLSRFGRNYIESGKYIQKIFPFLGVRFIAINDNYDSAEGSNITDNIMIPFKNLINDSYCRDSSIKIRSQLEIKRKKGDFIGSFAAYGYKKAENNKNKLEIDEYAAQVVRDIFKWKLEGMSQQGIANRLNEMGILSPMEYKRSLGERYKTTFKVKQQALWSAVAVRRILTNELYIGVLEQGKRTTPNYKIKTRVERPKEEWVRVENAHEPIISKELFTTVNGLLLHDTRIAPAEETVYLFSGIIACGDCKENMIRKTVPANGKKYYYYTCSTNRNDKNSCTTHNISEKAFEEAVLAALNVHIRSILDIERILTYIDTLPYKQEEILKLDAQIVKAQEEIEKIQKYKLTSYEHFVDKVITKEEYRNHVNRYNAKIQKAEKLILKRKQEIEDIINNKTPTNLWIENFKQYQNIEQLTRKVVVSLMEKIYVYENGKIDIHFKHQAEYESAIRFIESASKSDSFDASVAFKEAI

SEQ ID NO: 3590 - protein, 525 aa, unidentified
  source 1..525: note = uncultivated organism
MKDQASKRIGIWIRVSTADQAAGESPEHHERRARMYAESRDWSIVEVYHLEGVSGKSVREHPETERMLKDIASGHITGLIFSKLARLARNTKELLEFADQFREHGADLVSLQEAIDTSTPAGRLFYTMIAAMAQWEREEIAERVAASIPIRAKLGRPLSGSVPYGYRRENRKLVPDPDEAPIRRLAYELFHEHRRKKTVARLLNARGYRTRSGRGFSDTTVERILRDPTAKGRYRANYTRRDGRGPALKPQEEWVWSDVEPIVSEELWGECNAILDERKNRARPLGKKPRHLFAGFAFCTCGEKMYVPSNSPKYICHACRNKIPVEDLEAVYHEQLKRFLFSPEEVAACLEQGDQMIREKVELLEALNRERAALGEEMEKVYRLYLADKISADGFGLKFRPKEERQKQLDEQLPALQGEIDFLKVQRLSSTEIVAQAQDLHGRWPELAGEDKRTIVEAITERITVGSDEIRIDLCYLPASSDIMTKRQLSARARSAPRPTRSSRGARCSLCPAPCTRRSPSAATA

SEQ ID NO: 3591 - protein, 548 aa, unidentified
  source 1..548: note = uncultivated organism
MNTDNTYDVGIYLRLSKDDNNRNLESMSISNQRQVLKDYVVEKGWNLVREYVDDGWTGTNFERPGFKKMIDDALSGKINCIITKDLSRLGRNYVQAGYYTDEFFPENDIRYIAINDSIDTISDDNDITAFHHVLNEIYPKQVSKKVWQVKKKNAEQGKFMGSQAPYGYKKSTEDKHILIVDDEAALIIKRLFNEFAAGESARQIAERLNTEKIDSPRFYHYSKMGRINPLTSEKNVWGSSTVLQLLRNQVYIGNMVQGKRKTVSFKTKKMRTVSPENWIVVENTHEPIIERELWDRVHTLMDKKSRVAITKKKTVGLFAGMLKCADCGSPLAYMVKKQAHGDKGIYRCSRYNNNGSGACSTHYIEENDLCEIVLNDIRNYAIIAEADKETITKKLMALKSKHIKAETKVIKSQMDSAEKRLVVIKTAIKNLYIDKCSGNLPEEVFKSMMEDFLTEQEDVENRIPQLKRDYEEKSNATDEVNEWIRLIGQFSNADKLDRNIITQLIDSITVSERKQVDGRWEQSIDIEYRFIGNLLNESENEVKKENIA

SEQ ID NO: 3592 - protein, 563 aa, unidentified
  source 1..563: note = uncultivated organism
MARTSRKSAVMQPETAPVTPERIYHTAIYVRLSVEDNNRAGNHESIAMQQYMLEKYIEGQPDMMLREVFSDNGESGTGFARPGFERMMDSVRNREVDCIVVKDLSRFGRNYVETGYYLEKIFPYLGVRFVAVNDQYDTENPKEGNELVLSLKNLVNDIYAKDISQKSGSALHIKQKNGEFIGAFAAYGYLKSSEDKHKLVIDPETAPVVREIFQWRLAGDGISLIARKLNDRGIPSPSMYHYQKGHRKKKPEGASSIWQGQMIKMMTANPVYAGHMAQGKTKKSLCDGTPVTTVSCEDWIVVKNTHEPLVSQEVFDRIQEIAGERHQKSASIRGKYRTTENIFKGILVCADCGTKMRRYKNVSAAGTARYTFICRIYTENLGGQGCTKKCIGEPELTEAVFFALHIQTDLALDLEKKLKQLQEQSSFQKKCRELSEQTAKVKQKAKRNATLRGSLFESYCDHTLTESEYLSMKAGYDKEAQELAEELEQLETENKKYTQDLSPQNEWINSLKNYRKEKTVTRKMVTELIKCIRISGYNEIIEIVWNFQDEFARLAALAEKGAL

SEQ ID NO: 3593 - protein, 518 aa, unidentified
  source 1..518: note = uncultivated organism
MKGVSGAIKVAGYCRVSTEQEDQRNSLEAQQRYFKELIENREGWELYQIYADEGITGTSTKKREQFKRMISDAREGKFQLIVTKEVSRFSRNILDTIAYTRELKALGVGVLFMNDAISTLEPDAELRLSIMASVAQEESRKTSSRVKWGQTRQMERGVVFGRSLLGYQVKDGKIKVQPEEAELVRLIFRKYGLEKKSTSVIARELRHAGYRSLSGSTQWRSSMLVKILKNEKYVGDLVQKKTITPDYLTHAKKYNHGEEALIVIKNHHDPIVDRALWDAVQAERKRRDRHNRQSTGHSARFPFSGKIKCGICGANFTARRKKRKDGSSTLYWDCLTAIKEGRQHTDHMGHQKGCNIGCLLSDKSAGEMFRLALQSLRFDRQQLSGHLSRIAAEAIYETERAEEENLKREILRLTKKKEDVLDAFLSDMIGVEEMNELNRRCDRQLNALNEQLAQHRQSTGHCESGTEAGMQEHLEAILAGSVTSEIFCKTILDNILICPDKSAVLSLQGLSLRWRFSL

SEQ ID NO: 3594 - protein, 542 aa, unidentified
  source 1..542: note = uncultivated organism
MDKTENDVVKVTKAALYARVSTEEQTSNFSLAGQLELLRKHAKDTGCEIYDEYVDDGYSGTSSDRPQFQRLMEDARQGKLQLVLVYRVDRFFRKNLSLLGVVDELQKVGVSIRSITEPFDTSNYLGKFVLSLFGSIAELERNTFMDRSKMGRLRRAREGYYSGSSPTRFGYNYNKATKKVDINEKEAEAVKLIYELYNQPDSSLIKVTKKLRTLGYRTKTGQLMREDVVHEILRDSIYVGRWQANRYDSHTGKLKPPTEWIEVKVPAIVSEEALLKAKELLSIRRNYSERNAKYHYLLQGLVKCGDCGNTIAGTADKQVITKNGKSYGPYFMMYYRCVHFGKNRFEKTVSCRLRYIQAKKLEDAVWDKVEKIFHDPGLIEKAVKGKDAVNLQSRAVTGKEAERVGLLLDGLKKEEQRILEAYRQNIISIDQLKEQMESLKKERELFEKTKQDLNAKLDTTDRKSEIEYSVNYIEKVKQGIEKFNYETKKQILRLLKTSVKVNVSGAVEIDCFLPKAPFASGGDFFSSFVSARPICWRSAGCI

SEQ ID NO: 3595 - protein, 512 aa, unidentified
  source 1..512: note = uncultivated organism
MPQVKVIQPLSEQSKKLRVAAYARVSSDSADQLNSFATQVDYYTGYIQSKDEWEFAGLYADEAISGITADKRSDFQRLLVDCHAGKIDRILVKSISRFARNTLDCIQTVRELKQLNIPVEFEKENIDTGSMGSEMLLSVLGAAAQEESLSISKNLKWNYRHRMKNGDFTTHIAPFGYSYKSKTLVPNPNEVPIIEFIFNSYLSGKSLSEIAKELTQNEKPITSEKHSEWNRTSIQYILTNEKYVGDSLVQKRFTPDELPLKKIRNVGQLPRYYIRNSHPAIISREIFEAVQVLLQQKTISKSTVSSYPLSQIVKCGACGSTFHRRIQKGIVRWSCYKHLQDKDLCPMGIVQEYEIYQGFLKVHNKLLDNRDSILKVMLNQLLELQTKVTFARPDIVALNEKIADLVKQNHSLARLQAKGYIDSVIFIERSNGNNQRIERMRRELRQLQGPDELSSLIDSTTLLMDLLDKASPLLEFEPSIFKIMVKEIVVYPEKFRFYLNNNLALDEGRCLR

SEQ ID NO: 3596 - protein, 521 aa, unidentified
  source 1..521: note = uncultivated organism
MRKRTPLNAAPAVRCAIYTRKSTEEGLEQEFNTLDAQRESAEAYIASQKGEGWVALPDRYDDGGFTGGNMERPAVKRLMADIEAGKVDCVVVYKVDRLSRSLMDFARMMETFERKKISFVSVTQQFNTTQSMGRLTLNILLSFAQFEREIISERTRDKIAAARRKGKWSGGRSVLGYDVAPTTKKLVVNRGEGDLVCEIFRMYLERRSLLDVARELNGRSVRTKVVQTRKGKTYGGREWDKATVLKVLSNVLYRGRVRYKTETYPGEHEAIVPDELWTKVHELLRSNGRSGGMLVRNKYGALLKGLIHCGPCGMAMGHTTTCKNGKRVYRYYVCYKAQKQGWDACPCRSLPAEQIEAFVVDRIRCVGQDPAMLSLTLAKCREQMEIQRVAAEGELCGVERELARLNADLARTAGEAATSAQAAARLADVHEKVRAAEEQAKALRGQIEDIDAGEITKDEVDAALGDFDGVWASLSPKERARLMRMLVQRVDYDATKGSVSITFHPLGLRSIGRRAPEEVAA

SEQ ID NO: 3597 - protein, 570 aa, unidentified
  source 1..570: note = uncultivated organism
MNPRIRCAIYTRKSSEEGLEQSFNSLDAQREACEAFVKSQQHEGWQAIVTHYDDGGFSGGNMDRPAFKHLMADIHASKISTVVVYKVDRLTRSLADFAKIIEQFDKFGVSFVSVTQQFNTTTSMGRLTLNVLLSFAQFEREVTGERIRDKIAASKKKGMWMGGTVPLGYDVHDRHLQINEAEATTVRTIFNQFLRSSNVTILREWLRENDIRSKAGNHFFGGPLYQMLHNPLYIGLTRHKTETYPGQHQAILDSETWDKVQALLAANRQGGKRKPRATKSSLFTGLLFDAQGTLYTPTHAAKNGRRYRYYTSQAVIKKTEKIETPTRIPAPDIESAVIERFRKLLRDPDDLVASIRDNAQEEANQPAGFFTGIVARATSTAATWQSLSGPDREHFLRAVIDRVIIHPTRVEIRIRVNQFIQQLLGNNTPMADSRAGSAAGTPQAHVPLIASIECPFRHISQGRALRLIVGNTNITTEASRQAILKAIARARQWYEQITTGKATNIAQLAATDGVSPRFIRMQMKLVQLSPQSIEKLMTRPESLPLSLLDLLAAIPLDWREQSLGLSKKSA

SEQ ID NO: 3598 - protein, 717 aa, unidentified
  source 1..717: note = uncultivated organism
MFTHTTPSQAAVYVRVSSEAQQERQTIENQIDFARKYCDLQGIEILEIYKDDGVTGTLPLQDRPAGLQLLRDAKAGKFKLLLIFKLDRLGRSTRVILNAVHDLDGLGVLVRSMTEPFDTSNPSGKFLLTILAGVADLERSNILQRMDMGATRAAKEGKWLGGIVPYGYLKNDEGFLEPNTAPIPGFQFSEPDVVQMMYKMTAQDGATAQQVADHLNAMRIPPAWVAHNLGGKRRNNTSGLWSPSRVLRILRSTTYMGLHEYGKRSPKGREIITRPVPPIVDADIWKKAQAVITSNQVDSLKNAKHKYLLKSIVKCESCGATYRGNPAGRKSTGGYYSCGGRSNWRRMGRNEKCQAMSISMAWLDDFVWQDCLKFINDPGLVVAAVDKSEGDREADSQTETILEGRLTELDADKERMLDLYRQKLISLDDLSDQLDKIKKDRDAVEAELEALRDKYADEQFFAARETAMNMLELLAETVNKPDITFEMKQTVIRTMVEKVTVKTLEKNRAHVTIHYRFHDDSTRTVSRKGNHADYSAGITITTVAEYPPAPEPGNTQRDRLVYLRWRENLTQSELAAIGGTTACSIGGVETGKCSSLRPDTLRAICDHFGLPYWFLGAYDRLPEETIPQQLYKYRMYRLWDMQAAAGFFGVDRRTYIKWEHGHISKAPNAKKIQPEKLEKWKSHPFQPSGGSAIGRLVLPTPAADLTALPVTADRLGR

SEQ ID NO: 3599 - protein, 551 aa, unidentified
  source 1..551: note = uncultivated organism
MSKQQFNKDAGLYLRLSKDDERAGESLSIENQRRILEKYALDNGFNVVDTYIDDGWSGTSFQRPEVQRLLEDAKNGRINVIIVKDLSRFGRNYIEVGQYTDYIFPMYNVRFIAISDNVDSANSESSGMDMMPIMNVFNEWHAANTSKKIRAVIESNAKAGKYRASVAPYGYVKSEDENRLPIRDEPAASTVLRIFEMRAKGISPQKISDTLNDEGLLPPADYKEQKFGIPNTRKSHHLWSNSVVKQILTNPIYLGNLVQLKTYTLSYKNRKQVKNEPEDMVTIYNTHEAIVTQELWDKCREMEASVSQGKKNKTGYVNPLSGLVYCADCGNEMYIAWNNTRHKRTDPRTYHRENFKCGAYSKFGDRVCSSHYIQIKILNQIVLQDIRSKIGLVEADENKARKAFLSRSEKLAADTLAADRKRETQVKRRLAELERLISTVYEDKVLGKIPEEVCINLLSKYQEEKKNLTAELSEIERRLNSEVERHADVDEFIRRLKSYIGVPELTREMCMELIEFVTVDECPGKYSKEPREIHIYYKLIDKNQSKPTHKM

SEQ ID NO: 3600 - protein, 529 aa, unidentified
  source 1..529: note = uncultivated organism
MSINKCAIYVRKSTEHGLDMEFNSLQNQEESCLAYIASQSFNGWKYCKTYTDAAISGGTMERPALKQMLDDMAHGLINTVVVYKVDRLSRSILDFHNMMKYFEKYGVNFVSITQSFDTSNSMGKLTLNMLLSFAQFEREVAGERVRDKIRASKAKGIWVGGNPRLGYDIINKKLVVNKTEADTVKLLFNKYLELQSVALLKKFANANNIHNKQWTTKTGKIRGGRPFQNQTLLNLLHDKIYIGIMECKSAKTSAPGEHTAIIATELFNRVQAALRNNTNGKFGNSHNAPNLLTGKLFNDDGIKFTNQQTRQQNKQTKYYYAIPGLYIQSSPVDEIVINIIDEFMNANLERIHSDFGNALKHIDFSNLPFPTKRDFIRRILQKVIYSKNKLTLFIDQNADIKEFINTEFTNENQNKMDYVIGDKSIIVRREFIMQRYNKRNDYNAGKSAAISISDNNHLVVRAFARAFKYRKMYEECGDYKSIAKMENTSESSVYRHLKLAYMHPDTVNAIMSGTMQCSVDKLFNIQNNL

SEQ ID NO: 3601 - protein, 572 aa, unidentified
  source 1..572: note = uncultivated organism
MTTTARPRVRCAIYTRKSSEEGLEQSFNSLQAQREACEAYIASQRHEGWHVIPKKYDDGGFSGGNMNRPALRQLLEDIAARLVDTVVVYKVDRLTRSLMDFSKIIEAFDQKGVSFVSVTQQFNTTTSMGRLTLNVLLSFAQFEREVTGERIRDKIAASKKKGMWMGGVVPFGYDLKERQLVINAKEATIVQEIFEQYVSLGSVAELKQYLDRKRIRTKVRTAAGGRVFGGQPYSRGGLYKLLKNHVYIGKIAHRGDTYVGQHTAIIASETWGKVSALLEANNQGQRRPGRTLVPSVLAGLVFDSEGNRYTPTHAVKNGRRYRYYTSQAVIQKRKKPSYLDRIPAKELEHLVSSRVQKLISSPDEFGAAYSESGWPHEDLGRVIDAARALATDWPKLTSAETADILRHCIRQVVLYGSEVRIQVDVVALSARVSREGSECIVAHEGESPSAAHLFTLTAPLTVARYRGELRLALPGDASPSGKSGSSLLKAVVRAQRWKQRILNGEIYCKEQLASEANLNASYVGRMLRLAALSPEWIDAVVQHRKVFDQPLSGVLKRIPLDWSKQKSLLLNA

SEQ ID NO: 3602 - protein, 527 aa, unidentified
  source 1..527: note = uncultivated organism
MKEIEYKVGIYLRLSREDERLGESGSISTQRELLLSYIRDNNLIFVDEYVDDGVSGTTFDRAGFNRMIKDCEEKRINMIITKDTSRLGRDHIEFGFYVERYFPEHGIRYVAVNDGIDTFSNSSANDMLVFKSAFNDMYVKDISNKQRSSLYIKKKNGQFVGAYAPYGYNKSEEDKHKLVINEDEANIVKRMFNMFADGCSLTNICDTLTNEKVPTPSISKNMNIGQNNFHYGVWSTRTVGDILKSPNYIGNLTQCKQKKINYKSKKRIHNRKDNWIIVEGIIPKIIDDDLFNLVQDMFKSNSNRIKGNGITDKLLLRGLIYCKECGHTFGFRAQEQNTKKYGLVTRIYGNCNYWAKRKKQNVCTPHSVKYNEIEEVVINELRNMCNQYIDANSLEDGFKNSNKIQAKKDRCNVEILKLENCIKVLNKKIDACYNDKLEGNITLDMYKRAYNNFINEIKENEHKINEYKKELYNIENNNNIDEKQFIKKIKEFLNMNDPSRFLIASLIDRIEITEDNNIDIYYKFKLV

SEQ ID NO: 3603 - protein, 555 aa, unidentified
  source 1..555: note = uncultivated organism
MARTAKRYKDTNNELRANGKLSYYVGVYSRLSVDNHDRKSESVENQIDIINQFIFDNNSNPDREMELVVYDTYIDRGISGTSFERNGFERLMQDVKEHRVNCIIMKDLSRFGRDYLETGNLIEKILPFLGCRFIAVADHFDSMAANVNESKLAMNIKNLVNDMYAKDISKRVAVARKMSAENGSFIGSFAPYGYEVVHVQGIRKLQINEECAEVVRNIFELYAQGITIKDIITRLYSDKVHRISDYKKYGHVYCEEGEILHQWSEGSISGILQNTNYLGNLQQCKSQSRLYEGQKGVSFSEEKDWVTVRDTHEAIINQELFERVKERKSGGKPETKIQYKNKNTENIYRNILCCGCCGKVMHATYYQSRVKDARHYAYYCRSAYLIDERKCEKNYIREEQITAFVLEQLRNVLKEQQVKAKDLTKLNMEEYESKIAEYELEEKKIAEECEYMKKQAGIIYGQYKEGVITRAEYDVFKQNKKEQDYFAEKRLEEIRRKIRKAKSKAEEENKFLRSLLKAEKCKKLNIQLVEALIEKIIVFSNGVIDIVYKFSYGGM

SEQ ID NO: 3604 - protein, 582 aa, unidentified
  source 1..582: note = uncultivated organism
MSTKKVEIIEPVAQRIESKKKLNVCAYARVSTGSEEQKDSFISQKEYYEELIRSNSDYNFVGVFADEGISGTTDKRPGFQRMIRLAEQGFIDIIYTKSLSRFSRNVMDLKKYCGKLKDHNVDVIFETENLRLLDSSGALLFNILSAISEMEVENTRERVNWKMQIKMEHGELVGQANPLGYDVVDNQLIINKEEAEIVRYIFRRYIEGVGGSRIARELCNMGVKTKKGNVNWCATTVIGIIKNEKYTGVLLQGKTCTVGNTVNIKRIDNNGNARKYKVENHHEAIIDLETWMKAQEILEKRCITYADGRRKGTTRNSNLSIFTSKLVCAYCGKNYVKRIVHAGTKYAKVKWNCSTKCKQGKSQCPYSKAIDEDYLRQAVVMQIKSLIDDDSMFYLSNERLGTILKQSEKNIDLIEEQINKCNRNIETIKKKKSKLFDLLLEDNITEEQYYSRSALLDEEMESSCKMMDDLSATINYEGQKGNTALQIRRLINEGKAEGFNEDLFNYIIDKIIIGGKRLDGTDDPRSLHFDLNVNNLQTDMVTKIDENGIVRYTCDSDIQNVDINSGEDTNSELCTFYNVSPL

SEQ ID NO: 3605 - protein, 652 aa, unidentified
  source 1..652: note = uncultivated organism
MIQAATEKKTIRCAIYTRKSHEEGLEQEFNSLHAQRESGEAYIASQRHAGWVALPTDYSDGGFTGGNMERPGLEKLLADIQRDRIDCVVVYKVDRLSRSLMDFAQMIALFDQHDVAFVSVTQHFDTSTSMGRLILNVLLSFAQFEREIIGERIRDKKLATAKQGKYVGGQPFLGYDIDRERKRLIVNPAEAEIVRQIFESFIRTRSNLVVARELNAKNSRTKAYKTIKNGKVLGGKRWNKVYVYRVVTNRKYLGDVVHKGQSYPGEHEAILDRRLWDEAQRIMVDNYHARATKTRQKAPALLTGIIRCGHCGNAMGASHTKRRGRRYRYYVCNHAEKNGYDACPVKSVAAGQAEGIVKDRIRVILRSPDLIARTFREVQAQAGSQRADLAGQRERLEARLAELKRAIGRLARSEGNDGALATELGKLNEEYGQTQNRVEEVGRTMEALGADGPAEDDVREALQKLDPLWDELFPAEKERIVKLLVEEVVVGRDSLLIRLRLHGLNSLVAELRGDGPAAVAGGRVAPGSDGQTVDIRVPMEFKTRSGRKEIILPPDAATTADVGPRSPLVVALARAYRWQRMIDSGEVSGVEVIAAQYGVDRAYVSRILGLAMLAPDLTQAALKGNESGGLSLRKLAKPLPSRWDEQWGLSSS

SEQ ID NO: 3606 - protein, 607 aa, unidentified
  source 1..607: note = uncultivated organism
MRKNEEKIAIYSRKSKFTGKGESIGNQIELCKDYVRNMFGERYVELCEVFEDEGFSGGNLKRPAFQRMMADVRKRKFKAIVVYRLDRISRNISDFTGLIDELTKLDVSFVSIREQFDTSTPMGRAMMFIISVFSQLERETIAERIRDNMHELAKTGRWLGGTAPLGYRSKPVSKITIDGKERKSFCLEPVPEEIDIPKLIYDLYTQSDSLTAVEAELLRRRIKTKLGKNFSRFAIKAILQNPVYMVADEDAYDFFTERKAEVCFPKSAFDGSCGIMAYNRTDQEKGRAMILLPMEEWIIALGKHPGIVPSKQWITVQQSLERNKSKGYRKPRNNEALLTGMIYCSCGERMYPKLTERRTGSGELIYTYVCKMKERSKRTRCNKRNANGNILDTAIIEQLKTLTEKDSAFMKQMEKSRQFYTGNREQYDTQLTKLREELAQNEKIIAGLLDSLGMVGDSIARPSVLRRIEELTEANRVLDCRILELEGLVTANHLSDGEFDLLRQILAMLRENVDQMSVEEKRAAVRTVVRKVIWDGVNAHVVLFGAEDGDLDYPNIDDRLSEAGEDDENDLEDLADVECEESDINDAFMEENRTFATPKSRWGDGSE

SEQ ID NO: 3607 - protein, 519 aa, unidentified
  source 1..519: note = uncultivated organism
MSNKHIVKPEARKQYRCAIYTRKSTEEGLEQEFNSLDAQREAGELYIKSQKHEGWECIDTKYDDGGFTGANMERPGLRRLLADIAAGKIDCVVVYKVDRLSRSLLDFAKIIEVFDRHQVTFVSVTQSFNTASSMGRLTLNVLLSFAQFERDMISERTRDKMRAARRKGRWIGGKPILGYNVENSKLVVEPLESMRVQEIFKLYLEMKSTLQVARVLNERGWRMKEWTTKKGKTIGGGEFNKNKVTAVLTNATYIGMIEYEGQFHPGLQESIIKRDVFDLVQETLKQNSRMKKDLNRCKHNALLQGLLRCAACNCGMSHSYTKKGSTLYRYYVCHKAQKQGWASCPSPSLPAAEIEDFVIDQIRRVGQDPGVVRDTLAQSRVQTQKTVEQLKKEKNALERAILGYYERLNLAIADGANESAFADIQDQIREKEQRVSEVVDEMTSVSSLLIDESDVRDALGRFEEVWTALSPAEKAKAIHQIVDSIQYDGHSKELSISYHPIGIRTFNQEQKSKEGAATC

SEQ ID NO: 3608 - protein, 521 aa, unidentified
  source 1..521: note = uncultivated organism
MASVRFIPATKRIGSRIVEDETPKTRVAAYCRVSTETDEQATSYEAQIEHYTDYIKQNPSWEFAGIYADDGISGTNTKKRDEFNRLIDDCMAGKIDLVVTKSISRFARNTLDCLNYIRQLKDKNIAVFFEKEGINTLDAKGEVLLTIMASLAQQESQSLSQNVRIGLQYRYQQGKVQVCANRFLGYDKDDEGKLVINPEEAEVVRRIFREYLQGKSYFEIGKGLSADGIRTAAGNDFWLASTLRKILRNEKYIGDALLQKTVTTDFLTKKRVVNNGIVPQYYVEGSHEAIIPKDIFMMVQEEMGRRAHLETATGRRSVYSGKYALSSIVYCGHCGDVFQRTHWNCRGRKKVVWRCVSRLHKKDTEFNCPARTVTEADLHEVVVRAVNEVFTRQEELLPPLRASIARALERNNNGPVAELDARIADLEQEILKRNRARQDYDDLGREVIRLREEKYQLQLEDAEKEGMRKKLSELEEMMAEIGGQVTEYYDALVRRLIERITVRDDKYVVEFKSGIEIDVRL

SEQ ID NO: 3609 - protein, 523 aa, unidentified
  source 1..523: note = uncultivated organism
MKKPAEPVTPIRCAIYTRKSTEEGLEQEFNSLDAQREAGEAFIASQKAAGWVYSDTRYDDGGFSGGNADRPALQQLMADIEAGLVDCVVVYKVDRLSRSLLDFARMMETFERHGVSFVSVTQQFNTAHSMGRLTLNILLSFAQFEREIISERTRDKIAAARKKGKWAGGKPVLGYDLMPGPGGSKLKVNTTEADRVRDIFNLYLAERSLLRASEILNDRGWTTKRWVSKNGEPQGGRRFDKAVLHKLLTNPVYVGKVRHHEHLYDGEHEAIVDEAVFREVGELLASNSAKGGRSPCNKHGALLKGLVRCRACGCGMGHHFASSKASGGGQKRYRYYVCGRAQKEGWSVCPGPSLPADELESFVIGELRSLGQDQGLVADAVTAAQERLRERVAAFRSDRSALTAELDSARDELRAIVAGGRDRNGSAAEAAELRERIRDLDARGRRLDGRLAAMRDRVLDEDELVGALESFDPLWEQLNTDERERLVRLLVKRVEWEAETETITVAFNADAEAGATEELGCQT

SEQ ID NO: 3610 - protein, 531 aa, unidentified
  source 1..531: note = uncultivated organism
MEKAEKKKINCAIYTRVSTSEGLEQEFTSLDNQRESAESYIQSQKSEGWMLLPERYDDGGYTGANTERPALQKLLSDIKDGNINCVIVYKVDRLSRSLLDFSQLLEFFEQNNVTFVSVTQAFNTNTSMGRLTLNILLSFAQFEREIISERTRDKMGAAKKKGKWIGGRPALGYDLDKVNHKLIVNQDEAKIVREIFDLYLEKHSLLSVAIALNEKSRKTKSYTAAKGNKFGGIKFKSTGVQLIVKNTLYTGRVSYKGQLYPGEHERIVSDEVFKEAQEILANNRRERKVAGTTKNMGLLNNILCCKACESTMYCVYSMKGKNKYNYYLCMNAQKRGYKNCPTCLVAAQVIENKFMEFLRKITKDPRIEARAWDALTLEEKIPILKSIAKIAHYDGNNETLEIVLQKSEISHKFALRLAELKHIPYHRRQAEIGSQPWVRQNLILAHQINQVTHERNCSLRDIAQWVGIVHSRICQIANMLLLSPRIQEEILLSDSKALFNVPEYRLRDITTEVDWSKQQGLWDKLLKSDQK

SEQ ID NO: 3611 - protein, 505 aa, unidentified
  source 1..505: note = uncultivated organism
MPQVKVIQPIAEQAKKLRVAAYARVSSDSADQLNSFATQVDYYTSYIQSKDEWEFAGLYADEAVSGTTADKRSDFQRLLADCRAGKIDRILVKSISRFARNTIDCIQTVRELKQLGVAVEFEKEEIDTGKMGSEMLLSILGSAAQEESLSISKNLKWSIRKRMQKGDFITCRAPYGYILSGSTLEIFPPEAKVIRFIFSSYLNGMGIEELTDELNRRQLPKRWESKKWHIYHVQYILTNEKYMGDALVQKRYTPDILPFQLQKNTGQLPQYYIENSHPAIISREEFEKAQVLLQKKAPKLSERQEYPLSKKLFCSLCGSVFKKQHSAGTWICRKHYKDKTQCPMMPVSETDIYRAFLRLFNKLLEHYSQILQPIVIDLEKLKAAKETDEHLAFINQQITDLMRQHHALTRLRTKGSVDSSIYIERTTQINQKLYDLRQQAKQIPHENKIGHRLDKTKTIISLLDSAEPMIQFDEDIFKAMIEKVEIQQNTFSFRLVNGLILKEKR

SEQ ID NO: 3612 - protein, 696 aa, unidentified
  source 1..696: note = uncultivated organism
MNVNTKNSKKRLRVVLYLRLSKEDLYKLSPSEKSQSIKNQEIILRTYALENGWNIVGVFDDEDYSGSDRERPNFNKMIKECKEGNVDIVLVKTQARFARDIELVNEYVHNKFRQWNVRFVTYIEKIDNTKDETKKTSQIIAMKDEWLLEDTSKNIRETLKSKRAKGQFTGSFAPYGYIKDRENKNHLLIDPIASLNIIRIFEEYNMGYGMDKIANRLSRDNILSPLEYKIFNGSKIKIPIKRKDYVNYINKAGTYVIDINYTNNQKKILKNITTIEVISNALLFNNTFNIRLLKKKNSKIKIYYSIKDLNKLDIIIDNGKYLFKNKPNFNNDDCWKEFKLNDTLPKDVTCIATYIMDLDRMHNIFYSFEITLKENRNHLKYYYYIFAYADYYNTHLNYHIKVRNKYNWSATTIRKILFDEVYIGNLVQFKTTTVSYKNHTLIYNNSDNQIRVENTHEAIINLRLWNAVQIKLSHNKRCCKGGKVHLLSNKVYCQCCQKIFYKCGKNIDGMGYLCCKDKLTSWSNCDNKKWINERFLHEYILQKFNILLDKYYSINKQIKYDNSFVENNLFQEKIKVLLKEKKEISFELDNKKGYFKNLYLDFKNGILNKKQYFYLKEEDEVEMKRLEQRLKIIERNLKSIYKEKNERKNRYLLFNKYKEINTLNSFIVDNFIDKIIIGKYDLITNSRNIKIIWNFL

SEQ ID NO: 3613 - protein, 523 aa, unidentified
  source 1..523: note = uncultivated organism
MKRPRSSAPRTVPAVTRCAIYCRQSVEERGGNGFGSLEAQRDKGEAYVTLFPEKHWEIVPTEYSDPGFSGATLDRPALTRLRADIAAGKIDCVVVYRSDRLSRSIRDFLELMEEFDRHEVTFVSVSEQFDTSTPGGRMHRNMLLMFAQYEREVIAERTRDKVHAARRKGKFTGGGLILGFDRHPDGGRLVVNETEARRVRKIFRLFEEHPSLVETVKELNRRGWTLKRWTTKQGREYGGGPFDVHSLRRMLSNFAYRGQVLFRGTVYDGEHDGIVDQETWDRVQDLLKNGRNGPRRPGSRCTSLLAGILRCAPCDSAMTPTYSQKGRVRYRYYLCLKAHLRGWDSCPSKSVSAKKIEKFVVDKIRGVGRDPELVARTVEVAGRQLTTRKTELESEAKRLRGELEKAHADLRTTLRAVPRDGRPGRRDATAREESIRALEERLATVVEEAAVLEGQRIDPADLQAGLAAFEPVWSHLEPAEQARVMQLLIERIDYDGGTGNLAITFRPGGVRTLAAEATGEGGL

SEQ ID NO: 3614 - protein, 548 aa, unidentified
  source 1..548: note = uncultivated organism
MSKRVAIYLRVSTSEQFEEGYSLREQGVRLKHYCENQGYEVYNVYEDAGISGKNITGRPGIKSLLSDDTKGKFDLVLVWKLNRISRKLLDILNIVELLNKNGIAFRSLTESFETETTTGRLNLNIMGAIGEFERETIAENVKMGLLARAREGRWNGGVVLGYDIVEIPNEGKKRKNTRLEINEKEANTVRRIFELYSQGHGYKAVVNRINKEGVKTKRNGEFAVSTVKEILQNPVYIGKIRYNVRQDWSKKRRNNINANPILSDGQHEPIIDMETWNKVQVILKERSKKHNKIYDSEFPLTGILRCPICGAGMTINRSTAKRQDGTRRINEYYSCGNWKNKGTAVCNSNSIRVDVADEYVLNKIMELINDESILSKVVDNINKNKSTKLKPKLEQLEQINKEIEKITNKKNKNIELFEDGILDKSELSTRVKVINDDIEKLKYREQELKQDLQLAEGEPIPFEIIKEVMQRFKEVFLGMSTSQQRKQVIHLLVSKITINKEREIDNIEIQINDDVITYLMKDGLPKEKGNSSFLHLFGMNCMNFKLVI

SEQ ID NO: 3615 - protein, 566 aa, unidentified
  source 1..566: note = uncultivated organism
MPVSERILERKDSKKSMKKVRMLLRVSSNHQLDPDGDLKIQREIVMEYILAHEDWQLDVKEYFEGAQSGYRNHVKDRAILYEVLEDAKMQEFDILVVYKDDRIGRLMWEIGAYIMQLKSYGVDIYTTKDGCISPDRSDIMGQMMLALRYGNAQKSSADTGQRVKDTAQKLVKNGRFMGGKAPYGYKLELSGELSKHGRALHKLVIIPEQADVVAYIYDLSYRKELGSGKIAQVLNADVTYSKLAPNDVWKAGTVTSILTNPVYCGYVAYKRREKNNGRYHRLGQEDWIYAEKENEELRIIDKVRWNQVQEKRERRRPCLPNGIPSGAKRAMLRNDGNLPLIDVIHCGYCDAKLTNGSRYNYWTIKATGEKRTSRTPLYRCPFASDGRVHEGKMHLPAEKIENIVFQYVGNYLDDVMNPDEIKAKIYEQNQIIIRSVQTKIRQKAGEIQKIQDDIDTMKKHVPEAMRGEYPLEIGILADAIIDLEERKAIEREATAKLQEKLRELQEEKEEGYTFADCMPSWKDVFCRADRLVKRVIIDRLVEKIIVTDEKLTIRFKFAPNLFDNNS

SEQ ID NO: 3616 - protein, 533 aa, unidentified
  source 1..533: note = uncultivated organism
MRGRRREDDAFGSTVAPADRPTMNCAIYTRKSTEEGLEQAFNTLDAQREAAEAYINSQRHEGWVALPQRYDDGGFTGANMDRPALRRLLDDVEAGLVQCVVVYKVDRLTRSLLDFARIMETLDKRGVTFVSVTQQFNTTTSLGRLTLNILLSFAQFEREMIAERTHDKMSAARRKGKWVGGNPVLGYDLLPQGGGLIVNEDEAQRVRAIYALYLEYGSLMPVIQELDQRGWRMKRWTTRKGKPAGGRPFTKNRLYNLLTNILYTGRIEHQGKIYPGEQPQIVDTDVWNQVQEKLNTNGRTGGRLVRNKYAAILRNILRCASCDAGMVHTYTRKGNRLYRYYVCVNAHQRGWNRCETRSVSAPEIEQAVVDQIRGIGRNPELLEEVLRQVEEQRRSHESALESERRLAERDLKRLTDEMLGLAKISTAKAPAGRAATDRLAEVHARVSELEQRLADIRHHVQEMSDQVASAADVEEALRRFDGLWQHMTPKEQERFIKMLIQEVRYDGKTGTVTLAFRSAGLKQFCTQSVGQEQ

SEQ ID NO: 3617 - protein, 579 aa, unidentified
  source 1..579: note = uncultivated organism
MSKPAAKGGGRRLRCAIYTRKSSEEGLDQEFNSLHAQREACEAYIKSQRHEGWSCIPQAYDDGGLSGATLDRPALQQLLADIQAGRVDIIVCYKVDRLTRSLADFAKIVEIFDAKGVSFVSVTQQFNRTTSMGRLTLNVLLSFAQFEREVTGERIRDKIAASKKKGMWMGGVPPLGYRCRDHKLIVIPAEAETVRHIFRRYAALASVRFLQQELDAAGVRSKSWISTAGRRWGDKAIVRGALYTMLRNPIYRGQIRHKDQNYPGEHERIIDEPLWEEVQAKLAANAVKRATRERRLSPSLLVGLLYDREGHRMTPSHAVKNGMGYRYYVSHPLVCKTREAAPEGLRIAAVEIERIVRSEIGELISSPARLAEALGPYFETAGEQQELLRRAVEVAAGRPELPAAQLRAALAMLCRHLAVCSERADIEISARGLHAFLRGEPATTLEAMNSDQPLLLSFPARLCRIGQGKRLVIDAVLQPGASGRPDPKLIKLLVRAHRLKEKLRAVRGTRIVELALQEELSPSYVALLLRLTFLAPDITRAILEGRQPGSFTAQKLVTYSGLPLTWAEQRQALGFVAHL

SEQ ID NO: 3618 - protein, 545 aa, unidentified
  source 1..545: note = uncultivated organism
MRCGIYTRVSTDNQVEKIYNSLETQKESAISYIQSHKFEGWTHEDTFEDGGYSGATLDRPDLKRMLRVIKKKGIDAVLVYKVDRLTRNQKDFYQLIDYFEKYGVTFISITQNFDTSSAAGRLMRNIMLDFAQFEREMTAERTKDKLCARAKRGMWNGGCVPLGYINDKENKVLLVDPEEEKLVKLIFQKYIELKSISKVVELINSNGYTTKTGGEFMGTTVGHILSNKKYLGLIEYANETYEGLHTGIIDQETFNKVQDILSRNKTGNYTPSENKYNLSLLGLVKCHYCGASLTSYYCIKDGKRYMYYKCSKLLHGNNKSCQMKALNAHSLDKAVIDKLTELGNDKAKLDDVINKVNGRYMEELESLEVQQGRHKEMLSKTKDKISKLIHAITDRDTKLEVIEDELHALEMKKKDLELKLVELNTRIVRLKDKIINAGVVYDGYRHFTSIYPTLLPKDKHRYMQSLVKEVDVSNDLISMCLYEPEGIKEEARTASSVHAYYMAPLISRSTKCFWVTFAIQKLRKNKGRFEYIIGEIIPDVSNKEL

SEQ ID NO: 3619 - protein, 556 aa, unidentified
  source 1..556: note = uncultivated organism
MPKQTIYNAGIYVRLSKDDERAGESLSIENQKRILTNYVTEQGWNIVDIYVDDGFSGTNFDRPGVTRLLEDAKTGKINLIIVKDLSRFGRNYIQVGQYIDYIFPTYNIRFIALNDNVDTASSDTMAMDMMPIMNVFNEWHAANTSKKIRAVIESNAKSGKYRTTFAPYGYVKGDDENRLPVVDEPAASVVRRIFEMRSQGISPRHIADTLNAEGVPTASDYMYSKLGKPNPRKTSHFWSAERIRALVNNPTYLGHLVQMRTTTVSYKNHKHIKKDPSEWIVVENTHEPLVSQEVWDKCREIEASVSQGKKTASGFVAPLSGLMFCADCGEKMRLGWNNTTNGSKKNPRKYVRHNFNCDRYNRNGKIACKSLYIKMNDMNAIVLADIRSMAALVVEDENASRQQFLAHKAKLNAHQTESEKKRLRDGKYRLDELQKLIPSIYEDNVLGKIPEDVCVNLLEKYQAEQKALSAEVEELEAKLSAVKQDEDDVDEFIRRLKKYTDVQELTREMCLELIEYITVDEYAADRPRDIHIYYKLLEKPLPHKKYLEVAKNDETS

SEQ ID NO: 3620 - protein, 516 aa, unidentified
  source 1..516: note = uncultivated organism
MIEIRDRIAGPSSALSGIPATIADPELGAISVPSVRTVVVLPATALWLYAPGMRILDVARLSNDTDASTSIERQHDANRHYAAAHEYVIVAPVDDVDISGAVSPFDRPELGPWLNGRSGEWDAIVVHKLDRLTRSLAHLVELLEWCQARGKTIISVSESLDFSTPHGRMFAHLLGVFAQFERERIGERVADSRKKTRANGWWAGGQAVPWGYRAVKVADHYELAVDEFARTVINSIANMIIGGSSIRQAARAHGRDDATLVSQLKNQALRGYVMHDGQPVRGEDGMPVTREAVLDDGTWDALQRALERLSRPDSGVRNEAALLLRVLYWGSQPLYVHRRPGRGDRYRTGPKVDKSASFDATACEAMVESALMSTLGHLPMRRLEITPAVTHTAELAKVDASITDIEAVVTSGEMPPKSAARMLATLEARREALSALESRPEVQRYVETGQSFAQYWEALDAAQRHALLLGNGVHAEVRRGVGNTDTLPEHTTETYDDKTRYTMRVTFTGLATLLGR

SEQ ID NO: 3621 - protein, 528 aa, unidentified
  source 1..528: note = uncultivated organism
MKLIYARQSIEKKDSISIESQIEKCIAFCTYNGWDYKIFKDAGYSGKDLNRPGFIEMMNEIEAGNGDMVICYRLDRISRSIADFSNLIVEFEKYNVKFVSVTENFDTSTPLGRAMVNIIMTFAQLERETIADRITDNYYSRTKLGRWGGGPAPYGYKLKKVSGPDGKRFTILEPDEYEAEIVRNIYNWYLEPDGSVGKIVNKLNELQIPSRGGSAGAAVWTSRVVSEILWRPLYAPNDIKIYNYFKNLNANIINNITEFDGLKSVNLYGKTEKNAGKHKRCRSIDKQYFIVSPHKPIVDSNTWLLVQAKKNEKKRQPARKGTGTTSVFTGLMKCGECGYSVSTVCDGKNYRGYICSTKKNRAKDLCSLPVISQRYADPIIFSDIAQHYSSDEVKQKIISAKQEYKASPSYLAKKNAIEMEIARIDAEIDNLLNSIAEGNTTVNKYINKKIETLDVHKSQLLSELNELELEERSSRNNIDGLEEIIDQISSLEETLNSGDFNKVKNMCRVLVKSITFHKDKSIEIEYYI

SEQ ID NO: 3622 - protein, 523 aa, unidentified
  source 1..523: note = uncultivated organism
MLKVGIYCRLSIEDKDKLKNDDSQSIQNQKSMLRDYCKERDWEIYDIYCDDGYSGIDRSRPDFNRLLRDCAAGKINIVLCKDQSRFSRDTIVIEQYINDKFLEWGIRFIGVADNADTDSEIYGTMRLFTSAYNEMYVKDISSKIRRTLAYKREQGQFIGSFAPYGYSIDPDDKHHLVVDEETAPVVRRIFDMYVSGEGYRGIVQKLNNDGVVSPAEYKRQKGSKYVNSNADSSNSKGLWTQSTVAAILRNEMYTGTLVQGKSHHISYKNKKRKKVDQADWVRIPDTHEAIIDSDTWSQTQERLNSHARVGKRSQELSPLSGKVKCAVCGRPMKRNVYYNKAKTIKYYGLQCATYKTGAMNCQNRSSISGLVLEQKILGELNTIVEQYCQADELQLIDIHSEHLKELEKKLSFLTERQYSAKDRLVKMYKDKLDGILSDQDYALFRNSLCDEEQEITERIEEVDYQIAKCRERIKNTEGQRAVIEKYTHFNKLDRMIADEFIDYIEIGMTDENGIREIHIHWKL

SEQ ID NO: 3623 - protein, 555 aa, unidentified
  source 1..555: note = uncultivated organism
MSGKTVRRCAIYTRKSTDDGLDQAFNSLHAQREACSAFIASQAGLGWKELPEEYDDGGISGGTMDRPALARLLAEIRAGRVNVVVVYKIDRLTRSLADFARMVELFETHEVAFVSVTQQFNTTSSMGRLTLNVLLSFAQFEREVTAERIRDKIAASRRKGLWMGGSVPYGYKAIDKKLVPCEPHAPIVRHIFERYIDLKSVRALAAELQTAPPAGFDRPVHKGWLYHLLANPVYIGLVRHKRRTFDGMHDAIIDQELFTQAQQVRTEQRQTTLARARQQRTHLLTGLLFDETGDRLTPTHSTKARKRSGYYISARLGTQRKGDADPGGWRLPRKELEAAVEEELRRVLRTDDVLRAGLSVSGTTKEVADLLYAARRLARAYDAMPFGERRTLIAAAIPSITITPGTLRFTINPRALVACLLDQSPALSEATETDLHHTERAFRLRRRGVETKVVLTGDHPQKRVPEPSLVALILRAHSYLNAITKPSRPTLAQVAIDHEVPASEVSRILPLAFLDPMITKAILDGSQPPTLTVDALTRLTDLPLAWSQQRKALGM

SEQ ID NO: 3624 - protein, 531 aa, unidentified
  source 1..531: note = uncultivated organism
MPEARKQARCAIYTRKSTEHNLDLEFNSLDAQREACEAYIKSQAHEGWRLAPGQFDDGGISGGSLDRPALQRLISEIAAGKVDIVVVYKVDRLTRSLTDFAKLVDLFERNGVSFVSITQSFNTTTSMGRLTLNVLLSFAQFEREVIGERVRDKIAASKKKGLWMGGPVPLGYVAKDKKLVIEPAEAETVRLIFQRYLELGSILALAEDLNQRGIVTKERNYSSDRAVGGIRFGTGPLAHLLKNRMYIGEIVHRNEVHAGEHQPILSRELFDAVQAKLASNAVDRALRLKRSPSLLAGLIYDDQGNKMSPSHTNKRGVRYRYYVSQGLLQRKGEVGGVKRVSAPDIEGIVLGTLRAKAEASDTDNDQTVVEQHLEKVVVKPAAIEVYLRNTEDEIEVSHRSGPIIALWAPPSLIAEKGIQAGDKTRSSIDGEAREALLTAIAKSRAWVEDVMHGHVKTIAEIANREDKSERYIRMLMSLAFVSPSFLGAIIEGRPLMPKIATLLQSLPSSWKEQANAFAPSLARSAVFAKRP

SEQ ID NO: 3625 - protein, 580 aa, unidentified
  source 1..580: note = uncultivated organism
MIKRNQRKPSVGPSELQRPRKVAMYIRVSTEYQVDKDSLPMQRKDLVAYADLILGIQEYEIFEDAGYSGKNTDRPAFQEMMARIRKHEFSHVLVWKIDRISRNLLDFAEMYKEFQINHVTFVSKNEQFDTSTAIGEAMLKIILVFAELERNMTSERVTATMISRASNGLWNGGRIPFGYSYDSEKREFSIVPEEAEICCKLRDRFLDRRSLVDTARYLNEHGFHTRSGIEWSPTAVWVIVSSPFYAGSYRYNRYKGADRRIENPEDEWVIIHGHHPAIFTQEEHETMLATLNRNARHTNRIGEYHISKNAHVFSGICYCGKCGSRMSSTPGRLHADGFRPSNYSCPRRRNTKDCDNPTVSDMVVGEFVINYILNMLAAKRSFSSIQDPEDLQRRLLFGSTFSGIDHIEQTGLNEYFNLLSRYGSDDSYVFAVKKPRKKKAEVDPQIRELRADKEKQERALQRLQDLYLYSDNALSEKDFILRKAEIMSRLDDISKQLGMLDRGPDRSLSDEDFMKQASHLLISRYLKDRTYIYYKSLAKDVSPEILKEYMSTIIDSLTVADGKIKSITFANGLTHRFIWK

SEQ ID NO: 3626 - protein, 546 aa, unidentified
  source 1..546: note = uncultivated organism
MDKEITSNQKHLVCAIYTRKSSSEGLDQEFSSLDNQRESAENYIKSQKNEGWTASSELYDDGGYTGANIERPALQRLLSDIKAERINCVVVYKVDRLSRSLLDFSQLLEFFDKHNVVFVSITQHFNTNTSMGRLTLNILLSFAQFEREIISERTKDKLSAARKRGQWLGGHPPFGYMRNPLEKRKIIINPDEVDMVRKVYSLYLEKNSALEVAQTINATGYRTLSWPTKTGRTFGNKKFSIVTVVRMLKNHTYIGKVNYQGKIYDGLQPAIIDEETFDKVQDRMAHHRLDRKPYKNKDCSGLLSKVLKCKACGSAMVHTYTLKKKRHKYRYYLCSNAQKRGYAECPVRYVNAQQIEDRIVQILRGEVKNLKNSPHKSESEAVLSPIWDTLFFEEKRRIIQKLIKIVDYDSTTKKIGMILDGSTERMEFDSNIIKIYARERDRKKRQLSKEPPARRLLILAHQLNNHLSEGKIKDLNQASAWLGLDQSRLSHILGLLHLSPSIQTEIIKGNSPILDSIPEYKLRALSSEADWSIQAAKWQEIKSSLS

SEQ ID NO: 3627 - protein, 579 aa, unidentified
  source 1..579: note = uncultivated organism
MKKRSASNSALSTASAAPLVRCAIYTRVSTDDQARGEYNSLESQRDICEHAIAVHLHEGWKTTLYLDDPGYSGKNLERPGMQALIQEVKAGQVDVVVAYKLDRITRYLPDFYEFWKILNEHKVNFVSATQAFDTSTPMGMLMLNMLLSFGQFEREMIAERVSHKIAERAKKGLWNGGWAPLGYAHDPVTKQILPDPAEAPIARRVFELSKELRSAAKVAGALNAEGLRTPERTVKSRRGNEMVVGGKRFIPNKIKVIVTNPLYKGVVHHNGEDYPGEHEPLVSEKLWQEANDALSGKGKKRQQTVLDRNTHQSLLKGIIRCGECGHRLTPKPGGKKDRDGNPYLYYTCNNVSKDGKAATCSLRNVPARAIDDFVIQILGEIGRRPEIIKAAVASSNEEKSKSIRPLKTKLGELQRQHADMGEELQRYLAMVRKTDSAHFGRETLAAAEDLAKQKHELEREIEKVKIDIAYRERAVTDEHLVAKNLLDFEKTITGVSFDEQCDLLRLLLRQVRVNRLDPKKEPIPGNPHTWSTQIRTQWFAVNLDLYASDLISRSCANPAASSHSDHDGGEGGIRTLGSC

SEQ ID NO: 3628 - protein, 504 aa, unidentified
  source 1..504: note = uncultivated organism
MFFVYKGGLNVTTKKIVALYVRVSLDIQVDGYSIEEQLDRLHKYAESKDWTIYKEYIDPGYSGANIDRPAMQQLLNDVKNKKINTVLVYKLDRLSRSQKDTLYLIEEEFLPNGVDFVSMSENFDTSTPFGKAMVGILSVFAQLEREQIKERMEMGRIGRAKAGKWRGGSNPPIGYDFIDGLLVINDYEALQIKKIYELFLQGETLNGIARFMNNHYTNRYSNYNDPHTISKILRNSLYIGKINYKGEEYKGVHEAIIDSDTFYKAQLRYKEISATDEHHYRSPYKGKHLLTGLLFCGNCGARYFTHTARSTKKDKDGKQTKLGEKYSYYKCYTRDGNSKMKKADFCDNPIYKVEYLDSIVLDEIKKLKLDPDYLKSLIENSQKDNILSDEIRILEDKAEAVKKKIDKLLDLYTVGNIPIEDIGERLRPAYEEQDKINRQLQNLKNNTSNNSRLNYKETADILHHIGDNLDDLDLSGKREIVQSLISRIEIGHEKDTIKIYWRFT

SEQ ID NO: 3629 - protein, 539 aa, unidentified
  source 1..539: note = uncultivated organism
MENNTAQEKKLLRCAIYTRVSTSDNLEKEFTSLDSQRESGESYIASQKSEGWTVLPDRYDDAGYTGANTERPALQSLISNIKEKKIDCIVVYKVDRLSRSLLDFSQLLEFFDQNNVTFVSVTQHFNTNTSMGRLTLNILLSFAQFEREIISERTRDKMGAAKRKGKWIGGCVPLGYDLDKVNHKLLVNLEEAKIVCELFDLYLKKCSLLEVAKIANSNGYKTKAHKLSEGRQRGGIKFLNTSIERIIKNAYYIGKVKYHDKLYPGEHKPIISDDIFQKAQQILSENRPNRVKKSVKNIGLLSGILHCKSCNSSMYNTYSFKNSKKKKYKYNYYLCLNAHKRGYNECPTRLLSGHLLEAMVMRYLRTLSKEPKINYETWETLILEEKILILKSIVKQVYYDGNKEILGIILQNNDKCYEIKVEKKELKRVNEPPRETKIKVEPQLRKNLLLAHQIQEVLNEGRAKNLKEISGWLNMSPQRINQIASLLLLSPKIQEEIILFKAGLLSSLPEYKLRQVINEIDWENQYKIWQELLKNTTKK

SEQ ID NO: 3630 - protein, 573 aa, unidentified
  source 1..573: note = uncultivated organism
MVGSTVLRPETVGLTMSKPRIRCAIYTRKSSDEGLDQDFNSLDAQHEACAAYIASQRHEGWVAGKTRYDDGGISGGTLDRPDLQRLLANIDAGLVQLVVVYKIDRLTRSLADFAKLVERFDAAGCSFVSVTQAFNTASSMGRLTLNVLLSFAQFEREVTAERIRDKIAASKKKGLWMGGVPPLGYDPHPDPKTRGLVVNVAEAETVREIFGLYDDLGCLNAVMHRANEMGLRSKLHRFKSGRVQGGNPFSRGQIYALLRNPIYIGKIRHKAKLWDGQHDAIIGIEHWDRVQDKLQSASARPRSKAGSQNNRTRNETAPLTGKLRDETGDRLTPTHTRRHGRHIRYYISNRLISGGTDPSGWRLPAGQLEQAVFDIIAKHIGNLARGHRILVNADLQTGDAIRNKASGLAMRLSVGASDLIRNLVSEGSIGNGRITLILEATELANELNLKPDEIDVTALQIEAPFALRRRGVEGKIVVGDREPKPDQTLLRSLARAHAWTADLRNGKPLSEIAEATSHSESYIRTRAQIAFLSPAIQKAIFEGRQPPDLTLERIVRKPVPLDWDSQAKLYGFD

SEQ ID NO: 3631 - protein, 545 aa, unidentified
  source 1..545: note = uncultivated organism
MTGRQGWRSPAPAAFDLKAYRAPAGYVRVSTDEQAEEGTSIGSQIRQIQQYASTFGVELPPERIYIDDGWSGRDLNRPAMARLRADVKAGRVDCVLVAKLDRLSRNLRDTVNLCLGEWQDEAAEGRRAVLKSISEPFDTFTDFGRMVFGLLAMFAEFERRRIAERTWSGKAARAEEGRNAGHRAPYGYRLVPAPDGRGSLFALVPEEADLIRAICRLYLSGAGDRQIALRLNEEGHRFRGGRLWQAQQVARVLTNPMIAGIYAYGRTAASGGARPRRVPEEQWLCTGPEGGPPAVISPQVFRQIQAVRSERRRHRQTGRGTALLTGLLRCGRCGSACGVKHAGPQGRYRYYRCLKEKQTGPAACSAPQVRADELEAQVLAAAAALLQSEPERLHEHLQEAANRRCAGLRRSLAEAQDRLAELVALRRSYFTWLEAGRLAPEAVQERLNELAREEAALRAQTAALKRSLDGLAKRLQGTPGQKLSLPPASGTWAALSHQERRQLLGLLIRRLEVDGRRLRIHWRAAPKTIEFLPPEGQELAVRFSD

SEQ ID NO: 3632 - protein, 546 aa, unidentified
  source 1..546: note = uncultivated organism
MNQWRLLAMIRKSSKVRAVAYCRFSSSNQREESIDAQLRAIYKFMGEHDYTPVGDYIDMALTGTNTDRPNFQRMIEDAKKGLFDVVIVHKMDRFSRNVRDTLNIESELAQYGVKVISVIEQFADTPEGQLQQIIQLGVGQYYSQNLAREVMKGLKENAYRCLHNGGLPPLGYDVDPITKQYIINEKEAESIRIIFKKFLEGWSYRELAEYLNVLGYRTKIGNKFSANSSFYDILVNSKYKGEYVFGRSLSKPKQPGMKRSHRKNKDESEIIRVPNGLPAIVDEGTFEQVQKLLASRQRSKGASKAKEVYLVSGLIECGECGSAYHGSARIGGRNKQKYVSYRCSKRKKIENPCKCKEINRTLLDNFIVQQLFTTILNPQHLERLHQKVNEKLKEKISEMDHDLPKLEKQLAEVNQKASNLVQAIAAGGLGSIDTITAELQRLEQQKIVLTNEIQNHQVKQSEVNLTLDQMKDVLEEAKEYVLKNNDEMMKYILSRFIHKIIINNDSLEVAYNLGAFFVDFKKVVLIETKVYSKKVIYAYSPLKEVS

SEQ ID NO: 3633 - protein, 549 aa, unidentified
  source 1..549: note = uncultivated organism
MKTSALYARVSTSGQEKEQTINSQIAEIVSKAKGDGSAIEQGLQYVDDGWSGELLARPALDNLRDAVKNKSFDTLYLYDLGRLSRNFLNQLILKKELTEAGIKIVSLHDINGENPESLLAQNVMGLFHDYERIKIAERFRRGKLYKAKSGILFGWQAPYGYEYIKGKEKGMGNFKIVPHEVEILKMIFQWIGIEGLTIRQVIKRLYEQKIYPRKSKNKYWSTSTLSRRLRDETYIGVTHYNKSKSIVPENPTKNEKYKKIKKSSRHNNPKDQWFAIEVEPIIEKELFTAVQKQLILNDSFAMRNKKNNYLLSGLAYCSCGRKRAGEGNSKTHNLYYRCTDRVLRYPLPKECHNKGVNATVLDDRVWSTIVKLLSNKNLIKKHFGIWKEKQKQPTSNTDFLKTELDKQLDAFETQEKRYLEAYGEGAISLSQYKEQVQAIQNKKTTILTKLQRVSTDFSTPSAPVILPDLDEYCDKMKIILTNRDFEKKLPIVRKVIQKVTTDGTIATIQGYIPLQIPVENTQENVKFKSEYRYRRSPQRRKINPIQRPP

SEQ ID NO: 3634 - protein, 556 aa, unidentified
  source 1..556: note = uncultivated organism
MHYILIKYIVSQTTGTCTGVIFVHFLGSDTMIFASYGRKSIYSDHSDSVKNQHRMNQDYADCHFPGKVDSFLLYEDEGMTGANTNRPDLKRLMKDIESGIINILIVYQLDRLSRDVRDFSNIYAFLEEHHVQFVSVKENIDTSTPIGKAMMYVSVVFAQMERETIANRVYDNMVGLSDDGWWVGGNPPSPYYRKRVTTDDGKEHVIIVPNPDEVRQLQDMYRLFLDGRFSLSGLERYLKQRKIRTKNGKFFSINQLHKLLTMPFCVRATPEIYDFYKDKGCIMSERSPREKWDGSVGVMIYGRTTERNKKHVLQPPEKWRVCLGRHEPCMEPDVWLAAQRQFTHNLIDKTPRHPAPLLKGVLRCSCGCLMGVSRKARVDGSMTVWYYCPKRSRQGPEYCNMSQIHANLLDDKVLEIFRNIKKDPASISDYLQSEPSGRDIKADEAALQKKILSVNAKIENLTATLADAQDGPAAKYILQAIEKYDKEIHKLNRQIAELQAIERSDKDTQKSIQEKQRQIIDFMDNFDSFSANEKNAIAKEVIKKCTWDGHTLFVLL

SEQ ID NO: 3635 - protein, 527 aa, unidentified
  source 1..527: note = uncultivated organism
MTAKPNKTVRCAIYTRVSTDQGLEQDFNSLDAQYDASQAYIRSQVHAGWTLIRTKYDDGGFSGGNTDRPALQRLLADVRAGKIDVIVVYKVDRLTRSLADFAKLVGLFDKHGISFVSVTQQFNTITSMGRLTLNVLLSFAQFEREVTSERIRDKIAASKRKGLWVGGMAPLGYDTRERKITTNKTEVETVRTIFRSYLKLGSLNPLMADLRKRGIITKKRLLKSGKTVGGIPFTRGPLAHLLRNRFYIGEVVFKGETLSGEQAAIIDRKLFDMVQAKLDGQLRSYKKSRTSSEAILAGRLFDDRGQRMTPTHTRKGSTKYRYYVSWALVQGQSEQAGRISRVPASEIEDLVMRSVRDQLGSSADVDDKALVQSHITRVDLRPDRLVIEFAQMKGAKAKRRPQRLEVPWRKTSSTRRREILLPETPSSHPARPMRSENRALLIASIAKGRRWLNALMAEPAITVKAIAQREGCSLRKVNMTISLAFLAPNLVKAAIEGRLPYGMGVTRLCELPPEWLRQYRVLGLTPP

SEQ ID NO: 3636 - protein, 563 aa, unidentified
  source 1..563: note = uncultivated organism
MTRAAIYARISRDKLGDALGVARQEADCRKLCLDRGWEVTQPPYIDNDVSAYDPTKTRKEYERLLRDIAAGRVDAVVVWDLDRLHRQPRELEEFVSACDHGGVTQLVTVSGTVDLGSGDGMLVARVKGAVAAEEVRKTTARIRRKKLELAERGLPSGGGGRPFGYDFDAMTVMPVEAAMIRAAADKVLHGATLLSIRNEWRHSGVPPVGGGTWATKSVRNTLIRPRYAGLREHRGVVLGEAQWPAIVDRVVWEQVQAILTNPTRRKAPTNAKYPLKGLLVCGECGHPMPAMPRGQVRMYGCRKSLGGTRCGHVQVTADRIEDYVIPLLKQLADTPKVRDLLEAENTATADELRALLLEKGRQEALLIKLEDAFGDGTLSKEAFSRQRRRIEARIEPLEQQINTIRGNSALGRLGPELNDAWPRMTVDEQQSVMRMLVSHINVSRQLKAGNKFDPERVSFVWRSGALAQAVGLGDNGELDLARLDDVWRTDAVKRILKQNTDVFPDVLVASAEATGVDMGTYAPTGLFKRGTEIVGVTLSSDNADESDLIMIELSEIETATNVT

SEQ ID NO: 3637 - protein, 562 aa, unidentified
  source 1..562: note = uncultivated organism
MEPAKASSRRCAIYTRKSSEEGLEQDFNSLHAQREACEAFIKSQAGEGWRLVKTAYDDGGLSGGTMERPALQSVLGDINQGLIDVVVVYKVDRLTRSLADFAKMVEVFDAHGVSFVAVTQQFNTTTSMGRLTLNVLLSFAQFEREVTGERIRDKIAASKRKGMWMGGFVPLGYDVCDRRIVINEGEAETVRYIFRQYLELGCVRLLKEDLDRRGVVSKRRTSKTGIESGGHSFSRGALYALLLNPIYVGEIRHKNLRHPGQHQAILERDVWERTRRQLEAHRVRAKSHDAGREKSPLIGRLVDENGERLTPSHARKGERKYRYYVSRNFPAQGLAPSRVAWRLPARELEDRVAAAVREMLGDESAVLEAAQKTDINSSQVDRVLHAARTWSHRVQSEAEQASAIAALVDRVELKSDGIRVSIKLPVAGAEKSRAQLPDQVAIARTFSMNLKRRGVELRLIVGDHNRSAAVVDLPLLKAVARAHRWFDELSTGKARSLAAIATREGLAVRYVGRLIRLAFLAPDIVESIVEGRQPTTLTAEALTRRIELPLSWCSQRTALNVE

SEQ ID NO: 3638 - protein, 557 aa, unidentified
  source 1..557: note = uncultivated organism
MSAKRQIRCAIYTRKSTEEGLEQDFNSLDAQREACEAYVASQKAEGWVVLGRRYDDGGYSGGMLERPALRRLLNDIEDAAIDVVVVYKIDRLSRSLLDFTRLVEVFDRKSVTFVSVTQSFNTTTSMGRLTLNVLLSFAQFEREVTGERIRDKFAASKKKGIWMGGNPPLGYDVDTRKLVVNQAEAKTVRLIFRRYLELGCVRLLCADLMAQGVVSKHRAFGNGEKRGGKPMGRSAVYCILNNRAYIGETTHKGASYPGEHDAIVPRDLFDAVQQRLADQRPSLSSKARLQQDAPLAGLLFDETGTAMFPTYSIKQGGLRYRYYASRPTLKGERSKAAICRIPAPPFETFMARLLERLALSRGAHERDIQAVVQRIELQPNGIIVQFHRAAALALWRAANPDGAIGRDREVIASCRAGLANGESLSDDGERLILSLPVRARFRGGRAEIFHPAGATQPTARSDMALVKALARAHRWRQMLLDGEVASVEALARRVKLDRGHVGLTLNLAFLSPAITRAIIRGEQPPGLRLTHLLSADIPLCWREQEAAIVRAAGVTGR

SEQ ID NO: 3639 - protein, 572 aa, unidentified
  source 1..572: note = uncultivated organism
MTVNVRSRVRCAIYTRKSSEEGLEQSFNSLQAQREACDAYIASQRHEGWHAITTPYDDGGFSGGNMNRPALKQLLADIAAGLIDTLVVYKVDRLTRSLTDFAKIIEVFDEKGVSFVSVTQQFNTTTSMGRLTLNVLLSFAQFEREVTGERIRDKIAASKKKGMWMGGVVPLGYGLKGRQLVVNSKEAKIVQEIFAQYLSLASVAELKQYLYRKRIRTKVRTSASGNVFGGKPYSRGGLYKLLKNEVYIGRIAHRGQSYAGQHPAIIETEIWEKVSALLVNNNQGNRARGRKVASSTLVGILFNQEGKRYTPTHAVKDGRRYRYYTSQAVIRKQRKPSYLDRIPAQELERLVYTRIQALLASPQELSSACAESTVAQNEFNRLLEAAQQLAGKWPDLWSEQLAELVRRIVLRIVVRDSEAEIEIDVEALAVRLLGDDDESPAIENRRPHPGARGFRLACPFCPAHRRGESRLVLPGSRLGTERPNHSIVRAIARSLQWRERIVAGDIHSKEELAAEAGLNASYVGRILRIAALSPDLVDALTRLGDFSDYPLTGLVNRLPLDWRRQKSALLNP

SEQ ID NO: 3640 - protein, 527 aa, unidentified
  source 1..527: note = uncultivated organism
MTAVPANPMRTVVVMAVNAIKPVRCAIYTRKSTEHGLELEFNSLDAQRDACEAYIKSQASQGWRALPQHYDDPAYSGGNLDRPALQQLLQVIDAGRIDVIVVYKIDRLTRSLADFAKLVEAFDAKSISFVAVTQQFNTTTSMGRLTLNVLLSFAQFERELSSERVRDKVAASRRKGKWTGGTVPLGYDAKDKKLVINKAEAETVRYIFKRYLELKSFGKLVEDLDNKSIVTKRRDTKVRKFNGGIPFTYGPLAYFLKNRIYVGETGHKEKWFPGEHAAIVDRKIFDQVQQLLASQPAGRKARRTANEALLMGKLYDNRGNRMSPSFSAKNGVRYRFYVSSALLRGRKADVGSVGRVPAAEIESTVIAALKTHQQQGQPDSAPASIGDVERVVIARDHLLITTAGTADGDGTNQEFRIAWSTKVKDAAAAMEDNGVSEVARNESLIQSIVRAHAWVNCLRDGAYDSIEQLAEADRLHPKVVRQALRLAFLSPEVTSAILERGQPTGLSLAQIPKLLPLPWSDQRRLLD

SEQ ID NO: 3641 - protein, 542 aa, unidentified
  source 1..542: note = uncultivated organism
MGPEVMKIQRVDVPAAVRLVEWEARPAVVRCAVYTRVSTVDQARGDFSSVENQRETARKIIQARSADGWQALASSYDDGGFSGGSMERPALKQLLRDIEAGLIDCVVVYKLDRLSRNLRELLWILDFFKKHGVAFVSVSESFDTSSAMGQAMLGMIGVFAELERGMISERTRDKMVAARKRGRFTGGPPPLGYDVHPDGGKLVPNPAEAERVRRIFELYLQRETLTETLAALSERGWKTKSWQTRQGHLRQGKPFQKGTLNRLLHNPVYIGKVRHDGAIYEGEHEAILPQKLWERVQRKLAENASHGGAGVKNKYGYLLRGLLRCSACDAAMTPSTTKRSNKVYRYYVCTRAQRHGWKSCPTKSLPAGEIERIIVERIRDIGKDPELVAQTVRAAERQRREELKRLRADIRSTQRELQHLKDQQEKLLPAVAKGGTPAQRAVEKIEELSKEAEAADARLVDLQDQLDTLQAQSIEPEDLARALADFDGIWEVLLPQERRRVLHLLIQQIDYNGETEELGVTFQPAGIRTLVTRLSEAEGALA

SEQ ID NO: 3642 - protein, 563 aa, unidentified
  source 1..563: note = uncultivated organism
MSNRIRCAIYTRKSSEDGLEQDFNSLDAQREACEAFIQSQRSLGWTPLPKRYDDGGLSGGTMDRPALQALLVDIDRGKVDLIVVYKVDRLTRSLTDFARIVDTIEARKVSFVSVTQQFNTTTSMGRLTLNVLLSFAQFEREVTAERIRDKIAASKKKGMWMGGLAPLGYDSREKQLFINEREAKTVRTLFRLYLEFGSVRRLKEEADRRGLITKRRKDSNGNLTGGKPFSRGHLYQLLHNPIYIGEIAHKGQTYPGQHKGIVARNTWNAVQRRLDGNSTARNSANNVTQTNLLTGLIYDETGDRLCPTYAIKSNRRYRYYISKRLVHEPNKKNGGWRIPSKELERFVERAVCGFLKDDVHLIDAIRLPTVSTDLIRRALENASELADRISGDDLDAKRRSLRALLRRVTVGKSAIKVEVSRWGLRGSLIGPCDGGANVDGEIISLDAPIEIRRKGIERKIILSSPSDMPTPDDRLIALVAQSRPWFEQMSMGQVSSVREIARKYKLDQGHVSRFLPLAFLAPDIIESILAGNQPSELTAEQFKQIGGIPYSWEEQRQVLGFTS

SEQ ID NO: 3643 - protein, 543 aa, unidentified
  source 1..543: note = uncultivated organism
MTSPVRVALYLRVSTKRQAEHDLSIPDQRKQLEAYCLSRGWEIAKEYVEPGASGTTDNRPAFQDMIADARAKPRPFDVVLVHSFSRLARDAYQLEYYVRDLRKRGVRLASVTQETGDDPSGELVRKIFAMFDEYQSQENAKHTLRAMKENARQGYWNGSAPPYGYRTVAAEKRGDKIKRKLEPDAIEAEIVRKVFRLYLNGDDSTVPLGVKAIAMHLNAQGYRQRGRRFSNASVYRILRDTAYIGTAYFNKRDSRAKTDKPESEWIPMPCPAIVDKDTFAAVQKLLAERNPKRTPGRATNNPILLSGLVKCAACGGTMGLRTGKSGKYRYYACIRQAKEGKDGCTGCSVPMGKLDDMVTATLTDRVLEPSHLTTLLKELNIEADSAKGKSKGELQSLEARFKETDLRVSRLFDALENGTVTDSDIFRNRLTQAQGERQEALRLLTEAQRRATEAQTMLSPKKIAAFSKGIADLLRTGDIQFRKAFLRTFVDKVELLDGEVRISGSKDVIAKALETGLPPSGTMVPTLVQEWRGVCASTGERSR

SEQ ID NO: 3644 - protein, 578 aa, unidentified
  source 1..578: note = uncultivated organism
MKKVQLGRSRMAEEMARPSWGITAKEKATADHISQKSHDKNEGKVAMIAAVVKEKEKLRVAAYARVSTDLDSQETSIENQREHYLHYINGHEDWELAGIYEESGVSGTKAETRPELMKLMKDCRAGQIDLVITKSISRFARNTSECIAMVRELTDIGVTLIFEKENIDTSKMESEFLLTLLAAFAESESQSISTNQKWSIRRRFQSGTYKGGKVPYGYRRGKKGYVIHSKEAEIVKRIFNMLCEGKGTLVIARELNEERIPTWTESYKGLEAQGKWRSNSIIAIARNEFYTGDSLYQKTFMENYKKCVNTGQLDQYLNEADHPAIIDHATFEQANAMIKSHGERLGREKAVKDTKRYVFSGKLICGLCGGHMRRGKDARAFYACENHIHKRTVMVEGTEAPCPMLPVFEQDVKNAFATALNRLAADPSIFAIPDDGEAERELLEAQLQSVKRRQSVLHDRALADRYTAQLREKKATLDSEEKTILDALAKLEKKNPVDDLRRTVVKRGVRESFTESDEKLFTSFVDHAVLWSKEKAQFHFTCGLVAEEDMHVKKVGRSYTEVPVRTEFDEQKGAFTWQ

SEQ ID NO: 3645 - protein, 515 aa, unidentified
  source 1..515: note = uncultivated organism
MPNEYCIYLRKSRADLEAEARGETDVLITHRKTLLAFAAQHGYTIGAIYEEVVSGDTIAERPQMRRLLQEVEAGLWRGVIVMEIERLARGDSIDQGIITRAFKYANTYIITPSKVFDPNNYYDEEHLEFDLFMSRREYKMINRRLQAGRYAAVQDGRWLGGKAPFGYDSKKLRGEKGYALVPNADAEIVRSIFRIYTENPKMGTTRICAKLNSLGYRSATGKEFNVGIVKDILQNPVYAGFVTWGKRKTVKITKNGQIENKYPRPKEYPIFKGRHDPIISEEIWNAAQAKLAARSFHPVPKSKELQNPLSGLLICGKCGHKMQARPQAGGRYLFCYHYCGMMSSRMEEVEQALITALHQWLAEYSVSSKAPSSATSDEREQLEAALQKLNDELTSIESQRARAFELVETGVYTPELFKERQAILSDRRDSIVAAASETRHMLDRLLKEEQYRESLIPKVSNVIESYQHTSSAQEKNDMLRTIVSKIVYQKSTKVQSTEGSDLTLTIYPIIPDIPD

SEQ ID NO: 3646 - protein, 537 aa, unidentified
  source 1..537: note = uncultivated organism
MKRKVAIYARVSTEHEAQLSALDNQVQYYDNILEQHPDWILYDRYIDEGITGTSTKKRKNFMRMMEDARAKRFDLIVTREVSRFARNTVDTLQETRKLKKMGVEVFFTEDNIWTFNDEDGELKLTIMATLAQNESKKTSQRVKSGLRIAFQNGIFMGSGNILGYDKVDKNTMVINNEQAEIVKYIYNEYLNGIGSTTIANNLKKLGYKTSTGLDRWSAAYVTRILRNPFYCGTIIYNKQYVPDYLEQKSKTNHGEVEKTVVEGTHEPIISKEDFKKVQIILDSHSKPVKEGQRTAIGVPKNIWSKKLICECGSTFNRKKDHDNKYGKSYCYGCYNKKTHPKNGVYDYDYKFCNVKDVQEWKLEMMAKTIFTSLVEDKENREELINTLMNEIKIDNNEEKTIKKEISRLNKLIAEENVKLDRLINLYLDKVTDVSYYETFQKKLTNKIEGYKLQIGELEKRLENLDPPEVKMEQAKQSIRKLLDINYNGIDEKLIEEVVEKIIVHKNWFEWKLNFLNETIKLEFVGKRKNDCMLVEHK

SEQ ID NO: 3647 - protein, 507 aa, unidentified
  source 1..507: note = uncultivated organism
MRAVIVRRVSTEKEVQENSLQNQKDYFQDYCLAKGWDVVDIYTESESGTKFNRKEMNRLIADAKAKKFDIILTKELSRLARNQRLALEIKEIIQKYDIHLVTLDGAIDTTTGNTQMFGLFAWIYEQEAQRTSERIKMAFQIKAKKGQFKGSIPPYGYRVSEGTLFLKDDGTVETVQRIFQRYMEGKGFDAIARELYEDGVPTPSMVAGKKKQSELWNGSSVRNILENPHYTGDLVQGRQTTASVTSYERKEKEKSEYIVVKGKHEAIVSHELFDNVQQLIESNRRQAVDNPEVKSRPHQNVNLFTGVIFCEDCNSGFHYQKNCKGYICGRSHKHGDKACEKHRVREKELVAIIQEDLQKLAHLFNDQACYNEVKSKLVKSKARLERELKSVTAKIEDTKRLKSKALSKYLDDAISKSDYDDYVAQQDEGLTKLVQEQERLNASLVEVMDSKKLDEVKSAVAQALSFSEINREIINRFIEKIVVTKSIQVKLYYRFVGTSKILSELLG

SEQ ID NO: 3648 - protein, 558 aa, unidentified
  source 1..558: note = uncultivated organism
MRCAIYTRVSTDEQARSDYSSLDRQRELCASYVDLHREDHWKVTEVYEDGGYSGKDMNRPALQRLLRDFTNGKVDAVVTYKIDRVSRSLKDFYDFWELLQEHKVTFASATQQFDTSTSAGMLMLNILLSFAQYERELTRERTLSKMAGRAERGLWNGGMVPIGFDYCAEGKALTANEREAEIVQFAFERFIETKSPSLVANEANSRGYRTKKRQVVARDGATKEMGGNRFDEDTVKAIIRNPLYKGVIRYGGKLFPGTHSPIVAPETWDRANQYVGQAREDDGTRNRDEHVHLLKGIAKCGVCGTTMTPYPAGKKGKDGQPYLYYACTSVTQDGSASPCPVRSLPAREFETLIKSVLIDLGADRAMLESCVQAANREALIPIKDLEEQQKRHREEVARLTTGIRRIIEIIKSQDDLGPDLRGELKKLSEEKEQLGRLIEKLQMDIDHRRRRVLDVDLIRRNLVEFERLLNLMPAADQKELMQLLLNKVEVRPFDPERDELPDGSSGAFATQVRSKWYRVSVSLQQLPGLGLGKRYSGRSSDYRGKWLPDLDSNQEHRG

SEQ ID NO: 3649 - protein, 527 aa, unidentified
  source 1..527: note = uncultivated organism
MNKKRPVAPSPVPEIRRCAIYTRKSTSAGLDQDFNSLDAQREACEQYISRQACLGWQLIAEKYDDGGFTGANLERPAFARLLQDIEAGKIDVVVVYKVDRLSRSLLDFARVMDRFSRAGAAFVSVTQNFSTADAMGRLTLNMLMSFAEFERSMIAERTRDKIAASRRKGKWTGGIPPLGYSVEKKKLVVNEVEAALVRRVYDLYLDKRSAVAVANALNAEHRSTKHHVASNGNSRGAREWQKNAVLAVLKSPVPAGLISSAGEVYEGEHEAIIERELYDRVQALIAEKGGDRVIRNGRNPEYILTGIVRCARCGQAFTPASNRRATGKVYRYYRCSTRDKLGSAACPSKPLPAMAIEGFVIQRVREALADGKFAAAVAKAAKERLEKERGPLEEERSQLPGQIAAVSTEGKRLVETASNVTGPARRLLDAKLQEVGEQLGRLEARYLEVQRRLALLADTELEAEWVKRCLADFDTVWDTLSPENRMRMVHAVVARVEVDEPSGDIRAFMTDLGADAEEVARAVEVTP

SEQ ID NO: 3650 - protein, 622 aa, unidentified
  source 1..622: note = uncultivated organism
MAIITAIYIRVSTEEQAEKGFSVENQIEKLSHTAEEQGWQHEIFDDRGYSGAKFDRPELQRMLKLVKNKQIERVLVWKVDRLSRKLSHLLNILELLEANNVELISVSENFDIKTPVGKLLLGMLGTVAEFERDSIIQRIKAITNTRKRIKKLPLGNPPYGLVINETKSMLVQDNGPGCELVKKIFNLAGRGMGTTRIAEYLNNNGFKTRREKRFSSAVVGRMLNNITYAGMIEIDGELVRGNIEPIISLDTYMKMQGALQRRKHQIKAPGTKHLLTGLLKCSICGSGLVSSGYYALGKRFYRCARKANEGRSACTLKAFNAKRLEADIEAKLSEIVAKDKNLILQRMIKEEEKYILMAQETKKDIRRLESSIKRDENSVNKYFEMFETDFISQEDLGKRIDLLKKNTKAQRNELFTLKASLLDLNPTEIRKRLEAALNSFQLVFELADEWEQRNLLRIIIDRIDAYNDHLDVFLKSGYCFKIKYEREIKRFTRILRNWEINTLKEIGNKRARAIIMASEGVRPIEIAHVLNVDFNKIITTIRMVNRRGIGVCFNEFRDNQDTPFESFLRQNITTFRYLSFRKIMKKLEDEGFSPSLNQFKNAWYRIVPDDPVGGLKKEKINS

SEQ ID NO: 3651 - protein, 570 aa, unidentified
  source 1..570: note = uncultivated organism
MNNITSETTINPRCAIYTRKSHEEGLEQDFNSLDAQREACEAYITSQKHEGWKMLPDYYDDGGISGATMERPALKQLLADVAAGRVDVIVVYKVDRLTRSLSDFAKIVDVLDKYSVSFVSVTQQFNTTSSMGRLTLNVLLSFAQFEREVTAERIRDKIAASKKKGMWMGGNVPLGYDCIDKKLVVNETEAATVRYIYQRYAELGSVASLRDVLKAAGIVSKIRISKAGRQSGGSIFYRGALYHLLQNRLYLGDIVHKDLNYPGNHQAIVDQDLWEQVQTRLASNRIENQFGKSAKEPSLLAGLIFDDQGIRMTPSHAVKKGKRYRYYVSRSLIIGPRADAPNGRRTPAGEVEQLITKRICQMFQDEALILDTVTAHTDDLAEQKWLIAKIHNLAIEWPRKTPTETRQLLLALIIRIDVHREQVDIQIRPSALIQIATEKNLTPLVTDGPAITLCVDARLKRTGMETKMIIEGLRFKQKPDRSLVRLLIQAERYQNRILKCRDKTVGQLAEDEKVSQSYFTRILRLSYLAPDIIRAILTGTQPPELTAKKLAASSQLPLTWPEQRELLRFI

SEQ ID NO: 3652 - protein, 528 aa, unidentified
  source 1..528: note = uncultivated organism
MESFDFSSLRRVCIYLRKSRRDLELEQSGGEDTLARHRSILLEDARRWGLTIGKIYEEVVTGDTILERPRMTELLREIGAGRWDAVLCMDIDRLGRGGMRDQGVILDTFKWSSTILLTHERVFDLRNELDEEAMEYKAQGARFEYRMIKRRLARGREASAREGKFIGRAPPYGYRRVKLKGERGWTLEIREDQARVVRDIYSWYTGAQGERVGIARIVRRLNDMGISSPGGKDWTNCAVRSVLSNPEYCGFIRHGQRKTVRTFVDGTLRESHPRVPAAEVELYPGRHPAIVTKEQFEAAASFLTGNRSRPGPKQAETANPLAGLVYCARCGRAMIRRPYGGTRPDSLLCPYTSCNTVGSYLAAVEEMILQALRRWLADCPLDASHSAAEEDAALLRTLSDAAGAGRKELEALELQKQRACAFLERGVYFAELFASRMSALNRQTEEISARILSLETEQKDLRRRLDLRQALVPKLTHILDVYPLARTAEEKNRLLKSILQKVVYHKTRRERQKGGSDLTLTLYPRFHR

SEQ ID NO: 3653 - protein, 543 aa, unidentified
  source 1..543: note = uncultivated organism
MKAALYARVSSEKQADKDLSIPAQLKAMRDYAIRREWDIVQEYVDEAESARTADRPKFQEMISSAKQKPPPFNVILVWKLSRFARNREDAVVYKALLRKHGVNVVSINEQIDDSPSGKLLEGMIEAIDEFYSANLSCDTIRGMKENAQRGFLNGSVPPFGYKRAYVQVGPNKKAKLAIDEDAAPVVKRIFRMCLEGHGAKEITKTLNSQGLLTRKGKKWQVNTVCYLLRNETYTGTLIFNRVNKNSVSPIQRPASDTIRVENAHPPIIDRNTFEKAQELIKQRSRQWVHPRTINSNYLLSGFLYCSCGSHMVGCAAKTSTFFYYGCRNRQRHGTDDCVFPLVNKDRLERAVIERLKSRVLTRENLIKLVLMVNEELAEASGQTVELVREKDAQLSDAREKLQKLYSALETGRLDLVDLAPRIKELRARIDELERGKAALVNEGGDPIRADEKEVEAYISDLHDLLSKGAIVEQKSFLRSWIKRITLDGDSGGTIEYTLPIAAVNGNDGSNREVLSISKNGVPNWLKDRTFRIAFRLLSVKSRR

SEQ ID NO: 3654 - protein, 547 aa, unidentified
  source 1..547: note = uncultivated organism
MKNNATKRCAIYTRKSSEEGLDQSFNSLDAQREASEAYIHSQKHEGWVVVKDTFDDGGFSGGNIKRPALLKLIDAIKQKLVDVIVVYKVDRLSRSLADFAKLVELFDEHSVSFVSVTQQFNTSTSMGRLTLNVLLSFAQFEREVTGERIRDKIAASKKKGMWMGGPIPLGYNVKDRLLVINKKEAKTIHYIFNRYIEFKSVRLLKQHLDQSRYKTKQGKHFSRGILYKILHNPLYIGKVRHKDQVFDGQHPAIVELKVWKQTQSILRINHHESINKTHALERSPLAGLLFDDRGHRMTPSHSKKGNKRYRYYVSQALLQHQDQEAGSIARVTAEEVETTVLKSLTEFFSDAQKVLEIIGYEKPKLSLIKMVNKQIKRLLKEENHDFKQHNNLKSVSKIIIKRAELALHIFPEQLALLFGLDPINKDSYIYKKAIEWQHVGKGQTLVINGKSAVVNTSSTQAVQRAIAKAMEWNQGLLDGSIASLREIANKEQVRVSYIRRILRLAYLSPIILSAINNGLNSTDLALEEIREIFPLDWGKQNSKYGTN

SEQ ID NO: 3655 - protein, 571 aa, unidentified
  source 1..571: note = uncultivated organism
MAVKVIKATKQISGMTTGTARTTVEKLKVAAYCRVSTDSDEQETSYEAQCRHYTDFINGNPSWELAGIYADEGISGTSTKHREQFNRMIADCEAGKINMVITKSISRWARNTIDSLKNIRKLKDLGIPVLFEKENINTMDAKGEVLITIMSSLAQQESESISKNVRMGIQYIFQQGKGRLNTAQFLGLEKGEDGRTLVIIPEEAALVRRIFREYLEGYSPNMIANGLMQDEILSPAGKSTWYQSTIDSILRNEKYCGDLLLQKYYVVDVLSHKLAKNEGQLPQYFVENAHEPIIPKEVFYQVQGELQRRSMLKNDPGKFRYGAKDALTGRLVCGKCGRKLKRYTNPDPMMTDWRCRKRAYEKKSMTKEVEAKCDCRNANEREVQAAVVMAFNELPGLRDEMLRTQGALRNGDLKRIDTMIEGNQEQQGRLTERLDALADPNSEEASFLNGELARLEEERMSLMLERAEAAHREVKIRLLLELIDAMKEKHDEGYGIVHEREEDSGEGACYDYDEFFRRTRMELADGVLDEEGRLSGFYDDLVIRYLDTVTVLDDGYEVNFKAGLTVKVNAG

SEQ ID NO: 3656 - protein, 692 aa, unidentified
  source 1..692: note = uncultivated organism
MSTRVNRNGVKSIPAIRCAVYTRKSSEEGLEQEFNSLDAQRESAENFIASQKHVGWVCLPDRYDDGGFTGGNMDRPALKRLLDDIRAGKIDCVVVYKVDRLSRSLLDFARMMGEFERSKVSFVSVTQQFNTTHSMGRLTLNILLSFAQFERELVSERTRDKIALARQRGKYAGGRPVLGYDAVETRLVVNEEEACRVREIFATYLRTGSIGRAVADANARGWTTKRWTTKEGRVMGGVPLAKRILHGMLTNVLYIGKVRHGRNVYTGEQPAIVDEETWAKAQALLNENGRTGGTHVMNKYEAVLKGILRCGACNKPMIHSCTRKENGQCYRYFVCFTAQSSGYHACPSKSLPAEQIERFVLERIRALGRDRNLVATVLEQARQQDRRTGELWDGGRSFIGGGVVAVRNDSGADLERYHALAIDGPLFVPGEDGPEKSFQNRLAFKGITPTDATRPGSFAIAREPIPQGEVGLCVVHGVTPARVLVEDEEHAFAEVAPDETVLMSAGLGSTAILWKEEGVGEKWALVEVGRPRRGRIVAILGEAHEIEGERFRWRYPWTEAAVDGDPGSETFGRYIALEEGLSSKGAGGEEDPARWAINRFESHHSEVPDEEPEGTDGFGGLRSLFVPGQLDPQDPAGYCPRKAAIPLLRPILKGVAVEMFAERDTRGKTVWAFQALNGMELVELDVPVWLYV

SEQ ID NO: 3657 - protein, 510 aa, unidentified
  source 1..510: note = uncultivated organism
MIDSKLKNAGLYIRVSTERQAQEGYSVAAQKENLTNFAKQQNWNIFNIYADEGISGKNIQDRPDVKRLINDIKNKKVDVVVLYKFDRLTRDMSDTESIIKLIQECGIEVYTISGGTVDVSTATGRFLIRMTGAVAQLEREQTVERVKVAFIQKVKEGKSLCSSTPSYGYDRPKHQEIQTINKNEAIIVKRIYKMYIEGKTFTEIAKILNAEGIPTKKKGKVQKRRYKDESYTINSVWQPKTIRLILSNVTYIGGVRYGINYSNGFEEFNGLHKQIISKKIWDDVQERLGKVKKVSRTNHPKDYVYYCGTLVCGICGQRLTTQRTIRIKKDGTKLIHYGYRCMNREKGQCTALGMSHKKVEDVFLSYIDNIEELTEIKNIDEIEQDNEELNNIEYLNKRMSEINNKKKEIMNLFMSNDIDYNQMKYMTVELDNQFDILSKELNEFEKQNQSTKQIDKNLIAKTIKEHWKYLSNKERLEFLTQFVGEIVIVNRDANRINGRPEIIEVKFYDN

SEQ ID NO: 3658 - protein, 521 aa, unidentified
  source 1..521: note = uncultivated organism
MSKPKQSKPDTIRCAIYTRKSSDEGLDQEFNSLDAQRESAEAFIASQKAEGWTCLPERYDDGGFSGGSMERPALDRLIRDIEAGTVDCVVVYKVDRLSRSLMDFSRIMETFDDKGVSFVSVTQQFNTTSSMGRLTLNILLSFAQFEREIIGERIRDKIAAQKRKGKWAGGVPILGYDVDRSGGSPKLVVNAKEAARVRTIFDLYLEKQSLQPVVRELEKRGWTNKRRVTKKGRVIGDKAFDKSTLYAHLKNPLYKGMISHKGELYAGEHQAIIDAEQFDRVQKILSYNGRTGGKEVRNKYGAILRGLLRCKACDRSMTHVFTTSRGKNRKQYRYYRCVGSIKKGACTCPSGSLPAAEIEQLVIDEARAAMTDRALIRQIIGESQGVLDQQIKASEKDLADLRGELKRLHRDLRRAVGEPGDQTGRIAELNDAIASDQRSEKQLQKKLELLRGQQIDPDEAKGMLVDFDEVWGNLIPREQARLLKLLIETVEYDSASQSVSVTFRPSGIKSLATKTEPKEAA

SEQ ID NO: 3659 - protein, 512 aa, unidentified
  source 1..512: note = uncultivated organism
MRQCAIYTRVSTEEQVERYSLEAQKEVLTRWAEVLGYEVAATYTDPGYSGAQEDRPALTRLLADAQEGRFAVVLVYRLDRLARKVRLAYDLIERLEACGVGLMSYSEPNINTTTPIGKVVLGIMAVFAEWERDTFAERSRLGLRKAAQSGKYLGGIVPYGYTIEDGRLSPQPEEAVVVQQIFTWVAERGWSTERVAQELNRLGIPPKYRRDGRGVRGQRTAGVWRGGGVLRLLKNRTYIGEYTYGKRTRKVQPELVKIAVPPIVEPALFEAAQEQLSRNTLFATRNARSVYMLKGLIRCGTCGRAYAGSADYYACVGRVNRQASPIPSMRCTAPHVRRKDLEEAIWRDIRSFLLNPGKALQAFLKGESREENETALLEKRLRSLLDARTRLLDLYLEGGVDKESYFSRLEELDTRIKEVQAALEEARRQVIEERKRQESLSTLEDLARQLRDRIDKLTPEEKQAVARELVEVVTVRPGKGEVQVEVRYRFGQIAPHTGRDSWPQSTKTAQDR

SEQ ID NO: 3660 - protein, 601 aa, unidentified
  source 1..601: note = uncultivated organism
MAKINGFKIGTYIRVSTEEQALNLEGSIKNQDERLKSHVRIKNMESNFGEIVGTYIDRAKSGKDTNRPELQRLLKAIRNKEIDLVLVSELSRISRSMKDFADIWEMMQKCDCGFQSLRENFDTTTAAGEMVLFSVANIAQFERRQVSERVSLSQNARAKRGLYNGGSVPFGYELIKDKPGYLAINEEHAKVVRKAFEAFLKQETLASAARWLNENGYRRSKVMQGGGRHMRLDQFTFDNLHQILRSKTYLGLRNYKEQGEVKEAKAVWEPIIEKRIFNKVQKILDTNKSRKKPHTKTRYPYLITGITYCDKCGDPLSGKSAHGKNKKIPYYEHSWSTKRNSALNKKVFDCGNPRRFPANKLEPLIIQEVQKLISGSKFSKELLIEAKNVHEGNHGVKEMERLKAQFYGYTSQLDALAERLSQLPKKVSANPIFKQMEKLETLKETCEKSIEDAKRLGSSATDKPVGLKSYSKFLDSLKDLFKNGPPEIKSKIIQRLIHRIEVGQKEVKIYYNIDESSLLREPMYLGSRFFLCLDTGKVIEKPNKKGHKEVDPMASEINPTFFESGCSNSLTNGALGENRTPTPLRELDFESGASGNIYSVL

SEQ ID NO: 3661 - protein, 607 aa, unidentified
  source 1..607: note = uncultivated organism
MSNERKVAGIYIRVSTEDQAREGFSLGEQKEKLLQLCAFREYEVFKVYEDAGISAKDMARRPAFKEMIADMKKGKINYIVAYKLDRVTRSVRDLEELITQIEKYNTYLVCDRDDVNTSTANGRFFVRMLTVLSQLEIEIVSERTKFGLNGAIKSGHLPGIVPLGYKKENRKTIIDETSKDIVIRVFNMYLEGKSYQQIANVLNAEKFCYPKTWHDSTIQKIIDNKIYMGDYEQYKRIGKRENIEPVIYMNVVEPIVSRAVWNEAQLQKEKNQRTYTRDRVYMFFQKLKCPKCNHIMKCKGAGGTKKKYMYYNCDHCRLYYREDLVEKTLMDFIYNLVEYDMAVKKYFFPILADKKELNTTKIDREIDALQKQKDRIKKAYLSGIVEMEDFSKDYKIIEEKLDILEKKKYESINLDSINFTPQELMADRDIEREKLIRLDTLKDSIKFEWDNKSKEEKQEFISKFIESIILTKDDGNNFVIDKINFRSSYIEQLTKFFKAGIFDIAVPVSVNNIEQDIRTSVNIDEEQLEDYLQRLNDQFDTKFYKLYEKIDKETKQVVYEFNKKENESIIRFVSIEKKETFPIRKEDVEPNIGVVTYKDNTSLFVAN

SEQ ID NO: 3662 - protein, 537 aa, unidentified
  source 1..537: note = uncultivated organism
MKAAIYSRKSIFTGKGESIENQIELCKDYSQKLNITEYYIYEDEGFSGGNTNRPQFQQLLKDAKSKKFDVLVCYRLDRISRNVADFSTTLEMLQQYNIDFISIKEQFDTTTPMGRAMIYISSVFAQLERETIAERVRDNMLQLAKSGRWLGGQEPYGFTAEKITYADEEFKERSLMKLSPLKEELEIIKMIFNKYIENQSISQVVKHLMLGNFKGKNGGDWATMQVRRVLKNPLYVKSDKKIETYLKSIGINVYGEPNGNGYLTYNKTKNVTMDRDITEWIAAVGKHSGVIDSDLWLEVQALLDTNKNKKIPRLGTGDNSALLPGLLKCKICGANMKIKQGHKSMTQEETRYDYYVCGAKENSYGTKCKNSNIRVDRLDNLVLGEIRAYNKELLMEELAAVLENEVAENVLPNQIHTIRDNIRTKEKEISNLVKELRKDSDEITKEYIRTDIKLIHSEITKLKENLEDLEQNNNSFNEQVFNTQLVIDSLDKFNNEFDTREDMPYKRKLLKDIIEHVTWDGLNQELKIVFFTGDKKK

SEQ ID NO: 3663 - protein, 516 aa, unidentified
  source 1..516: note = uncultivated organism
MAEIIVIPPSKTADGTKKKLRTAAYARVSSDSEDQLNSFLTQMDYYKQYISENPEMEFIDLYADEATTGTSKDKREGFLRMIADCKEGKIDLILTKSVSRFARNTYDCISTVRELKNIGVNVVFEENEIDTRKITTESELIAVASIAQEESVSTSNNIKMAIRSRMKNGTFKQSHAPYGYSVHDGVFTIIPEQAEIVRLIFGAYKEGKSLTKIVEELTIMKIPTAGGKTKWTGSNIKYILTNVRYKGDALYQKKYNTEFPFRSRINKGELDMYYLKNANPPIVSAELFDKVNALLKKQELVYHGKECKEKTEYLLSKKVYCAECGSIYKRKTSQNPHWVCRTHDISSASCHNVRIAEYKIYKTFVKVYNRLVKNKETILVKMLNELKQLKERKISSKHEIYDISEEIAKLTKQILVINKLQTQGYIESASYYEKLNEINAKILELTKEKKSLMGRDVCDEAIKNTTALIALIDKKGAISKFDNSIFEAMVEKIIAQRSMLTFVMINGMTITMDAEV

SEQ ID NO: 3664 - protein, 538 aa, unidentified
  source 1..538: note = uncultivated organism
MSRRERTVPTATTSTPPTTVKCAVYCRVSTEEQHQGDFTSIDAQREACRAYIMSQRHEGWLPLPTTYEDAGFSGKDTERPALRQLIADIQTGKIDVVVVHRIDRLSRSVLDFLNLVRFFDDHHVSLASVTQQLRTDTAIGRLIVQILAAFSEFEREMIVERTRDKMRAAKRKGKYCGGMIPLGYDIDPATKRLVINAAEAEIVKAIFRMYLETGRTAEIRKAAEKLGWTAKAWVTKDGQMHKGCALSYGVLATLLRNPVYVGKVRAGDELVPGEHEAIIDEATFARAQAIADARHQFRDDAHFFRRNPQALLKGLLTCGKCGALMTHASSHKRQDDKRYRFYRCLTAIKQGAEACPSFYVPAQEIEQFIVDHLQRLADEPAQISQMIQSVIAHRSVRLPQIAEEIRQSEARIARASQTIERLRNSLEAGEVGETTRAFERIHTREQEITEAQQTREVLEQEQADLEQAAISDTAFQYTLTLVKETWSLLTFPERLVLLRRILKKVAYNTESGKLDVDFKLAGICALHDEHIQTEENVQ

SEQ ID NO: 3665 - protein, 688 aa, unidentified
  source 1..688: note = uncultivated organism
MNRVAVYARVSSEDQAERGTIENQIEFAAKYCDLHQLEIVEWYKDDGITGTIPLEQRPEGKRLLEDAKKKRFDLLLIYRLDRLGRSARIILNAVYELEQHGVKIRSMTEPFDTGDPNGRFLLTVLAGVADLERETILERMWHGANRAARAGKWLGGIVPYGYRVNEDGYLEINEDPLPGMDMSEADVIRLIYRLVAEEGYSTIKVADYLNALGVPPAYVKDGRQVKRGKRKVNTAGIWRPARVRNMIVNPTYKGIHYYGRRTNKKRELIPRKVPAIVSEEIWEKAQQVLRENQLEAVKNSKHRQYLLRGLIKCGICGLTYHGTAFGGPGGKPKVYYVCGGKTAYRGPLQGRCTSKNVPAEWIEDLVWQECVNFIENPGEAIQELAATMEVRKSQRAALEAEKQKALMALNEKEAEKQSILDLYRKRIISSLDVEQQLQKITQERKALEERVRELDRQIAAEETLINQFNTAEELLADLRAKLHSDPPFEVRREIVRALVKEIIVDTKPAENGRPIAVVTARYTFSKDVIRTASREENNLDLSIERRTKLPAWLLGHVWYGDSPGARLRQARVAKSMTIRDLADATGLTTATISSLEAGRTTASLPNLRKLAQVLGVPIAYLGCFETLPENTLGQRITKARLFHGLTKEEFAQIIGVDVKTLRHWEQGKHVPLPRYFNVLNQYLKVLEE

SEQ ID NO: 3666 - protein, 594 aa, unidentified
  source 1..594: note = uncultivated organism
MIDDKKIAGIYIRVSTEDQAREGFSLGEQKIKLEDLCKYRGYKVYKVYEDAGISAKDTNRPAFQEMIEDMKNKKINVIVSYKLDRLTRSVADLEKLIKEFDRYDCILECALDDINTDTANGKFFVRMLTVLSQLEIERTSERTKFGMIGAIKGGHIPGITPMGYKRDNKRLVIDEATKDVIRKIFELYSTGYSYQKIATKFNQEKVLNRKWRDGMIIKVIDNAIYRGDYVDGKTIGKPVLYEDVVEPLITKDLWYECQSQKGKNSRNYTRDVIYLFLQKIKCPKCGRIMAGKAPGAKKKHKYIYYKCCDCNDYVREDNIESKLVPLIMQLTEFDSLIKNQFATVLLNKLENPIPKLEKEIQTLKNKKDRLRQAYLNEVINLQEFDEESKVIESNIKNLQDKLKQEEINEKIDFSYESIMICRDIRRFEWIKNNDAFGLSPLHEYNKMSKAEKQNMFMRYIDSIEYEGEGKNIIIKKINFRSSFVNEYNECIQKGMFDELCNIQLENGRFLIFCSNEKTHDEATNYVNKLKELYDVDYIEFEVINTEKGQLFNIKPEDVKDGYRAIKMIPRKQENRLDNISKNKLGLLTIPQKLE

SEQ ID NO: 3667 - protein, 546 aa, unidentified
  source 1..546: note = uncultivated organism
MASRVSKKRLPFTSRAEPETRDKRVGVYLRRSTDEEHQPYSLDAQQIRLDHYIASQPGWRKTKTFTDNASAKDTNRPGLQAALAAARAHRIDVLLVVKVDRFSRRQRDLVALVEELTELGVAFVSATESFDTSTPAGRAMLQMLGTFAEFEREMIRERVVSGMERHAAAGKWFGGVYPYGYTLDTTTGKLLIVPDQAPLVREIYRLYTTQRLGTQTIARRLNARGSRTRTGGPWSAHTIAGILTNRVYLGELTFRQATVTDAHPPLIDQATFDHAGAIMDARGEDHTRRAANASDYHLSGRIRYSQCGKALIGTAAHGRTKTYRYYTSFSRARYGTATCEAPRLNADALDDAIFQALARFYRDHHDLITQAIIQATAHHTARNSDRRAELTAIEKQLTRAHSTINRYLQAFEDGDLDPTMVKDRMTKLSNKISQLTGRRDELADLLSHAPIAPPAMVLDELADHIAEIIRSGSPPQRKALIETLVIEVTITGPNTIIPTFRIPQPTAATNTALNTAKITDTLPENMVRTMVEPVGDTGIEPVTSSV

SEQ ID NO: 3668 - protein, 508 aa, unidentified
  source 1..508: note = uncultivated organism
MKASPMLRAASYARYSTSNQDENSLAYQFERISEYCKKHDIQLVAQYADEAQSGTNTENRPEFLRMISDAGKGLFDAVVIYDITRGSRDVADWFEFRKTMRMLGVRVISVNDNLGDILDPSAFLQELIGVGIGQHQVLTSRAKSLDGVAVKAKQGAFLGGYAPYGYKIIDQQYHIVPSEAEVVRKIFQMYADGAGYGEIIKTIGPVMGRRGRPIGENTLHFMLKNERYTGVYIWNAHINRVMRKWVGGKPNPNIVRIEGAIPAIIDKATWERVQSRMSERKNNARYKAKRQYLLSGIIVCAACGSHYVGHTSTNKKGFETRYYVCGNKYRTRTCKAKNINANQIEEFVMLQLNAFFAEENFTAYASTIADIINSASPNLEAEKRELLEVSEKIKNGMNAILSGLVLPELQDELARLRSRKSELETIIAKKESCRQKANPAKIEMLLRNAHAQFRSNDYASVRRAVELCVPKIEVDPDGSYTVHIGVVHTIGSPGRDYVVYTTAGYKVS

SEQ ID NO: 3669 - protein, 523 aa, unidentified
  source 1..523: note = uncultivated organism
MNAVIYARFSSHSQTEQSIEGQLRVCREYAEKNKINIIGEYIDRATTGTNDNRPEFQRMIEDAQKKQFDQILVYKLDRFSRKKYDNVIYKHKLAQYGVKVVSATEIITNTPEGDMMEGLLEMFAEMYSKDLSQKVKRGIKESILKGNFIGGKILYGYKVEDKKILIDEKTAPAIRYLFEEYANGKSKKQIIKELNQKGYKTNRGTSINYNSFQNNLSNIKYTGMFDNGNLQNDNYYPAIISKELFNKVQIKLAEHKHQPATQKAKVEYLLTGKAFCGYCGSSIVGISGTSHTNKQHRYYTCSQRYKNHTCNKKNENKEYLEKYVVEQTLNFVLTKKQIENIASGMLEKWNKNTTAIKIKEYEKQLEKIEKDLDKCFDMFFNADNEEMQKRINEKSKSLSIEKQDIQEELKKLKLVQVITHTKEDVKNLLAEFLDGNINDIEYQRKIINKFVNSVYIFDDKIAIYYNLFNNHKLSYNEAINNILENEKVLISNEMAQKSGFEPEVAFTTPAFQASTLDRSDTSA

SEQ ID NO: 3670 - protein, 522 aa, unidentified
  source 1..522: note = uncultivated organism
MTKRKVTDIAASVRARLLANAKENGRPFQGLELEFNSLDAQRESAEAYIKSQKAESWKCLPDVYDDGGFSGGNTERPALKRLVADIEAGKVDCVVVYKVDRLSRSLLDFATIMGTFDNYGVAFVSVTQQFNTSTPMGRLVLNVLLSFAQFEREIIGERIRDKIAAQRRKGKWAGGVPVLGYDVDRSNPSPKLRINAEEAVRVRRIFSLYLELGSLLPVVDELARRGWNNKRWITKKGTPRGGSTFDKNSVYGLLTNPLYVGKIKHKDQLFDGEHEPIIDGDVFDNARKQLAQNSHGKGNHLVNKYGALLKGLLRCQACGAAMAHTFSTRGSKQYRHYTCTRAIKRGRKTCPTGSLSAPEIESVVVDQLRCIGQDAGLRDEVLRQAQSQSDADLEELETRQRQLERQLKRDHDEIRKLVSVTDTSSATTARIADLHGRIASAEQTLKQACHKAGEVRQKRIDEQDIAAAFADFDNVWNALNTREQVQVLELLIERIEFDPTESTIEIPAAEPGVSSGPPARQL

SEQ ID NO: 3671 - protein, 573 aa, unidentified
  source 1..573: note = uncultivated organism
MAEKLLKVAGYIRVSTPGQAQEGESLSTQTDQIAGFVKAKGWKLVKQYEDRGLSGAKADTRPGFMAMIEDAKKGMFQGIVFSRLSRFARNTADFLKYQKELKDKGVSLFSLKEGIDPSTKMGEFAMKLMSLFAEWERETIKEQMHDNKLARWRDGRTFVGKPPFGYVWNGEAKRLEVNEKEATIYREIVKMYAGLSLSMKDIAIKLGDRGLKAKKKPFSSVVISDILKNSAYYGHYVLNKYVYEDGKRMDGKKDKKLKPESEHIVFEIPPLISKKEWEAIQVKTDFNKTKSKRSSYDQKLYWLRDLLVCGECGGTVKPHHGANRKDGSFPRYYSCYWAMGNGKAMKLAKNHKCDLPYIRAERLETEVWNAIMKPYLFHSGSFKGGTWIPSKMGELLDSSHYDKAIKQMGKTVESLQADLKKLNTARERIFDLIEDDRFDKNEMSRRLNRNKEETLIVEGKIKEARQKLTQAEEAKKNDVLYREFLKDKKGVLKKLAADLYKLSPDDMKRLAEGSINGKVKLVLGYDETKDTEIAIPKLEASSNMALLKQLMEEGKIGKFFSKDGSHDPSGYEF

SEQ ID NO: 3672 - protein, 537 aa, unidentified
  source 1..537: note = uncultivated organism
MDKAKTRRCAIYTRKSTEEGLEQEFNSLDAQRESCAAFILSQAHEGWENLPELYDDGGYSGGSMKRPGLTQLMSDVQAGKIDVIVVYKVDRLTRSLADFAKIVEVLDDAGASFVSVTQAFNTTSSMGRLTLNVLLSFAQFEREVTSERIRDKFAASKKKGMWMGGAVPHGFRVEERKLLINEGEANQVRYMFQRYTELKSVPQLVIELKAAGYRTRGRQQKSGRTIGNVAFGRGALAGILKNPVYAGKIVHYENIYDGEHKAIIDQALFEEVQAITKFNCYDAMLGTRSANPSLLTGMLVDPDGKAMSPGQARKKDRRYRYYATRVDLIEPAGSAWRTSAGPIEKIVVEQTAQALGNPDLANSDDAGLQDLVDKAQQLATKLRSSGIIVQRGILLDLNVKISIAEHELKLSFECPTTRAMRQHDIDAKLLRRGNNIRILPERSGMTVDSSADAGLLELIAKAFAARQHLFEVESSALVAGFSKRHLVRLARLSCLSPDIIDAILSGRQPAAMTARSLLRVGTLPLCWTEQKAHLGFA

SEQ ID NO: 3673 - protein, 543 aa, unidentified
  source 1..543: note = uncultivated organism
MSRTAPAPVHCAIYTRKSTEEGLEQAFNSLDAQREACAAYVMSQKHEGWTLLPEYYDDGGISGGTMDRPAMQRLLADVRVGKVDVIVVYKVDRLTRRLVDFAKIVEVLDEAGASFVSVTQAFNTTNSMGRLTLNVLLSFAQFEREVTGERIRDKIAASKRKGMWMGGPVPIGYDVIDRKLVINPNEAEFVRLIFAHYLNSPSLEALAEDLDKLGVRSKQRVTRDGRPFGGTPFRPGGLRHILGNRIYLGEVNHKGQVHPGEHDAIIDLALWKKVQARLSGAVKRPRTGTISALTGRICDADGKRLYSTHGNKGGKRYSYYVSSTRDNRNGWRLPAGDVEALVQQSLATFLCDPNRLDAELGGLGLTEASISRAATLAPPPGDSKGLREVLQQLDARVSIEPHALRIEFDRSRLAETMTIGTTEVLLRDSIVLTAPVSLKRRGIELRLVYAAPDARPANRDPHLVDLIRRGWAAWKRLTNGQRSTNPVERSHLVRLARLRFLAPDITMAIIEGRQPVELTSRSLLRSGELPLDWNDQRKALGFA

SEQ ID NO: 3674 - protein, 516 aa, unidentified
  source 1..516: note = uncultivated organism
MVGMKTIQKRCAIYTRKSSEEGLDQDFNSLHAQREACEAYITSQKIEGWNAIKTAYDDGGFSGGTMDRPALQNLIADIRAGKIDIIVVYKIDRLTRSLMDFAKLVEIFDEHNVTFVSVTQSFNTTTSMGRLTLNVLLSFAQFEREVTGERIRDKIAASKKKGMWTGGLPPLGYSLENRKLVPDEAEVQIVHMIFNDYLACGTVVNLYKKLKTMNKTTPVKTSIKGNRYGGKSYSRGYLYKLLRNPVYIGKIVHKRKIYDGLHDPIIDQELFDAVQKSLDENKVASHNTPIQKSRHLLKGRVFDSGGIPYTPTFTNKGQKQYAYYVSQNLLQHNDHPTELPPRIPASDFDDFVIRETVAGIERDFEKHYPNLAPDICNDIGRFLEAADNVTIRNLIEKIVIHRENVGITLSPEKISKVIAERLHISLPAVQSGNITLVAPYCIYNSKNGKRIIHSKSANGNNANLTPDHLERIVKGIVWRDEHFAGKTIKDIAADNKHGLTYVYKCIDESFEHLIGQ

SEQ ID NO: 3675 - protein, 557 aa, unidentified
  source 1..557: note = uncultivated organism
MTTIAVYSRKSVFTGKGESIENQIELCKNYCETYLLEKDLNYIIYEDEGFSGKNINRPQFKKLINDIKSNKINTLICYRLDRISRNVADFSSTLELLQKHNVSFISIKERFDTTTPLGRAMIYIASVFAQLERETLAERVRDNMIQLSKTGRWLGGSLPLGFNVEKVTYLNDEMKEKTLSKLVPNESELNTVKFIYDTYLKVHSVRDTTRQLNLNLFKGKNGGNFDLTQTRRILRNPMYVISDDDTHNYLKNRGMNVYGTPNGNGYLTYNKRKQSCISTDVEDWIVTVSNHKGIIASDQWLNIQLILDDNKEKQSRIGTGRSNSALFSGLLKCSKCGGNMVVKLSGRNANNNNLPYEYYVCSNKMNKYVNKCTTKNIPVKKLDSVLISKIKTENNEILKKTLEKSVDSIEKDLLNEEVKDIKAQISEKESSVSNLIKQLSKSKSESISDRLMKELNDLDTEIKQLKNRLTLLDKQKSINVNKNNNILELMNALEHFDKTIDLIDDITQKRFLIQSIVESASWDSDTNDVEIKLSSRKNRQFIDGGKSMDCNLYSSKG

SEQ ID NO: 3676 - protein, 573 aa, unidentified
  source 1..573: note = uncultivated organism
MPRKSSGTPDQFRCAIYTRKSHEEGLEQDFNSLDAQREACEAYVLSQKHEGWQALPEYYDDGGISGATMERPALMRLLKDITAGRVDVVVVYKVDRLTRALSDFARIVDTFDENGVSFVSVTQQFNTTTSMGRLTLNVLLSFAQFEREVTAERIRDKIAASKQKGMWMGGNLPLGYDSKDRKLIVNEDEAKTVRHIFRRYLELKSVFGLMEVLRSEGIVSKVRISETGRQSGGVPFNRGALYHLLKNRVYLGEITHNDVSYPGLHDAIVPTELWDGVQTLLSENRVERQSGRRTREPSLLSGLIFDDHGARMTPSHAVKSGKRYRYYVSRGLTGKGKSQSKQGRRTPAGEVERLVSNRIREFVGDEQNVWLAVETVTKDPEQQDQFRTRIRKVVAAWEELDPSELRMILLSLIVRIDVHSDRIDIQVRSNAIAHLTLDDYSPSTDISGPIKTLSVSARLKRAGMEKRMIVDGPPMPGAKRKPDRSLIRLVLTGQRYQEKILKAEGRSIQQLCDDEGVTRSYFTRALRLVYLDPEIIKRIVNGTQPGDMKASTLKAASRLPLDWADQRALFGIE

SEQ ID NO: 3677 - protein, 510 aa, unidentified
  source 1..510: note = uncultivated organism
MNPNVTVIQPTIAAGQEQKIRVAAYCRVSSDSADQLNSFMAQMRYYENFLADSKTETLVSVYADEGVTGTRMDKREDFQRMLKDCRRGKIDRIISKSISRFARNTKECLTVLRELKFLGITVLFEKENIDTANMSDEMMITVMGGLAQEESTSISKNLKWSYQKRMKSGQYITSCAPFGYNLIDGKLYINESEAKIVSEIFDYFLNGHGIQSTTEYFNEVYAHIKKWSLSSMRYLLTNEKYIGDSMLQKYYTPDEIGAKHQENKNAADKYYIENTHKSIISKNKFYAVQNLLNSRRTSKMSIGSYPLSQKLKCGTCGLHFRRKLCRGIVYWTCNNHDKHASICNQKRIPEIAIYQAFICLYNKLKCNFKSIFPSLLSQLQELKNRKFSGNQQYMEIAKEIAKLKEQTHVLARLKTKGFLDEAKYLEQTAEINSKINKLSREQRKIVRSDDEDDMIEQIKDIASIIENGINLMTEFDEVLFESLVEKIIVKDQITLEFYLYGGLKFTERLV

SEQ ID NO: 3678 - protein, 528 aa, unidentified
  source 1..528: note = uncultivated organism
MAESMNAVIYARFSSHAQNEQSIEGQLRVCQEYAQQRGYTVVGEYIDRALTGRSDDRPDFQRMIADAKKKAFKYVIVYKLDRFARNRYDSAVYKHKLKQYGVKVLSAMESIGDNPESIILEAVLEASAEYYSVDLSQKIKRGRKDSASKGKFVGGNIPIGYKSINGQLVIDEEKAPIIKWAFEQYATGVPKKEIIAELNARGIRNRAGKPYGFAAFQKALRNEKYIGVLEQCGIRVEGGCPAIIDKETFDKVQKFLDHNQHYGKGNKAQVKYLLTGKLFCGHCGAPMVGVSGTGKYETYYYYSCGNRKRTGSCNKSHEKKDFVEWYVCEQTIEYVLSPERIDMIAQRVAAQYNDEFGNAAVKELERRIRKFERDIEKLVAAAFETDSKILREKFGKQADELDAQKAELEVDLAKLRIANKVHLTEDEIRTWIKQFCNGDLMDEDFRQRIIDVFINSIYLYDDHMIIFYNIKGSKQVSYFEMLDVKEKIEADEILKSSYDKLLAPPKNLTYEHPLFIFVNGLFGIICKR

SEQ ID NO: 3679 - protein, 544 aa, unidentified
  source 1..544: note = uncultivated organism
MRPNNKYRAAIYLRISRDDEDKAESNSIQNQRELLKSFIDKTSDIDFIREFSDDGYSGTNFDRPGFIRMMDMVQSKDINCIIVKDLSRLGRNYIDTGRYIEQIFPSLGVRFISVNDNYDSIKEINEADQIIIPFKNLINDAYCRDISMKIRSQLDVKRRNGKFVGAFAGYGYLKDPRDKYHLIIDDTAAEIVRTIFDMKMDGYSPGRIADHLNDMGVLTPQEYKRSIGLNSNSGYWKCEHPRWVAPTVIRILTNELYVGNISQGKYRKVNYKVNRLEVVDKRDWIKKTGTHEPIISRAVFDRVQYMLASDTRTSPGSDTVNIFAGVVKCAGCGQNMIRRVTKKGDKEYVYYMCSTAKAGGDCTYRSINAKNLEKAVLKAVQTQMELLLDPNCFTHTITEAPRKSHRVTILEEQLSALEKEIEKYRNLKERLYEDYVEGIVDADDYEELRKRFAGKINAATQTAGKLDMEIRAEKDKPVLPPEWLEEVRSIGMVKALTRKTVIMLIDRIVVYDKNRIEIVFHYSDEIAEAVKAARKKAREGEIAV

SEQ ID NO: 3680 - protein, 527 aa, unidentified
  source 1..527: note = uncultivated organism
MSARTRREPVASIQPAVVRCAIYTRVSTDEGLGQDFNSLHNQREACEPYVASQRANGWELIPDHYDDGGFSGATMDRPALKRLLADVEAGKVQRIVVYKMDRLTRSLMDFSRLADLLERHAASIVSVTQQFDTGNSMGRLTLNMLLSFAQFEREMIAERTQHKMAATRRKGKWAGGTPPLGYNVVESRLAINPAEAERVRAIFHLYLEHEAILSVVQAVNARGWRTKSWTTKDGKPNTGVRFEKGRIHRILTNWHYLGKVNYKGKVYDGEHEPIVDEGTWNRVQQILERNRLNGGAHQRTKLGALLNGLLVCDVCGAAMIHQPSGSKNGKVHRYYRCRTAAAQGRDACPTGFVPAAELERFVVDRIRDLGKDPSVVAATLEAASRELQAQRPVLEEERVALLADLAVKNEEIRRLVRLVAAGDGAAEAVAPELADRQDAIRVGEERLREVHAELAGLAAATVDEDDLRQALGLFDPIWDALLPRERIRVLHLLLERVDYRNGKLGLTFRPTGIRTLAAEATTTEAST

SEQ ID NO: 3681 - protein, 556 aa, unidentified
  source 1..556: note = uncultivated organism
MPKVRTLDAQARFEMGFQMPIEEIEKRRRSSKPPPEPIPAPPPGTVQTIPALPKITHKPRVAAYGRVSTLHIDQEGSLEAQQEHFNREIKSNPEYVFVDIYLDQGFTGTKADIRPELKRMIEDCKAGKIDLILTKSISRFSRNCIECLEMVRELTSLGVDIEFEKENLRTDAMTTEIMLTLLATYAEMESRSISENIKWGIRKRFRDGTYLPALILYGYQRGQDGNLIINDREAAVVREVFHLILSGYGLKAIAQYLNRRELYTRQGYLWTADQLGHMVKNPTYIGDRLYQRTYRDENYKQIVNHGELDQYYDEDCHPAIISREDFERVKEMLNRRRTKENKVGSYLFSGVMTCDKCGCTMTRKAYPHRITYRCSSYDKQKATCQNVIMEQSIRNAFLTVMNKLKFGEQNGVSVVGRFIEIISSRDLHAEEIAEIEEQLNRNRAETEKIIAAGIAGIYRMADRERSVVLIKEEQDLIRKKQMILTQSESLEFANRLQEAVREWEITTYGFEDSLFEELIECMSVGDDYIVFHFRCGLDLREEFYPADQDENVEAAS

SEQ ID NO: 3682 - protein, 512 aa, unidentified
  source 1..512: note = uncultivated organism
MPQVKVIQPIAEQAKKLRVAAYARVSSDSADQMNSFATQVDYYTSYISSKEEWEFAGLYADEAVSGTTADKRDDFQRLLADCRAGKIDRILVKSISRFARNTIDCIQTVRELKQLGIAIEFEKEEIDTGNMGSEMLLSILGSAAQEESLSISKNLKWSYRKRMKSGDFITCKAPLGYFFENNTLVPDPKEIPIVKYIFNSYLAGKSLEEIADELNEAELKSDKKNSELWHATIIRYILSNEKYIGDSLVQKKYTPDELPLRQRRNKGEVSQYYIKDSHPAIIAKEIYEAVQELLQQRIEQHAPKQKIRKSSLSNTMQCGLCGSAFHKHKSNGENCWFCYQHRKGKTLCPMGILYEKDIYAAFLSVHNKLLDNQDILKAMLNQLLELQTKVMFTRSDIVELNEKISELIKQNHSLTRLQTKGCIDSAIFIERSNLNNQKIEELRRELRQLQEPDEVSRIVDSTKLLLELLEEAQPMLEFEPSVFKSMVLKIVVYPERFSFHLINGLVLDEGRC

SEQ ID NO: 3683 - protein, 535 aa, unidentified
  source 1..535: note = uncultivated organism
MTTKPTIRCAIYTRKSTNEGLDQAFNSLDAQREACSAYISSQRHEGWRLVKTHYDDGGQSGGSLDRPALERLLSDIDSGQIGMVVVYKIDRLTRSLADFAKLVDRLDDKNCSFVSVTQAFNTSSSMGRLTLNVLLSFAQFEREVTAERIRDKIAASKKKGMWMGGMVPLGYDTRRKDGRSELVINRHEAEQVRQIFDFYYSNPNLAQAEQKACEAGIVSKKREFESGAKFGGKPLSRGQIHFILTNPIYTGMIKHKQVLYDGQHHAIIDKEVFDRIQAKLAAASNKPRSNGSLPARRSPLCGRLFDETGDRLTPTHTKRKNGKRYRYYVSNRLLSGSRDKAGWRLPADPLENELAAAIHQRLQAQAHRLGRVHPALVDVSRLLNLIDRAKLSKGCIAIQLNAKAVENWLGRASGNATADQLKFEISLALKRRGVENRVISGQLIPAPDAILIRALAKAHKWLDQYREGSPLHEIAAREKMTSSYIRNRACLALLSPKIQSAIVNGTQPADLSLERLMREGIPADWAEQERKFGFA

SEQ ID NO: 3684 - protein, 564 aa, unidentified
  source 1..564: note = uncultivated organism
MARKSKKIDFVNVNDLGQQTMTVSAPVKSACYKVGLYARLSEETEANRERATIETQMELLRKFVAENDDMVVFKEYADISYSGTNFERPGFEEMIKDMRSGLLNCIVVKDLSRLGRNYVETGNYIERVFPFFDVRFIAVTDGYDSNKSGEELLMPLKNMVNEMYVKDLSKKMKSAHRAYWKNGEYSSGKVPYGYVNIDRHLYPDDKVKENVLEIYRLFLEGNSLKEITRQLNSKKILNPKSYKLIQFGHDIPEGMNTEWNSVTVRAILTNHAYVGESVHNKMSRVNGKTVRVPKENWIIVEDTHAPLVSREDFDTIQEMLEENVKHFHSTHGKNGFDHARFNLIGKKIVCADCGKIMAFRTEGTRHVNKSYRCKTYLNTVKKGCTNHLVSAEAVNAAVFSEIQEHMHVCIDKEETVKRLNAKTENLKKYDLYGKEADKIRKELQKTTEVKAGIFEDYRDKLIDEEQYVQISEKYAAKIKELSARLDEMLKAQAEYSREYHINEDWKAVVQKYLTKRKLTKEMVDAFVDRVEVHEDANIVVHLIYDDVLESLKSLSAEREGGSNG

SEQ ID NO: 3685 - protein, 550 aa, unidentified
  source 1..550: note = uncultivated organism
MARKSRKNLAAAPTQPETKGMKLWRAALYIRLSVEFNGKRGDSLETQRQIMEAYLALCPDIEVIDIYTDNGTTGRTFERPAFEKMLSDVETGKIDCIVVKDLSRLGRNTIDTGYYIEKYFPIHHVRFIAVNDQYDSEGEDNNGSHIIVPLKNMINEAYAADISKKVKSQAHQSMKDGDFIGARPPYGYKKAPDNCHKLIVNEDTAPIVQQIFEWTADGTGMNEIVKRLNEKGVLTPGHYLASIGIIKNQRLMGSGKWQTWTVSKILADEVYTGDMVQGKTKAIGHKQVPTPPEEWIVVRGTHEPLVSRELFETVQAARKQAAERVTRAEKVPYTENILRGRIFCGHCGKNLHRQRRHWNGKYFFHCISNDRIAKGACDGNISIEETDLFQTILTIIRQEAETVIGKNLRLKHQDTKLAAQKTEVDKEIVKLRQETASSRGYLTSLYENLVTGILTSEEYRSMKAGYEKKITAAVERMQQLQEQQAELEKQVNSYSSLAEKLAKIDGDTALTACLVDQLIERITVNGPEDISIRFRFDSGFERIAEVLANE

SEQ ID NO: 3686 - protein, 562 aa, unidentified
  source 1..562: note = uncultivated organism
MEHAKSRTRRCAIYTRKSSEEGLEQDFNSLHAQREACEAFIKSQTGEGWRLVKTAYDDGGLSGGTMERPALQRLLEDIRRRLVDVVVVYKVDRLTRSLADFAKMVEVFDAHGVSFVAVTQQFNTTTSMGRLTLNVLLSFAQFEREVTGERIRDKIAASKRKGMWMGGVTPLGYDVRDHKLVVNPAESATVKHIYERYLELGSVRLLRGDLERRRIISKIRVSKSGVRSGGLQFSRGALYQMLSNPIHLGEIRHKKERYPGQHEPIVGRELWEKVQRRLRDQAATHRERPTKAPSSPLAGKLFDENGEPLYVQGAVKGARHYRYYVSRELVRGSAEYTDRGWRLAAPELERAVRAATLQILGDRAAIAGAIEEFNIDASRLPSIFKAAEAWIKSLRSEAEAASVLTRLIEGVGLKQDGIQVSIKLPIPSDEWRDVATPNELALTRFVPMRMKRRGVEMRLIIDGDATPTARIDLPLLNATARAYRWSNDLLTGRARSIGEIARREHLTGRHVRRMMRLAFLAPRIVEAIVEGRQPADLCTLAMTQRIELPPLWSAQERALDIR

SEQ ID NO: 3687 - protein, 533 aa, unidentified
  source 1..533: note = uncultivated organism
MAEKKMTDGSMALQEKHYRVITIEATEKAQDIKLRVAAYARVSSASDDQLNSFAAQNNYYTTLISSKENWSMVDIYADEGITGTSAEKREDFQRLMADCRRGLIDRVLVKSISRFARNTKECLEAIRELKLLGIGVYFEKENIDTATMSGEMMTALFASFAQAESESISGNMRWSYQRRMQSGEFITCKAPFGYRLRNGKLEVEESEAEIIRLIFNRFLSGYSTSDIAEEVTNLGIPTRDGTPYWQQTTISYVLRNERYVGNALLQKKYTTQTLPYQKKRNHGEQEQYFVTGSNPPIISKEIFNAAQSLIHRRAQKIATEKPSELSLAQKLHCSNCSATFKKKLIRQTTYWVCRTHDRDKSKCLITQIPQETIYRTFLRLYYNLKHYGEPILAQMLTSLQTIRNRRMLWSLDVIELNKQISELSSQNQMLTTLKQQGLIDPDIFISQSNELTEQLRATKLKKERLLVADGDSTIAQTQELIDILEAGPDFLDTFDAELFGELVDKIIVDSNEQLRFRLKNGLELTETIERTVR

SEQ ID NO: 3688 - protein, 507 aa, unidentified
  source 1..507: note = uncultivated organism
MSRPLQAKGYLRLSRSKDDDYSMRKQLQAVKDTIRHRNERAETIGGSRYAFDDGGWSPDRGGGVFGDLHVDIDKSAFRMDVRRPAHQALMALGDVDLIVVWEATRWDRRMLRFVASLQTLQERGIGFVSARQPDLDTTGALGQLIVLLHAAFAEFESETISRRSKESREQRAELGLYVGGTPPVGYRSCTPDEQDAAGSEGPFLVQEEDEAAVLQIAAQLVLDGSSWASAARRLNELGHKTRSGGQWRGPNLAKYLTGAATAGFVPRGDDFVRSPSGDRVRLVADPVLDEATWNELRAKLRRRPGGARVETLLHGIAVCASCGGSLRGSGSRYRTYACPRGSDGADVCAQPAIVKREALDSMVERYVLQRLAAAPVVGGEASETDELRVQLEEELRQLRAALGRLEEDRLAGMYDHSVDRYRHQYREQTGRVAEVEAELASWSGADRRRELTPIGEEAWSLLPVGERRQIIGLLVQEVRVTKAGQGKRFDPRRVEVVALSEGVRGGR

SEQ ID NO: 3689 - protein, 569 aa, unidentified
  source 1..569: note = uncultivated organism
MSSMPEINVSEAEKKVYLKDNTEKKIAVCAYCRVSTAKDDQRNSFEAQKKFFDDEFKRHPNWTVRTVFADKGISGTSLKKRDEFNRMVAEAMAGKYNLIITKEVSRFSRNVRDILNIVGDLHDRGVYIWFLTEDIYTEVNDYEAELNKAGDQAEAESRKTSKRVKWGQRRQMENGVIFGRKEMFGYNIKRDENNEQYFEIIPEEAEVVQRVFTMYANGMGTFKIAKQLQQEGIKTKRYKKGWSNTVILRMLRNEKYVGDLETGKTYTPSFKTHEKKYNRGESAKIYIKNNHPEKAIIDRELWDRVQLLLKENSPSDEIKAKHSNRYWCSGKVFCGECGERYVSRTKDLKSGVKYKSWKCWNGQQDGSRKTKTLDTGEQIEVGCNSESVNDKVLQQGMYDLLTEFVRPTLPTIIEAVKKTREQRQVEQTSTGAREIEVLKAESDKLHKKIIHFNLLREEGEITKMSYKITVSQLEKDLQDVTDKIATLSEQLDAEYDNDIIINAQIDELQRVLELDDEDINESVYRSLIDRIEVYNGHILKYYLYGLEPITMQYKAMGRMDKYQVEFTIL

SEQ ID NO: 3690 - protein, 557 aa, unidentified
  source 1..557: note = uncultivated organism
MEKKVIAIYARKSKATDKGESLQVQIEKCKQLARFKYSDFKTEFIIYEEQEGKTGANLDREKFKELMGDITSGSKPIHILLVYKLDRLTRSVQDFTEIYEILNAHGTEFISVKEDFDTTTPMGRAMLTITVVFAQLEREVIAERIQDSMLELAKRGRWLGGKTPFAYESKLTSYINHGGQEKKKNYLEIVPGEAEIIEKIFANYLELGSLSKVEAYLLKHLYKTRSDSDFRRYSIKFILANPVYCKADLNAYEYFIKNGYSIYSPKETFDGEHGIMAYNKTLSVKYNDTNLDMKESRWRKKEDWVIAVGEHKPLIESGDWIKVQKMLDKNKEKSYRASRTTDALLSGVLKCKCGHPMRPKTSGTRNSEGEKSFYYLCEMKERSKGARCKECNLAGNILDKIIIKKITELEKEIAPIFNKALFRCHKRKEDNRIFSTARDSYIRNQIDKTKRYLNNIKKATLKATTEEAIADFIEEYQVYLEELKQLEISLEDTIEEEVMEYGEEEWVELLTVFDKIMWKELSYEQRKYAVKELIEEIYWNGGKVEVFFKGSNLSEKC

SEQ ID NO: 3691 - protein, 528 aa, unidentified
  source 1..528: note = uncultivated organism
MKRRDNKEAAAPTVRCAIYTRKSTDEGLEQEFNSLDAQREAGEAYIASQKHEGWVGLADRYDDGGFTGGNLERPALKRLLADIEAGRVDCIVVYKVDRLSRSLIDFSKIVEVLERHSVSFVSVTQQFNTSTSMGRLMLNVLLSFAQFEREIISERTRDKIAATRRKGKWSGGMPMLGYDVVRTAGGSRLVVNEDEAHRLRAVFDLYLDRQSLIETCKELADRGWSTKRWVTRKGHERGGKPFNKNSLFKLLTNRIYLGKVTYKDEVYDGEHPAIVDAEIFERVQRLLKRNGRSGGKHVRNRFGAILKGLMRCKPCGCGMVPTHTTKNGTKRYRYYVCANAQSRGWHSCPSPSVPAPEIERFVVEQIKGIGQDDALLADTLVECRRQREETIAALEGERGALERQLAAHNADLRRLASRDGDDTLATDRLADIQDRIRTAEQRATVVRDQIIALSRELVDAREVAEACALFDPLWETLTGREQGRVLRLLIQHIDYDGPAGKVSIAFHPSGIKTLADELNAGNKQEVNA

SEQ ID NO: 3692 - protein, 566 aa, unidentified
  source 1..566: note = uncultivated organism
MKNTAPVIAIYSRKSKFTGKGESIGNQIELCREYIRTHFGDDAATCAVVFEDEGFSGGNIHRPAFGQMMARLTQNEFTALVVYRLDRISRNVSDFSNLIERLNRKKIVFVSIREQFDTATPMGRAMMYVSSVFAQLERETIAERIRDNMHELAKTGRWLGGNTPTGYCSENVKSVTVDGRTRKSCKLKLISQEAENVKLIFELFMKSRSLTATEAALMQRHVLTKNRNFFTRFSIKSILQNPVYMEADKDAYEYFQSRNAELFSSEERFDGVHGIMAYNRTGQEKGKATVFKPVNEWIISVGKHPGIIPGNMWVSVQEELECNKTKAFRRPRKNKALLTGLLFCSCGSRMYPKISNRKTADGETVYTYVCKQKERSKKSCCDNRNAGGNTLDLLIMEKIEQLEDEKSDFVKQLEKSNIFHTGNRGQHEKTVGVMKKEKADLEKKVDALIDTLAQAENDYTKGAIIARIDQMTAQIENLSQEITKRLSLASEQTFDDAEFNRLRQTLSRFKTPMEEMSCEQKKTALSDIVQRVVWDGEYAHVILFGSQGGDAGIFSATKTDLREDSK

SEQ ID NO: 3693 - protein, 575 aa, unidentified
  source 1..575: note = uncultivated organism
MSEVGNLRRSGMVRCAIYTRKSSEEGLEQAFNSLDAQREACEAYVRSQKHEGWSLLPDLYDDGGISGGTMERPALKRLLADIEAGRVDTVVVYKVDRLTRSLSDFSKIVSVFDARGVSFVSITQQFNTTTSMGRLTLNMLLSFAQFEREVTGERIRDKVAASKKKGMWMGGVVPLGYEVKDRKLTIHEAEAETVRLIYRRYVELGSVRLLAEDLKAQGIRGKAPVSPGGEVSSEGSVLARGALYRILSNRLYRGEIHHQGSHYPGEHLPIVDQELWNSAARLLADNRDERKHGVTAEAPSLLAGVLFDAAGVPLTPSHASKKGRRYRYYVSRALVTGCREDAPDGLRLPAGDIEALVENRLMHLLASQTELHELFAHYVPEAATLWQLLTRAGSLGQGWRTLEAARRRALLLAIISRVTVHPDHLSIQIRPARLKTVLAAWPKAVTLSAMEDSSADHRVTLTVPARLSRSGIGKRMIIAGQTATEPDPSLVKLVLKAFDLQAALLGGKGSTLEQVAARQGINSSYATRLLRLSFLSPEIVRMILDGRHPASLTARSLLADTRLPIAWSEQLAALT

SEQ ID NO: 3694 - protein, 544 aa, unidentified
  source 1..544: note = uncultivated organism
MPKKVYRTAIYCRLSREDGDKVESNSIASQRAICEDFIAKHDDLEIVCEPFIDDGYSGVSFNRPSFKKLEEAIRKGAIDCIVVKDLSRFSRNYIDGGRYLEKIFPQLGIRFIAINDAYDSLTGDPQSDSFVIPFKNLINDSYCKDISMKIRSSLEVKQKSGEFVGAFAPYGYKKSPENKNQLIVDEAVSEYVQMIFAMYKDGISIGRIAARLNQMGVLSPMEYKHSAGVKYDTVFKTGNTAQWTYNAVQRILTNEVYIGVLAQGKRGTPNYKVRVVQKKDEEEWIKVENTHEALVSYEDFMAVKAMMKRDMRCSSDQEEVHLFSGFLFCGDCKQSMIRKTVPSKTKKYIYYVCSTNKHSRTCSPHSISEKELEEKVFRAVHDQIELVINLENALAMIDRLPAQNRKAFNYEAQITKLEEEIERYQKLKLRLYEDLSDGVIDKTEYFEFRNSYTKIIEEKQEAILRVKKEMKQTVATGTSERNWVMLFKQYENIDELNRRVLMALVDRILIYENHTIEIVFKYRDEYQQTLEYVLGYSGELDIAV

SEQ ID NO: 3695 - protein, 708 aa, unidentified
  source 1..708: note = uncultivated organism
MKSELPSSNSIVRVLGLARVSTDEQAQRENNSIGMQRSYCEQYVELQKIHGWKMMKVIEELGYSAGTLKRPGMQELIEAIEAGQVDVVLVYKLDRLTRSLKDFFVLWDIMQRHNVNFVSATESFDTTTAIGRVILHVILTFAQFEREQTAQRLKDKFAQAARNGERHPGTPPYGYTGDFKKRTLIINNEEAKVIRLMFRWAVELGSAAAVVRALNSAGYRTRILTRYRNRPKEYTVGGKPWNPNKVIKILQNVAYKGIRLGTDGTEYPAIWKPLVSKKVWEQANRMISRTDEKKSKEPAKRDNFTNKSQALLKGLLFCGHCENAMTPKAGGKKTAEGQTRPYYTCQSVVQFGSGSDCTLRNISASGFDAFIVRLIGKFGKNPVLIKQTIQASQKNKTKSVRPLKSQLRELKAEFRQVTNEIENCLKLARAKGSGSFTSELLEDANELSERKQTLQRKIDSLKVEIDYLQQSASDENLIAEALCDFEESCRHLTFAERAEVIGLLVESIHVERIDSTAEALEVYTDASASHESVQWHRLKIRFHIKGALGQVSENNSASPKKSPHARTEVEVIAGLLGMDWSTGGFAVHPFKLDECRLEASSGRVKFTLYKKRHILATTLQWRKQLDDNPHLGTRDIASQIGVTAIRIRQILRLSKLHPSIQAHILSLPGKEASRGFSEHALRELVALQPEEQLIRFRQKWPNHTLGSH

SEQ ID NO: 3696 - protein, 510 aa, unidentified
  source 1..510: note = uncultivated organism
MPIVTVIQPTITEEKNTVLRCAAYCRVSSDSDDQLNSLMAQTRYYGKFFENSETEILVDIYADEGVTGTREDKREEFQRMMKDCRRGRIDRVYTKSISRFARNTKDCLKNIRELKSLGITIFFEKENIDTANMTDELMITVMGGLAQEESTSISQNMRWSVQKRMQSGTYKIARPPFGFDIINGNLEVNEEQAQIVRQIFGWYISGHGTKKIADTLNKHNIPSSQKQKLWTADVVKYILKNERYTGNAVFQKNYVTETLPHIKKRNYGEKQKYYVSDTNPLIIEKSVFETVQKILKERYRPYSNNGHLLSGKIFCAKCGATYKFKKYGDKHYWTCRTHDKKSDLCKNGRIPENDIYAAFVRLYNKLMYNYKQILVPLHTELQNLKLRKFNGNTNVMDIHKEIAKLKEQNHVLARLKTKGFLDNAKYLEQTSEISAKVNKLQSELKKITRSDDEDETLEQLEMLIEYFEKQTAITEFDKASFEFLIERIVVVNQNELEFQLYGGLKLREMI

SEQ ID NO: 3697 - protein, 539 aa, unidentified
  source 1..539: note = uncultivated organism
MLQAQQNPVVTVIPAVMSTTQASTYRQLKVAAYCRVSTELEEQQNSYQAQIEYYTDKISSNKKWRMAGIFADEGISGTQAKKRPEFIRMIRLCERGKIDLIITKSISRFARNTVDCLNYVRRLKALGIGIIFEKENINTLTMVSEMVITMMGCFAQAESESISKNVTWGKQKSFQDGKVVFQYKYLLGYRKGEDGKPEIIPEEAETVKLIYRLYLDGLSLKGICDELESRGILTSQKKESWTYGVVRNILINEKYVGDAILQKTFITDCITKKVKKNNGERAKYLVSNHHKPIIDREVFNQVQEEMARRSSKRKVSDKTITENGKYSSKYALSELLICGDCGTPYRRTTWAKKGKKKTVWRCINRLENGTKYCSKSPTLEENKLHNVILDALNQYFNCKEEIKETLKRNIQNVLEYGDSQNIIAMENRVRELNLAVSDLLKLSVNTGSESNFEVEFQQISSEINVLKKQIETEKAKQKSSKDVSARVNEIMGILNSHNSTLTQFDDVVIRKIIEYIKVISSNKIQIVFKGGVEVVGEVG

SEQ ID NO: 3698 - protein, 521 aa, unidentified
  source 1..521: note = uncultivated organism
MNFAMYGRKSVYSDKSDSVANQERMCREYAGLRFQVDSFETYSDEGLSGADTNRPGLKRLLADIEDGLADALIVYQLDRLSRNVKDFANIYSKLEENNVMFISLKESINTGTPIGKAMMFITATFAQMERETIATRITDNLEGLARNGFWTGGKAPQGYRLERIEVNGKKHVIFSIDQEAMERTRWIFNTFLDKGCSLCSLQTLLRNQGIRTERGYFFSASQLYSLLSSPYCAEAAPEMYDYFAGMGCQMDSSSPREKWDGTHGVMVYGRTCQKNKIQRKQPPEKWIVCAGYHKPFIPASQWLAVQECFKKNTFNKTTKYDVPLLKGVVRCKCGCLMAVSRKKLKSRILSHYYCRKRNQQGIEACDMPFVKCDVLDNKALDIFKKIEADPEAIMEYTNAEKTKNNAKILQNLETQAMRIQTKIEHLTEILGDAEGSSAARYIITQIEKEDLSLSAARREIEITKAALRHEKNTIMDAKERTGQIANLIHGLDGFSASEKNAIVRDIVQECRWNGNEFFLRL

SEQ ID NO: 3699 - protein, 578 aa, unidentified
  source 1..578: note = uncultivated organism
MKENIERETEKKAYRAAVYLRLSREDGDVCGEGRQGEGHKEESNSITSQKRIIRDFLKDKENIRIFQEYVDDGYTGSDFRRPAFQRMIKDMEAGKVNLIIVKDLSRFGREYIEAGRYLQRIFPAAGVRFIAVTDHYDSLTAGRTEKNIVLPVKNFVNDAYSADLSVKIRSHLESKRGNGEYTGAFVSYGFLKDSRDHNRLVVDPVAGENVKRIFRWKLDGMSNGRIAERLNALGILAPADYKRSLGISYQSGFRKYLYAGWSPAAVGRILSDPLCKGLVVQGRRERINHKIKKTVAKPEAEWSRYRQEDLALIGERQFDAMQGLLKRDTRVSPGRETAYLFSGILCCPDCGRQMIRRRITRQGKQTIFYICKTYNVEKTCTRHSIKEQELLLLVKEAVKAQAWLTADMDKIRKAAQDAGEMLRAVSLTDTRLPELEKELAENAAMLSGLSPDRAEGILSEEEYEEMKAFYDGRRRALEGQIRKRREKAGNREKVVEEAEQRLARIRDADGWFFEAAEEIRRSLLWSLVDRIWVYEGKRVEISFLCQDRMVEAYALCGMFQETRQETLSRERGRDDGKT

SEQ ID NO: 3700 - protein, 545 aa, unidentified
  source 1..545: note = uncultivated organism
MPTIAIYPRKSRFTGKGESVQTQIELCRQYCDAHFDSPSYLIYDEDEGYSGGNVRRPAFQRMLKDARDHKIDILCCYRIDRISRNVSDFSRTLDELHSLGVSFVSLREQFDTSTPMGRAMIYIASVFAQLERDTLTERINDNLQALAKEGRWLGGTTPTGYRSKRVDVERGGRKRRYNILSAYEPELETIRLLYAQYREKRSLAGVETYCLQHCIKTRNGRDFSRATIKAILQNPVYCTADADAWTYFSLGDFNLCADESDFDGLHGIQPFSRTESERPSSVLKPTSEWIIAVGQHPGAISGADWAEVQKHLQAAKDSTYGAPRTKTALLSGLIVCAHCGSYMRPKTHSRVREDGTRGVSYTCALKSSSRGERCAMKSADALEVDRLVLEKLSELSGDRGAFARQASVDLIETTNRRADLQRQLEDANTELAEMRDKQRKLIDRLTDLTLSKIVVKSISDEYDRLEAAAIEAEAQTGRIRQELDACEDQADVLDMMQRLMGSFGKSFADLDFDEKRRLLKAVVERVVWDGDNITIELFGEKRLPK

SEQ ID NO: 3701 - protein, 582 aa, unidentified
  source 1..582: note = uncultivated organism
MSSAATPDRAANYGRCSSQRQAERDLSVPAQLEHAGEYARRRGYVVVGEYTDNGFSGSDMRRPGLQRMLACARAGQLDVVVVWDLSRFTRNLADQLRLINELRGLDVRIESIREPSQAGAAGNLTLNLFGLINEFQLMKLSEDTQRGMRRNASLGNYNGGTVPTGYARGPAKGALVVDPVWAPVVRELFRLALRGNGAASIARMFNDKGQPTRRGRRWSKNAVLTILRNERYTGTAVWGKRQEGKFATETLDPVRVPRAHPAIVSAADFAAVQVGISSRRRERLHPWRQASTYLLSGLVFCGHCGSALAGHGAKSNRFHYYGCQKKMKQGATACPAKLLRAERLEAQVADQLRDVVLTQGNLERLLGFVNEELAGGVDVLAEELGAVEAQLTQAERKLGNLYDAIASGDIPHSHLAEPLARWTATKSGLETKVAKLREQAELPPTVGLSPAQLHTAVENLRGLLDVGTRQERRSFLRAWIRRITARGYEDVQVEYAFPAVFSDDGSGSGSLAPVLGDIPILGPEVNEDRGMKGWFEAPDTPRAEPAVWRVLPKGIDGSPPRGRTVRRSRTPSNGPSRRRRRG

SEQ ID NO: 3702 - protein, 531 aa, unidentified
  source 1..531: note = uncultivated organism
MEKAEKKKINCAIYTRVSTTEGLEQEFTSLDNQRESAESYIQSQKSEGWIALPERYDDPGYTGADTERPALQKLMADIKNRKIDCVVVYKVDRLSRSLRDFGQLLESFEQNNTTFVSVTQAFNTNTSMGRLTLNILFSFAQFEREIISERTRDKMAASKKKGKWVGGNPPLGYDIDRINRKLVINQKEAELIKEIFDLYLEKQSLLSVAIALNEKNRFTKSYMTLEGNKLGGVKFKSTSIQSIIKNPFYIGKVRHAGVLYQGEQERIITDEVFQKAQEILANNRRERKIASVVTNTGLLNSILRCKTCDSIMYYIYSRKGKNKYHYYLCMNAQKRGYKTCPTRLISAQLIESKFMEFLRAISKDPRIEAKAWEALTLEDKIPILRSIAKVAHYDAINGTFEIVLHKVNESHQFALKLAELKHIPYHRQQAEISKEPPIRRSLILGYQINEVMKEKRCRIREVVNWTGIIRPRLCQFIDMLLLSPKIQEEILLSEEKAIFDIPEYKLRDIIAEIDWNAQQKLWNSLLESHRK

SEQ ID NO: 3703 - protein, 532 aa, unidentified
  source 1..532: note = uncultivated organism
MTTSRETVGSNALDNKREVIYISPKAQATPIKPRVAGYARVSSDSDDQMNSYAAQCRYYTDLITSNDKWEFIEVYADEAVTGTSTEKRDDFNRMMADCRRGKIDRIITKSTSRFARNVMDSLTAVRELKDIGVSVLFEKERIDTGLITSEVLLTLYSAFAQEESQNIAENKRRGNRMHMRNGDYVSSSVPYGYRLVEKLPQICEQEAVIVRRIFGEYLSGCNGYEIARGLTEDGVVRKDGVANWRARTIYSMLRNERYIGDMLLQKNFKTDELPYKKVKNRGELEKVYISDSHEAIIDRVSFKLANLLLEQKHSGASGIAEQTYPYSVKLRCGECGKTYRRRVTKEKVYWTCRLHDESSDYCSAERIAEPDLDSAFARLYNKLKANSGKILDPMLEQLEKLRDSRNRGNPEIQIINKQIADISEQNHVMNGLLTRGILDSALFLSQQDELKRKLRALKIAKSKLQSAQDGDEIIEKTEDLIDVLDDGPKRIGGMDKSLFADIVEYITVDRNTLIFHISNGLELKEQLIRTVR

SEQ ID NO: 3704 - protein, 519 aa, unidentified
  source 1..519: note = uncultivated organism
MFTVGRGVWQTAIALYARKSVERENSISCETQLEYCRSSIKPEERGEPVLTFVDNGFSGGDLHRDAFQRMMQQVRQGTIRKVIVYKLDRISRSLSDFVNILQSFKEYRVEFVSSQEAFDTSSPYGEMLVKLLMVFAEFERASIISRVTQAYAHRSELGFYMGGRRPYGFQLVPTTLHNVQTKKLDPVPSEIAQVRYLFEVYARENVSLRRLQARLVAEGKQPTNGSAWTTAKLSTILKNPIYVKANAKIYDYYDRHGVRMITDVSLFTGEYGAQLYGQSKHDRDAPDWSDMKLVLLTHSGIVDADIWLACQRKLAKNRQITNSYSNATSWLAGKLICEKCGRTMTTVKGKPNKNGTVRRYFNCTGRSNQKVCTGPNVTIYAEDLEALVSDCIAQKLATLHAPQRAVDRGNAAELNALKLKQKAIEQQEQQLLDTMLSGGCNDALLAIANQKAMQLRQDRQALQDHMEALKSRSAEAAPTIDLAAAWQTANYDQKKSVAMLLLHKICIGEDGTVTIQWAL

SEQ ID NO: 3705 - protein, 563 aa, unidentified
  source 1..563: note = uncultivated organism
MPDKKKNITIAIYARKSKFTGKGESIENQIQKCRKYMQDSMERERDDGRLDAEAVIQFVEYKDEGVSGKNMERPMMKKLLADMEGGKIQKLVCYRLDRVSRNVKDFAELFETLTSLGVEFVSVNESFDTANPMGRAMISMSSVFAQLERETIAERIVDNMMALAKTGRWLGGKPPLGYVSRKVEYCDDNGKKRSHFRLTEVPEEAELVEVIFSMYLKLGSLTKLETYLLNRDILSRNGKPYGRYVLRAILSNPVYCAADSRVYRYLCENSYGVYAEEMLFDGEHGLIAYNKNNNRARVQRVNDVKDWIVAVGEHSGLVSSELWIQVQERLKKNAGMSYRYPKRIGALLSGMLRCGNCGSYMRPKGGRTAKDGQVRYYYQCECKERSRGQKCQMPNLFGNAADEMVVDQILALKEQYVTEYSYLENVLQKIERTSYRKSEQNLLKRQMEENEKQVQKLLDALGRSKNDVTSDLILTRIDEINRQQEKLRRQCEGEKENNIMDAGGFNCELLSEDLLSLNKAAWSLLSPSAQKDILQKVIKEIIWDGQYATIHLLAEDGPCIKSA

SEQ ID NO: 3706 - protein, 552 aa, unidentified
  source 1..552: note = uncultivated organism
MNTKYTASNADKNEYFAVAYYRLSKDDKAKSESDSIANQRKLISSYVDSHSNIKLVEEHYDDGYTGTNFDRPGFRAVMAAIKERNVNCVIVKDLSRLGREYIEMGRYIETVFPSLGVRFIAINDDVDSSQSNNSDDIIIPIKNIMNESYCRELSKKLRKQFQIQRANGEFLGAFASYGYLKSPDNKHKIIIDEYAAEIVRGIFLLKIRGYSGQGIADFLNKEQILPPAEYKKSIGLNYKSGFKGLSKAKWSAVTVGRILQNPIYIGTLIQGKRGTPNYKIKKMRVRDEDDWSVVKNNHPPIIDETVFSAVGRMLARDTRKSPNDETVSPLSGVLFCGDCERTMAQRSVTRGNKKFYYYICSSYKYRKSCSSHNFEQKKLEKIILNAITNQINLVIEINEMLKEIGESSLTKIKIKRFDMMIAQKNSESDRYNGMRAKLYEALNGGLIDRDEYEAMRAKYSKLIYDTEQSVENLKRERSEFISDTADNNAWINEFIRFNGAKELTRELVVTFIDRIYVYENKRIKIDFNYRNELSNMQELLEQKAKEAIKDGA

SEQ ID NO: 3707 - protein, 537 aa, unidentified
  source 1..537: note = uncultivated organism
MTLKRVVSYVRVSTTGQAEDGFSIEAQLEAIRNIVKALGYTLVGEYIDRGISGKSIENREEFLRMMQDAKAGLFEEVIVYKMNRLSRNHLDLLKLYEEFERIGVTFKSVTEPFDTSNPSGKLLFNLLGSIGEFERETIVENVKNGMKQKAREGGFNGGLMLGYRSVYPDSSQNKKEIVVIEEEAAIVRMIFDWYINGKGFKYIAYRLNELGFKTVKSNAFSIYSVRTIINNPVYAGKIRFNNYVNHNKNKRKGSEYELVLADGNHTPIIDINTWEKAQTIFNNKKRFRTTPKKGAFLLTGLLKCPVCGSSMVAGRATRKDHSGNKTYYKYYQCSKYKNFGKTECNANSVNAEYAEEYVLNKLNEFTIDDGLVTKIINDLNDYVKRTVKPIQTKLELINKNVSQYTDKKERIFKLYEDGIIDQPHLMKRLQAFETEYESIKIQREELLEQINYKQTTKEIPTDHVKAILKNFGNVLKISSREQKKLLLNLVVEKITVHDNRKINNIELRFDETIQKTLLKEDSSDEESSIFMPFSLTV

SEQ ID NO: 3708 - protein, 535 aa, unidentified
  source 1..535: note = uncultivated organism
MYNATKYLRLSYTSDRANESDSIANQRKYIDEFVKRNPDIKIINEQVDDGYSGIVFDRPAFKAMLEDIKSGKINCIIVKDLSRLGREYNETFTYLRRVFPALGVRFIAINDNIDTAKEAVTGDISVSFKGVMNDEYCRDISVKVRTALNIKRKNGDFVGAVPVYGYKKADNNKNQLVIDEYAAQVVKDIFKMRTDGYSAERIATELNRLAVLSPREYKKDNNISLPTGGYCDKENSKWSATTVIRILKDEIYTGKLIQGKCGKPNYKVKEYVKRNADEMFVTENAHEAIIGRQDFELVQKIMRIDTRTSPKKNELHLFSGILICGCCGNRMTRKTVTHNGEKYFYYYCPTGKKNGCTGGNMIKEADLVNCVTDSIKGHIRNVASLNALIGGINNNAINKDMCNKISVQISEVQKQLDKTSEYKSTLYENYISGILNKEDYKTLNTSYSKDKKRLEDALKQLETELDECRNNTSKKLQWIERFKSFENIDKIDRNIVIRLIECIHIYDKTHIQIAFNFKDEYAQTLAALSEYREVV

SEQ ID NO: 3709 - protein, 527 aa, unidentified
  source 1..527: note = uncultivated organism
MKRNGNGKTAAPRTGPTRCAIYTRKSTEEGLDQDFNTLDAQREAAEAFIQSQRAEGWEVLPDRYDDGGFSGASIERPAFKRLLGDIEGGKVDSVVVYKVDRLTRSLLDFARIVEIFDRHHVAFISVSQQFNTATSMGRLILHTLLSFAQFEREMIAERTRDKMSAARRKGKWVGGMPVLGYDVAPGGGRLIVNEAEAAQVREIFETYLREQSLAATVAELKGRGWTMKSWTTKKGREHPGRPFDKSNLFGLLSNVIYTGQVNHKGTLYPGEHPALVDEPIWRKVQEVLRHNGRTGGSSVRNKYGALLKGLLRCTPCAAAMVHSYSVKGTKLYRYYVCGRAQREGWTSCPSKSIPAAEIERFVVDRIRALGQDEGLLDETLRQARSQGASQVEALEAEQEALLADLKRVNVEIRRTLQASNGANVDADRLASLEDQVRIVEGKLAGGRERLETAREQMVDEQDLASALSLFDPVWNALFPREQARIIGLLLEHVGYDGAAGTLALTFRPTGITTLARERSAALPEAAP

SEQ ID NO: 3710 - protein, 575 aa, unidentified
  source 1..575: note = uncultivated organism
MTSVRKLRCAIYTRKSSEEGLDQDFNSLHAQREACEAYVASQAGLGWKVVSDRFDDGGISGATMERPALQRILSEIRAGRIDVVVVYKIDRLTRSLADFARIIEVFDERTVSFVSVTQSFNTTSSMGRLTLNVLLSFAQFEREVTAERIRDKIAASKRKGMWMGGMVPLGYDSVNKKLVVNQDEAVTVRKLFDLYRQEKSIRAVQERAQVLGLKTKQRIAARSGRSSGRTDFSCGHLRTILSNPIYVSRIRHRGQTYDGQHEAIIDDDIFSEVQELLKKGSNPSTTLPRPDDMHLLTGILFDENGERLSPSHATKSGRRYRYYVSNGLMKGRKTKSRSHWRIPTSRLDPVVVDTVLKFLRSHSGLLSALGDTTLSPDHLEKILQNADQAANGLQCPSPSLRRQTIQTFLRRVTLGADRLQIEIMTDALLAGTARTNSDHAEDQNLPPIHCIELPITFRHRGVERRIIVEADGGSPSADPDTTLIELIARAHRYLRRLTCGHSVSASDLATEEKLDVSDLSRILRLAFLAPDITAAILDGKQPVELTATKLKRLGEIPYRWDDQRRMLGFGSSTNA

SEQ ID NO: 3711 - protein, 567 aa, unidentified
  source 1..567: note = uncultivated organism
MEKDTRKIAIYSRKSKFTGKGDSTSIQIEACKKAINMKYDDIDLKKDIIIYEDEGYTGANTKRPAFQNMLKAIKNNEIKAIVFYKLDRISRNVSDFSSLLDELTDYNVSLISVTENIDTESPMGKAMIYITSVFAQLERDTIAERITDNMIALSKTGRWLGGATPTGFKSEAVEYVKDNDDKKRKLFKLSPVEDEVRVIKLIFSKMIELRSQTKLETFMINNDIKTKNNKNYTRWTLKNILTNPVYAIADMHTYNYFKNFKIDIHADIDRFNGKNGLMVYNKTGTGKSSTGKPVIVDKDITEWIVSVGKHKGIISGKDWVEVQNIIKGNTSKRYRHASVTNALLSGIIRCSFCGSFMRAKTSPGYDELGRRKFNYMCELKEKSRRVKCNCPNVNGRVIDDLVMEEIKKVSLPTSKLYLKLKDISTSIFDKETKINEELKTLRKAINKNESFIEGYIEKIPYIEISEMDEINNKIKKLKETNKNLEKQIKEITKRDHTEIKDKDMADLILNILDTYLNSFDDLNLKVKRTMIKAILPSVTTDCENLVINFIGTRDIDNTALPVRDDFK

SEQ ID NO: 3712 - protein, 626 aa, unidentified
  source 1..626: note = uncultivated organism
MYLAKGTLFNAYPFKVKGGFKIMNEERKVAGIYIRVSTEDQVREGFSLGEQKEKLLQLCKFKEYEVFKVYEDAGISAKDMAHRPAFQEMLADMKKGKINYIVAYKLDRVTRSVRDLEELIAVLEKYNTYLVCDRDDVNTSTANGRFFVRMLTVLSQLEIEIVSERTKFGLNGAIKSGHLPGTIPLGYKKDGNKKTVIDETTKDVVIRIFNMYLEGKSYQQIANIFNQEKVLEPKKWRDSTIQKILENRVYMGDHEQYKRIAKIQSIEPIIYMNVVEPIISRAMWEETQLQKEKNQRAFTRDRVYIFFQKLKCPKCNSIMKCKGSGGKKKKYMYYNCEHCKIYYREDKIEECLEDFILDLVEYDMAVKKYFFPILADKKETNTEKLDKEIDTLQKQKERIKKAYLSGIVEMEDFSEDYKIIEEKLSILEKKKYETLNLNSITFAPQQLVADRDIGREKLIRNNKLNETIKAEWDKKSKEEKQEFISKFIESMKLIKNKNGDFKIEKINFRRSYIEQLTKFFQSGIFDIYVPIEVDDEEKYVRTSVNINQKQLDEYIERLNKEFEVEFYEVFPENMNGKPKIVELKLNKEKQKLIRLVAVKSDKKFLKSKEENVKIGAVICNTNWKMN

SEQ ID NO: 3713 - protein, 579 aa, unidentified
  source 1..579: note = uncultivated organism
MLRKKSNAPISRPCGATEIDARKPMPKYQAAEYLRLSYTDDKSSESDSIQNQKRLIADWLTGHPDIELVSTRVDDGYSGILFDRPDFQRMMDDIMAGRINCVIVKDLSRLGREYIETGRYLRQLFPSYGVRFIAINDDIDTANEHSGDDLIVGVKNLVNDTYCRDISVKTRTALMVKRKNGDYVGACPVYGYQKAPDNKNRLVIDSDAARVVRDIFRRRINGVSARKIADDLNEHGVLSPLAYKISRGLPHPTGGYADSADAKWSVHTIIRILQDETYTGTLVQGRQGTYNHKIKDLIDKPSAEWIRVEKAHEPIIPKRDYDLVQKIMRLDTRTTPDGEGVYLFSGMLICGCCGARMSRKTNRRGNKEYIYYYCRTGKKNGCESGVMVRENDLMECVLASTQAHIKSVVSLGELLDSISEEQINRDVIEGYKAQIADNEAKLEKAMRIKATLYESFIDGNLSKEEYKDHKNFFTAQADDARKAVKLLREDMERAQHNVTDRLKWTQHFKEFASITELDRRSVIALIESIEIIGKEDLRIKFRYGLEYEAALKLLAERKAAPVPLMALYPSLMAITKEAV

SEQ ID NO: 3714 - protein, 523 aa, unidentified
  source 1..523: note = uncultivated organism
MNFCSYTRKSIYSDHSDSIDNQTRMCREYVDMKFPGQVDSFIEYSDEDFTGANTNRPDLKRMISDIKDGLYDILVVYQLDRLSRDVRDFANIYAMMEEHGVKFISIKENIDTSTPIGRAMMYVTVVFAQMERETIAARVTDNMVGLAKKGYWVGGNPPVGYVRKRITVNGKQHCTIEQDPDGVEHVKWIFSTFLENNYSLQQMETAFKRQGIKTVRGGFFSTTRLHQILSSPFYVEATPEIYDFYKEKGCQMDPGSPREKWDGTVGVMIYGRTTEKGGVHRQQKPDKWLVCLGIHEPFIDAEQWLEVQTRFAKNKFDKTMKYDVPLLKGVLRCSCKTLMGVSRKKKKNGVGSWYYCVKRTRQGPEVCNSHHTKCEVLDEKVLDILRSIQKDPKIIQNYVDKNVDNQEAPDPKKTASKVASCEAKIGRLAASLALAEDSTAQKYIVAEMERLDLELQALKREHSIALASERRTAAEKKDTDAKVKEIIRMMDNLDTFSAKEKNEIMRDIVKECIWDGESLFITL

SEQ ID NO: 3715 - protein, 530 aa, unidentified
  source 1..530: note = uncultivated organism
MPRNSSVREGPIRNRNSAEPSRIAPIRCAIYTRKSTEEGLDQEFNSLNAQREAAEAFVRSQRHEGWELLATPYDDGGFTGGNMERPALQRLIADISRGAVNCVIVYKVDRLSRSLLDFARMMELFDRHGVSFVSVTQQFNTTSSLGRLTLNILLSFAQFEREIISERTRDKLSAARKKGKWIGGHPMLGYNIDPKGGRLVINPEEAERVRAIFDLYLKLGTLSAVQQEIARRGWMAKQWTTEAGIRRGGSPMSRTGLYGLLTNALYSGMVDHKGVLYPGEHERIVAQAVWDRVQAMLREAGRTRGAVIRNKYGALLRGLLFCKQCGAVMVHTYTKAGPRRYRYYACHSARQPNGTRCGAKPVGAEPVEGAVLSSIRRLSTDRELSEAVLAEAATQLALRKQELTAGKLSAQKDLRQLNQNLANLAGNTAEDSGQRAERIRAVEEASRAAERRIEEIVQEQRHLEQEPLEPDQLRRIVGDFENVWASLTVREQEQLVKLLVAKVVYDGTTGKVTIGFRSEGARELCQGRNR

SEQ ID NO: 3716 - protein, 509 aa, unidentified
  source 1..509: note = uncultivated organism
MTVAALYVRVSTTAQADAGASLSTQEESCRRHALDHNHVVAEEHVYREVFTGTELWDRPQLTRLREAIRQRSIDVVIAHAIDRLSRDPVHLGVILSEADHKGVAVEFASEALDDSPEGQLIRFVRGYAAKVEHEKIRERSIRGKRARVESGKLLRGAPELYGYRLDRDAGVRHLHEPEARIVRSIFTWYSVDGCSIREIVRRLDDAGVPTPSFGKRTYADGRQPRWSLTSVRNILRNDAYAGVTWAWRWKSGPNRAYHLRPENEWIRLPDATTPAIVSREAWDTARRRLATNAGEMARNRSHLRLLRGLAFCARCQRRLWVDANLHNPRKQYYYCPSRVLDPEPCGAAYVNALDVEAWAWDEVRIRLNNPALIAQELHERAIRSAAPSSAAELRDLRKRLDRLARGQERLLARYAETEAIPWSLVETEIQRAETEKADVQSRIAALDRGRLERQRTQRQTADLSDWCRRAAGNLAMMTFDEQRKTLSILGVRVLAAGDEFHLTTDPAVF

SEQ ID NO: 3717 - protein, 534 aa, unidentified
  source 1..534: note = uncultivated organism
MKRIRCAIYTRKSSEDGLEQEFNSLDAQREACEAYIASQRHEGWELLKDHYDDGGISGGHLERPALQQLMQAVDAKQVDQIVVYKIDRLTRSLADFAKLVDRLDQAEASFVSVTQSFNTATSMGRLTLNVLLSFAQFEREVTAERIRDKIAASKRKGLWMGGNVPLGYEKDGRTLQINPDEAEVVRKVYNLYDDWGTMNMVREAAARLELRSKSRRAPDGTLRGGNLMSRGQLHHILTNPIYAGRIRHKGKAFEGQHPAIIDPARWDALQERLSDGAVKARRSKQHRDPSPLAGKIVDDAGDRLTPSHTKKGDKRYRYYISQKLVTGVTRVDEKQRTWRIPALQLESAIATAVQKRITQLSEAAKVQQFPGTETPTPDAKEALTVVERVRIAPGQLTVDLSAGDVHKLIGGELDCDPGDLTLDLPFTERRRGVEMKLVIGSSTAEIDEKLLANIIRANQWYQRLKEGKSFAAIAAEAGTSKRRVQQVIDLAFLAPDIVRDVTNGAQPMGLTSDWCLRHNLPSGWRAQRQHIATL

SEQ ID NO: 3718 - protein, 595 aa, unidentified
  source 1..595: note = uncultivated organism
MKEVEVIKAKNTLSSRSFRQTLERLRVAAYCRVSTDSEDQKNSYNSQMQHYTEYINSKAEWTLAGIYADEAITGTQTKKRENFQRLINDCLNGEIDMIITKSISRFARNTLDTLNYVRMLKEKNVAVFFEEENINTLTMDGELLLTILSSVAQQEVENISANVKKGLKMKMQRGELVGFQGCLGYDYHPETKSITINQEEAKVVRYIFERYNEGMGCFVIAQELEKMGYKTKRGNTTWAESTVMGILKNEKYKGDIRQGKTFTVDPISKRRLDNLGEEDQYYIRDHHEPIISEEMFESVQQIINRRSRNRKTSNDKRETFTRKYTFSCMLECGFCHGHLTRRSWHSGSLYHKTIWQCVTATKKGKKFCKESKGIPEVMIEQAFLESYKLLCYNNKDIVEEMLQRIESALCSCDSAKEINRIEKAIASVNKKKKKLLDMRLEELIDQEAYEEKNSELAERLTYLNDELMEYNNDEARVKNIKKRLADFRKVLENNETLTEFDRTVFESIIDRVIVGGYDDEGNADPSMLTFIYKTGFTNNVDGSKYKPPRKNSKGKKDVDNASEDKLCSFSTNDNNKLCSYNSDDTCGDGCGGLSK

SEQ ID NO: 3719 - protein, 519 aa, unidentified
  source 1..519: note = uncultivated organism
MAANNIKPVRCAIYTRKSTEHGLELEFNSLDAQREACEAYIKSQASQGWRVLPRPYDDPAYSGGNLDRPALKQLLADIETGLIDVIVVYKIDRLTRSLADFAKLVETFDRRSISFVAVTQQFNTTSSMGRLTLNVLLSFAQFERELASERVRDKVAASRRKGKWTGGTVPLGYEAKNKKLVIDPKEAEIVRTIFKQYLELKSFSLLVQDLDRRGIVTKRRDTKVPKYRGGIPFTYGPLAHVLKNRTYLGEVHHGGKWYPAEHKPILDGKIFDQVQELLAQNRVTLQTRRSAGEALLAGKLRDDRGNRMSPSFTVKNGIRYRFYVSRALLHGRKIQAGAVARIPAQLIEDIVINAMRERLALDLQMPDDQLKNHVIESVAEIVVHPRKIAIVMQPMSSAHIADATETIEVQWQGPVKNSPAPPPPSANTDQPDPKLLQAVVRAHAWLRDLKNNKFDTVEALATSVQLHPKVVRQELRYAFLAPAITEAILTGEQPPTLSLIRIPKTLSLTWSGQCRALSF

SEQ ID NO: 3720 - protein, 544 aa, unidentified
  source 1..544: note = uncultivated organism
MKAGDFGDRFPAAGYIRLSREDGDREESDSVMNQKKLIQSFLASREDLELEGFYVDDGFTGTNFERPGFQRMLRDIRGGKIRCVVVKDLSRFGRDYIEAGRYLERLFPEWGVRFISVIDQIDSIRKAYDLLLPIKNIFNEQYARDISEKIQATMRQKQRAGEFIGAFASYGYRKSPSDKNRLLIDPYAAGIVRRIFQMFLQGMGKQTIARTLNREGILCPAEYKAVSGQNYRNGNSPRGRAGWTYSTINSILHKEIYAGDMVQGTRHQQMRSRQKRVPRENWVVVRETHEPVIDRQTWEKTQRLLGKRTREPGDFRENVLAGFLRCGDCGGPMVRTGWKRKDGSRGYSYYCGTYKRKGGGFCSSHGISLDVIEGILRQDLGCMLKKLRVPESLPRRQAPGGNAAEGEKLRGELERLERLQQGVYEDYREGILNRREFERLRESYRQREELCRAGISALETETGKEEEEILERADRLQRGGPGILTRGMIGELVDRILVFENRGIRIVYRFSGECRDWFAPAYPPGQQRKSAADSRLMEAEIREK

SEQ ID NO: 3721 - protein, 519 aa, unidentified
  source 1..519: note = uncultivated organism
MSKERETPPALRCAIYTRKSTEDGLEQEFNSLDAQRDAGEAYIASQKSEGWVCLPDRYDDGGFTGGNMERPALKRLLTDIEDGKVDCIVVHTVDRLSRSLIAFSKIMDVLERRSVSFVSVTQQFNTSSSMGRLMLNVLLSFAQFEREMISERTRDKIAATRRKGKWSGGMPILGYNVENNGHGGRLVVTDEEADRVRTIFELYLDHQSLIETTKKLDERGWTTKRWVTKKGLERGGKPFNKNSLFKLLTNRLYIGKVTYKDEVYDGEHQAIVDDDIFDRAQRLLKRNGRTGGKHVRNRFGALLKSLVRCVPCDCGMVPTHTTKNGNKRYRYYVCQNAQKRGWHTCPSPSVPAPELERFVVEQIKAIGKDETLLADTLTECRRQREEAIASLESEKRSLERELHHCNSDLMELAKHEGQRTDKMADLQDRIRTAEQRATEVREQIIALSRELVDAREVSEACALFEPLWDTLSAREQARILHLLIEQIDYDGVNGKVAITYHPTGIKTLADEMHEQEALA

SEQ ID NO: 3722 - protein, 538 aa, unidentified
  source 1..538: note = uncultivated organism
MTKLMRCAIYTRKSSEEGLEQDFNSLHAQREACEAYIKSQKHEGWQLIKMAYDDGGISGGTMQRPALQRLLDDIRAGKVDVIVVYKVDRLTRALADFARMVELFDQHGVSFVAVTQQFNTTSSMGRLTLNVLLSFAQFEREVTGERIRDKIKASKEKGMFMGGRVPLGYRVEGRKLRIVPEDAELVRTIFRFYLEAGNVRLLKEKLDGMGLHPKPQKIDGQRHFSQFSRGALYTILGNITYLGKVLHKGTIYDGQQDAIVDQELWNQVQTELAANRHGAKKPTRKTEPAPLAKKLFDSDGTALVRVDSSKRGRRYRYYISQKLLIKSDGTGWRLPGREIEAALVTATRKLMTDPSMLVPALSEAAVPPAAVPEIIKASVEAADRLADGLVMQLVIEKAVLSPDGVTLTLQLIPEPNLIRVKRFIPLHIKRRGVEMRLIIPSDTSSPVKIDRGMLKAIARGHTWFDDWCNGKVTSIREIAAREGVSKSHVGDVIRLAFLSPKMVEAIIAGRQPTELTLDGLIKTSLPFDWHAQKLALGF

SEQ ID NO: 3723 - protein, 520 aa, unidentified
  source 1..520: note = uncultivated organism
MEFNSLQNQEEACKAYILSQSFNGWEYYKTYSDGGISGGTMERPGLKTLLNDIRAGQIQVVVVYKVDRLSRSIIDFHKMMQEFDKYGCNFVSITQSFDTSNSMGKLTLNMLLSFAQFEREVSAERVRDKIAASKAKGLWMGGNLPLGYDVDDRHLVVNEPEAEIVRQVFQKYLETQNMLGVAEWLNGQGIHTKRWVTKHSKRERGGEPFKKNTVQRMLTNPVYLGKITHYAQNKIYNGVHKPIVSRELWEQVQTVIRRRIHDSNAFCHYKFHKTVLADKLYDDKGKKFRFTSSKNQHRKLLYYYNGVGGHYLPVEQLDNFVLDVLRQTDLEELEPLADRIGITDKQMRSWIVKATCQTAGKAHYLTILLDEKQIKIDLINCPKITETQERKALSVVRMADNLYVRSTFMVDNVSSVKLQNGSARNILTVRQLNESLVRGVVRGWQLKKIGEFSGGIRTLEKEVYMTKRTIMRYINLCYLSPRIVADILEYKNPANLTLRELMNLAESQMDFAEQEKVWSP

SEQ ID NO: 3724 - protein, 537 aa, unidentified
  source 1..537: note = uncultivated organism
MKAAIYSRKSKFTGKGESIENQVQLCKEYAAKLNITEYIVYEDEGFSGSTIDRPQFKRMLKDAKAKKFDVLICYRLDRISRNISDFSNLINQLEAFNIDFISIKEQFDTSTPMGRAMMYISSVFAQLERETIAERIKDNMYQLARTGRWLGGKTPIGFKSEAIKYFDSEMKPRKMYKLTPIPEELEIVKLLFEKYIELGGIHKLEGYCFENNIKSRNGNNFNISSLIFILTNPVYVIADKLFYEYCVSKNMDIASKIDDFNGINGAMVYNKRTVKPGKSLKLRDTSKWIVAIGKHKGIIPSKDWIIVQNLLNENSVKAPREGTSRISLLTPLLVCANCGNKLRAVYKYSNGEVKHHYYKCRLKERSRRTQCNIPNLNGAEAEKLVIEELKRLAVSRRALAKKLDKTKKKINSNFKNVDNEKEKLERNIKELEKSIENLTIQLAQNSSSTSAHYIIKQIEKFDKELNNLRLKLNAIEEENSNTLVEKINLEILQQQLSKFKSNVDTMDFDIKKKLLMGIVKEITWDGEKLKINLLGTD

SEQ ID NO: 3725 - protein, 529 aa, unidentified
  source 1..529: note = uncultivated organism
MAQTNLAIARPPRITVIDARAPDKAKLRVAAYARVSSDSDDQINSYLAQVDHYTKFISSNEDWDMVDIYADEGITGLEARRRDEFNRMLRDCRDGKIDRLLVKSTSRFARNTKEYIQYVRELLRLGVSICFEKENIDTGKMTSEQVAQIYGAFSQMESTSHSSNMRISMRIRMQNGEFLPSSIPYGYRLDVEARELKILPEEADVVRYIFSAYLGGQGKDDIAKELNELGVDRGHNRERWHPSTVTYILTNISYTGDELWQKSYATDTIPFEQVRNKGQKPKYFVEDCHEPIISKEDFERVQVLMAARRMQFHSGGKTSVSVFSKRIVCGSCGRVCRRKVTSGKVYWVCHQRDADKTRCPVPQVPETEITAAVLRCYHKLKRNQQILACFLDQLRELRERELRANRKISDIDNEIKHLAEQNLVLIRLKAKGFVDPALFLAQQDEIERKLRDLRRLRRRILETAEEDSQIQATEGMLDYLEESPEWLEEVNGELFDYLVERLTLVSAEELKITLHGGLELTETMTRTVR

SEQ ID NO: 3726 - protein, 522 aa, unidentified
  source 1..522: note = uncultivated organism
MENQVELCRRYAAEHLEEGAGAEVVIYEDEGFSGKDLCRPQFQRMLEDSRRRPPDYILCYRLDRISRSVGDFAPLVEDLIRRGIGFVSIKEQFDTSTPMGKAMMYIASVFAQLERETIAERVRDNMLLLARTGRWLGGEPPTGFSTKREMSQTSDGKRKSLCRLQWNPQEMPIAQQIYTQFQKIHSLSAVKAALEEKGISSRNGRPFSAQGIRSVLTNPVYCVADRYARDYFLSQGAQICFSEQECSDENGLLVYNKRGQHSSKSLESGKSSWIVAKGKHRGIISGRDWVELQRALEHKPGITAPKGGNHRALLSGLLYCRRCGERMLAKPRTCGGQFDYICAGKLERGVHACSCQNLNGSETDGQIIHFLQEHLHLHAGIAERLQPLARQLKEKSYSPRSAALQEALDTVEGELNHLAELLSRKELAPPLFQRLNQRAEDLERNRQAIIKDQEQLQMKQPLFSDPKEIAQELLRPEKLLDVLTLQEKQILARLLIQRIWWDGETLQLCCNSGGPLYDRVAL

SEQ ID NO: 3727 - protein, 521 aa, unidentified
  source 1..521: note = uncultivated organism
MSSSKTDTARAVRCAIYTRKSSDDGLELDFNSLDAQREAAEAFIASQRGEGWQVIPTHYDDGGFSGGNMDRPALAALLKDVEAGLVDCVVVYKVDRLSRSLLDFTRIIATFESQKVAFVSVTQHFNTTHSMGRLTLNILLSFAQFEREIISERTRDKIAASRRKGIWGGGRPILGYDIERTPGGSKLIVNQEEAERVRAVYALYLELGSVSRVLRRLDELGWRNKAWTGKDGRQLGGRAFDKSQLFKLLTNPAYIGKVRHKENLYDGLHESIVPVELFSKVSTTLRENRNHEGRGSGNARNALLKGLVRCKACGCGMTHHYATDRTKAGEPREYRYYVCSRAQKRGWDACPGPSLPAGELEKFVVARIRALGRDDATAGACVRNAQERLRARVSELQRESGAANAQANALVAESRLVAERFEGHERDARLAILRESIRSARAAAARLDAQAASIDARVLEDDELTGALESFDPLWESLRFAERERLVRLLVRAIEYDAEHESISVTFRTDEPVSASEREKA

SEQ ID NO: 3728 - protein, 520 aa, unidentified
  source 1..520: note = uncultivated organism
MKKADKAKAKVVRCAIYTRKSTEEGLNQEFNSLDAQREAGEAFIASQKHEGWTLLPRRYDDGGFSGGNAERPALQRLMQDVAAGEIDCVVVYKVDRLSRSLLDFAKLMGTFEEQNVAFVSVIQQFNTNHSMGRLTLNILLSFAQFEREIIGERIRDKLSAQARKGKWKGGIPVLGYDVDRSTPTPKLVVNKAEAIQVREIFELYLSMGSLLLVATELNDRGWFSKHWTTKSGRKRGGVEFDKNNLHALLTNPIYIGKIRHRDDVFNGEHAPIVEPALFFRVAERLKRNAHLPNPRSRNKYGSLLKGLLYCRGCGRAMTHTYNTERKRRYRYYTCVRVLKLGRAACPSRSLPASEIEKAVVDQVRCIAKDPALRRAVFDETQVYLRQQLEECRLNLAVSEREITWLEEELKQTTQTGPTDSEMTKLAADLQERLSCEHHKYGKLANRVTEMEAAEVKASDIARTMENFDNLWSTLSPKEQWHVLSMLIQRVEFDATESSFEIFFEDAGIAALSHAAEGSAR

SEQ ID NO: 3729 - protein, 513 aa, unidentified
  source 1..513: note = uncultivated organism
MATAKVISPLARRPGTKTRVAAYCRVSSSSADQHNSYIRQVDVYTKLIANNPDWELVEIFADEGLSGMKAANREQFQRMIQMCELHQIDMIITKSVSRFARNVKEALEYCRKLKLLGIGVKFEKEGVFTLSMADEMLLNTFAAMAQEESKAISQNQRLSILKRMQSGEYVDSNAPYGYRLVDRQLSVYEPEAQVVRFMYHQYLKGHSTTEIARELNERGIPTKTGKQIWRSSKVSYILRNEKYKGDSKYQKTYRESFVPFRQYKNRGEEDMYYAEQTHPSLIDAETFEAVQKLFAKRQETFGQCSTNITYPLTGRIQCSECGSFFHRRQVSGCVKWACSKHIQDRHLCDSEYYTEERIYTGILTVLNKLRFGGTDVLGQTLKMLESALTFTKQGNMLVQQGDREISELNSKLLMLEKMNAKGYLDGDMVKAQTLEITARLSELKRQRQNAIISRLPAMIADIKHLKSLLWEIEEPLVEFDEGLMHDTVREIAINKHGEMTVTLLGGLSFTEKL

SEQ ID NO: 3730 - protein, 509 aa, unidentified
  source 1..509: note = uncultivated organism
MDGQKIGLYLRLSRDDERAGESMSIENQRSGLMQYVHRRGWQAAEIYSDDGYSGTNFDRPGFRRLLDDIAAGKIDTVITKDLSRLGRDQIGTAYYYQIYFPQHQVRYISVAEGFDTAEPGAAGALFPFLTAANDFYTADISRKVRAALTTRKREGKFIGASPPLGYRKDPEEKGHLIVEPEGAEVVRRIFRMYLAGGSVVGVAKALTEQGVPTPSQRKGGGITGSRFPGVWSDTMVRRILTNPTYAGHLTQNRREKVNYKLSRRITLPEEAWIIIPNTHEPLVSQDTFDRVREMLAVRSYTHSGRGGHLLTGLAFCADCGAPMTYVRESEKRTCMVCQGYRKGGRLHLCTAHRIREDAVIGAIQRELRALAGQLDEREIQKALQNEDAADGAQRRQRAARQKLERLNAVLEQLYQDREAGVLLEGEFRTLLARNREERAGWEGVLEEARQHMEQESTHRDFAEQIHQFLTFDTLDRAAVTSLLARVLIHADQTVELEFRFRRPDGQETV

SEQ ID NO: 3731 - protein, 606 aa, unidentified
  source 1..606: note = uncultivated organism
MNNNVNDRIRVATYARVSTQEQALEGTSLDFQDSQLLAYCQLQGWSVINSYSDPGYSGKDGNRPGLERLLADAKIGLFDKVLVYKLDRLARNLRLLLEVEQKLRASGATVTSVKESVDTSTGTGKMVFQMFGMIAEWEREAIIERTKSGRLQRYKDGCWAGGSVLYGYAYNKGTKKLVIDEAEARIVRRIYSEYRDGKTLNGISEGLNKDRVPGRTKNCQGWRQTVVRDILLNPMYKGTQIVNRHTRISNINKIDLSKAIQIRVPAIVDEQVWQIAQERLQNNKHVKPKKRGEFLLQGMITCGVCGYAYRTERVLSARYYCCRGKMKDHHLDGSPRCKSHYLKAEWLENQVWQRIEEIINDPDRLFAVIRDTIENLRSKEADLSARIMPINERLTEIAEQKAKLADDWVIRHMNNEKFKELKDNLDREESRIRALKAEIDPAQIADLESTRGVLRFWEDQIRSMAWNTENEDGSMVRLVDKPHHVALKVVGFEDKKLSETLGFPASKRELLDKLQVKLVVFNDRIEVKGLFPIQPINIQSLVSTKGDKEGFYSCIPPTGECAARGESSPLSYSFPLSDQLKAAMVAGIENHIWNVQEIVRLAAPNY

SEQ ID NO: 3732 - protein, 551 aa, unidentified
  source 1..551: note = uncultivated organism
MRQQQNYNVGVYCRLSRDDKNATAESMSILHQRQMLTNYVKEKGWDLRDCYVDDGISGTTFERPDFQRMIRDIETGRINCVITKDLSRLGRNYIQVGQYTDFVFPQYGVRYIAVYDDYDSLQGENDIAPFRNIINEWYPKEVSKKVRQVKKASAAQGKFMGSKAPYGYIKSPMNKHQLIIDPEAAAIVKRLFAEFNNGESGRGIAAKLNIEGVESPRAYHYRQIGQTNPRPEESTAWGSNTVMQLLKNHVYIGHMVQGKREVASFKTKRRQFIPVDEWIVVENTHEPIIAHDTWERVQKRMESAKTTKSHNPIRKNNKNEVSLFSGIIRCADCGSLMHYTQRTDRGKTRETYRCGRYVIYGKEQCSTHAIHFDTLKEIVLTDIKQYATLAEKDEEILINKLMTSTAQDRNREQSIHQSKIRELKKRVVTVDHAIKQLFEEKLAGNVPDSIFKKLMSDYEAEQIKLADEIDELERKLETAASDESDIEKWIDLIKECIHLDELDRAVAIALINCIEVSEQFDTDGQRQQNITIKYNFVGKIPETQEKMGISA

SEQ ID NO: 3733 - protein, 511 aa, unidentified
  source 1..511: note = uncultivated organism
MRCAIYARVSTRREEQQNSLQNQIALAESIARENGFTVVGQYIDNGISGSGLKNRNEILRLLDDAKKKKFDVVIAKSVSRLARDTRKGMEIAYQLESTSIRLILPEDNYDTETSKSRLMFNLKAILAEEENSKLSERIKLGLQSSARQGKRIVSLPPYGYTVNPVTKRLEVDETTAPIVKEIFRLYLHEGWGMFKISNYLMRKGVPTPRTVSGAANAGTKWHQNTIKGILSNPVYTGKLVFHREETTGILAESELYKIRRKVEPDKQIVIENAHPAIITEDDFQAVQELMKKKGERKSNGKESLFAHIAKCADCKSGMHFKPDRRNGAYVCGGYVKYTSLYCSSHIIEEQALLQAVKNDLRALIQDSVRIERFYGLAEEKANILQSSIRRELKRIDKQLVELDKRFDKLLGLHVEGAITTEQFKQQNERISKQQQALANKKAELKSALESRKDFNEQLQAFMKEVERFIKLDIDDEQVLKQVLQRLIHKIEVFEGGKIKIHYNLSHPLPLN

SEQ ID NO: 3734 - protein, 602 aa, unidentified
  source 1..602: note = uncultivated organism
MDNLAYKMPNMYISNRLRTSGLDKVKVCFYGRVSTQHEEQVNALSNQLQWYDSILAQHPNWEKVEVYVDKGVTGTQVKKREGFMRMIADAEKGKFDLICTREVSRFARNTVDSLQYTRQLKDWGVEVYFCNDGIWSLEQDGELRLTIMSAMAQEESKHISERVLAGQRTSREKGVLYGNGNILGYRLIKGKKSTDNTYEIIEEEAETVRMIYDLYLSGFGVKAIASKMVELKRKKANGSYKWEHTAVLRILNNKTYAGYIGYKKSYTKNYLGHDRVPIRDMNQYEYVKGNFPAIVSEETWERVQAIKNKRVVIVNGRKHSKSISRDKWCRHLVCQCGSVYARYKWRTNKSGEVCYGYQCRHQIRYRKRSFWEKQGIDDSEYCDVPSICEWKLDFMAKNILKRLWRDQKATVEELLGDIQDNYTEEEEIKDNEVRVEKLHRELERLQNRRSNLVDMKLDDLIGKQEFESKNQSIEERMQQVKNELTILSQESEATEPVEIKEEINKIKEYLNTVCDLDNKKVSDELIDSIVTRITPMESGVFKWYIQSDDNGMETSFDESKYILYDKFTLNFEEAKAYRKSFGNFIRFNQWKDIVVEVYVRQE

SEQ ID NO: 3735 - protein, 504 aa, unidentified
  source 1..504: note = uncultivated organism
MNTKIDAIYARQSVDKKDSISIESQIDFCKYELKGGNSKEYTDKGFSGKNTDRPRFKELISDIEQGLISKVVVYKLDRISRSIIDFANMMELFQKYNVEFISSTEKFDTSTPMGRAMLNICIVFAQLERETIQKRVTDAYYSRCQKGFHMSGRAPYGYKLTPTVVNGINTSMYEAEPEAAERVKMMFEMYAAPETSFGDIARYFSNEGIREDGREISRVTISQLLKNPAYAQADIDVYEFFKSQGTNIVNDAADFAGSNGCYLFQGRDVAESKRSDLNEQILVVAPHEGLISSDTWLAVRKKLLTNTNTNFRAGRKVATTWLAGKIKCGRCGTGLTCICSPLDVLYFRCRKRADRKSCEGCGTLHVKEVENFIYEEMCRKMKEFKTLTDSNPAKANAKLTALKVELAQVEAEIEKLLNTLTGANAVLMSYANGKVEELDAKRQSLSKAIADMTAGAVSPNKLNQISGYLNDWSNIDISDKRFVVDGLIHQIKITSENVKIEWKI

SEQ ID NO: 3736 - protein, 557 aa, unidentified
  source 1..557: note = uncultivated organism
MTKKIRCAIYTRKSSEDGLEQEFNSLHVQREACTAYITSQKAEGWVLLPELYDDGGLSGATLKRPSLQRLLSELDEGRVDQIVVYKIDRLSRSLTDFAKIVDRLDRAGASFVSVTQSFNTATSMGRLTLNMLLSFAQFEREVTAQRIRDKIAASKRKGLWMGGSVPLGYGPHGRTLTINEAEAITVRAIYRLYYSHKTIFEVTKKARRLDLRSKRRTTPSGEIKGGNVIDRGNIYYILTNPIYAGRIRHKKQVFEGQHPAIIDPKEWDEIQRRLSNRSGRKRGVRTAAHPSPLAGNLFDETVDCLTPSHSAKNGKRFRYYISRRLVTGKSKKHPDAWRLPAPRLEASIARVVHNHLSDPRILPKLLGEIDSTDVDQLQAKTKLLADTVAPHQSASKWSALITSATISPGKLIVQLNSEAIADSLEVREDRIDGAHLRLEAAFQLRRKGVETKIILGGEPAEVDEVLVRNIVKARNWFEAIKRGETFAKIAKREGTSKRRIQDVVDLAFLAPDILQQVIAGTLPLPAATDVLIKRGVPGRWTEQWLLLKENLAHSNAT

SEQ ID NO: 3737 - protein, 569 aa, unidentified
  source 1..569: note = uncultivated organism
MANSKYAEILEQSSVPNKVWKTALYLRLSRDDGTETESNSIASQREILKEYLKRCPDMELVEIYSDDGYSGTNFDRPDFIRMMEDVYSGKINCIVVKDLSRFGRNYIEIGNYLDNVFVRQRVRFVAINNNYDNLSTGNNVVSNLLTLSITNVTNESQAASTSVNVRGTLNLRRQQGKFIGSFPTYGYLKDPDDKHHLIIDEETAPIVRMIFERFIAGESIIGITKDLNEMGIPNPSMYKKQKGLNYKHPSGRSNDGLWPDSSVRRILQNRMYVGDMVQGKNTTYSYKIKQCRAIPKDEWIIVEGTHEPIISHETFDNAQALFNKSIRKSPKKKNVDLFSGLVRCADCKRVMNKKTNQHSYGTYHYYRCVTARKMKKSACTNHTIRIDKLEEAVFLSIQNMINTAVTMSDMLDLINNNAKRKSESSHLQKALKTQVSEREKLVTMLTDLYPDWKSGVITMDEYQMLKERLNERLRVIDEKIAGLTKSAEQFKNGINEDNDFVAHFKKYGNIEALTRPIVTELIEEIFVHEGGDIEIVFKFYDAYMQVVEYIELNKHLIEPEKLTKKKKTA

SEQ ID NO: 3738 - protein, 542 aa, unidentified
  source 1..542: note = uncultivated organism
MLLIKAGETMMGRQKNTDGALALTQGPRVVTIPANTTELARKLRVAAYARVSSNSEDQMNSFVAQNAHYTELITSNPEWEFVDVYADKGITGTSAEKRDDFQRLLTDCRRGRIDKILVKSSSRFARNAKECLEAIRELKALNISVCFEEQNIDTAELSAELLTAIFAMMDQKESESISQNMRWSYQIRMRRGTFVPATMPYGYTKKERPYVVVEQEANVVKKIFSDYLMGIGIAEIATNLNKCNTADSLPTHQRWTPHAVSRILKNEKYAGNSLWQKTYHTKGFPTKQKNNHGEVTQYYIKSTHVPIIAPEIFETVQTLLKRRGEEYFPGREQDSPLNRNIVCGICGTIFRKKRVRGNMYWVCRVHERNKERCEMRPLCEIDIKEAFLRIYHKLQCGKSVLDKMTADLQAAQNGKMLWSADIVELNNQIADITRQDRLLTQLKHQGLVDPDIFISRRDALAEQLRAVKLEKERLLESEENQTIRQTQLLLEALESSPDFLDTFDEELFRELVEKIIVESNNRLRFRLINGLELTESIERAVR

SEQ ID NO: 3739 - protein, 622 aa, unidentified
  source 1..622: note = uncultivated organism
MRGLEKSKRVGVWIRVSTEDQARGESPEHHEKRARMYAESRGWEVARVYHLEAVSGKSVMGHPETAKMLEDISSGRVTGIIFSKLARLARNTRELLEFAEIFEAKKADLVSLQESIDTSTPAGRFFYTMLAAMAQWEREEIADRVAASVPIRAKLGKPLGGAAPFGYRWAGKELQPDPSEAPVRKRLYDLFLEHRRKKTVARILNESGHRTRNGSPFTDTTVDRLLRDPTAKGHRRANYTKSTGDKKKWVLKSPDQWVWIEVQPIVSEEVWEAANSILEERRVSGQRPAKRSVHLFTGLVFCACGGKMSVPSNSPKYICPKCRNKIPEVDLENVFQEQLKNFFFSEEDLAAYFARADEVLEEKKELLLSLETEEGRIGSEREKLYRLYMADQLSPESFGERDRPLDARLRQIQDERPRLQGEVDFLEIQHVSSAAMVSEARDLYSSWSDLAFEEKRRIVETITERVVVGKGEIDFDLSYLPGRSGSGLVGASRGGQSASSRGRPSSSLSPELVTERQRGHTGSWRRRRGSGPGTSARPRRARPKPLRPRAARGAPRERRAGTRGARRGRVRRNGRARARRGEGRSLLPRERRPRRRGAGTGTGDGREVRSARGDARKRSRRA

SEQ ID NO: 3740 - protein, 591 aa, unidentified
  source 1..591: note = uncultivated organism
MSLNIKRVGIYLRVSTEEQARIQDGSLVSQKQRLIEFVELQNARHETAWGMVVDFYCDEGKSAKDMNRPEFQRMLRDVKSKRINLIVATELSRLSRNIRDFCEVWDLFKKHETSFITLRDHFDTTTAAGELMMFNMINYAQYERKQTAERISVNFQARAKRGLWNGGSIPFGFDRNDKNKAELLPHPIESKQVKDVFELFLKEGSVRRTCLAMTERGIFAKAYTNKHGISKSGRSITFSGLQRILTNRAYVGIREIGVSRGKKLELVKAAWKPLISDELFKQVQERLQLNKNKLKPYERKNYAFPLTELLICGECGKHLGGKSGTSQTGDRHFYYGHSRQLKNDGINHIRRCKLESVRVEKIEDIVLKSLKHLLNNEKVLDHFLDIYLKGNQANFPALQGKIKTAGNDILTLERRNQNLVERLSELPKEIAGDQLYNQMKTNNDQIATLKGTLASLKAEEYQKGSQSVSREGLLFKIRRTVQNLEKAPIEKHKDIYGNLIKFAELHSTKVRMGVYAPVQNQSAQTKKAAGGYPAASIKSDLNFFEPTRVGSCTVLNGAEDRNRTGTSLFTTQDFKSCASTNFATPTLKSLI

SEQ ID NO: 3741 - protein, 542 aa, unidentified
  source 1..542: note = uncultivated organism
MKKPPPKPVRCAIYTRVSTDQGLEQDFNSLDNQREAAEAYIKSQAHEGWRCLPAQYNDGGFSGATLERPALQKFLDDVRARLIDVVVVYKVDRITRSLADFAKLVELFDQHEVSFVSVTQAFNTTTSMGRLTLNVLLSFAQFEREVTAERIRDKIAASKRKGMRMGGPVPLGYDVANKRLVINPEEAKRVRLIYERYLELGCITKLARNLASRRIHTKATRRPDGTTRGGISFTKGPLAYVLKNRTYIGEVVHKGQHYPGEHEPILDRALFEAVQEKLASQTRARRHTRINNGSLLTGRIFDDRGNRMTPSSAKKGSARYRYYISAPLIQGRREAAGKVSRLPAADIEAAVLNATKQHLRRIAAPDKAASYVGLTDGELVERYLEKIVVKQGAVEIIWANQDEIEQLAPLTVSWSPIPSTRKREIILPADGRAAPQRPIRSETRARLIEGIAKARLWLEELVSGRISGTKAIADREGCSERSVRMTLSLAFLSPHIVQAAVDGTLADGPGVSGLVGVPECWRKQYKWSGPKERPTLGKAGRS

SEQ ID NO: 3742 - protein, 577 aa, unidentified
  source 1..577: note = uncultivated organism
MNDRRRFRCAIYTRKSHEEGLDQTFNSLDAQREACEAYIHSQAGLGWELIEEQYDDGGISGGHMEREGLQTLLADIRAGKVDVVVVYKVDRLTRSIIDFGKLVEAFDTHDVSFVSVTQAFNTTNSMGRLTLNVLLSFAQFEREVTAERIRDKIASSKQKGMWMGGRVPFGYRAQNRELFIDPDEAQVVRLIFELYHEHRRIKFTKEALDRQGILSRTRTSRSSGRVTGGLPFSKGNIASILANPVYAGRIKHKDKVYAGNHEAIIAETMWEEVQHLRNTQAASKTKRPRPKCSGPALFAGAMFDADGNRLICERATKKGKHYYYYTSSRNKLKDTDPKASIIMTTGKPTGKPIRMPVAKTDPIIEAMIADFLSNEKDLLHTLNLQNQSAEAIADACHAAKGLKQRLGAMEIYERMQVYESIIARIVIASDAITIWFEPKGLSNQLQTTLDPESELKFEKQMTIRRRGQELKLVIGGLEHKATNINQPLLKLIAKAHQLRVELESNEATSIKAFAQDNQLDHADAKNLIPLSYLAPSIIEDILEGHQPSDLTVTKLKQLAPRLPLIWSEQRQLLGYPA

SEQ ID NO: 3743 - protein, 568 aa, unidentified
  source 1..568: note = uncultivated organism
MEDTRKIAIYSRKSKFTGKGESIGNQIELCKAGIRTAYSDISDDAILIFEDEGFSGGNTNRPQFQEMMKLCRKRKIKCIVCYRLDRISRNICDYTSMIEELNQLDISFISITEKFDTTSAIGRTMMNIASVFAQFERETIAERIRDNMLELAKDGRWLGGNTPTGYRSVETIGSITMDGRKRKARKLEIIPDEAKLIQLIFSKFLEFHSLTKTETYLIQNNYITKTGKYFSRFAIKGILMNPIYLKADEAAWNYFDTKEVEVFSDRNCFDGNHGVIAYNKTKQQTGHSNKVRDIKDWIIAVGKHEGIISGEDWCQTQKLLAQNKSKSYRKPRSNVALLSGLLFCGDCGSFMRPKLSQRINQDGEFIYDYLCELKEKSKRQKCSMKRINGNELDQAISNEIKKITSDESELLRILKKEAAHAQMRNTSHQKKILSLKRNKSYTECKIKNLIALLEKAEDTAAHKYILEEINTLDKAKIDIEAQIQEYEGMERVNALSDLEFEGLAKMLCSFADSFETMPLEQKRFTIKTFVRKIVWDGSQVHIYFLGNEDDKTDISQDALLEPQREGYK

SEQ ID NO: 3744 - protein, 554 aa, unidentified
  source 1..554: note = uncultivated organism
MKEKLFLAAMYLRLSRDDEDRDGSMKTESNSIGSQRELIRTFIREQSDIELYDIYVDDGFSGSNFDRPEFKRMISDIEAGRVNCVIVKDLSRFGRDYIESGRYIQKTFPGLGVRFIALTDHYDSSLADTGESSIVLPVKNFINDSYCRDISTKVKSQLEVKRKNGECIAPFAVYGYLKSEADRNRLVIDEYAAENVRKIFAWKIEGIAVSEIASTLNRLGILSPKEYKKSLGLHYNGGFSGTGTALWSSTSVKRILTNEVYLGHLVQGKTEKVNYKVRKNTEKPKEEWVKVENTHEPIVSEDDFFIVQNLLKTDGRKSMDTGNASPFMGLLFCGDCGEQMVRRVNRYKDTVKVYYICSTKNRGDGCSRHSIEEQTLKGIVTESVRHYANTFLKEKQLFERSVQFETNFESVSRYDKEIDRLKREQDKYYKLCSGLYEDLSSGIITKEEFERLHGGFWQKARKLEEAMKKQEQLIKEMFKKGVLSAGRLKTFQDCVELKEIDRRSLCSMVKRIEVYENRQIEIEFYFSDIYRVMTAVNQKIRMDKSKLRAVERSA

SEQ ID NO: 3745 - protein, 502 aa, unidentified
  source 1..502: note = uncultivated organism
MKLAVVYARYSSEKQNDQSIEGQLDICQKYAAQNGLEIVDTYIDRAMSGTNDQRPAFQQMLADCAKPVPWDIILVYAIDRFGRNSIEIAVNKQKIKKNHKTLISATQRTSENIDGSKNLDGILLENMYIGLAEYYSAELSQKVRRGFHENRKKGLFCGGNIIFGYRVENKKILIHEDEAKVVRYIFDQYIRGRQAKDILDELTAKGVMHRNKPIPLNTFYAILRNQKYIGIAHLSDGVYTDMYPPIIPKPLFDEVQIILERNKRGSKSPTTDYLLKGKCICGYCGRNVQAETGTARDGSTRHYYKCGGRKKYRSCNKSVHRKDDLEKLVIEITRQVIGTPENIDLVADAVMEIHEKRNKSQSMLNILLTEQEEAQRIVNNIMKAIEQGILTPTTKTRIEQAEQKLAEIEDKILAEQYKQQNQIKREQVVEFLKHTVWQKPQLMIYTLIQKIVLYDDKIEIYYNYIDPIRPDGPSDDDDHRIFFILDGSNLIRSAAPTKKDEP

SEQ ID NO: 3746 - protein, 540 aa, unidentified
  source 1..540: note = uncultivated organism
MKPVKSVEVIPGYSGKKSGNAGFRRLRVAAYCRVSTATEQQESSIDNQYEHYASYIASRPDWVLAGIYSEAGVSGTKQEGRPELQRLLSDCEAGRIDLILTKSISRFARNTTECLAMVRKLSALGVKICFEKENIRTDTMESELMLTLFSSMAEAESHSISSNSTWAIRRRFQNGSYKYSKAPYGYRLENGNFVVEPEEAATVREIFAMVLEGNGTVLIAKELNRRGIPTGTMKRDGTPGTWSASMIQGVITNVVYTGDALMQKTWHDRSFRLRQNYGERPQYYVSGHHEAIIERSVFELAKAANRQRGEEKGTRPKERKPQIEPVPEQENRHCLSGKLVCGCCGSGMKRITQTTAGGRRHHWCCTRHLEDAGMCPSKRVAEEDILNCFATMMNKLNYGADALAYIYRSAERAKDGMVHEEQISELKERIVECTKERFQLSRKLSKGCYDPGSLTRRIMELQGEEQFLKDMAEKLGGRSSRDDKLKELKAGIRDWQTGMPGESGTEQLIRKLTDHITVGPDREILFHLKCGLTFKENCSM

SEQ ID NO: 3747 - protein, 637 aa, unidentified
  source 1..637: note = uncultivated organism
MNEKDVKRICGIYMRVSTEDQVRDGFGLPEQKVRLEDYCKWNGYEIKEYYTDAGISAKTGNKRPEFERMLEDGRQGKINMIIAYKMDRLTRSMKDWESLMEYSETYDIALAFVGDKVDTTNANGKMYSRIMMSVAQNEIERTSERTKDGLAGAIKEGHIPHKAPLGYRHENKKLVIDYATKDIVIRIFELYHNGMSYQKISNLFNEEKVLDKTNWRDSTIVNILQNEIYKGDFVHGKRTKHPTYYKNVVEPIISRELWEECQQQKKNNSRSYKRNLTYLFLQKLRCPKCNRIMGGKATKKKNGNVYYYYYCTDCKCNIKEDIIEKHISSFIDDIVEYDSVVNQFFLPMMKQKIENPKEQLEKELREQKLKEERIKRAYVNGTFSLDEYDEEKRKVNKTIEELEIKLNDTEVCDELRFTPEDILLKRDIDFISRLEYSDKYQEFNKFWKDYTREEKSELIMRYVDEIELEKDKNKYEVKYVKFRESMCKPMTELENNGYLDKKIQMFGNFAGYLRFSDYLPTEKVGEHIMRLRQFYDVRFYEADYYVQDKIFRFDLDENKSTIVRVFPMKDYKKIDPDNKKDIHNYGVLYVNKNNLLYKASDDVVLNYIPDVCDSVTFSKEPTLIDVKPITKKTIAEA

SEQ ID NO: 3748 - protein, 516 aa, unidentified
  source 1..516: note = uncultivated organism
MKRITIIENDTRKSRKTRVAAYCRVSTDSDEQLVSLEAQKQHYETYIRSNPEWENAGIYYDEGITGTKKDKRPALKRMLKDCENGRIDLIVTKSISRFARNTTDCLELVRWLSEMGIYIYFERENINTENMEGELMLTILSSLAEEESVSISQNTRWSVQKRYRKGTFIIGYPPYGYQNHDGMMEIVEEEAEVVRDIFASFLSGKSTSVIAAELRDKGIKTKKNGQWRPETVNAMLKNEKYAGDVIYQKTWTDERFNRHINHGEMDQYVVRNHHEPIVTREDFEAVQALMDQRFGEKGGERGTDKYGQRYAFSGKIICGECGSTFRRKIQKRAGQNYIIWSCHRHIEDKDRCRMMAVTQDAVETAFMTMMNKLAYAKEEMLRPLLDEIRSFDRTEGVGRINELEQKIEENVRKREHLRSMLTQGLLDADIFNSENNLLLAETDQAETELSDLKAGIREQLTIIAELEKLIKHLGSGQMMTAFDEHIFTEFSDHIVVRSRSCIEIVLKCGLHLKEAI

SEQ ID NO: 3749 - protein, 528 aa, unidentified
  source 1..528: note = uncultivated organism
MSRALAPATAPRAVAIYIRWSTDEQTDGTTLETQRERCSLYIKSQGWTPSEDLEFVDDGYSGGTLERPALTRLREYIRAGKVDCVVAYSIDRLSRNLADITELIQREWAGRCTFRSATQPIGTDEGNPTGQLVFNILASFAEFERGLIRERTYSGSIRRAKEGKVPGGRRPPFGYDRVGVGQLAINETQAVIVRQIFEWAVTGPYGQGPNVIARRLNEQGIPSPAGKRWWSMAVRDLLHNPIYCGTVTFGRRKYNGVHRHDKNHPLRVKREKPLVVVEDAAPAIVSKEVWEQVQALEKDRSETYTKKGVQAKNRGLLTGLLLCRCGGPLHRFYKQGKLEYYRCSRNAQAGGCIEQPGIYRAKELEQLVVDEVMKRYGTRDLREGAMRKVEEVLSGVSRRQEYEATLEQIALRLKQVEGDLTRLRRAARTGEIQLSTYEELKEDADAERLDLEAQRQVLEISLSQNRDTSAALDAWKKTLEGVDLWSQLEPGRQREVLFGLIRSIEVYRRRGDTQPVSVSFTWESPVTL

SEQ ID NO: 3750 - protein, 608 aa, unidentified
  source 1..608: note = uncultivated organism
MYEDDIESKQITQRVAFYLRVSSEDQVEKFGLALQMESLNNLLSYKGKYPNGNPRLVLAGENYIYSDPGVSGTIELVDRPDFRRLLENLRESEPENRPFDVLAVYKVDRLARKLEILLKAIKILEKYEVRLISTLENIDTTTPFGKAILGIMGVIAELEIETTKQRMVGGKNQAIKTKGTVIGSHPVFGYTKDADKKRIVLDEEAQIVRLIFQFFVYDSLTPQEIATRLKRDCVLSPAASAITHNKKSGDVHKINNIYHWRAETVASILKDETYLGTYYYNKTTVDSKTKKVIRKPKEEWLLSTIRHTPLASKHDFELAQKRFKDRVAKREVTQKKSDDYTYLLSSLLECDHCKRPNESKRHSMGGAKDEIGYKGSGVYSYKYVCGRKNTSKNSETCGVIPLPADQLEQYVVEFVKTLLQDPQMAYQQQLNKKSTKLYLQHLEKRIEIKLKQINNYPNRIKQLRDQQEHGHIDIDELDKRTIELKTEQEIAEQEMEKLQQERTKKEMPLRYIETLEEFQTKYGNELDDILKDRKQATVFLRNMISKIIVYSRDMNPGEKVAGRPKKGTKQYIPNSIEIVLKLPNEMLTHLSSKDSVVNKQFGVTSVDL

SEQ ID NO: 3751 - protein, 602 aa, unidentified
  source 1..602: note = uncultivated organism
MQKNDDRIAIYSRKSKFTGKGESIGNQVELCKEYVRNMFGEQYVERCVVFEDEGFSGGNLKRPDFQKMMYEVRKHRFKAIVVYRLDRISRNISDFTGLIDELTKLDVSFVSIREQFDTSTPMGRAMMFIISVFSQLERETIAERIRDNMHELAKTGRWLGGNAPTGFKSEAVSKVTVDGKTRKSFKLVPIPEEAEIPKMIFDLYTETDSLTAVEAEMLRRRIKTKQGKDFTRFAIKAILQNPVYMVADEAAFNYFTEREADVCFPKEAFDGSCGIMAYNRTDQEKGKATVLLPVSEWIIALGQHPGLVPSKQWIKVQESLERNKSKGYRKPRNNEALLTGLLFCSCGERMYPKLSKRVTADGQPIYTYVCKMKERSKRERCNRRNANGNLLDAAIIEQIKALTEYNSSFISQLEKSRQFYTGSRQQYESQLAELRAEYRENEKTINGLIDSLAMVGDSIAKPRVLKRIEELTEANREVENRIHELEGLTSANSLSDMEFDLLRQMLSMFRTNIDEMSVEEKRAAIRTVVRKVIWDGVNAHVVLFGADEGEIEFPDMDGRIGNTDEVGGEEEPLEAFTDVDYDEFDYESSYDGSKTPWREDSK

SEQ ID NO: 3752 - protein, 517 aa, unidentified
  source 1..517: note = uncultivated organism
MASKSDTVRRCAIYTRKSTEHGLELEFNSLHAQREACEAYIKSQASQGWQALTRHYDDPAYSGGNLDRPALQRLLKDIDAGLIDVVVVYKIDRLTRSLADFAKLVEAFDAKAISFVAVTQQFNTTTSMGRLTLNVLLSFAQFERELSSERVRDKVAASRKKGKWTGGSVPLGYDSKDKKLIINQSEAKTVRIIFSLYLTLRSFQKLVDELNQKAVVSKTREIKRKMSGGIPFSYGPLAYLLKNRTYLGETGHKGSWFPGEHEAIVDRDVFEQVQQLLKVNSLGRTGRRQRNGALLAGLIFDDRGNRMSPSFTVKRGVRYPFYVSSAILKGRKSDAGSVTRISALDLDAAILNALRHRVDGVEDDSPRTPQNIIDHNVSRIVIGSKNVTIMLKPTADSAPSAVEIPWSTPNKRGCPRIEGTNEDTVRAPNPQLVQAIVRAHAWIRLLSDGTHKTVKSLAQSVGVHPKIVRNGIRMAFLAPNVTKAILEGDQQPGLRLKDFIGPVPLSWSGQRLALRSE

SEQ ID NO: 3753 - protein, 553 aa, unidentified
  source 1..553: note = uncultivated organism
MSETKRVRCAVYTRKSSEEGLDQSFNSLHAQREACEAYILSQRHEGWEIIREEYDDGGFSGGNMDRPGLAKLLADISAKRIDTVVVYKVDRLTRSLADFAKIVEQFDRQGVSFVSVTQQFNTTSSMGRLTLNVLLSFAQFEREVTGERIRDKIAASKRKGMWMGGVVPLGYELRDRSLVVNEDEAVRVRRIYQLYLELGCVTKLQNRLDELGIRSKKRLSRKGRSSGDAIFSRGSLYELLKNRIYLGEIRHKEKCYPGQHAGIIAPEIWEQVQALLVSNRPPENVHEGIREADVLTGLLFDADGNRFTPSHTTRHGRRYRYYVSQAIIHGQKVTRKSIHRLPAKRIEALVRNGVEDIVRSSNRLLDAISDRCSDPVEMNAMVKAAESYRDGRTESFTLTDVITKIVVREQYLDISICRRGLRNAVGLDSCVSTGGEFEMQLPVVLGRIGGELRFRMDGIVRQDRQEVPSLVAAVVRARTWLGRLLSGDATSQRDLAEKEGLNERYVSRLLPLAFLSPEITESILEGSQPDHWCLKTFLGNVPLDWQEQRKLLT

SEQ ID NO: 3754 - protein, 530 aa, unidentified
  source 1..530: note = uncultivated organism
MKKTAAIYVRLSKEDLDRGECESESIQNQKAMLLNYAISRGWQVYNIYCDEDYSGAYAGSDNDRPEFNRMINDASRNKFGIVLCKSQSRFSRNMEVIEQYIHGKFVEWNIRFVSLVDNADTEIKGNKKARQINSLMNEWYLEDLSENIKSVFRYKMEHGEFLAAFPPYGYSKDEDNKNHLVINPTTAPIVKQIFEWHSEGYGAARISRMLNDRGIPNPRKQQELDGLRKTYMYGPGEMGRWSTATIGDILNNQVYCGDVVQHKMEKVSYKSKAIRKVSEDQQIVIKNMHEPIISREAFEETQARLSKRRKATGTGKVHMLSGKVFCHYCQKPMQKNHSASSKTENIGYLRCRNKYSYAEKDRCSTPNIRIDFILDALQMQLIKKFKYMSVDSLDERLITNFLNKSNNENSLLKTELANLKGEQEKIVRKQKNLYDDRLNEIISVTEYLNYNRGFIERLDEIKQRIMEIEKQITVKDDTHKRENVKKALMNFLETKRIDRDIIDHLVERIEFGEISKETGNPILKIYWAWD

SEQ ID NO: 3755 - protein, 535 aa, unidentified
  source 1..535: note = uncultivated organism
MAGALKSGPMTTNKAPRRKAVIYSRLSRETISSTSIQGQGDDLLALAEREGWDVVAMFVDEGLSGGKKRANAEEALRMLRDGEVDVLAAYSVDRYSRLGIGEDAEVIRVVDAREALARSTGAPRPLVYFAREGIRSDSGSDWRLRFALSSEMARNERDLVSSRQTAARDRMRRQGRNAGHGVPGFGYRTGPHPTLPVGRGLLVIPEEREVILEVAERILNMESTLKIADDLTARGVPTARSAFRVAKLAGQPTSGLDRGRWKGARIRETWSSEHMLGRVSHNRSPLYDDDGNPLAPFEPVLTLETILAIRARFDQNKRGQALRRASGLLSRMAFCGGCDRPLYPRRTAVSPSAPQGRVNYGCSSRAGGVHCPSQVSISARLLEGEVVGKYLAKFGDLPETRPRPLGNGASAALADVEAQLRELAASLVASDDEDNIAALTRTMEALRGRRRELRALPATPQGGEAATGRTLAEAWEATTDLDERRRMLARFLARSVVHPTTAPTRVELFWAEGTGVSRQRDRAAAPGWDEGRVTK

SEQ ID NO: 3756 - protein, 535 aa, unidentified
  source 1..535: note = uncultivated organism
MKRVYALYRVSTKRQVDKDKDSNENDIPMQKQACHRFAEQNGWVIVKEFLEKGVSGFKVSADDRDAIQDLKAAAERKEFDILLVFMFDRLGRRQNETPFVVEWFAAQGIEIWSTQEGQQRFENDVDYLMNYMRYWKSNSESKSTSTRVKTRMRQLTAEGVYTGGVTPYGYKLVRSGKFNKRGKELMDIQIDETEAAVVRLIFNRTVKEGYGSYRMADYLNERGIKTHNGSKFQCNTINRILRNRMYCGYFISGDIVSPLLEHLQIIDENHFMQAQYILDQRSYKEQEKQQIARNTKGKTLLSGNLYCAHCGSKMIATSYVDSHTRADGTEYRVRRQRYICCNKAQKRGKCDGQAAYVAATVDEAVLEILREYFSRIRVTPRDKALERRYKQDIIATQAQQKKLSEDTEKMKRRLVELSGEIAKSLMGESVFTPDILSQAIEATKEEIRQNEQQLQEVSNSLDDREGAMQQLDYYYAQFRSWADEFDNATNEQKKMIACQLLREVRVSRGYELDIVFNINYEQFLLSTAANMATAG

SEQ ID NO: 3757 - protein, 557 aa, unidentified
  source 1..557: note = uncultivated organism
MLRCLPNLTPSHRTYSAICNYSALSKSVADGETRTTIEAGGTEQEMAKHESIVEGARHIGIWIRVSTEDQAQGDSPEHHERRARLYAEAKGWHVTEVYRLEAVSGKSVMEHPEAKRMLMDVKRGRITGLIFSKLARLARNTKELLEFADYFRDHEADLVSLGESIDTSSPAGRLFYTMIAAMAQWEREEIASRVAASVPVRAKLGKPLGGQSPFGYVWKDGKFVVEPNEAPVRKLIYELFLKHRRKKTVARILNDQGYRTRKGQQWSDTTIERLLRDPTAKGVRISNYTKNVGKSKPIALKPETDWVYHECERIIPDELWDECNAVLDAQRTTGKRPAKRAVHLFAGKAFCQCGGKLYVHTSTKNRYVCKACRTKIPIVDLEGIVHEQLRNFGVSPEKVQEHLDAGHELIRQKEELIGVLEAERNKIAKQQNTLIDLYQAGGLAKEDFGPRYQPLADRLRQIEEELPALEASRDVLKINSLSAEEVMSAATDLYARWPTLPREEQRSIVEAIIDRITVGKDEVAITLLLPENPPQNAVALATHKQGFMAATSWKRAG

SEQ ID NO: 3758 - protein, 524 aa, unidentified
  source 1..524: note = uncultivated organism
MENLSTPFSEEKKIAGIYIRVSTEDQAREGFSLGEQEEKLRQLCKYKGFEIFKVYKDAGISAKDMKNRPAFQTMLEDMKNGLINYIVAYKLDRVTRSVRDLEVLISTLEKYHCYLICDRDDVNTSTANGRFFVRMLTVLSQLEIEIVSERTKFGLNGAIKAGHIPGKCPLGYYRDKDKTLKIDNSTKDIVVRIFEMYLEGKSYQTIANILNKEKVLYPQVKHWIDSSINRIINNKIYMGDYERYKYDNDRETELFMDVVPPIITRAMWEEVQKQKETNQRAYCRNRVYIFFQKLVCPTYGQIMTCKGTGGKKSKYMYYFCDTCKLYYNEDEIENCLIDYILDLVEYDFHVKKYFYPILAEKKQSFISKFIDTATLKKNKDGSFEIEKVNFRSSFIEQIDKLYDKGIVDVPTMIERDGKLEDVKVSVNMNKTQLDDYLSTLKKELDINYMDLGEYYFHDDKIDENYDTKTQVAKIRNRAIEFKLKKNQKVIRLVAMKEFKNYMARPEGKLRLGLVTHTTSKKKHK

SEQ ID NO: 3759 - protein, 574 aa, unidentified
  source 1..574: note = uncultivated organism
MSERCFAYKRKLGKSLFYSTLLFAVSMLTYKRIDHFTGFRECDKVKIAIYSRKSLFTGKGESVENQIEMCKEYINFSLNNEAPKEIFVYEDEGFSAKNLNRPQFQKMMHDLEAEHFDYIVCYRLDRLSRNVSDFSGLIETLERKNVHLICIKEHFDTSSPMGRAMMYITSVFAQLERETLAERVRDNMHMLARTGRWLGGTAPTGFDTSELSEIIMDGKMKTSHALVFNDEIETVKLIVKTFLENPSVSGVNKKLIRENIKSRSSGKFFSIPGIREILSNPVYCIADSDAYEYFYAHNADICRNKKEWNGSFGVTAYNKRDYSKGAKRNDISDWIISIGQHQGIVSGKDWVFIQNYFHDNSKEKIINTSELGLLSGLIYCTDCGEKMFTKRRSNDEENFSYICSGKLKGGTALCGCKNLLGKQTDDLVVDFIRNKLDDFDLCSELKSKIIEYENSDHKKEIKDAEQKIRIVESEIGILTERLTDSSLSAVAIQAVDRKLNEKVMEKEKLQQNLEILLQSDDHQTMDIYAIVSALQSFSNEFDNLSVYDKRQIIRLLIDRIEWDGENLDIFIYGE

SEQ ID NO: 3760 - protein, 609 aa, unidentified
  source 1..609: note = uncultivated organism
MAVKGEITRVAIYSRKSKFTGKGESIGNQVELCREFVRGHFAGVRETDIFVYEDEGFSGGNLERPGFKQMMKAARAHGFDAIVVYRLDRISRNISDFSTLIEELGRLGVAFISIREQFDTASPMGRAMMYIASVFSQLERETIAERIRDNMHELAKTGRWLGGITPTGYASESVKTVTVDGKTKKACKLKLVEEEARTVRLVYELFLRTRSLSSTEAGLMARGVRTKNGRQFSRFSIKAMLQNPVYLVADEAAYDYFLGLKADVFSERAAFDGSHGVMAYNRTEQSKGKPTVFLPVEEWIIAVGAHAGLIPSREWLEAQRLLGQNRCRAFRRPRSNEALLTGVLFCACGSRMYPKVSRRPDGRGGFQYTYVCKMKERSRKAMCSRGNVRGDALDHAVIIELQKLGEDRDVFLARLEESRRFYAGAREEAGRELAGLREEAARMDRKLAALVDSLADVTENVARRQIGERIAALGREREALALRIGEKEKEEHRRELSEDALDGLCGQLGTFAASLNASDVVQRRAAVCMLVHRIVWDGDQAQVYLFGTEEDTEPDELLPTGTEKSEPREISGHGSCVQEEGSASGKQTSDTKPVQKEKKRKEERFVKEK

SEQ ID NO: 3761 - protein, 551 aa, unidentified
  source 1..551: note = uncultivated organism
MARKSRKNPVIAVPEPTLHISVALYIRLSVEDNKKRGCSVENQKLVLNDFLADKPEFVVYHTYIDNGLTGTNFHRPGFQQMLSDIEAGYINCVIVKDLSRLGRNSIDTGYYIEQYFFTHHVRFIAVTDQFDTAEPNNLHGGIMLPLKNMINEAYALDIGRKIKAQARQAMKDGDYIGGRAPYGYRKDPKNCHKLLIDENAAPVVRQIFQWAYEHKSLNGIVRNLNEMGIATPSNYKESTGEITSPGLIGSGKWQTRTVMKILQSEVYTGDLVQGKTKIMDHRQVKAENDNLIIAQGTHEAIVSHEMFEAVQAYRKEICEESKAKPKKPYTPNIFKGKVFCAHCGRSLHRQRAERKKGPDIYWFHCLTKSRVDRDGCIGVAVQESELMVTVTSILEKELSVALGMSVPLLQLETKHQKEQDALKSRMLLKRQEIEKYRRLVRGLYENFVQGVLTSEEYFTMKADYEEKIKSVSSEITELENEVEQLMGRLEQYRAMEQDAQTLERNHALTAELIERLIDRIEITHDRDIHVAFRFQSEFATQEKEADLCEAM

SEQ ID NO: 3762 - protein, 522 aa, unidentified
  source 1..522: note = uncultivated organism
MRFATYGRKSVYSDKSDSVDNQERMCREYADLKFSGQIESFEVYQDEGFTGANTDRPGLERLLRDVKDGLVDALIVYQLDRISRDVRDFSNIYALLEEKRVMFISIKENIDTATPIGKAMMYVTMVFAQMERETIAARVTDNMIGLAKKGYWTGGNPPYGYVRKRILVDGKKHVTIEPDPDAARYVESIFDTFLENGYSLQGMETAFKRQGIRTLTGAFFSTTQLHKILTMPFCAPATRRVRDFWISQGCNVEGSEEEWDGSHGVMIYGRSTQKNNRHQLQPKSEWVVCVGAHEPFLSEEKWLAAQEQFRQNTFEKKQKYDLPLLKGTLRCAKCGGLMQVSRKKKKVGVTSHYYCLKRMRQGPSACDMSMIKCDLLDDEVVSIFRRIEADPETVKKYAAVDMPQDPGQDIAVLTKKISAQAAKIDRLAASLADAEDSPARKYVLAEIERQDLNLAALKRELELAKTEKRRADGRGQSLEEKTKEIGNLVRAFDTLSAKDRNAVVREVVKECTWDGETLFLKL

SEQ ID NO: 3763 - protein, 533 aa, unidentified
  source 1..533: note = uncultivated organism
MTRRTMASTPAVRCAIYTRKSSEEGLDQEFNSLDAQRAAAEAYIASQKSEGWTTLPDRYDDGGFTGGNIERPALRRLVSDIEAGQIDTVIVYKVDRLSRSLMDFARLMEIFERHNVSFVSVTQHFNTTHSMGRLTLNILLSFAQFEREIIGERIRDKIAASRQRGRWTGGVPILGYDVDRSGASPQLVINASEAIQVREIFDLYLDRGSILSVVKVLTDRGWKTKSWMAKNGNTKGGVEWDKGRLYHLLTNILYAGKVRHRDKTYDGIHEAIISEDVFARVQKQLAHNGRHIGPATRNQHGALLRGLLFCKSCGKAMSHTFTTRGGKRYRYYTCTNVIKRGRRRCSTPSLPAAEIERVTVEEIACIGRGPAVIDATLESACAQANEAIKTSNDEKAILKRSLRRCHDELRTLAGDEADGAKRRSADVSDQIDSAERRLAEIEARLATRRAEMIDRDDVAEALGDFESLWDAMTPREQVRLMHLLVSRVDYDAADSSIEVSFHPAGIRALADETRTRDSQPPAPSKPNSKEAAA

SEQ ID NO: 3764 - protein, 539 aa, unidentified
  source 1..539: note = uncultivated organism
MGPDKDMEKKIVIYSRKSRFTGKGESVGNQVEMCRQYIQLHFGKEAADRSLVYEDEGFSGGNLERPQFKQMMADAEKKCFQAVVVYRLDRISRNIGDFAGLIQRLKELEVDFISIKEQFDTSSPIGRAMMYISSVFSQLERETIAERIRDNMNELAKTGRWLGGRTPAGYGSESYSYPAADGKTKQACRLKLVPEEGRIVKEIYQTFLETGSLTETEERLNAAGIRTKAGKPFSRFAVKAILSNPVYAAADPAAWDYFSEKGAGIYTEKERFDGRYGIMAYNRTIQQKGKADRIRPEKEWILAAGKHEPLVDGETWVKVQKLLERNRSKTYKKPRGSQALLPGLLLCGNCKSPMRPKASSRVNGNGETRFSYVCTLKEKSRGRLCSMKNADGNALDEGVLKVLSGLKTDEETFVSCLEKGRKRLREKAWKEGGLSCKKNIRLEGQIRNLAAALAQEKEGEARSYILAEMERLCKQKAALKEDQRSAEVQEIPAEKWKGFSPFLPDSSFPISVEERRMAIRSLIESVVWDGSKAAVKFSE

SEQ ID NO: 3765 - protein, 580 aa, unidentified
  source 1..580: note = uncultivated organism
MGTKAIKQFVIYSRKSKFTGKGESIENQIELCRQYIAAHFGADEAENALVYEDEGFSGGTLERPQFQKMMADSHQEQFAAIVVYRLDRISRNIGDFAKLIEDLGNRKIDFISIREQFDTSSPMGRAMMYIASVFSQLERETIAERIRDNMHELSKTGRWLGGTTPTGYESESISNVTVDGKKRKACMLKMIPEEIGLVKLIFDKFLETGSLTKTEQFLSAGQYRTKRGKPFTRFAIKGILSNPVYMVADEEAYGYLVENNADLFADKEMFDGSHGVMAYNRTLQKPGKAHQEKPMHEWIVSVGKHQGVIPGAQWVQAQKILKRNKSKSYRKPRSNAALLSGLLYCGKCGDYMRPKLTNRQTAAGEPVYTYLCTSKEHSRSQVCNMKNANGNVLDAKVMDMVKGLGKNSEDMARRITRAKKQISSRREGCDAEAAKVREQVTDNETQIKALVLSLGKTAGSHAEKYIMEQIDELHEKGQSLQNRLKELDAMTRQHELADMEFDMLRQMFSAMGASMEEYTVEQKRAAIRTFVRKIVWDGENAHIYLFHHDGDYEFPNPPVNDSGSGEVSPRIDEPLREDSK

SEQ ID NO: 3766 - protein, 533 aa, unidentified
  source 1..533: note = uncultivated organism
MAKGAIYIRVSTVMQLDKESRGVQRNDLIRYCNDILGIPDYEIFEDAGFSAGTTDRPDYQKMMQRIRAGEFTHLLVWKIDRISRNIIDFTDMYQELQALGITFISLAEQFDTSSIVGQALLKMILIFAELERHNAAERSKAVLLSKAEAGEYTGFRIPFGYRRDSDTKEYSIEEPEAHIIRLIFDMFDHGTTVYTIAKHLNSLPLKERVKEKWQMPTIERMLTNISYTGALRYNYRSYTSKKERVINDEKDLVLVENNHPAIITKEQFERCQQLYIERKDTVYHVRKPLFADLLVCNVHRIPLSWQKENKRKFSSPATYSCPYCSQSSFTGDEIGSFVMNYISNLLQAYGQVSLSTSSITLKRMLLRGKEFKGITALVNAEEIKRSLLGDGSGKEDVQDKRKKLNFELQMKERELERLESYGTDPSDVPSVQVDQLKSTIEKLYVELQQLENSAGTQSVPKVDYLKMCYNFYVQHNLYHLSDIGFSDCFKNISFYDFKHFFQDVIAGIYVNDGKITAIEFCTKQEKREAHQFR

SEQ ID NO: 3767 - protein, 563 aa, unidentified
  source 1..563: note = uncultivated organism
MKAPTLKALCCAIYTRKSTEHNLDLAFNSLDAQREACEAYVKSQAHEGWRLVSEHYDDGGLSGASLDRPALQLLLDQVRSGKVDVIVVYKVDRLTRSLADFAKLVETFDKHEVSFVSVTQSFNTTSSMGRLTLNVLLSFAQFEREVIGERVRDKIAASKRKGLWVGGPVPLGYRSVDKKIGVVEEDAEIVRTIFRRYLALGSIGLLIDDLHRRGVMPKPRIGNDGKTVQPTHFMVGPLAYLLKNRFYVGEVVYRDEVHPGEQLPIVDRALFEAVQAKLKDGKVTRKFRRSQSPAFLMGLLYDDRGNRMSPSHANKKGVRYRYYVSQAILQNRKAEAGAIARVAAPEIEELVVAALRHHVDQTDQVEQIDPIVGEVNLGRTKSSTPMEIPDRDLVALHVERIVLRARHIELALRPEASDAGPSGAAGPAREGPGDADQSPPSPTVLQIPWAPTSASARKGIAWKPSAQPNLDPATVEALLMAIAKARSWMSDLAEGRANSFEDIARREDKVERHIRNLAPLAFVSPRVIEAIANGAAPADLTVTTLAHKLPHRWAEQEMMFGAA

SEQ ID NO: 3768 - protein, 554 aa, unidentified
  source 1..554: note = uncultivated organism
MRQRKLTEKEAEKATTAPRRCAIYTRVSTDEQAALEYNSLQAQEDISKNYIAIRGADPALARKWVHAGTYADAGFSGGTLDRPALKRLIADLEAGKIDVIVAYKIDRISRSISQFYEIWNLLERHEVDFASATQEFNTATSQGKLMLNLLLSFAQYERELIGERTRDKIAAARKKGRWCGGKPILGYDIDRERKALVVNEAEAKIVRDIFATYLREMSLLRAVRAVTAKGHRTKAWTTAAGVQHEARPFDKVTLSFFLRNPAYLGKVKHHDKFYDGLHAAIVDAATFERVQSLLAGNCRHNASQAENVHGLALKGLVRCAACGRAMSPNSAHGRHGRRYVYYTCQTATREGAGKCPVRSVSAPALEGLLIERLGKIVADETVVAKMIKKASAEATQRLPALREERARLDAELRRQREEAKHLVDAIASGATDGRSVGERLNEVEVSIEAGGRRAEELEREAARLERSTVGPGQIRAALARFSDLWRTLEEGERGRLARLVVADVTYDGRDKANGLIAWRFRPLAVETLSPGEGEGFDVGNVWRGGRDSNPRPPA

SEQ ID NO: 3769 - protein, 519 aa, unidentified
  source 1..519: note = uncultivated organism
MELAAMGRGAYERFSEERGRPSTSNADQLSEIKEHFARNGWPFNESLNFQDDDISASMHSTKERPGYRAMLDVIRAGQIVIIVVTEMTRLFRQVAELLELINIAGQLPALAIETTGGARCDLKTNQGMHDALEAVVDASRESGKISDRVKRAKRARAREGRWNGGSRPYGYAKPPNGEPGELAIVPAEAEIVRELAERVLGGEAMVALAGELNDRKVPTATNGRWHVNTVRRVLTNPVMKGVRVHNGTEYPAAWSAIISAEDFERLQLILSDASRHVGHTGKGVRSYLLTGLIECGVCGADGTTHVKLVGGQKKVNKEREPKRRYRCRKTGNFGQQVGCGRILRMADPIEALVSETVLARFERSEDLAALIAPEAPVELHELAADLIEDKRRLDDANRDRYRRDDDPLRLDPKDFARIRGEIEDAMEATRRRMARLEQGRVLASIPVGKTLRDSWHAADLGWRRTVLSLVVERVVLHPGRPGSRRWPTEDDPEYERIVKGYPGAPWAFDGSLVRIFWKV

SEQ ID NO: 3770 - protein, 527 aa, unidentified
  source 1..527: note = uncultivated organism
MNRLETLGSSAMNPLREIIKIKASITSETANLRVAGYARVSSASIDQLNSFSAQVRYYTGLIEEHEGWDFVEVYADEGTTGVSTEKRDDFNRMIADCRKGKINRIITKSTSRFARNTLDAIGVIRELKAMGVTVFFEKENLDTAKLSSENLLTLYSLFAQEESMSISKNAKRANRMRMQQGTYVSSNPPYGYRLVNNQLEIHEQEAETVHRIFSEYLDGKGGFEIAKRLMADGVPFRDGKMNWRHQAIVCIIRNERYAGDMLLQKSYNEDAMPYRKKINNGELPKVYVKNTHEPIVSRIEFELANILLKERSAGINIGESKEYPLSRKVRCEECGSAYRRKITRDIPYWVCRQHDNDKELCAGERITEDALHNAFARLYNKLKQNYVGILLPMLNSLEKLQEMQTRGNPEISTINKQIAELSEQNHVMTGLSSGGTLDPALFISEIDEINRKIRFLKVTKARLLEEQESDGVLEKTEDLVEIMENGPDRISGMDETLFADMVEKITAHDTYTINFTLINGLVLTERL

SEQ ID NO: 3771 - protein, 598 aa, unidentified
  source 1..598: note = uncultivated organism
MKAAIYCRVSTEDQEREGTSLQTQLDACLAYCKQKGYQVARRFTETYSGLTLERPKLTELRDLIQSNDIDVVVVYCLDRLSRDPTHGVILTQELEKHNVTLEAVTETVESTDLGKLISYIRGFASKLEAEKIRERTMRGKLARLKEGKLPQGTGIGIYGYQWDKTTGRRTIIEHEAKVVQKVFTLVLQGFSFHKIALELNKASIKSKTGSMWHPLTIRRIATNETFTGKTYFGKTKRIAKTKVTSRPQKDWILLPDVTPPIISEAMFKRTQKVIVQAKQARPIKQNSPYLLTGFMKCSNCGSPIGGTTLNGKYRYYKCRGSQPTATRDKICNCGYIRANDLENSVWNKIIQMLSHPKTILGLLYDYGTSENGKSEQKDILPLINKQIEQLRRKLKTYPAKEKSLYDLLSHEAVTKDYVLDAVNKLKQERSNDESRLKDLLVTRKEAQQERLTFELSELSDLIISELLKSTGDKAIPTDNLSEKRRLLEMLRLEIVADPHSFQFSFKLGGQLISTQNYDSNDEFTKDELAALNQELAEFKEKHPDIDPYAKFSIQFPDNKPLPVLLNYLKNLVTKSQTSGCLSSHAYDWLIPFQYAIRI

SEQ ID NO: 3772 - protein, 572 aa, unidentified
  source 1..572: note = uncultivated organism
MFNKSKNNKVAIYVRVSTHHQIDKDSLPFQKKELINYCKYILGIDEYEIFEDAGYSGKNTDRPAYQEMMSRIRNGEFTHLLVWKLDRISRNLLDFCDMYEELKKYNVIFISKNEQFDTSTAMGEAMLKIILVFAELERKLTAERVYGIMLSRAEKGLWNGSPVPLGYDYDEDTKYPVINEEEAKTVRFIFDTYEETRSTGEVKHRLELAGIKTKRNGTWTTKTIADIIRNPFYIGTYRYNYRYSPHGKIRPEEEWVIVEDNHPAIISKEQYEKCNAIMDSNIRARGVKRTDHIHVFRQLIECEKCKKNYIATVDRPRADGYRPSTYRCYNYVHSKKAYRKCKGTISEVKLGPFVINYIANLVKANEYINMYGAKGNEKQVEKILLHGPAFKDVVGIVPEDLTRTYNIMLSNTGDILFDRIDSSKEIEKDIEMQNLKAEKKKLERALKRLEDLYLFSDESMSEKDFLIRKHDLDSKINEVNNKIKKRSIEFSRELPGHDLNFIKKATQYLLAQNLVGDRPIKYNKLVKVVDKKLLQDFMQSIIKKVTVREDKTITSIEFVNGITHKFIYRDGK

SEQ ID NO: 3773 - protein, 542 aa, unidentified
  source 1..542: note = uncultivated organism
MNAAGQGRAKRCAIYTRKSTDEGLDQVFNTLDAQREACEAYVKSQAGEGWQGLAQRYDDGGFSGGNMNRPAIQQLLADVDAGRVDVIVVYKVDRLTRSLMDFSSIVQRLDARGVSFVSVTQAFNTTSSMGRLTLNMLLTFAQFEREVTGERIRDKVAASKAKGMWMGGNLPLGYDLGERKLVINEAESAQVRHIFARYLELGSAVELMRELRAVGVVSKQWTARSGRQMGGVPLGCGGLYYILQNRLYLGEVVHRGASHDGEHVAIISRELFEKVEQALARNRRARCSKPTRNAQCPLAGRVVDADAVPRTTSFSYGRRGKRYRYYVSPDVLPATKAVRRTSAVSRVPAAALERLVLDAVGRVLGAREPLPWPDALAVIRTVEVHQRSLQLILDQTAVAEPHEPLDWLVRRLQERLGIGRVVSDQDGSIRMIIDRAARFRGGAASAYREQEVDHASGALASLWRSAHDLLQRHYMSPLYEDAHHAAEAPRDQRHRRTISLGLLAPSLQKQLANGSLGAEVDTKLLLQQMPLAWEDQAALIRS

SEQ ID NO: 3774 - protein, 538 aa, unidentified
  source 1..538: note = uncultivated organism
MIKRAAIYVRVSTDSDTQRDSPANQIATCQEHAERIQLKTDPSLIYNDAGISGTEMTHRNEVQRMLVDARAGRFEVILFTAISRFSRDLSDAFNTKKRLEQVYGIRLISIEEGYDSAIEGRNSEMIFTVHAMLAAYKSKEMSRAIQRGLRQSARRGRHIGNITPYGYLKDGAKKLVPDPQTAPIVREIFDMYLTGKGTKEIANTLNHRQVPTALKHQYQKNTAWQASTVNAILRHEVYVGTLIAHKRTTMHDIEKSRRIDLPVKRLQFRSEDDWIVIPHAHPPIIRQDRFDLAQHLMKFKARNKSVKQSANLLAGFLRCASCGGSMIVTGRKKRERERYKYVVCSKVKRINKAACDNHSATNYDTLSEMIFAVLNRKFQEDSGWLQFQQSRREIASLGVDRSEQRMQALKIQISINREEQKRNLEAFRRGIFPTALIEESQRNLIDQERILQSEMNRLLEKKIEQAPTSSEDTVSLGAELLFTPSTPYDDSTLRLALRQVLDRVVIDRDGSVHVYFLWSPSSTVCADSPLRLDDDIGE

SEQ ID NO: 3775 - protein, 541 aa, unidentified
  source 1..541: note = uncultivated organism
MRRIRCAIYTRKSTEEGLDQEFNSLDAQREACEAYIASQRHEGWELIDRAYDDGGISGGHLERPALNRLMRHVDDRQVDQIVVYKIDRLTRSLADFARLVDRLDAAEASFVSVTQSFNTATSMGRLTLNVLLSFAQFEREVTAERIRDKIAASKRKGLWMGGSVPLGYDADGRSLKINEAEAEMIRTLYDLYETHGALNIVTEEAARRSIRSRKRQTKTGDWRGGNSMSRGHIHHILTSPIYAGRIPHKDKIYEGQHPAIIEPQRWQRVQEQLQKKAPILRQKEPRMTARSPLLGKLFDEKGERLSPSHTRKRGRRYRYYISRRFVTGRKENLQGRGWRLPAGQLEKFIAQAIRDYLASSTGNSLVADPSIETIKHLRSMADADQTEILDLLRNTQIREGLLSLGLDAEALAARLNVEQSSLNLNQLVFEVPFTRKRRGVESRLVMLGPSTQIDEPLVGNIARAHAWLERVKKGECFDKIAASENLSKKRVQQTLEYAFLAPDIMRDILTGKQPPGLTSTWIATHMIPSDWAEQRTLITSL

SEQ ID NO: 3776 - protein, 538 aa, unidentified
  source 1..538: note = uncultivated organism
MARKSRKNLDTAPVEVISRQCTYSAARYIRLSSDDTKKRGDSLDTQTNIIENYVAASPDIQIVETYSDNNVSGTIFARQGFQRMLADVENGKINCIIVKDLSRLGRNAIDTGYYIEKYFPMHEVRFIAVTDNFDSNESDGGIVLPLKNIINETYALDISRKCRSVQQQNIKDGRFVGRMAPYGFAKSPEDCHKLIIDEEAAANVRQMFDWIESGMTVGDVVRSLNESGLLPPSHYKRDKGIIENEKLIGNSFWQKCNVNGILADRVYIGDMVQGKSRTINHKEFRVPPEEWICVENTHDAVISREQFDKVQTMLKQAAESILSARRKSEPYTQPILKGKVLCAHCGQLMHRHRQNKDNVYWYRCESQWKIHKSACVQVSVKETELVSGIVALIHKQTEAIVGRYVAPLRHEDTLYSKELSEINRKLNESGRYRQSLYENYLGGVITSEEFTMMQDDYTAQIEGFSQRADDIRHLQREKKLTLSEFNDTADALSCVLNGGKLNTDTIDRLVEKIIVRRDKSFDIALRYADEFQEVRRVG

SEQ ID NO: 3777 - protein, 510 aa, unidentified
  source 1..510: note = uncultivated organism
MKCAIYARVSTRREEQKNSLQNQIALAESIAKENGFTIVGRYIDNGISGSGMKNRSGIVGLLDDAKKKKFDVVIAKSVSRLGRNTLNSLQIADQLERIPVRLILPEDNYDTETSKSKFMFNLKAILAEEENAKLSERIKLGLQSSAKQGKRRVSLPPYGYTFNPVTNQLEVDDATASIVKEIFRLYLHEGWGMFSISNLLMRRGIPTPRTVSGAANAGMKWHQNTIKGILSNPVYTGKLVFHREETTGTLAKSELYKIRRDVEPDKQIVIDNAHPAIISEDDFLAVQELMKKKGKHKSNGKESLFAHIAKCADCHSGMHFKPDRRNGSYVCGGYVKFTSSYCSSHIIEEQALLQAVKDDLKALIKDSVRIDRLYGLAEEKACALQSSVTKELNRIDKKLTELDKRFDKLLSLHVEGAITTEQFKQQNERITQQQQELANKKAELQSALKAKKDLNEQLQDFRKKVERFIALDIDDEQVLKQVLQRLIHKIEVFEGGKIKIHYNLSHPLAS

SEQ ID NO: 3778 - protein, 503 aa, unidentified
  source 1..503: note = uncultivated organism
MYDAIYTRQSVEKIDSISIESQLEYCKYETRGNPYKQYIDRGYSGKNTNRPAFEEMLADMEQGKISRVIVYKLDRISRSILDFANMMEAFQKYNVEFVSSTEKFDTSTPIGRAMLNICIVFAQLERETIQKRVTDAYYSRCKKGLYMGGRIPYGFAKMDTVINRIKTSMYISVPEESEQIKLMYSLYANSENSLGDIVTYFNENGIKHMRGGMWSTARISDMLRNPVYVKADADVYEFFRSQGANVINPVSDFTGYNACYLYKGTISTTRKQCDLTDKEIVLAPHQGIVSSQDWIQCRIRCLNNRQSTKTCKPKNSWLVGKVKCGKCGYGLTIAKANTKWHRYFICATKLATEGSKCGGTGGTVYADVLEDYMLEAIRKRLSEFQTLSKQTENRISPKVNENKIRISQIDREIDDLLSKVAGANEILMQYINDKIETLDGERKRLQEETLSFTHNPTENSLGIISNHVKKWEDATFEDRQSVVDVLVKVIHIADGNIEITWNI

SEQ ID NO: 3779 - protein, 500 aa, unidentified
  source 1..500: note = uncultivated organism
MILVAAYCRVSTDKDDQANSYEAQQRYFREFIERNPDWSLYQIYADEGISGTSTRKRTQFNRMIADAYDGKFTLILTKEISRFSRNILDTITYTRDLKQIGVGVYFFTENLNTLNPESEMMLTFMGTLAQEESRRTSARVKWGQSRQMEQGVVFGHSLLGYDVQGGKMTINEVEAELVQLIFRKYVIERKGTSTIARELRDAGYRTKTGNPQWRANHIIKILHNEKYVGDLIQKKSYTPDYLTHTKKTNHGQEDLITLRDHHPPIIPREIWDAAQAELSRRDKHSGEGHSNRYLFSGKIKCGMCGASFVGRQKARRDGSKSRRWCCGTAAAEGAASCSIGKLVRDDDARQMLKTALQNLEIDRDGIADDVLLIAMKAIRAGEVGGNYDPDRLKWQLASIKEKKEACLDCYFAGDITKEEMENLKSKYDARIMELEKQIQIPPSSSEPDANKIRNAIDRLLKCETKNDVFYGTILDKLTVYKDRHLELHLKYLPQCFLYKE

SEQ ID NO: 3780 - protein, 527 aa, unidentified
  source 1..527: note = uncultivated organism
MAITRVCIYTRISTDEENQPTSLHSQRERLEAFCKAQEGWRIVAHKQDQATGTKLDRPGLQAALDLARSGSIDLLLVYRVDRLSRKVRQLAQLTEELDTLDVVLNSATEPFDTGAAAGRMMLQMLAVFAEFEHATIVDRISAGIERRAKEGRWFGGRPPFGYTFSSEERMLVPDPVKAPVVRHVFDLYARKRLGTRTIAQQLREEGAPAPSAGWGHPGVHWIINNPTYVGKIRWRDKVFDGVHEPLVDEFTFAKAQAIMRERGDHAKRRGNASDFLLSGLLRCGRCGKAYIGMSANGNGGRYHYYACSGRQKYGPKACDGDRLPREKIEQAVIHQIASLYRDEHVITEAFAMANIDAEKRRPEFEQRLASIRAETTRAEQALERYYEAFEQGKLSPERCENRLAYLQARLDDLQAQEAELTLSAPVQAAHAPTAADLAEIADALEAVTAEGDPQKAKALLQLLIDELRVNSRAEILPTYRLVTPAVCAMSEKVERAGIEPATSGLQSLNVVDSRRLTRLFWQDSPHL

SEQ ID NO: 3781 - protein, 528 aa, unidentified
  source 1..528: note = uncultivated organism
MQQTQRTVTKIVPNIIVMQETKRLRIAAYCRVSTDSSDQEHSFAAQVKYYTEMIEKLDDAVLVDIYADEGISGRGTAKREDFKRLIADCKKGKIDRIITKSVSRFARNTVDCLETVRMLSKLGVTVCFEKEHIDTAHMTSEVILALSGTQAQDESISHGNNMRWSYTNAMKSGNFLGTVATYGYTLINRGTEIINEEEAKVVRLIKDLYLSGMGLQKIANYLNAHGIMRRSGKPWNAMAVKYVLTNERYVGDALLQKSITTFEYPPRRIKNDGSQPQYYVENCLPAIFTREERAAILALMAQRQIKDRKTGGHPLSKLLRCSECGHSYRRIVTPKDVLWRCAYRNSGKTDCTIYTVREEDVCRAFIAAINKLRAGRDNILIPMIERLEAMQSKVNGTTVRISTIDKEIAVLSRQSLVIAELLNQGILEPSDFAAQNNELSQKIFHLRSKRRELLAINETDDMLNALRELADMLEDMETEMSDYDEDIVRAIIKNATVVSDTELKIHLYGGLTVTEYLPQYYSRRCKHQ

SEQ ID NO: 3782 - protein, 540 aa, unidentified
  source 1..540: note = uncultivated organism
MKAPSVRPVRCAIYTRVSTDHGLDQEFNSLDAQYDAASAYIKSQAHAGWTLIRSRYDDGGYSGGSTDRPDLQKLLDDIRARKIDVIVVYKVDRLTRSLADFAKLVELFDAHGVSFVSVTQQCNTTATMGRLILNVLLSFAQFEREVTSERIRDKIAASKRKGLWVGGTLPLGYEMKDGKIAIVEEEAELVRLIFRRYLELGSVNELVRDLKNRNIRTRTKRLATGATRGGIPFGRGALYYVLSNHFYIGEVKYKNEILPGEQPPIMDRTLFDAVRQKSLAQWSHRTVVRNGSDHLLTGLLFDDAGHRMVPTHAKKAGVRYRYYVSTPCLHGEAKTASAGSVSRVPAADIEDVIVKLLKEHLAAKQDGATTSALSLEGDRSALTQLVAGIVVQKDRLIIRLKSENADEASDCPDDRSLSIPWQKPPSKRFRQILLPHNASRNDVRPEQFERRARLVSIIARGRRWLDDVVSGRVTTVAELCAREKCSVRQVNMTISLAFLAPNLIKAAVEGRLPRGIGIERLRDPPTEWSQQFEALGLNPE

SEQ ID NO: 3783 - protein, 1311 aa, unidentified
  source 1..1311: note = uncultivated organism
MGKKRNSEQITSGTLEQSSIDDGTGHVEGKDSTGQLVIHDVISVDDKDDKRLSIDGQDCTDQLDINDFIPADDKADDQRSINIQDFIPVNPYKNWSEVDIKDHVDRSMWVQDLWQPIEESGSLTSKKIKVAAYCRVSVVSSDKCDSLINQVDHFTRLISAKPEWKFVGIYFDNSVSGKNVQQRHGFTRMLRHVSEGKIDLILTKNISRFSRNTQELMEILNQLDGCGAEVYFENENILSSDKNNQFLISTYAGLAQAEIESSSSAIAWGFEKRFISGRPLLSNVYGYRTSIDGYEIVSDQAAVIRQIYAMCLEGNTYTKIAKWLMVQNVKTYLGKDLWSVTVVKSILTNEAYIGSYTARKRTSELFSGRSKPTDGLRKQYQIENSHPAIVDEDTYHQVQEMIITKSRTYTKTQLGKIKLRSLSERIKCGICGYNYHHSQKTSRHYWKCPTRVISKDVCGAKNLSEEAIREMFLSAINLRFNLTEDKSLKELLTLIQMVNQNDHLEFHRLKALNAIELAEMRVGIEFTEEEIKELKRCYIEFEKKLDHIETDRKYRDEAIKWLKEIKSAHDFITEATIDYLRAWVIRITIFSEDDFEVFWIDDQSTCVGDCSPRIREKKVSNIIFAEPSVEIRGRSDPELETGISVKPKSVDLMKQVTHSIKGSNIIRTIPIKTDKAKIRVAAYVRVSTESDLQMMSLKAQTAYYTYAILKNPQYEFAGIYVDEGITGTSIKSRDDFNRMIEDCTAGKIDLIITKSISRFSRNVVDTLKYIQYLSNLDKQTHVFFERENISTENKDSAFMISLLAAVSQEESRNSGTSIAWAKRSMAKRGIIKHHQPGYGYKIGKNHEWHIIEEEAEIVRRIYREFLEGRTYARISKGLRDDQIPISKWQKAWEHSIIKRILHREEYRGNYLFQKVHRGESIEYKRIINKGELPQYLIENHHPAIIDSQTWELVQAEIERREEERKGKIKYKYPKGLGKNEAFVKKLYCGECGSLMGFYRQLGFPKSGKYYHNWRCNEGYKSRCDNKPFYQNFLEVGFSQMLLDIQMNPRFDDYVNRFKSEIRLNEDELTEMNVLEDLVEDLNQELYIVVEGELGKKGKDTKRVDELTEKIVALKDQIREFTKREEQVQAIDAQILEMRKALGDRRIEESAVDKKKRKQKTETNIEIVLQDEFGYYEDCPDFNSEQFERWIEKGITYSDGRLSFRFKAGFEWAVPFVYDDYKERLRAIKRQEKAAEKEAYFNGPQVKKLLTFCKEPKSLAEMYEFFGKYSDKYVFKEWIVTPLLEREKLKLTMPDQPSSRFQKYYSGRTRKF

SEQ ID NO: 3784 - protein, 579 aa, unidentified
  source 1..579: note = uncultivated organism
MIAAGPIVIYSRKSKFTGKGESIENQIEMCRQYIRLQFGDDAAEQALVYEDEGFSGGTLERPQFKKMMADAKSKHFRAIVVYRLDRISRNIGDFAKLIEQLNGMKIDFISIKEQFDTSSPMGRAMMYISSVFSQLERETLAERIRDNMHELAKTGRWLGGNTPTGYESESVSHVTIDGKTKRACKLKILPEEIGIVKRIYDKFLETGSLTKTETYLLQNGYTTKNGKQFTRFAVKGILSNPVYLIADESAYDYLTKNHVDLFSEQRDFDGVHGIMAYNRTLQQPGKAHQIRPMEEWIVSVGGHQGVIEGKAWVRVQTALEQNRSKSYRRPRSNVALLSGLLICGNCGEFMRPKLSQRRNATGETIYTYLCSMKERSRGHVCNMKNCNGNTLDADVVEQLKHLSEDGSDFIQQLEQSKRALPGSRQSYDAEISRLESEITANEEEIKGLVSALGRSSGTSAERYIMQQIDDLYEKGEGLKRHLAELNELTSSQALSDIEFDLLAQMLATFQNTVDGMTVEQKRAAIRTFVKEIIWDGTDAHVVLFGSEYEYKFPQTPNRQGDVDEAAERGAAEPLGEDSK

SEQ ID NO: 3785 - protein, 641 aa, unidentified
  source 1..641: note = uncultivated organism
MNNNNVEIIKPTLKTICIKQNREIKLIRACAYCRVSTDNEDQKTSYESQRIHYKNMIEENPNYEFVGIYADEGITGTQTKKREQFNQMMNDAINGKIDLIIAKSISRFARNTVDTLNCVRLLREHKVDVFFEKENIHTLCLSNELFLTLYSAFAQAESESISENVKAGVRMKMKRGGMVGKYAPFGYLYDKEKDIIHPDESKKDIIIYIFEEYSKGIGFRTITLNLNELGIPSPTGRKWCHASVRRIITNEKYVGDLRSGKYYSDNVISHKRKVNYGEKEQYFTSNHHEGIVSRELWNKCQELLEKRSKIVKPDGNRDKFSRKYPFSSKIYCGMCGERFIRRSYKIRSNNKEIAYWVCRSHRNQIECSNLLHYKQEELEDIFIKVYNKLFENKDKYINTFIKKIDEVINENNNFNSDKIKENILNLQNRLSNLIDLKLDNKISQEILNNKEIEITNKIKELENKLADNKDLELSRRKKLEQINNITKTLKQYKGLTKFNEDIFNNLVDRIIIGEKLDNGIEDLYKIKFILKTGEMIKDNLPNNKFKIGSDMGHYGFSINKQLLEIKEDNVSAYVLCKNSYINTTSHSFPPFIKFREILKYLSYVSSQISKMYSLKLKFFQKLCNFFKIILLIMFLNIKWLI

SEQ ID NO: 3786 - protein, 528 aa, unidentified
  source 1..528: note = uncultivated organism
MEQYLVYLRKSRKDRDTEMQTGVFDTLQRHRDTLLNLANSRGYTVSGIFEEVVSGDTIAERPEMQKLLAAVETGKYTGVLVMEVPRLARGNTRDQGTVAETFKYSDTKIVTPDKVYDPSDEADEEYFEFGLFMSRREYMAINRRLQRGRIASLNEGKYIAGTPPYGYRKVKIEHQKGYTLEINPEQARVVKEIFRLYTDGDPRPDGTLDPIGSYAIANQLNTQGIPSPGGMKWSAVSVRAVLKNPTYAGYVRWAYRPQTKQMVGGELTVSYPVNKDCKLQKGVHTPIISELTWRRAMASMRDRSHAPVPGAKHIANPLAGLLYCSVCGRSLVQLPKGTKSGPTVMCPTSKCPTVGSRRDVVEQVLMESLSNWLISYRIKISQQPEQGAEQREESESALESAQKNLEKLSAQKGKLYDLLEQGVYTQDVFLERSRLLASRITEAEAAVQRLHQHLVSINEAEQTRCQLIPRVQNVLDVYNTLDNPADQNALLKSVLDHVIYFKSVGGQWKESDMQLYIFPKISPFENDL

SEQ ID NO: 3787 - protein, 578 aa, unidentified
  source 1..578: note = uncultivated organism
MSTLQKRSIRCAIYTRKSSEEGLEQSFNSLDAQREACQAYILSQRQEGWRAIDAHYDDGGYSGGSMERPGLKRLLTDIEARKVDTVVVYKVDRLTRSLADFAKMVEAFDARGVSFVSVTQQFNTTSSMGRLTLNVLLSFAQFEREVTGERIRDKIAASKQKGMWMGGMVPLGYDLKDRRLILNEREAEQVREIFRLYLEFNCVKKLKAHLDKRGVKSKIRVSSSGRSSGGATYSRGALYKILQNRIYLGEIPHKGKSYPGEHAPVLDRELWEKVRTLMAENVRARRHGTNASAPSLLRGLLYDENGNRFTPSHAVKRGKRYRYYVSQRVIKDAASASAQPGRIPAREIEKVVINELKSFFSSADQVVSALADADDDLATTRTLIESAVGYAKRLEENSPSTLSEMLEMIVTRILVHQGSVEIQLNRAKLRAQLLGTKDANYLTQDTMNDRNQQPLVLSIDTRLKRCGGEMRLIIPSTSADRAPSNAVPALIKAISCAHEWVRLIVAGEYKDLRAITVASGLSARYVRRIISGAFLAPDIVEAIVKGRQAPEVTLAALLDEVPLSWAEQNAKMAAFVTQ

SEQ ID NO: 3788 - protein, 506 aa, unidentified
  source 1..506: note = uncultivated organism
MIAIYARQSVDKKDSISIETQIAECKYEARKANFEVYQDKGFSGKNLDRDDFKRMMDDIRAGKISKVIVYRLDRISRSVLDFSNIMEVFKKHKVEFNSCKEKFDTSTPMGAAMLNVSIVFAQLERETIQQRVTDTYASRSRSGFYMGGRIPYGFQRSAITINNIKTSQYIPIPEEVIHIQIIYAMYAKPITSLADIVRYFKNNNMIKLRGVNWNTSRLTEILRNPIYVQANMDIYSFYQSRQTEIINDMNLFTGTNGCYLYTKNINQSTSTVNTRGRYNNMFLVLAPHAGIVDADTFIRCQLKAEENLCIPNGRRAYTSWISGKLKCPKCGYAMRYNKWIGKTTLNEYYLCSAVASKKCDGVGAVHKDMIESVVFRQLNGKIKTMKIEQRQPDLHQADINAVKAIISAKEKEIEKTLENFSTASQTVIQYMNSTVDILVNDISELQTQIVKLETSKCHSILLDTDSIEIIFANWNNISKEDKQKVADILIKKVLVSKTLIEIIWKI

SEQ ID NO: 3789 - protein, 586 aa, unidentified
  source 1..586: note = uncultivated organism
MAEPRQNTSAARAKFRCAVYTRKSSEEGLEQEFNSLDAQREACEAYVTSQKHEGWSALSTLYDDGAYSGGTMDRPALQRMLDDIRAGNIDVVVVYKVDRLTRSLADFAKIVEVFDAQGVSFVSVTQAFNTTTSMGRLTLNVLLSFAQFEREVTGERIRDKIAASKKKGMWMGGLPSLGYDVKDRKLIVNEAEAAAVRQIFRRYLELGAVRALQDDLAAAGIVSKRRTAADGSPYGGQRFSRGALYLMLKNRIYRGEIVHKGKAFPGEHAAIVDEELWQRVQSHLEENRLERREGANATEPSLLTGIVFDASSESMTPTHAVKKGTRYRYYISRRLITGPATDSSHGQRVPASNLEALVNGRLRALFADPVEILNAISKDERDAPMQKRLRDAAAVLSARWERLPTETLRDLTRSVLVRAQVHADRIDLDVGSARLVRRLLNEGGGDGIADGIRASNANADSAEEPLIRLSIPARLKRTGKEMKFIVDGVANSAPADTTLIRLLVRGRKIGKRMFEPGCPPLEDIAREEGITSSYATRLVRLTFLAPDIVAAILAGKQPAGLTANKLMADTRLPLDWRDQRTALGFA

SEQ ID NO: 3790 - protein, 523 aa, unidentified
  source 1..523: note = uncultivated organism
MREGLRSRDDETLRRCAVYTRKSHEDGLEQDFNSLDAQREACEAFIRSQAVRGWELASGHYDDGGFSGGTMERPALKRLLKDVDAGAVDTIVVYKIDRLSRSLLDFFRMVELFEERGVSFVSVTEQFNTTDSSGRLMLGILMSFAQYEREIAGERIRDKVAAAKRHGKWCGGPPPLGYDVDRPNKRLVVNEEEARIVRRIFRRFNQTGSTLQVVRELNADGLTTKAWVTKKGKRREGHAWDVPAVGRLIRNRLYTGELEHNGNVYPGEHEAIIGKELWERTGELLSENHRTRRMTGRLTTDSPLRGLIRCGHCGCAMSPTYTKRHGRQFHYYLCKTAHRRGAGACPVSRVASGEIEKVVVEQLGAVFRTPALVAKTFMAARAQEDEERERLNAKREHLKNELSGVQDEAVELIRAGGAPARIMELNENASSIGTQLDQIERKLDGLGGERITEHDVAEAFGTLEELWEVLFPTEKHRLIHMLVERVTVWLDGLDLKLKAVGVTGLVADLTGYAEETRQRGGET

SEQ ID NO: 3791 - protein, 505 aa, unidentified
  source 1..505: note = uncultivated organism
MPRVAFYTRISLDESVQKYSLSAQEERLEAYCKGQYGDEWTLFNVYRDSASGTTMERPELQRMVADARERLFDLIMVFRVDRFSRRVGELAMLAAELKSYGVDLKSATEPIDTSSPAGMMIFQTLGVFAEFEQKSIVERTKMGMLKKAKTGSWPGGRVPLGYRFEKEHGLQIDENEAPIVRRVFEMYVEGQSGSSAIAQDLNRSGFRTRTGKKFGRKAILDILRNVMYRGQFMWQKQAFDSPHEPIIHVETFEAAGAILQKRSDDAPGKRWHNQDDRILSGLIRCGCCRSRMVGVSANVRGQKHSYYACRKRLETKECTQEYVRAEWLEQQILADIQKVFRDEALLEEVWQSAQQQLTDSAPDLEAEIQAVEHQRTKTQAAADRYFQAFEAGTMAPAACNQRVEELTTQLQQLDEQRAELQEQRVALDLPAIRTDFLHEILTNLAAVVEAVPNAQKKHLLRLLVEKVLIRDKSTFEVWYRLPQFPAVRTLSHLVAPRGLEPLLPP

SEQ ID NO: 3792 - protein, 550 aa, unidentified
  source 1..550: note = uncultivated organism
MKKLNCAIYTRKSTEEGLEQDFNSLDAQREACEAYIKSQIAQGWTLIEKQYNDGGFSGGNLNRPALIELFNDIKNRKVDIVVVYKVDRLTRSLLDFAKIVELFDSNNASFVSVTQNFNTTTSMGRLTLNILLSFAQFEREVTGERIRDKIAASKKKGMWMGGRVPIGYERVDKKLVVNKYDANKVKVIFEKYLELKSVPKLKKYLEDENIKTNTNKNFAKGQLYHILQNKIYVGKITHKGNIYDGEHKAIIETRLFDLAQELLNQNAIDFSVEKSNSNSLLTGKLFDDKNNKMSPSHSKTRKKKYKYYISQAITKSNKQNVGSISKLPANEIEKFVIVELEKYFADIKISQKFIEKLSIQKQNNIFEKLKTINFINHNIIQNIIEKIVISKDWIEINLNKNQIQKFLYNLGGDIQDIAELKTFKQEFITIKKDVRISTTNSKGNKVLILDSNSKDEIFINDNLVKAIVKSYYWHELLLTGKAKNTKEIQKLENLKDNSYIKQILNLRFLSPKIVETILKGTQPKDLTVSKLFNIKTLNWQEQEQLIHLNN

SEQ ID NO: 3793 - protein, 513 aa, unidentified
  source 1..513: note = uncultivated organism
MAQVQVIQPYQLRPAELEKVAAYCRVSTDSRDQLNSYHTQISYYTNLIVRHPGWKLAGIYADEGITGTSLEKRDEFKRMLQDCRAGKITRILVKSVSRFARNTLELIETMRELKELGVIVVFEQEGIDTSQMLGEMQLTLFAMAAQEESTSISKNMRWSIQKRMENGTFTTCYPAYGFSLENGKLHPKEEEVAIVRIMVSLAAQGVGHNRIAGYLNELGAPPRNGKKKWLGTTVSYILSNEKLIGDSLVQKEFTPAVLPFRKIKNHGQVPQYYVSDSHQGIITPELFNNIQKLAEQRRASYQNHVDHLFTHRILCPDCGKHFRHIESNKQGYWTCPNRVNGLSDCSAIRFSEKSIVQAALSMMGKLYLHRDALLSPTLTLLEEIASRQEQGNTKLYELNTALADLNEKAHTLQRLHNKGFIEDVDFREQSDALASQRKKLRDQRAQTIHGSKALETLDKMRELQEQLASFSESPWEFDIDLFDQLVEKIVPISNTELLFKLKCGLELREVLPK

SEQ ID NO: 3794 - protein, 554 aa, unidentified
  source 1..554: note = uncultivated organism
MKRVRCAIYTRKSSEEGLEQDFNSLDAQREACAAYVLSQASEGWTLIPDRYDDGGVSGGTLERPALQRLLADIAQGRLDIIVVYKVDRLTRSLLDFSRLVEAFDAAGTSFVSVTQSFNTTTSMGRLTLNMLLSFAQFEREVTAERIRDKIAASKARGMWMGGTPPLGYKPDGRSLAVVEEHAAIIRDIYARYLASGNVRLVADQLAAASIGAPVRHRTGSGAPFGGVPFTRGQIHAFLKCPTYVGEIHHQGRVHAGLHPPIIDRDTWEAVQRRLAEHVRGTRRGPRTASPALLAGVLVDASGEPLISSHACKGKVRYRYYVSRAAHHEGSGTGLRVPALEIEAAVAQAVARALDDPLALAASTGLAIRPADIHPLTERATELSGQAAKRHPELLRALIAQVRVLDTAVEVDLAVPALAMRLGLEQDGGADTPASLTLRADLRLTRTGRAVRLVQGDGLAATTGTDTSLITLVLKARRWWEVLQVGEVDIKTLAAREGVGASWITRVLRLAFLSPAVVDALLAGRLRAGVDAAALTATDAIDASWAEQKRALLST

SEQ ID NO: 3795 - protein, 528 aa, unidentified
  source 1..528: note = uncultivated organism
MLDNVNMTSTRKKLLRCAIYTRKSHEEGLEQEFNSLDAQREAAEAYIESQRMQGWRGLPDRYDDGGFSGGNMDRPALKRLLDDVDDGKVDVIVVYKIDRLSRSLLDFTRMVENFNERGVSFVSVTQQISTTDSTGRMMLNILMTFAQYEREVIGDRIRDKIAAAKRRGKYCGGPAILGYDIDRENKKLLVNPDEAPLVQHIFRRFTQLASARKLAQELNEQGYKTKSWVTKKGKHREGTEWNTGHIYRLLSNRIYNGEVVHKGEVYPGEHPAIVDKKLWQKVQSILSENTRAKQSKAKTRMISPLQGVIRCGHCDCSMGPTYTQKGERRYTYYICEKDAKRAVSRCPLKRVPAGDIEKAVLEQLGAVFRTPTLVAKTYFAAKEMEKAERERLTKQKEQLEEDLAAARKRALELMSPDNSEPDREEKLAKVNQRAVASTRHLVNVSAGLRVFENDQVTERDVSEAFESIEIFWDDLFPLERNRLVRLLMKKVEIRETGIDMELKTNGLTSLITELTGLACEVKERRNGK

SEQ ID NO: 3796 - protein, 521 aa, unidentified
  source 1..521: note = uncultivated organism
MRFANYGRKSVFSDKSDSVDNQLRMSKEYAHSHFPGQVDSFTHYSDEDFTGANTNRPDLQRLIADIKAGLVDVLIVYQLDRLSRDVRDFANIYAILEEHSVNFISVRENIDTTTPIGKAMMYVIVVFAQMERETIAARVSDNMLGLAKKGYWTGGNPPRGYIRQKVVIDGRKHVTIVPDPEGVSFVMNIFDTFLENGFSLQSMETYFKNKGIRTPSGAFFSTAQLHKTLTMPYCVEGTQEIYDYYASKGCIMDSDSPREKWDGSRGVMIYGRTTEKNKKHQLNPPDKWIVCLGLHKPFMPATKWLSAQNRLSQNKFDKTMKYDIPLLKGILRCSCGSIMCVSRKKKINGVSSWYYCLKRMRQGSDACDSSQIKIELLDNKVLEIFRNIETDPSLIAEYTSVKPTSNIDTDTISRKITSCETKIRRLAGSLALHNDSTASKYIIEEMERLDLELQALRREQSAALIQSQQNLLAIHSAEERAVEIQHFIHNFDTFTAGERNEIARKVISSCTWDGETLSVTL

SEQ ID NO: 3797 - protein, 533 aa, unidentified
  source 1..533: note = uncultivated organism
MNDVNKRPKEIRCAIYTRKSTTEGLEQEFNTLDAQREACSAYIASQRHEGWVEIDKYYDDGGFTGGNMERPALKQLMDDITAKKVDCVVVYKVDRLSRSLMDFSRIMDVLDKTGVSFVSITQQFNTTSSMGRLTLNILLSFAQFEREIISERTRDKMSAARRKGKYIGGRPVLGYDLNRETKKLIVNEIEAERVRQIFDLYLESEGLLGTMQAIEARGWRTKHWITTSGKPLGGGPFGKTSLHALLTNPVYLGKVTYHDEIYEGEHDAIVDPKVFAAVKKKLRDARVGFGDRIHGRSPGVLAGLLRCTSCDAMMTHSTSGGSGRGKRYRYYVCNKASKRGHKTCPRPSLPAEQIERFVVSQLQALTIDEALLNETCLRVSRSVTDRGQNLEKELALLNESLRNAERVIEALSTPTGEAGHEAKRLASLASLTEQQSRDIRRRNDLQDELARIHSAAPDRATIMAAIKNLESLWDHLTVGERSRLMTRLVERIDHDPVASNLSITLSPTGLKSFNAELSAQTTSTHPNSTSAHA

SEQ ID NO: 3798 - protein, 692 aa, unidentified
  source 1..692: note = uncultivated organism
MRDTGQIVIYSRKSKFTGKGESIENQIEMCKQYIRVQFGEKAAANVLVYEDEGFSGGTLERPQFKKMMADAKEKKFQAIVVYRLDRISRNIGDFAKLIEDLNRKEIDFISIKEQFDTSSPMGRAMMYISSVFSQLERETIAERIRDNMHELSKTGRWLGGTTPTGYESESITNVTIDGKTKKACKLKIIPEEIGIIKLIFDKFIETSSLTKTETFLLQNAYVTKNGKQFTRFAIKGILSNPVYMIADDAAYRYLTENQVDLFAEESDFDGVHGIMSYNRTLQQPGKAHQIKPMEEWIVSVGKHQGVIEGKDWIKAQRILEQNKSKSYRKPRSNVALLSGLLICGNCGEFMRPKLSKRLNTKGEPIYTYLCSMKERSRCHVCNMKNCNGNIMDADIVNQLKALSEDGSEFIRNLEQSKRVIMGNRESYDAEVEKLEADIDANENEIRGLVTALGKASGSSAEEYIMQQIDELHEKGEALKRRLAELRELTASHVLADIEFDLLAQLLATFKDTVDGMTVEQKRAAIRVFVKEVIWDGKDAHIVLFGSKYEYEFPEEPVGIGHQIADSDTDENFDEAVERGDVEPLSRDSKRDPDVLPLPEEAPGGGVAVRHPGQRPGGEQPVSDGRDPGGRHHAGGAGPEGRLPAGAKSGEKVPEPAGGGDHHAALWAERGGAPAPAGDRRPLRDIQELCIPH

SEQ ID NO: 3799 - protein, 539 aa, unidentified
  source 1..539: note = uncultivated organism
MNAVIYARFSSDRQREASIEGQIRECTEYAKRNDITVVGSYIDRALSASKDTEKRLDFLKMINDSGKGLFDTVLVWKLDRFARDRYDSAHYKHILKKNGVKVVSATEGITSGPEGIILEAMLEGMAEYYSAELSEKIRRGQKENALKGMNNGSTAPLGYVLNGSTKKLDIEPAEAPVVLEIFKRYAEGEDLKKLRDDLNARGLTTKKGFPFTYTTLAAMLKNRKYIGEYKYGDIVIPGGIPAIVPQDIFDRAKERLTKNQKTPAAAKADERYLLTTKLFCGKCGAQMVGESGKSRTGKMYHYYKCLSAKRKTGCDKKAVKKDWIEDLVVNQTMAVVMNDRLMERIADRLLAIQGAESYDIKLMGRELSEVEKSIENLLNAIQAGIFSQSTKKRLTELESRKEQLEKAILTEKLKRPALDREEISFFLHRFRNIDVTVPEQRQRLIDCFINAVYVYDDKIVLVFNYKNGTKTVKLNELKGSDLNMACPPELQVKTTICGQNACAARVLRSFRSEPERPQNFPIFPRFPQTGGIRTGDINN

SEQ ID NO: 3800 - protein, 531 aa, unidentified
  source 1..531: note = uncultivated organism
MRNAKLASRSSRARQARAGGSSRPPMMTVVYRAAPWNARDCSACWPTFEKLVDVVVVYKVDRLTRSLADFAKMVEVFDSHGVSFVAVTQQFNTTTSMGRLTLNVLLSFAQFEREVTGERIRDKIAASKRKGIWMGGTVPLGYDWCDRRLMVNEAEAGTVRHIFERYLELRSVRLLKEELIRDGIVSKVRVSRKGNRSGGQPFGRGALYELLANPIYLGEIRHRKVRHPGQHQAVVDRAVWELLQERLRKQAAHHRTIDRGALSSPLAGKLFDKSGEPLYACGANKRTRRYRYYVSRKVIRGSSEKTRTGWRLPALEIERAVSRAGRQMLADQPAIAVTLQDAGVPIGDLQSALDAAERTSKQLMHDAEVADNLRNLIDRVQLESGGIRVSLNLKRLLAEPIDTGDPAGLTMTRFIPIEMKRRGVEIRLVIEGEAARAARPDPALLKAIARGHRWFHELASGRTASIREIAQREGIYDSYVKRLIPLALLAPEIVQSICDGSHPATLTAEVLKHNATLPLEWTKQRQILRYG

SEQ ID NO: 3801 - protein, 607 aa, unidentified
  source 1..607: note = uncultivated organism
MDNERKIAGVYIRVSTEDQAREGFSLGEQEEKLLQLCKFKELEVYKVYKDAGISAKDMEHRPQFQEILKDMKEGKLNYIVAYKLDRITRSVRDLEELISVLEQYNCFLLCDRDDVNTSTANGRFFVRMLTVLSQLEIEIVSERTKFGLNGAIKSGHIPGQRPFGYKSAEDKRMVIDNATRPYVEKIFDMYLEGKSFQQIANYFKENNIFPKKNWKDTTIQKIIDNKIYMGDYEQYKRIGKQENLEPIVYMNVVEPIISRAKWEECQRQKERNQRTYTRDRVYTFFQRLKCPNCSRIMKCKGSGGTKRKYMYYTCEHCHINFNEEHVEHLLRDFIYDLLEYDMAVKKFFLPILEDKTNNIDTTSIDKEIRDLEKQRNRIKDLYIKGIVEIDDFKEDYKLIEDKLANLESKKLELVNLETFNYSPHELLAERDLEKEKMIRLDTLNTVLKTKWNGMDKSEKQEFISKFIDTIEIKKDSKGNLILEKINFRNGFIRQLVKFYERGIFDVAVPVMVDNEEKCIKGGRMNEEQLDKYLSKMNEHFETSFYEMYETIDEETNEVILEYQPKDNEKIIRFVAISSKDKFPISVDNVKDKYGIISYKTNKLLERI

SEQ ID NO: 3802 - protein, 538 aa, unidentified
  source 1..538: note = uncultivated organism
MPEKIIREIPPHPIDRKPRKERKMLRVAAYCRVSTEEEEQKGSFETQCSYYTEKIQSHDGWTLAGIFADDGISGVHTKKRDDFLAMIAQCKNGKIDLILTKSISRFARNTLDSIQYVRELKKQGISVIFEKENINTGTMTSEMILTVLSAFAQAESESISQNVARGKRMGYRQGKFSFPYSCMIGYRKGPDGNPQIIPEQAETVRMIYNDYLTGDSLVKIAENLDARGIPTPKNKGKWSSQTVMRILQNEKYAGHVLLQKTYTADLLSGTIKKNNGELPQYYIENNHTPIVSQEMFLLVQEEIARRKSKSPASQKKVRTNRGRYTSQYALSERLVCGECGCYYRRVTWNIRGKKKIVWRCINRLEFGKKYCKLSPSISEDVLHNAILRAIKELFQQQKEQTQKCLHDTILQCAAGGLDTSLTTLKNQLEQKNRDFDRILEMTLTDGMESEFMEAKMSRLNDEILQIKQMIKRQEHETKMQQAKGDKTRDLLAIITDRDFQIAEYSDMLVTRIIEQITVLSAEKIRIRFVDGYTKEQRL

SEQ ID NO: 3803 - protein, 509 aa, unidentified
  source 1..509: note = uncultivated organism
MPQVKVIPALSEQVKKIRVAAYARVSSDSADQLNSFATQTEYYTSYIQSQVEWEFAGLYADEAVSGTSTEKREDFQRLLEDCRAGKIDRILVKSISRFARNTLDCIEAVRELKRIGVTVKFEKEGIDTGNMGGEMLLSILSAAAQEESLSISKNLKWSYQKRMKAGEFITAKAPAGYRLQKGVLLPDPKQATIIQRIFHQYLSGQSAEKIAEAWNQSHFCGRHWSPSSIRYILSNEKYVGDALVQKNYTPPVLPLREKANKGEVPQYYIRHSHQGIVSRTEYEAAQKLLAGRRLLHAPKKEKQQYPLSRKLRCGCCGAALHHHQNNGAVCWVCARHRKKKEWCALPILQEKEVFDSFLNLHNKLLENQEIFKTMLSQLREWQAKSLRMQPDAVLLQNRISELMKQNHSLARLQAKGCIDSAVFIERSQYNRKQAEELGWKLRRFRKSDQTELVRKETQRLLALFEEADPLLEFSPAVFQSLVRQITVYPKKFCFQLTNGLVLEERRGRT

SEQ ID NO: 3804 - protein, 509 aa, unidentified
  source 1..509: note = uncultivated organism
MPGVVRCAIYTRKSTSEGLTHAFTTLDNQRQAAEDYVRSQQHEGWQVIPDRFDDGGFSGANMDRPALQKLLMDIDARKVDAVVVYKLDRLSRSLLDFLTLNRTFEDRGVTIVSVTEPINTKTPMGRAFLNILLSFGQMEREVTAERTRDKAHAARRKGRFTGGGLVLGFDGVPEGGRLVVNEVEAERVREIYELFLGSPSLVALVAELKRRRWTLKRWTTRENHEYGGGAFDPHTLRRLLSNPIYIGEVHFQGAVYPAEHPAIVERATWDRVQNLLAERLTGPRRTSTPSSHLLAGILRCLPCDAAMTPTYSGKGRVKYRYYNCGHRHRDGAAACPSGKVGATKIEKWIVDRVRAIGKDPDILARTAEETRRQLTERKGALRSEIAALQKVLDAAHATRRGQIVAAGRKTRGAGTEAPADIPATEQRLVALESELAGLNCLGLSPDGLRAAIQSFDPVWEELTQREQQRIVRLLIERIDYDGAAGKVAVTFSADGVRLLASGSGGEAIA

SEQ ID NO: 3805 - protein, 541 aa, unidentified
  source 1..541: note = uncultivated organism
MEASQRIYCAAYCRKSVEERADETFGSIENQHEAILSFIASHKHEGWTALTERYDDNGFTGSNTHRPSLQKLINDIKEGKVNMVVVYKLDRLSRSLVDFVQILKFFEEHNVAFASITQPIDTSTSTGKLMLHILSSFAEFERELISERTRDKMAAARKRGQWLGGRPPLGYDIAKDKKELVVNQEDAKLIREIFALYLKGNSLLKVAQIINEKGYRTKRATSRGGKTFGGIKFGITHIQAIITNVLYLGKVCYAGQIYDGQQEAIIDEDTFKRAQERLKENRVERRATKNIECTGLLTHLLHCKTCGNFMFHTYTLKHKTHKYRYYVCSNAQKRGYNSCPTKSVNAQAIEDAAVDCLKRIFANNHRKGDHPNKQEVEAVLSPIWNTLYPEEKRRILKVIIKEIDYSSTSKKLGLMLNGSDTRLEFEVDLKQVRPLNKWRKEKEVEKEPKIRINLISAYQLQRLIEAGRINSLKQTSEWLNIDQSRLNHTLTLLLLSPAIQTEIISGDTQILNLIPEYKIRSLAAQFDWNKQAEAWQNIKNP

SEQ ID NO: 3806 - protein, 555 aa, unidentified
  source 1..555: note = uncultivated organism
MSNRAVIYVRTSSEHQGEKSSPAEQEADCRQLAADKGLVIVNVYRDIEKYRVRTKLVEPSGTRSDRPGLVEMLSAAARDEFDIILAWREDRLYRGMRAMLLVLETIQDHKVNVMLARETFDPKIAPLRAWVAQMELDGMKERMTMGVKARLKSGKANTGQDRYGYQRQGDQIVLVEEEAFWVRKIFEWYLDGCRLMEIRDRLIAGGAPQKGSSVPRRIHWARSSIQAILKSAKEYAYGLKIQSRKGELFEIPVEPIIDIATYDSFREMRARKKTYPARRVHHDYLLGGVLKCDCGNKWGARTQKTRKNRKGVLVERKTTTGVYFCRQNHKDLVSPDCPRHIGAKKADEEAWEKICRALDKPEYLLSQAIDLVDQLRANASNLHEERDRIEKQLQRINHDRQWAITQAREGKFTTNDMEQQLATLTLQEISYKRDLAALGQTININALNNWEAKFEEYLTDLQSGVLELKEAAPQTDEERHRVFLLRKQVVDTLVEEVKINRNRELDVVIHLDLLKILDQDAGLENLSPAAYSRRGETYTRKRSIRAHRRRCASCG

SEQ ID NO: 3807 - protein, 523 aa, unidentified
  source 1..523: note = uncultivated organism
MPKVGIYCRLSIEDQNKLKTDDSQSIQNQKAMLRDYCHERNWEIYDIYCDDGYSGIDRNRPAFNRLLHDCESGNINIVLCKDQSRFSRDTIVIEQYINDKFLEWGIRFIGVADNADSDSEMYGTMRLFTSAYNEMYVKDISSKIRRTLTYKREQGQFIGSFAPYGYQIDPADKHHLIIDEETASNVQLIFEMYIQGNGYRKIVQELNNRNIPSPSAYKQQTGSKYINCNAESSNTKGLWTQSTIAAILRNEMYTGTLVQGKSHHISYKNKKRKKVAKEEWVKVTDTHEAIIDQDTWERTQERLNSRTRAGGSLKELSPLSGKVKCAVCGRPMKRNVYYNKAKTIQYYGLQCATYKTGAMNCPNSKTISGKVLEEKIIEELNLIVEQYCQTDEIRLTDFHEEQMTILENQLSKLKTQQTAAKARLTKMYKDRLDSLISDKEYTMFRDILFAEEHDVSQRIEDLTKQLDELSAKKSNAETQQAVIEKYTHFTKLDRTIADEFIDYIEIGEVSQTCERDILIHWKI

SEQ ID NO: 3808 - protein, 504 aa, unidentified
  source 1..504: note = uncultivated organism
MEKICLGYSRVSSEEQAAHGISIDAQRGILEGYAAMTSQPIRIYEDAGYSGKNTNRPALQQLLAACRSDSVSAVVVWKLDRLSRSLRDTLTIIEDVFQPRSITLVSVTESIDTSTPSGRMMLNLLASFAQLEREQDSDRVVMAHKHLARDCKYLGGHIPLGYCIDADKHYQLDPVTAPVVRRVFAMYMSRSGYTPILDYLNSFTFSGTRKTPFGKSDLKNLLKNEIYSGTYVRRMGTDPRHRITAPETIRVPGGVPAILTPDEWQRVCALRAQSERSAAIYNTRQVYPLTGLVCCAVCGALMPLNYGGKDRDGSVQRYYTCRAKCTRPARLEGLQDAVFTVLENMATAGADAISAACAIANSFSDAADEDHAAEAHAVDQQVIEINKRIASIVSFISGHGSAAPASLADDLRRLEKERDDLQARASSLRRPASRYNAPATVAAITACAGIKKQPPDQQKLLLQAAVHKVLVSDEEYKVLFNWHTGGGDEPPHPVSQSFHRPARR

SEQ ID NO: 3809 - protein, 502 aa, unidentified
  source 1..502: note = uncultivated organism
MAKLRVAAYARVSSSSEDQLNSFGAQNRNYTDYITSQENWSLVDVYADEGITGTSAEKRKDFQRMLADCRRGKIDRILVKSISRFARNTKECLEAVRELKALGVSVFFEEQNIDTGLVSSETMTAIFASLAQKESESISTNLRWSIQKRMQKGTFVPSTMAFGYERKQGKIVIHTEQAVFVYQIFFRYLCGENTQEIAAWLNQQAADNPVLADRTWTYKAIVRILKNEKYIGNSLWQKTYRTDTWPRKERPNRGEQEQYYAEDTHPSIIEKWAFEKAQELLRQRANSAKTVSQKSPLQSKLICGNCGGFLRRKTINKRNYRSCRTHERDSAACPILQIQESTIEETFCRLFYKLKHDSSILSQMLSSLQLIRNRRTLWSPDIIELNKKISDVTSQVQMLATLNQQSLVDPDIFISKNNELTEQLRAIKLEKERLMDNDSDELIHQTQELIESLECGPEFLPYFDAELFGELVDKVIVESNERLKFRLRNGLELSETIERTVR

SEQ ID NO: 3810 - protein, 509 aa, unidentified
  source 1..509: note = uncultivated organism
MSIILYARKSVERENSISCETQLEYCKMMIKPDERREKLIELVDNGFSGGNVNRDGFQTMIKLVRQRKVKKVIVYKLDRISRSLADFVNIMQEFKEYGVEFVSSQEAFDTSSPYGELIMKILMVFAEFERTSIINRVTQAYHHRSELGFYMGGRRPYGFELIPTTIHNKPSKKLHPIPAEAEQLRYIFEIYGLENLSLRALLNRLLDEKIHPLDGSHWTTAKLSAILKNPIYVKADADVYDYFERHGVQMISAVSQFSGDCGAQLYGRTKHKADDTDWSEMKLVLLSHEGIIDSEIWLRCQRKLEKNRQIGRSSSNPTSWLAGKVVCEKCKHSMTTIKGKANQNGELRRYFNCTGKSHKKICSGPKCTVYAEDLEQVIDDCITEKLTEILKETHTANVQDPAEINDLKLKIKAIEQSEKQLTDSLLLGSLNADMVALLNQRASQLKEKRRLLETRLEQIRSTQKECGKPIDLAHSWKHANYERKKAVASILVHQILISEDGSTKVIWNI

SEQ ID NO: 3811 - protein, 536 aa, unidentified
  source 1..536: note = uncultivated organism
MDKKIIRCAIYTRKSSEEGLEQDFNSLDAQREACEAYIKSQIHEGWTLVKKEYNDGGYSGGTMNRPAFQELLSDIEEDKIDIVVVYKVDRLTRSLMDFSKIIDIFDKHGTSFVSITQQFNTTTSMGRLTLNILLSFAQFEREVTGERIRDKIAASKKKGMWMGGCTPLGYKKEDKKLIIEENDAKKVKLIFDKYLELKSVPKLMEWLKKENIKTKSSRDFYKGQLYHMLSNKVYIGKIIHKDNVYEGEHIGIIDDITFERVQKLLYENKLDKVCGTKSSSNSLLAGLIFDDNNNRMTPSHSNSHKRRYRYYVSQAIKKYNKLQAGTVSKIPAGEIEKFVMLTTKEFLQNKKQMQKILSQFDVNKQIKLIKTAKAIEDYAEPKLICSIINRVIISDKKIEITYDTKNIKEALLTLDQGEGITLIPKTEKTETITITKQIKISQPSKSGNILILNAKENSVPEPNPYLVNALVKSYYYHKQISSGKTVEDLQKEENLKDSKYIRNILNLKYISPALTEQIFDGTQLEDLSLQKLLYNY

SEQ ID NO: 3812 - protein, 683 aa, unidentified
  source 1..683: note = uncultivated organism
MKAAAYTRVSTSGQIGPDKTSLENQLNDIRDYCNFKKWELLPPYDESVASGASMDRPVLQRLLNDAMRGKFQAVVVADLSRFGRNLLHLKQNIEILKKHKIIFASLRENIYADEDSPMGNLIISTLATIYEFERETIKIRTSTNKNLRWKDKKIFIGHPPFGYRWDKETEKVEIFSKTEDRTYTDEAATYQYIVSQYLYFDKSLQAICDDLNDNKVSTRRKWTEWFVPVISRILRHTVYWTGTIITNQGKSVKEQIDYSCEPLISKAKWEAVQARLGSNKIRSGRPSKTADIFLLHGLVRCGMCGSKLQSIADSRQRQRDGGYLRYYACYYHKPSNAAEIHREPCVLPYIPADQVEKLAWDQLLMILSANVNKKKLIDNAHWAEKEARAEHKIKRCKDAWGAAKLAFERLEEAPKKPGKFDLEDFFELRAKYSHEMTQCDLELREAIEELNNLRQMREEEEKLIQFAKDRADFLHQIRDVLNGLPFSEKQRFIKGMLSFPIEIGIMQDLDWTENEDAEPPEEIGWKHWSEGFFVPFRFNWPLLQDILSRYLPPTPDGGGDGNGNLSPHRGPFAQIRAVAHGRRIGEVCGCARAGVAGKTDSAGTAFRRGRLLKFPDEAEALEKILPPGRGRAVDPGPGRPATGPLRPRISPDTKSRPDDSGPGSSGEHPFRSPARGDSIPVSG

SEQ ID NO: 3813 - protein, 524 aa, unidentified
  source 1..524: note = uncultivated organism
MIKVASYCRVSTDKDDQANSFEAQQRYFKEYIERQPDWELYDVYADEGITGTSTKKRAAFHRMIHDAHMGRFRLILTKEVSRFSRNILDTIAYTRELRQLGVGVLFMNDGINTLDPDAELRLSIMGSIAQEESRKTSTRVKWGQTRQMERGVVFGTSLLGYDVKDGKISINPEGAELVKLIFQKYGIEKKGTTVIAREMREAGFRTYRGNSKWSNSHIIKILKNEKYVGDLIQKKTYTPDYLTHAKKYNHGEEALVVIQNHHPPIIDRELWNTVQAELKKRNVHGELGSGHSNRYVFSGKIKCGECGASFVSRKKYNKDGTFCRRWSCRTATNEGRRHIDAQGNEVGCNVGRLLRDDVAMDILKKTLRSLSMDTDWLIHNVTDLALGAIWLDTQKRENQAEVLEREIAQIREKKEDVLDAFFSKYITKDEMQMMNRRYDNQLASLQERLDTAQAREGESRTIQLQQKIQGQITDIVSCKIDSDVFYRNMLDFITVYQDGRAEVRVYCLPQKWMFQLTDTCGKRS

SEQ ID NO: 3814 - protein, 519 aa, unidentified
  source 1..519: note = uncultivated organism
MGTITMIPAKRRIGSRVVQDEVPKTRVAAYCRVSTDTDEQATSYEAQVEHYTEYIKKNPAWECAGIYADDGISGTNTKKREEFNRLIDDCMKGRVDMVITKSISRFARNTLDCLNYIRKLKDKNIAVYFEKEGINTLDAKGEVMLTIMASLAQQESESLSQNVRLGLQYRYQQGKVQVNCTRFLGYDKDEDGNLIINKEEAEVVKRIFREYLEGQSYNIIGKGLTADGIKTAAGSERWLPSTLHKILRNEKYMGDALLQKTVTTDFLSKKRVVNKGLVPQYYVENNHEAIIPKELFMRVQEEMARRAKLETNVGRRRQYSGKFALSNTVYCAHCGEVFQRTHWDIHGKKKIVWRCLSRLHKKKSKIDCPARTVNETDLHAVVIKAINRVFAKQGDFLSQLKTNIEKVLGNSNSVAVATIDEQIREKEKHLIRMTKARQNCDALGDEIIKLREEKHNLLLEDANKEGARAKLEELESFLSEQSTEVQEFNDALVRRLIETITAYDDHFKVRFKSGIEIEV

SEQ ID NO: 3815 - protein, 519 aa, unidentified
  source 1..519: note = uncultivated organism
MMRRKQQSEIPAVRCAVYTRKSTDEGLEQEFNSLDAQREAGEAFITSQRHEGWQCLPDQYNDGGFTGGNMDRPALRRLLDDIAAGKIDCVVVYKVDRLSRSLLDFARMMEVFEQHRVSFVSVTQQFNTATSMGRLVLNVLLSFAQFEREMISERVRDKIAASRRKGKWSGGMPILGYTVKDTKLVIDEVEAERVRQIFTMYLEYQSLLATVTELNRRGWTTKRWTTKKGMQRGGKLFTKNSLYSLLTNVTYIGKIKYKEEVHEGEHQGVVPDELFRRAQTLLQHNGHTGGRAVRNKHGALLRGLLRCAPCGCAMSHTYTSKGNRRYRYYVCGTAQQRGWSECPSPSVPAGEIERFVVEQIKCIGRDPAVVAETTKQVRRQADEDIERLGHEREALQQQLRDDHAELQAAAAMASHVDRVSRLADIQERSRRAERRLTEIDNELITRQNELVDDAEVAAALGEFDQVWDALAPREQARLLELLIERVEYDGQQGRVSLTFHPCGIQALNAELANHRKDAA

SEQ ID NO: 3816 - protein, 582 aa, unidentified
  source 1..582: note = uncultivated organism
MADGRNLTGLPSKRSRCAIYTRKSTEEGLEQDFSSLDAQREACAAFIQSQKQEGWSVIDKNYDDGGYSGGSMERPALKQLMADIEAKRVDVIVVYKVDRLTRSLADFAKLVEVLDRCGVSFVSVTQQFNTTTSMGRLTLNILLSFAQFERELIGERVRDKVAASKKKGIWMGGTVPLGYDVKDRKLAVNRAEAETVNEIYRRYLTLKSVRALREDLKLSGFRSKPRVRTDGSEYGSRILSQGALYLLLQNRTYRGETTHKGKVYQGEHEAIVEKALWDDVQALLAQNRVLRASGNNAQEPSLLTGLVFDEHGARLTPTWTSKKGTRYRYYVSTSLVTGTKESSSQRRIPAGNLERVVLERVRRLFTDKSELIGTADQLNLPQHSRHKLLERGSVVANRLEQMNERRDLIKSLLRRVVVQSDDLKIEVSARQLASALSAKRAQSLEPSNGETVENDQTLILTASARLQRVAREIKLVINQSESEADPNMALLRVIAKGYDLHARLEANSDLTVRDVAVTDNISSSYVYSLLRLRWLSPAIVTAIVNGQQPKKLTAKKLMRLSARLPASWPEQSALLGFASRGN

SEQ ID NO: 3817 - protein, 555 aa, unidentified
  source 1..555: note = uncultivated organism
MAKTDKKLRCAIYTRKSTDEGLDKDFNSLDAQREACAAYVMSQQHEGWTLLPELYDDGGHSGGTLERPALQQLLADVKAGKVDVVVVYKIDRLTRSLADFAKIVDVLDEAEASFVSVTQAFSTTSSMGRLTLNVLLSFAQFEREVGAERIRDKIAASKAKGMWMGGGVPMGYDAVDRKLVVIPKEAKTVREIMQRYLGADSIKALVQELARDGIVSKRRISKRGNVSGGVPIKRGALKCLLSNPIYVGEVRHKEKTYPGLHEAIVDRETFDAVQTKLKERTSPGSAGGNQRRVALLAGMIRDDRARPMSPTHTKNHGRRYTYYASNMNDDDETSALRLPASEIEQSIRRAIAKWLRANANIQRLAASRSADEKKRVFETAERLAADVEHLPASKASEVLNRLALRVVVNENEIEGVFEPATTLGLADAKGTAIFETQFSIALDRQNYGHEARMRLQPSEPNLAVMDNRLVELLGRAFAARQELLEMNEEATKSIKTTRLRHLQRLARLSYLDPAMIRDILNGTQPKNLSARSLWRTGDLPVRFANQRSALGFPNS

SEQ ID NO: 3818 - protein, 532 aa, unidentified
  source 1..532: note = uncultivated organism
MKNYQTPKCRKVAFYGRVSTEHEAQTYALSNQMQWYEELKKSYQNWIIVERYVDDGITGTQTKKRPEFMRMIEDAKTGKFDLIVTREVSRFARNTIDCLEVTRQLKNYGVEVFFVQEGIWTMENEGEMILTIRAMVAQEESRKMSERIKAGQAISRKNGVLYGNGNLLGYDRVGDSYVINEEQAETVRMIFNMYEAGFGLQKIRDELIKRGRKNSSGLVKWDNTRILRCLHNTAYKGVVAYNKSHRNNYLEQKIIVNHDEDTFEYFIANFEPIISEQQWEHCKQIRESKRQLRLVNVDGKAKIQYMGLHKGGNVWTKKLRCRCGSSMRMDRWRPKLNGERPVGYKCYYQLNKGANKITDKASEGFCDMRAICGWKLEMMAKAVFRKVWKDSELLEKSIKIFVNETVMEQHDIDRIRNDYNLQIKRLNEKTERLIEMRMDGEIDRETYIRLKATVEADKEQAEQQLLDYENLPRFAQTHPFSKEEVKKHLLDFISPNNIDFDDNIIDKFVTQIKVESETEFSWYLRVWYRRAL

SEQ ID NO: 3819 - protein, 576 aa, unidentified
  source 1..576: note = uncultivated organism
MSRSPRIRCAIYTRKSSEEGLEQSFNSLHAQREACEAYILSQRHEGWQVVREAYDDGGFSGGSMERPALKKLLEDIARKSIDTVVVYKVDRLTRSLTDFAKIVEQFDKQGVSFVSVTQQFNTTTSMGRLTLNVLLSFAQFEREVTGERIRDKVAASKRKGMWMGGVVPVGYEVKDRQLVINPTESERVREIYRMYLKLGCVSKVQECLDQTGVRSKERTSRTGRRTGGAVYSRGALYGMLQNHMYLGKIHHQGTYYPGQQPAIIDQELWDKVQGQFAANLQAPRSRPRSANKSLLAGLLYDPQGNRFTPSHAAKGARRYRYYVSQAVIKKPGRATEGPTRLPADELEELVISQVQSFLQSPQRMQEVLCGSTGGSVEIRHAADCAGKWATATVVQVRAVVPTIVKRVIVRDNLIELRLSRFAIREAVTGLQEAVPLADDSGSQEDLIILEAHATVTRCRGEVRLVLAPDVAQGPARAIPSLIKAVVRAHDWVDRIARGDVPHQRAIAAETGLHRRYVGRIIQMAFLAPDITEAILEGRQPPHMTLEILMGDMPTDWARQRKQLLVLSPSHDDRVCA

SEQ ID NO: 3820 - protein, 581 aa, unidentified
  source 1..581: note = uncultivated organism
MRKPRNVKMADRKSATRCAIYTRKSHEEGLEQDFNSLDAQREACEAYILSQKHEGWLCLPEMYDDGGISGATLERPALKRLLADIEARKVDTVVVYKVDRLTRSLGDFAKIVEVFDRRGASFVSVTQAFNTTTSMGRLTLNMLLSFAQFEREVTGERIRDKIAASKKKGMWMGGNVPLGYDVTDRKLIINAAEAETVRHIYRRYAELGTVFALKDALDRDGIKSKLRVDKAGCRTGGMPLARGALYTMLQNPIYRGEIRHKNKCYPGQHEAIVDELLWDKVQHKLAANRVDRNTGTGNAQPSLLAGLIYDNTGARMTPSHANKKGTRYRYYVSQGLINGQRHNLPRRRRVPASDLEELVEERLRQFLTSEAEVFGAVESLAGDITSCSDLIARAAALARRWPGLGPPRKRRILTALIERIDLMPETLEIRIPPDRLPLILGHEDDPRDWTRPAENHAPAITLTVPARLKRIGLETRLLLDGADSGPRKMPDHSLHRLLAQAYRYQEMVMRGDGKTMAELSAEAGVSGSWFTRILRLRFLAPEVVKAILRDHHPIELTAKRLANDTRLPISWDQQRAVLGLG

SEQ ID NO: 3821 - protein, 529 aa, unidentified
  source 1..529: note = uncultivated organism
MKTRPSKQVRCAIYTRVSTDQGLGQDFNSLDAQYDASQAYIRSQAHAGWTLLRSKYDDGGFSGSNTDRPALQRLLDDVRAGKIEVIVVYKVDRLTRSLADFAKLVELFDEHEVSFVSVTQQFNTTTSMGRLTLNVLLSFAQFEREVTSERIRDKIGASKRKGLWVGGMVPIGYDTKDRKISVNESEAEHVHIIFRQYLELGSLGPLMADLRQRGVVTKLRKLKNGKTIGGIPFTRGPLAHLLRNTFYTGQIRFKGEVLSGEQPAIIDNDLFEAVQSKLNEQTNNHRRIRRTSEALLTGRIFDDRGNRMTPSHTRKAGLKYRYYLSGALLQGQPEKAGSVTRVSAFEIEALVIATVRSHLKLPEETDDGSLIERHIARIEVEAEQLVIRLAREDEANDAGAEEGGTLCVPWQKKTSTRRREILTPTDATPRTSRPIRSETRATLVASIARGRRWLDELLSNAAATSQAIAKREECSVRKVNMTVSLAFLAPDLIKAAIEGRLPRGMGISRLIDLPAEWSRQHQMLGLPEQ

SEQ ID NO: 3822 - protein, 632 aa, unidentified
  source 1..632: note = uncultivated organism
MSNIRVIEADKGRTRRTSPVLSTNTRVAAYCRVSTDTEEQQSSYHSQVMHYENLINSKEEWDLVDIYADEGISGTGTKNRVEFQRMINDAMDGKIDLIVTKSISRFARNTLDTLNYVRSLKENNVAVMFEKENINTLTMNGEMLLVILSSLAQQESESISANVNMGIKMKRKRGELIGSHGCLGYDYNQTDKSITINEEEAEIVRYIFRRYIEGIGCSVIARELQNLGYRTKKGNKKWHDSTVRGIIKNEKYKGDVLMGKTFTTDPLTHRRLKNFGERDQHYLENNHEAIISEEVFEKAQSILSKRRRTHGRNDTAEKYSRKHAFSSLCKCAYCGSTLIRRKLHSGTNHEKYAWQCVNSIKNGRKACAHSKAIDENLLEEAFVRGYNKLFQSETDTVTEFVKNIEDSLEVNLLETQLDQLNSKVDNNEIKIQKLVDMNLEGKIDSDILNKKIDQINIEQNQLIEQKKIVTESLESDKSISMRINSFKKTINESDLMDEFDRLLMEAIIEGVVVGQEDQNGEAIPKVLTFILKSGLEISEEAINNVKKNMDGIVDPETYSHTGYNHEETCSHEGYLPCGVRDRNAKSKVVEIAQFTRVSRSLTFSIDDDGFRDKKAVGQFEVGIAVLMWSTGK

SEQ ID NO: 3823 - protein, 546 aa, unidentified
  source 1..546: note = uncultivated organism
MRIFIYSRKSKWTGRGESIENQVQMCRDYIESYVPGADRAEIRVFEDEGYSGKNVKRPEFQKMMAEIKKGRCSYLVCYKLDRLGRNIIDIAGLVEELNNLKVSFISIKENFDTSTPLGKTMLYIAGIFAQMEREQIAERVKDNMVMLAKSGRWLGGNTPLGFFSQKDEKIQINDKIKTSYRLAENPQEMITVRFIFREYLEKQSLAKVVEYFLRNGIQTKRGKEYTPTAVRDILSNPVYCMADEAAYGYFESMGCQMCFSQEEADGRHGIIAYAKTSSASYKNKDNPPEAWIIAMGKHKGEIPGAEFERVQKLLGANRQKGEACRKVRNEVALLSGILFCTCGHAMRPKYYSAKQVTNEGERKFSYLCPYKDATHSEKCSVENVPGNDLDFLVCRELFRHARPDWRVREMLDKLGNEFEKGEGYLAGKGDLQRQALEEKEQGIKNLLAAIKKPGRSEAFIAYADEEIAKLSKECEELKKHIKSGGDGEETPVREKCRADLLVGQLDSFEKAFQMLTVPKKREYLRMLLDQVVWDGEKAQIFLHGSR

SEQ ID NO: 3824 - protein, 526 aa, unidentified
  source 1..526: note = uncultivated organism
MKPEPKLCAIYTRKSSEYGLEQEFNSLDAQREAGEAFVKSQASEGWKLLADRYDDGGYSGGSIERPALKRLLADITLGKIDVVVVYKIDRLTRSLADFARMVETFDRHEMSFVSVTQSFNTTSSMGRLTLNVLLSFAQFEREVTGERIRDKIAASKAKGMWMGGTLPLGYDKASGTSRILKVNKDEARVVRLIFATYLELGSVHALERWLGEHGILSKIRVTRKGKVLGGQPFSRGALFYLLRNQTYRGMLNHKNQVHPGLHEAIVDADLFDSVQQLLDSNSRRHGCRRDHVAKAPFTGRLFDSDGSPMSPSFSHGTRGHVYRYYVSTSLLKGKKKSGKLVQRVAANALEQVVEHSISRLIPRTNYLPQIVPLRIEVRETSLVLQLPAKFLNPIRKRLLNDERVELDKENPEYLNLILAIRMQRHGGKYTIAGPGSPIARPDPILIKALHAAHCIIETDRRGLPLLNAAPSKSYKRLLVRLAFLAPDIQEGILAGKQPPGFTLERLIHSEIPASWKAQRQQFGWTN

SEQ ID NO: 3825 - protein, 538 aa, unidentified
  source 1..538: note = uncultivated organism
MRGDRGGKESVSSISAPAGIRCGIYTRKSTDEGLDQSFNTLDAQREAAESFIQSQRQEGWAALPQKYDDGGYTGANMDRPALKRLLSDVESGAVNCVVVYKVDRLSRSLLDFSRIMDTLDKHGTTFVSVTQQFNTTSSMGRLTLNILLSFAQFEREMISERTRDKMGAARRKGKWVGGVPVLGYDVAPQGGSLVANQEETRRVREIFALYLELGSLIPVVEELDRRGWRMKSWTTREGRKAGGKPIAKNNLYNLLTNMIYVGKVEYGGQVYEGEHERILDEQTWNRVQTALNRNGRRGGRNIGNKYAALLKGLVRCGSCDVGMIHTYVNKKDRLYRYYVCVKAHQRGWAQCETRSVSAPALEDAVVEQLRGVGRNPVVLREVLRQIDAHRHKAAAEIETEKASIQSDLKRIAEEMKRTVSVAGNASSAELATGRLAELQDRVSHLTSRLAEIRQKLTAMEAEGVDIQGVEATLSDFGPLWEQLSTWEKERFIRALVYHVRYDGKTGTVTLGFRSRGIKDLCNWAPALTEKYERREQRS

SEQ ID NO: 3826 - protein, 547 aa, unidentified
  source 1..547: note = uncultivated organism
MKAALYSRKSRFTGKGESIENQIHLCKEHGMKYLGVNENDFFVYEDEGFSGGNTNRPEFQRMMKDAKAKKFDVIICYRLDRISRNVHDFSNLIKDLKNNNVDFVSIREQFDTTTPMGRAMMYIASVFSQLERETIAERIKDNMVQLAKTGRWLGGVPPTGFESKPVVTMDKSGKQRTMFKLSPLYDELATIKLIFDKFVNFKSITKVERYLVTNKIRTKNGLDFQRYSIRFILANPVYAIADKTMYDYLIENKFDVYADWSEFNGLYGIMGYNKTLQDKELSSNRFRATSEWIISIGKHEGIISSEDWIKTQKLLEQNKSKSYRKIKSTQSLLSGVLRCAKCGSYMRPKTMQRKTETGEQVFYYMCEMKEKSRRTRCNIKNINGNVIDSSILNEIKKIAVEYSPLLDNISEKESLVETTKGSVQSEIDEIRKQISVIEKGIENLVTIITKGLTDEIRDVMIKRMEELVKEKEIYKTKLLELTAVNKNIELNEFNLELVSERLCSLDDSVWELMDVANKRRMIKSAIDKILWDGEKLSLMLFGSKNII

SEQ ID NO: 3827 - protein, 562 aa, unidentified
  source 1..562: note = uncultivated organism
MQKILDKKYHAAIYLRLSKEDGDFSVSGDKKESNSIANQRKLIMEYLKKHPEIVSVQEFCDDGYTGTNFDRPEFQKMMGQVKENKINCIIVKDLSRFGREYIGMGRYIEKIFPALNIRFIAINDNYDSAMAHEAGNEIIIPFKNLINDSYSRDISIKVRSNLDIKRRNGEFVGTHVVYGYQRSEENKNQLVIDRAVAPVIQNIFRMKLDGFSPEQIADKLNQNGVPSPFEYKRLSGSKYKTGFRRQVQTQWSAVAIYRILKNEMYMGTLVQGKSSTPNYKVKSRTQKDESEWSRTENAHEAIIPAATFELVQKLMLEDSRSPSGDSAVHLFSGKVFCQDCKSSMTRKKTRSNGKEYVYFICTANKQDKTVCNPHRITEQAIYDVVLALIQSQVSLALDLELALKELNGISWERRELERIQSRISRQEELIEYNMKMKASVYDDFKSEFITLEEYQIFKAEFDKKIAEAKETISRLQSSRNQVNAGLTEQQSWLAQFRQYENIQELNRRVVVSFVERIEISLNKEVCVTLNNADQFQAIIDFLNEFQEKESAKKIVSLVKEVG

SEQ ID NO: 3828 - protein, 516 aa, unidentified
  source 1..516: note = uncultivated organism
MTVKTIEAQPAEKKKLRVAAYCRVSTDNDDQRESLETQKAHYEAWIRLHSEWEYAGIFYDFGITGTKADVRDGLQALLYECRIGRIDYVLTKSVSRFSRNTTDCLELVRELLSYNVPIYFEKEKLDTGSMETELVLAILSSLAQEESASISKNVKWGNQKRIKSGRYRAGTAPYGYTFDSDGNYAIIPEEADVVRFIFESVVSGMGVHKIGKELDSRGVQTRRGGKWSTTTIMGILNNEKYVGDVRYNKTYTDDNFRRHRNKGDVDSPEMKDHHEAIISRELYATAHDVLEQRLRERGIRHDDEKYQRRFAFSGKIICGECGSTFKHQVISSGISWCCKKHIADKDSCSMKFIHEEAFQSAFTTMLNKLIFTRKILLRPYYNALRVAGSDENLQRIMSLKESIQKNSDRKCELKKLRVKGIIDAVMYTQELNRIEKQNEESRREIQNLGNIESGLMLRETEKLLHFIDTAEVQDAYNEELFISFVDSIIVYSRDSVGFKLKCGLTLKEALCTDTRS

SEQ ID NO: 3829 - protein, 504 aa, unidentified
  source 1..504: note = uncultivated organism
MEAIYTRQSVDKKDSISIETQLEECKKKLTYGEEYEVFTDKGFSGKSTERPDFQRMMIKVKNGEISKIIIYKYDRISRSMYDFINMQKEFEKYNTHLVSVNENFDTTTTQGKAMVNILMTFAEMERETIQKRIKDNYYSRGEKGYYLGGYAPFGYTKVDTYKDGKKTYTFDENTRESNILHQLYIDYTNGKSIGEMARELNERKIPTRRNRPWSESCISRMLKSPVYVKANADIYNYLLSLGATINNPIEDFKGEYGCYVYGEVAKRKGNKFVDLSSDFVTLGMHKGIIEPDLWLSVQQIFAHKKGHSNLGTGSLTWLQGIVKCKCGYTCYAKRFRPNKNKKEYKYLYCRGRKNNSCPYPKTMMNVEVIETIAKEALFERLQQLKNIQQSGITRHSPEINSLKIKLTEIEKKINNLIESLADGEAVTAEYINQYIKKLDTERKAITDHIAELELKSSKTASSQLVVDDITENWESYDIELKKSIAKNVIEIIVLEGKNIDIKFF

SEQ ID NO: 3830 - protein, 527 aa, unidentified
  source 1..527: note = uncultivated organism
MRRNGNNGSSRTPPVIRCAIYTRKSTDEGLDQEFNSLDAQREAAEAFIRSQAGEGWTVLPERYDDGGFTGGNMDRPALQRLLYDIEAGRVDCVVVYKVDRLSRSLLDFARMMETFERKGVSFVSVTQQFNTATSMGRLVLNVLLSFAQFEREIISERTRDKIAATRRKGRWCGGRPILGYDLDPQGSKLVVNPDEAAQVRAIFQLYLDYERLMPVVEELRRRGWRNKRWTTRKGFECGGRAFDKNSLWHLLTNVTYLGKVRYKDEIHDGQHDAIVDADLWQRIQALLARNGRTGGTWVRNKFGALLKGLLHCAACGCTMVHTHTSRNGSKRYRYYVCSAAQKRGRHTCPTGSIPAGQIEQFVIEQIKCIGRDPALVAATVRQLQAQASRGTEELAAEEARLRRELGEYDLQLHRIVTEPSTESDIERTTARLADLQERIAAAQRRLVEVHDQAERLRRGTIDPAEVARALAEFDSVWESLSPHEQARLLRLLIERIDYDGRDGLISITFHPSGIKTLVDRHVDGDAA

SEQ ID NO: 3831 - protein, 548 aa, unidentified
  source 1..548: note = uncultivated organism
MSAPKPLRCAVYTRKSTEDGLEQEFNSLHAQREACEAYILSQKHEGWTLLDAPYDDGGFSGGNMERPGLKNLLKDVESGLVDVIVVYKVDRLTRSLADFAKIVELLDANEASFVSVTQAFNTTNSMGRLTLNVLLSFAQFEREVTGERIRDKIAASKKKGLWMGGPIPLGYEVVERKLVPVPEEAERVRTIMRGYLVSASANDLIFELEEEGIRTKIQRRTSGPHRGGIPFRRGSLFYLLKNPIYRGKIVHKGEVYKGEHEAIVDEDLWKQVQAKLNQKAPPRKRKTNDKQKAMLRGLLIDPEGRPMVPTYTTKGSRRYAYYESRKDLARSHHPPATRFGQAALETHLLRELTKRLEDQHQLRRWSNSENGAQLEEMYGAAAGLLQRLKRHAERADTLKEIIDSIAIAKDEMRVCLRGFALGLDADNLAEWRMPLPERKPFREAKIRIDAAPCGKEIDTKIVALIGEAIAARELAMTSLDLSLNQIAKREGRCRKQLTKLVRLSWLSPKIIEAIVEGRTPQRVTRKQLLEADLPLNWSDQELLLGFAG

SEQ ID NO: 3832 - protein, 589 aa, unidentified
  source 1..589: note = uncultivated organism
MNSGNTNHRVAIYSRVSTLEQSMEGVSIEAQLATLHSYAKAQGWEVAGEYVDAGYSGGTDNRPNLKRLLMDAGKHQFSIIAVAKLDRFFRNLRLMLDILHSLEQMGIKFVATQEMLDTSTPYGRFAIQIMGVIAEFERGRIGERVRDSRQYRIAQGQWPGGHTLYGYRWLHKEQRWEVILEEAKVIRHIYDLYLNKKIGILPIALQLNKEGYHPRSGALWRFGTVHEVLTHPGYKGQHYLGLPMPVIIDEDTWRQAQQRRVNARRVRSNIRGWLLQGMCICGQCGHVLQCVQKRGEKARYYVCRGRLARNHLDGGARCTMRWIRADRLEWAVWNKVKAVLNDPNTLAQCVTKALSDLEERRAQMGTQVLSMDREIEALRTKKERLGIAFADGTIKEETYKLKLRQLKKQEADSLKCRDNIDPSTLTELSVLEDRIAAARNILSKGQLLLSEFGIFGMTGDKYLPAGFNVLRETDGQLAIGGAIQQDVFHIEGTEKVIRGIDVPAGFWEIHNSEEQSEKIKRNMRAILQLFNIRVYVLPDKVEIQGAIPGQVLDKPTQDQLAGASIISSARGSGGWGQCHGETKHDNLCH

SEQ ID NO: 3833 - protein, 552 aa, unidentified
  source 1..552: note = uncultivated organism
MKANKVVSNKENRTIRCCGYVRVSTLRQSDLEHGSLDAQIDEIRHYLKFRETSQTKFHLEEMLREEGRSAKDTDRPQLKKLLEAVRRKAVDAVVVTKIDRLTRSVKDFYDLWAEFEEHNVQLISVRDQFDTTTPMGKAMVNMILTFAQLEREMTAERTRIKMLWHAEQGLWNGGRPPGYRLDPKQKGTLFPDPEEKKLAELIFKKYVELGSVGELAKYLVKQGITTPPRTSRRGRKVGGKPFYKTTLLSLLRNPVYIGKIRYSGNTYKGRHEPIISEELFNQVNGHLMLQAPRRRNPRVPREHVYLLQGLVICGKCGAHMTPKTCTGTKQDNFYYQCTRNSHTNGGMCDMRYAPAPALEQAILGKLREIALKHGEIDRIVREANANTDGSLKGLAEDRRRVETRLETVVAETRKIIDVLKELGKDGLRTVGDELRKLEAERVALEAQRDDMVEEFKIIERRSMDADVMATSLRTFAEIVDEATPEELKGLIPMFVDRIVFHDPDKGGNGKIQLSLFECPVRRDGNGCNQSGFKSAECSYWLPGQDSNLQPCG

SEQ ID NO: 3834 - protein, 659 aa, unidentified
  source 1..659: note = uncultivated organism
MNDAPVRVAIYTRVSTDIQANREEGSLDTQEARIRSSIAARFGAHEIVQVFREEGASGKNLDRPAMQRLLKAVKKGKVDLVMVTRIDRLSRSLLDFFEVYQLFEKHQVKFTSLREQFDTSSPVGRAMLKLMLVFAELEREQTAERTRIAMRARAERGLWNGGPPMLGYDSAGSGRIVVNEEEAVLVRLIFDKYIELRSSVKLMHWLNENGYRQKRWTNRDGAISGGKTWVTANIRTLLRHKVYLGLVTHSGEAFAGQHEPIVELETWEKVQRILDDNIQRKSAPKPNANYPFPFVHLVRCACGYAMTSTSAGGRKGRYFYYACVGHQKARDHVCDVKRVRAEALDEAAMGAIRAAMSDPAILNAAVDEATVVNEGLLEPLRDRIRGLRTELAAVSKEGETLLMALVSGGLMDNEFARGKLDEVTNRRRELEESLQQGEAELEAREGEFASTESIRNALQVFQSWEHLTGGERRELLRNAISQVRVFEGRLEIDFFDATVMGGPIPKVRRSRKGGKQNPSADVSGWGMRSSEIVSLPESSRVDWMLAIWPFTGCESRRRGSHSKAPRQPRQSILARAKELEALRAKHGWSRSRLAGHLGVSRSAVTQALRPLDAPPRIRAELELREERGEPVGRRELAAAMRLPIDRAVMRLQRTRENRT

SEQ ID NO: 3835 - protein, 525 aa, unidentified
  source 1..525: note = uncultivated organism
MGTSRNRVGIYCRLSQEDRNKSRTDDDSESIKNQKLMLTEYAVSREWEIYSIYSDDDYTGTDHSRPEFNRLLKDAENGMIDIILCKSQSRFTRDMEDVEHYIHGLFPQWGVRFVSVVDNADTDIRGNKKSRQINAMVNEWYLEDMSESIKAVLTSHRRNGKFIGAFAPYGYQKDPADRSHLIPDEPAASVVRRIFSLYIQGFGKGTIAKMLNEEDIPCPSRYKNENGLGYKNQHCKGSPLWRYYSISSIIGNEVYIGNLVQNKSHSVSYKTKKKKPTGRSEWIRAEHTHEPVIDIKTWELAQTEARKRGRQESPAAAPDNIFSGKLVCGICGGSLGRHKSSRNVVDYRCNTHRYDSTKCPGTRITHRLLYGMILDSFTRHAALLADPDEIAANIGSNNDAEQYAERLRSAVAEAGAREKQILEAQKSLLLSKVRGELSEENFRVLYDSFSDDLERCRRTTENRTAELEKLRDRKCGTDLHRQAAERYLGSEKLDKAIINLFIDRITVMPSEPYSRKAHLSVYWKF

SEQ ID NO: 3836 - protein, 538 aa, unidentified
  source 1..538: note = uncultivated organism
MNIAIYSRKSKFTEKGESIDNQVQYCKTYGDSHLLHIPDKNYIIYEDEGFSAATSMRPKFQQLLQDINANKIQMLMCYRLDRITRKVSDFSKTLELLEQKKVGFISATENFDTSTPMGKAMIYIASVFAQLERETTAERVRDNMLALSKTGRWLGGLTPMGYTSKEIIYLDSEFREKKLYQLIPVEKDLKTVALLFDKYLELGSLSAVENYCLVHGITTQKGGCFYKSSIANILANPTYCTGDTASYDYYSSLGCCITFSREEFNGRNGILCYNRTSQQNKATRNKRPPNQWVVALGKHKGLISGNTFIRTQNLLKKNSEKASPRKDTSSYALLSGKIRCTNCGSAMRVKNIRKAGDKIYYSYACEQKIFSKKLNCNSTNLNGKFFDDYLLDLISTILLEAVNYSKLLRILQDKRTNLKKEDLEYRQRLDSLSNEKKDTEKEIETIITRLATDSSPLLHKYMLPKLEELDLRLRELQIKIDSMAPICQEVYDFPSSKSFPEFLHTIIMTSELSQKKALINTLIKNITWDGHQASVTLV

SEQ ID NO: 3837 - protein, 549 aa, unidentified
  source 1..549: note = uncultivated organism
MKKAALYSRVSTGRQEQEATIESQLAEVKEKIKNDGNILTQKHTFVDDGWSGGLLARPSLDRLRDAAKNNEFEVLYVYDRGRLARDFVYQEIIIMELKDLEIEFASLHDVDAKTPEQGVMQKMQGVFHEYERIKIAERFRRGKLFKTRNGKLLGYNPPYGYDYIYKTRDKNGEFVVNEKEADVIRKIFGWIGNEGYTINKVIKRLYELKIPPRKQKRPTWTNGPLSRILRDTTYIGQHYYNKTVSVVPIKPIKQEKYRKIKKCSRKIKPKDEWIEYKCPRIIDDELFYKTQEQLKINYQFCKRNKKNKYLLSSLIYCTCGRRRCGEGSAKNHLYYRCNDRVARFPLPKQCQEGGINARILDSLAWKEIKKLLLDKKRIKSYIVSWSKSQSEEPKIDTQEIEKLEKQLKQLDIEEERYLKALGLGASIEIFEKQIKELNSRRSIVKDDLSEKHNIFQSCQSSVKINVNDTLNKTLALVRQYNFSNQEELVRKLIDKVITSQQEATIIGHIPVESEYSYVKLPSISRNRRIAKCRQVDAIQRISKKPSGGS

SEQ ID NO: 3838 - protein, 523 aa, unidentified
  source 1..523: note = uncultivated organism
MSKKRIEKANGVTAIYVRRSVADRDNNSLSIESQKEDCIKYVGQDSVYRIYCDNGFSGKDTEHRPAFQQMMSDAREGLISRIVVKKYDRFSRNLRDYLNVSDELEKLGVTVYSLSEPFNTSTKEGRMIRNNLLSFAEFERETIAGRVADAYNTRGRETGFYQGGTMSFGYTTQRMTVNGRKGSVLVPSEQAGALKLAYEMYAEPSTSLRDILAYFKAHADEVHYLRTDEYGGKDGSHNGKLNTGSLSMLLANPIYVRADKSIYAYFQSMGYDIMDEIEAYDGVHGVFLHDNADGGKYVKVGYHEGLVDAQIWLRVQDKKSTNRRFQTNRKVMNSWLVGLLKCRECGLSILIDIQYRKSGKVYKYLFDSGWQSVDRCVSRTYKVKLDDIEQQVYEAMKARISELEIAHKQKEAPDTEVESVKADILRIDTEIRSLMDRMAEADDVVFAYIQQRIKELHARKSEMERQLQTKVRKRRQIDTKPLAEPMALWNKLTVQEKHDFAAEIIETVYISHHSDEIEIVFGI

SEQ ID NO: 3839 - protein, 521 aa, unidentified
  source 1..521: note = uncultivated organism
MSKRPETKPAPRVRCAIYTRKSTQDGLEQEFNSLDAQRESAEAYIASQRAEGWQCLPDRYDDGGFTGGNMDRPAVARLMADIEAGKVDCVVVYKVDRLSRSLIDFARLMELFDRKKISFVSVTQQFNTTQSMGRLTLNILLSFAQFEREIISERTRDKIAAARRKGKWSGGRSVLGYDVDPVTKKLVVNPAGAGLVREIFQMYLDRRSLLDVSRDLNRRSITTKAFQTKKGTAYGGRVWDKAAVLKILANVLYRGKVRYKTETFPGEHDAIVDEAVWKEVHELLRSNGRSGGMFVRNKHGALLKGLVHCGPCGLCMGHTTANKGKNRVYRYYVCYKAQKQGWDSCPCRSLPAEQLEGFVVEQIKRIGKDPSLLSLTLAKCREQLSERQAEAERELGALERDLFRLHAELRRTAGDSATDGHAAARLTDLHQKVQDAEDRTRVLRRDILAAEALQITKADVDAALGEFDGVWSRLSPKEQAKLMRMLVQRVDYDATKGSVSITFHPLGLRSIGQSELEEAAA

SEQ ID NO: 3840 - protein, 540 aa, unidentified
  source 1..540: note = uncultivated organism
MYVRKSTEHGLEQAFNSLDNQEQSCKAYISSQAFNNWEYTKTYSDGGISGGTMERPGLQKMLSDIAKGIINTVVVYKVDRLSRSILDFHNMMKYFDKYNCNFVSITQAFDTSTSMGKLTLNMLLSFAQFEREVSSERVRDKIRASKAKGLWMGGIPPLGYDIKDKKLVINEAEVQQVKTLFEQYLEFQSVSALTEFAELNGIWAKKWQTRSGDLRGGKPITQMSMHRILRDKTYIGFISHKANGTCARGTHEPIISDELFNAVQTALQNNTNNKSKALRSPNLLTGKLFNNIGIKFTNQRNSGKNQKTKYYYASKGFYLPAPQLDAIVLSTFTKFLDSDLATLPPESKDAIKRIDWTRMTYDTKRNLIQSVTKKVIYSNEKLIMHISLDPMRWLEFASEVYINETTEPTEFITSKDEVIISVPVILRKYATTRIDKNAKTGVLSITDNNHLIVKAFATAWRYKNLYEGGIGVKKIARDEKRDLRTIYKYLNLAYLSPKIINSALNGELHNHTNIQGLFLIAEKYENFDEQEKAFYDSDSK

SEQ ID NO: 3841 - protein, 557 aa, unidentified
  source 1..557: note = uncultivated organism
MEQSFNSLDAQREACLSYIQSQRHEGWKVVDEAYDDGGFSGGNIDRPGLTKLLEDIKAGKVDSVVVYKVDRLTRSLADFAKMVETFDEFGVSFVSVTQQFNTTTSMGRLTLNVLLSFAQFEREVTGERIRDKIAASKRKGMWMGGRVPVGYDTKDRALVVNKKEASRVRHIYERYVALGSVAKLKQELDAQGIRSKDRLSKTGKRSGNAPYSRGALYDLLQNRIYRGIITHRGKPNVGMHEAIVPEALWDQVQVQLETNDTAKRTGTKAQAPSLLGGLIYDAEGKRLTPTHTVKNGKRYRYYVCQALIRNLGNNKASARRYPAHDLEGLVVERLQTFLGNGPDVLESLALPLEDASLQTAVLASVRNQATKLTEAALTETRAFLQAVVSRITLAGDEIQILLSRQRLQCALLGNDRSTQSEPSKLHTDECDEPICLTIKAQLRRCGGEMRVILPDSQEKKDKAHPNPAMIKAIARAYCWHDRLISGEAKSIRSIAKEVGVHERYVSHILHCAFLAPAIVEVILEGRQPLDLTLNKLLYSLPMKWDEQRRGFQISDYQ

SEQ ID NO: 3842 - protein, 512 aa, unidentified
  source 1..512: note = uncultivated organism
MIITDIPRNNNTSKKIKLAAYCRVSTNSAEQIHSFMAQVKYYRDYEKNNPQYQLIGVYADEGITGTSMNKRDEFNRMLQDCRDGKINRIVVKSASRFARNNEEALRTLRELKDLNVSVFFEKERIDTETMNSEFIISLFGMNAQQESMTMSDNMRWSYQHRMRSGEFNTCKAPLGYKLEDGKLVIVEEEALIIRRIFDMFLSGKGKYAITKILNKEGVGQEFGIKRWYPSEIVYILSNERYMGDARLQKRYTSTTLPYRLMRNRGEKEQFYVENSNDAIVDRDVFLAAQALIEQRKEQASTESSGTSILNGLLRCPECGNAMRRISNVNRPKWWCRGYSLKTTTCSAHTVYEDDIFQAFTNMANKVKDNQRELIDDTISLLEQLMRIAGSNKDRIHEIDVDIADLSKRKYTFAQLYEKKILSDKDYVIKSNDVESQLTKLRAERRKLLADDKSTEYLDELTALDRAISKYEKQTTLDTTLFEDIVNKIVVDDSGCITFHLLGGLKFTERIRK

SEQ ID NO: 3843 - protein, 571 aa, unidentified
  source 1..571: note = uncultivated organism
MTAKPNFSTQKAAIYVRVSTHWQVDKDSLQVQRRELIAYAQMVLGIQDYVVFEDAGYSAKNTERPDYQNMMTRMRTGEFSHLLVWKIDRISRNLLDFATMYQELKDAGIIFISKNEQFDTSNAMGEAMLKIILVFAELERNMTSERVSSVMLSRASNGQWNGGRIPYGYSYDKNTKGFLVNEQESQIVHRIFNLYEQYQSTLYVSTYMNKLGLRSKTGCEWSATSIYKILTNPFYIGAYRYNIRKGTKGHKREEDEWIMVEDHHEPIISRQQFDTIQYRLKQRRRGGVQEGETYIRKNVHIFGGLLRCGYCGSNMSATIDRRRSDGWRPSIYCCGKHRKSKNVCPNKYISDTVLGPFIFNYVSNIIRAKNTIKPTTSLDVLERKLLRGDVFSQVEHIEAEGLVQICDLLLSGTTGVEYRPSTESVDSSSMSSERTRLTDQRRKKEIALNRLKNLYLYGDESIPEKDFIVERQKIMSEIIGIDKRLEELSDKNAASEVDSDEFIERASYFVMIENLLDEKNVDFRKYISKIDPTIPRAFLGNIINEIVVKDGLVLSIRFNNGMLHSFTYKPK

SEQ ID NO: 3844 - protein, 544 aa, unidentified
  source 1..544: note = uncultivated organism
MARRRSTATVETPTAPRQIRCAIYCRKSTNEGLEREFNSLDAQREAGEAYVLSQRHEGWTVLPQCYDDGGFTGGNTDRPALQRLLADIEAGEVDVVIVYKIDRLSRSLVDFLGLMQGFDEHNVALASVTQQIRTDSSMGRLMLNILAAFGEYERELIAERTKDKMGAARRKGKFVGGCLPLGYDLEISPTSSKLRINPTEAAIVRELFRLYRVYQGLLPMVKEAARRGWRTKTWVTREGKVKEGGALDRANLHRLLTNVAYLGKVEYDDEVFDGEHEAIIDESLFNEVQAILQGQSRTRGVYGGNGHPDALLKSLLRCGHCGHAMIHGHTRKRQGDQYRYYVCTTSQKQGVEACPTSTVPAAAIEGFVVERIREMVTQPEMIKQVVTEAETVRSTRVKELRLDVTTLEAHLLHRQRAGQQLTRALEVEEAATPSPLILEQLQQIEREISETSQALAEVKYELAALTARKVSLQEFRAALELFNPVWEVLYPIERARILRLLIEQVDFNASTGKIGITFRPTGIAALHDEMMAAQQLAANENEEA

SEQ ID NO: 3845 - protein, 570 aa, unidentified
  source 1..570: note = uncultivated organism
MCRRLWYTVRLKEKVSHTGAERRAFMEKTIDQPKKAALYCRLSVDDGRSGESISIESQKILLKQYCKSHGITDYEVYDDDGYSGTNFERPAFERMREDIENGRIDTVIVKDQSRFGRSYIEVGMYVEEFKDKGVRFIAVDDGYDSMKSDYDMMFPMRNVINEYYAREASKKTKSAKRAKAKEGQYIGSRPPFGYKLDPDDRHHLVIDEPAAETVRRIFRLAAQGVGYNRMTKIFREEKLLTPIAYFNQHNPDYYKSDYWRKDFDWHVTSIRVILDNEVYLGKLVYGKQKNKSMKSKEKVKCPRDEWIVVENCHEPIISQELWDTVHKILAAKHRPTQSGKVQIFAGLVYCSDCGHALTYSQKKKSDGTYHGAYSCWMYKTHGKEYCASHYITYDVLYQLVFCDLQRMIGCCAKDIIGFRKFLQSKCKSSSRRQLESIVNEAERKQTRLKEIDKILSKLYEDSALGKIPESRYEQMSEKYEQEQKELSQGILQLKQEFDEAKKQIDASDRFINIVKKYTYINELDANILNELIDRIVVHHKEKDQSGRTYQQIEIYYRFIGRLKPQTDIMT

SEQ ID NO: 3846 - protein, 562 aa, unidentified
  source 1..562: note = uncultivated organism
MNNDGKIIKVALYARVSTEEQKDNFSLAAQLELLRKHASDNKFEIFDEYVDDGYSGTSFERPHFQRLLDDSRQAQFSLILVYKVDRFFRNNKDLLNTVDELQRCGVSVRSITEPFDTSNYLGKFVLSLFGSIAELERNTFMERSKMGKLRRAREGYYSGSSPTKYGYVYNKETKKIEINEKEAGAVRVAFELYNQPDSSLLKVTRRMRELGYRTKEGHLMREDVVHDILRDSIYIGKWYANKHDSKTNGLKPVDQWIEVAVPKIVSEEAFLKAQEYLNKRRNYSVRNAKYKYLLQGMVKCGDCGNTIAGTADKHYQDHNGKKYGPYFKLYYRCTHFFRNKFQRSVECRLKYVQAGKLEDAVWNSIGKIFEHPHLVEQAIVNGKDIRKSDRETAQKEINRIALTQDGLTREEKRILEAYRQGIISIVQLKEQMDTLRKSREELERTRQDLRSSLSEQDRKIEVKHAVDYISKIRKGIKAFNYEQKKMVLKALNTLIKINVNGSIGIDCFIPSVPTPSEKDFLSYFESARPTWLWLAAHILFLSRSSCSLCLKFLRSSGFCAFF

SEQ ID NO: 3847 - protein, 562 aa, unidentified
  source 1..562: note = uncultivated organism
MTEQKKIRCAIYTRKSTDEGLNVEFNTLEAQREAGENYVKSQAYQGWVAIPERYDDGGYSGGSMDRPALKKLIEDIKRDKVDMIVVYKIDRLTRSLLDFSKLIQILDEHHCSFVSVTQNFNTYDSMGRLTLNILLSFAQFERELDAERIRDKIAASKKKGIWMGGCIPLGYKVENRKLVVEPSEAETVIAIYKQYKVLQSTRKVARYLNQNGYENKSRYSPKLKNKGIRPFSAATVKRILANPIYAGKLAHKNEIYEGQHEAIIPLNEWELIEKIRKNNIEDHVISSSRYPEALLKGLLECGTCHTSIVRVAEKRHNIIYEYYEPFKKKKEGDHSCEIRNIPTKELDEFIIKRIVNIIKSPKVIDALSKLIAYEIPNAGLCEIIKEIENPKEIFQKLPRDTIRHILRSVIKKIYMYPDHLVIHLTAEGSSLLEMSKCAVISGDKYDTEKQEITCNIALTRKQGQVVLVTNNACMDMVLVKAIAQALDWKDAIRLEGYHVDTLAKKANLSRRYVTKMLKLARLSPSIIRTIVKGKQPETLTLTSLLNSQMPVSWKDQEKLYLY

SEQ ID NO: 3848 - protein, 503 aa, unidentified
  source 1..503: note = uncultivated organism
MENKIDAIYARQSVDKKDSISIESQIEFCKYELKGGSYKEYADKGYSGKNTDRPRFQELIRDIENGLVRKVIVYKLDRISRSILDFANMMELFQKYNVEFVSSTEKFDTSTPMGRAMLNICIVFAQLERETIQKRVQDAWYARCQRGFKMGGRPPYGFRTEPIIIDGIHTKKLVIEPTEAAYVRKMYEMYVDPRISLHDIATQLTAQGVRSYFGKPFSRATISLILRNPIYVMADLDIYEFFKSQGTDIFNDVADFAGTNGCYYYRGKGNQENKHKYLQGQTLVLAPSEGFIPSELWLQARRKIMENQSYQPARKAKHSWMAGKIKCGRCGHALMAAHSCGHIYFRCSVHAENKSCPGCGTIRMLELEEVVYRQMEKKLADYKTLTERKRKKAVNPKLTEKQLELARVENEIEKLLDTLTGATPVLLSYANVKIEELDKRRQALADEIAKLSAEAVSPEQIDTISGYLDDWESVSFEDKQKVVDLMITVIRATSEKLEIEWKI

SEQ ID NO: 3849 - protein, 502 aa, unidentified
  source 1..502: note = uncultivated organism
MKEFWNSIQIVFTGVGGWLGWFLGGCDGLLYALIAFVVIDYLTGVMCAINDHNLSSEVGFRGICRKVLIFLLVGIANILDIQVIGAGSVLRTAVIFFYKLIFSKKRVAAYCRVSTGEDAQLLSLETQKAHYESWIKAYAEWEYVGLYYDEGISGTKKETRPTLMRMVEDCEHGLIDHVVTKSISRFASNTADTLELVRKLLSLNVPIFFEKENIDTGKMESELLLAIMSSIAESESVSISENRKWSDRNRFKNGTYKISCPPYGYDWDKEIGEMVVNPEQANVVRYIFLQTLAGVGTHVLMQQGIPSKKKGKWTASTINGIIRNEKYTGACLFQKTFTDESLNRHRNLGEYDQYYMENHHEAIITQEEYEAANALVDRRREEKGITTESGKYLIRYPFSGKIFCGECGGSFKRKKSSVIDELMSLAEQSLGAGRDAELETIDQQLEAKQKELVDRALKKLDYEELADEVEALKDVKQQILLGKAVDNNQQIKRDEMISFLQE

SEQ ID NO: 3850 - protein, 573 aa, unidentified
  source 1..573: note = uncultivated organism
MISVASYCRVSTDKDDQANSFAAQQRFFKEYIDRQPDWELYEIYADEGITGTSTKKRTNFNRMIHDAHMGKFKLIITKEVSRFSRNILDTISFTRELKSLGVGVLFMNDGISTLEPDAELRLSIMGSIAQEESRKTSIRVKWGQTRQMERGVVFGRSMLGYDVKDGKLSISPKGAEIARLIFHKYAVEKKGTTVIARELREAGYKTYRGSTNWSNSHIVKILKNEKYVGDLTQKKTFTPDYLTHAKKYNHGEEEMITITNHHEPIISREIWNMTQAELQKRNRHGELGAGHSNRYVFSGKIKCGECGYSFVSRYKKRKNGTKYRKWGCLTAPGHHTGRVDAEGNPMGCNIGRMLRDEVAMEILRQGIQYLQMDTDWIIRNVSALALEAIREGETESADTEDRLQYQIDRLIKKKETVLDAFFSQTVTKEEMRLMNERYDQELAALDQRMQAVREKQKLCYDASSLADNVRQKVKAIVCGETDSEVFYKNILDHMTVYRGGRVELRLNLLPQKWVFVLERLHDFRQKTGVSQFDTDVSPENTAEKSEENQGLPASVSLSEPAVPISVSSPFSSG

SEQ ID NO: 3851 - protein, 522 aa, unidentified
  source 1..522: note = uncultivated organism
MKRRRENEGTELRRIRCAVYTRKSTEENLDTEFNSLDAQREAAEAYIASQRHEGWVELPTRYDDGGFSGSNMDRPGLQRLLEDVGAGRIDCVVVYKVDRLSRSLLDFARIIEAFDREGVSFVSVTQQFNTTTSMGRLTLNILLSFAQFEREIIAERIRDKVASARRKGKYMGGMPPLGYDVDRANRRLVVNPPEAELVQRVFRRFVQIGSTTELAKELNAQGFTTKTWTTQKGRVRPGSPWNKDHIYHLLNNPLYIGEVSYKGQRYPGEQDAIISREMWDRAHAILASNHRIRGNRTRATTPALLRGIIRCAHCGSAMGPTFTKRRGKFYRYYLCVNASKNGYDSCPVRTVPAADIEQAVVGQLRAIFASPEMVAATVRSARQQAEERIEQLARERGGAEVKLSELKQEALRLVAAREGEDAPAFISSQLRTLNAQIEEREQALERITCDQEALGGSRITEQEVIEGLTSLDSVWEELYPGEQERIVQLLVSRVEVGIDGLELQLRADGMESLVVELRSRDE

SEQ ID NO: 3852 - protein, 553 aa, unidentified
  source 1..553: note = uncultivated organism
MKSKLQLNKKAGIYLRLSKDDEKAGDSLSIENQRLILRKYVADNGWGLIDEYVDDGYSGTNFDRPEVQRLLEDAKTGKIDTIIVKDLSRFGRNYIFVGQYVDYIFPMYNVRFIAISDNVDTANTNSAGMDMMPIMNVFNEWHSANTSKKIRAVAEANAKAGKYRSTHAPYGYVKGSGDKCLPVRDEPAASIVRRIFEMRASCKTYKEIYTVLNNEKVPIPAVYLHDKFGVTNKRPNKNLWADSILRSILKNPMYLGHLVRLRYTTVSYKNKRRVDREPIVFPNAFEPIITQELWDKCRELDESVSHGKHTSRGTMHVLSGLMYCADCGGKMKLGQQDLKPSKTHSEKRIRYHYICGNHARFGKYYCFNHYIRREVIEEVVLNDIRSKADFVMRNEKQARAEFLKRKEQATLTEVNADKKILKAKQRRYTELEKLILSVYEDKVAEKIPEEICVKLLSTYTEEQNALNKEIKELEGKLSETSKNETDVDEFIRRIKQYIDVRELTREMCIELIEGITIGAEPDDKTGMRDIHIYYKLLGENCESAKTLSICAKE

SEQ ID NO: 3853 - protein, 577 aa, unidentified
  source 1..577: note = uncultivated organism
MNKIRKIGLYPRVSTKEAAKKDEGSITSQIHRLKLRVKEKNRYSEGKWGKIVEIYEEPGISAKDTNRPAFQKMLKDVKAGLIDTVMVTELSRISRSVTDFLNFVEELNKHGADFICLQYDFDTTSPAGKVFMTIIMALAQFERELTVERIKNNIYARSLRGLLSGGRPFLGYDKDPDRSGSLVVNEKEAELVQEIFSLYLKTGSVSGVAKELNEKGFKNKKWITKEGNVQGGNKFTHRGVHSVLTHLAYLGKKEINKDNKDKDQNTLKPEERYSIVEASWEPIVDKAIFDKAHKKLDANKVISHKATHDYILSGLLYCDECGSPLFGQASTGRNGKHYYYSHSKNQGCKLNRIPVDKIEDKIRQTLFSLIRTDQRKKDFLKILGEFSGKGQKTYTNLVKQKEKELVELKKRKTNLMKVLSMTDDEDSVQSILAEVKELEAQAKQVDVDLDKAQIKAQDENRQLDVKTIMAGIESLKGDNFRKKTLSSKKAIIQSVIKSIHINPDNVIRIDVWGGKNRPERPERSQSTQTGVVLPFYKTAKKFEFKDIKKPAVFQTPVRVTSHLVEVVGIEPTSEVSS

SEQ ID NO: 3854 - protein, 559 aa, unidentified
  source 1..559: note = uncultivated organism
MTEKVQKKRVAIYTRKSVEEGLDMEFNSLDAQREAAEAYILSQRANGWYALPKHYDDAGFSGGNTKRPALKELLADCRAGMVDIVIVYKIDRLSRNLCDFLELTKLFEKYSVSFVSVTQEINTSTSSGRMMLNILATFSQYEREIIAERIRDKFAASKKKGMWMGGCLPLGYRVENRKLIVVPEEAKVVQMIFERYIDLQSPIQLALELNMKGYRTKTGKRWNQRNMFHILRNCTYVGMIPYKGESYPGEHEAIIDRETWDAVQRFLESRQAAKPKTLARRTERTMPLKGQVYCGHCGGPMTLTMTQRKHRAYGYYRCSRDEKRAESKCPVRHISANELERAAFTVLSSILRTPMMLARLEDFCDAEVPQIADAIGQDFWNEATLVERRNIAEFLVAKVTLYVDRFELEIKADGISAFKDQIDHEMKEESAKTEMLPSGNVLVSVPFDLQVRGNGKCLVLPDGAVADKSRTAFLMAVARGRKWQRDIDEGKVRDIRELTEILSLDQSYVSRILRLAHLAPPLIERVINGTIPENLCISRVRNTISNNWDDQLQEFRVEA

SEQ ID NO: 3855 - protein, 580 aa, unidentified
  source 1..580: note = uncultivated organism
MEKSNKLVRVAIYTRKSVEDSEDKQFNSIDAQRHMCESYIAAKASEGWVALPDRFDDYGYSGGDLERPAYQRLMQQCESGLIDKVLVFRIDRMTRSTKDFCEFDEKMKKLGVGFTSVSEPFVDTSSPMGELVVNLLVSFGQWERKTIQERIQRHFRTALEQGYFVGGVPPYGYKVENQSLVPDPEAAKNVPHIFRLFLEHGSLKKVASQLQTEGIERFPGRPWTVQSVKNCLKNVRYVGDANSHGRIVKGRQVPLITRDLWNKVSNKLKETEHNPLMRVACPETALFQGLVICGHCGKPMTYRWSKKDTLGVRKYSYFVCQQDMRKGVSECPIRHVSVTTVQDAIEQELETVMIASTAMLVTAANATSFTPEQIISGLRRHTFWQGLTIADRQIIYRLFLRSITVFKSSLELRMNLPVPGAIDELRKTHYIPKETPPDGDIRIEEEKCLFVKVPVAFRTISGRKHIIKNGEGRAPEKPTKLQLDTVMAQGAILKAFAKAIAWTKLIDEGKATSISQLSEIVGVDRHFVLYTLRLATLSPRIIRSALSGEMPDGFSLQKIRKIETDDWEEQERLLGFPISD

SEQ ID NO: 3856 - protein, 507 aa, unidentified
  source 1..507: note = uncultivated organism
MMKCAIYARVSTDMKSQLDSLENQLTFFENFIREKGWELVKTYADEGKSGTSTVKRVELQKLMKDAEQRKFEIVLIKSVSRWARDTVDSILLVRQLMSFGIRVMSVEDNFDSFDDGAEFKLAIYSALAQQESDTISKRVKFGISVKSREGKFHGSLPPYGYEKVKGKLELHPIHSQTVRHIFDLYLREGWGMQKIANYLTAKKIPTPRAVAGAKNAGDNTQRSNPHYTGNLVQGRSKTDGKDKIFLQKKGYKKRILNHQDEWIVSPNTHPAIISQEEFQEVQEKISKKGEKIFRGRGKKALFARLAFCADCGAGMNYKNDRKGYVCATYQKNGKQTCQSHYIKHDDLKDKVLADLRDLATNSLNMKTLLDIALKRAGTKKLGAMEELKRVEREIHSLQTEKRELLRLLSRQVITQHDYEEQYQIINDEQAALEQQKRTLEDTLAKEVDTEANIHAFQAEIQRFISLQFDNEETLRHVLHKLIDRVEVSADGQITIHYNFKNPMQKGA

SEQ ID NO: 3857 - protein, 534 aa, unidentified
  source 1..534: note = uncultivated organism
MTTTSAHRRASRRERGGAGKGAPGSAPPVVRCAVYCRKSVDKGNGGEFGSIEAQRDAVEKYIGAHRGEGWVALPTSYNDLGISGATTARPSFQRLLADIKAGAVDALVVYRLDRVSRNQADFIQLLQFFEQHDVKFVSITEHFDTTTPMGRFALGILIQVAQLEREVTAERVRDKVLASRLRGIWTGGRPVLGYDVVAKKLVINEAEAALVRELFDLYLRHRSLLAVANECRRRTISNKSFITRRGDRVQGGPMGKNALRSLLSNPIVVGRINADDVAVPGEHAAIIDEPTWAAVQAMLAEHGAPGRDRPRRTWTVPLKGMVRCGVCGNAMSHTTTGRGTRRWSSFVCVKVQKQGIAACPGSRVPARQMLGAVVERLRVIGRDPAMLARTTAACRKQLAADDAAHEIERRQLRADGERLSKERDGLRDALRRDGAQPKQLEPRLAEVDVALATIAARAAELQRLGTGSASLDETDLRAALAHFDPGWEALLPAEQARILTLLIKTVTFNAPKSELTIAFRGDGIRRLAHPEETP

SEQ ID NO: 3858 - protein, 521 aa, unidentified
  source 1..521: note = uncultivated organism
MAARRTADGYIRVSRRAGREGDSFISPEVQRKKIAAWAKLHEVEIVRWWEEIDQSGAKLQRPMFQQTLERCERGETGGIVVARLDRFARSAVDALESIKRLNAADARLVSVEDNFDGSTPMGRFAIGILTLIAELELERIKENWATAVTSAVGRGIHISARVPFGYRRDKEGPEKGRLQRDEPAASAVAELFRRRALGASWMELARYLDEQGLRPSTGNPHWSRVGVASLIKNPVYLGQARSGKAVKENAHEPLVSRAEFDAAQTVKKSLFTQHDGSIAAQAMLGGLARCAGCGHTLKITGNTRRKTGERYPTYYCTGHYASGPCPARANVTAAALDAYVETTVLAALEADDGVLARATAASAELETAAANVVAAEHELDLFVSNPTLLTVLGETKFVEGVTVRQRALDEARTELARLQMQNALAADLADGDLVAAWPTLATQEKRRLMHGLLERVVVTANDGRGRSRQPVADRTQIHLRGGTSLSPVNPTKTRAKLGQSRASRAPATSKRKRSQSRKKQA

SEQ ID NO: 3859 - protein, 572 aa, unidentified
  source 1..572: note = uncultivated organism
MTAKRSIRCAVYTRKSSEEGLDQAFNSLDAQYEACAAYITSQRHEGWRLLETRYDDGGISGATLERDGVQRLLRDIERGLIDMVVVYKIDRLTRSLADFARLVERFDQAGCSFVSVTQAFNTSTSMGRLTLNVLLSFAQFEREVTGERIRDKIAASKKKGMWMGGMVPLGYDVNPDARDPCRLMINPAEAEQVRFIFQTYARTADLIRTADLAKDHGIRSKRRAFESGGRFGGNPLSQGQVHFLLHNPIYRGCVRHKDIVYPGLHEAIIDEALWNTVQETLQRHGRATRRVRDKATGTLNAAHRSSPLTGRLFDETGDRLTPSHSTKTRTDGGSIRRRYYVSGRLLARTSEPHDPTGWRLPAAKLERAVADAIADHLTETGAEGLFATDDPVLLYRAQGALKRLYSALTVDRDAQLKALVERIEVAPGELRIRLSEAGLAEALGNNAETPQAFHDDALAFVRPFTLRRRGVETKIVTGRTEREPDQTLIRALALAHQWLDEVRRGTSMAAIGRRYGWTDSPIRQRIRLALLSPKITQAVITGGQPADLSLQKLLTSEIPLDWTAQEAAFGFD

SEQ ID NO: 3860 - protein, 521 aa, unidentified
  source 1..521: note = uncultivated organism
MIDRPRIRCAVYTRKSTDEGLEQEFNSLDAQRDAAEAYIASQKSEGWVCLPARYDDGGYSGGTLERPAFNRLLADIDAGKIDCVVVYKVDRFSRSLLDFARVMSRLEDRGVKFVSVTQQFNTTSSMGRLTLNILLSFAQFEREIVSERTRDKIAAARRKGKWSGGRPILGYDTVPQGGRVAVNEEEAGRVREIFEMYLHYKSLIPAVRELNRRGWRTKAWTSRKGKPLGGKAYSKDHLYRMLTNVAYLGKVRYKDEVHEGEHPAIVSDDLFQRVQDALRHNGRTGGKMVRNKYGALLKGLLHCAACGCGMMHTYTSRGKRRYRYYVCMEANKKGWDTCPTKSLPAGEIEQFVVERIRAVGRDPSVLAETLAETRRQATAGLAKLEAERKTLQRQLQRHNAEVRKLLDEAGLDGQRETPTSARLADLQERICQTEQRATEVREQIVAMSGRVVEERELATAMKMFDPVWDSLSTAERARVVQLLVEQVTYDGRDGTLSITFRPNGIKALVEEAQAAEAGLEA

SEQ ID NO: 3861 - protein, 529 aa, unidentified
  source 1..529: note = uncultivated organism
MTTFSMRAVGYRRVSMREQVDGFSLDAQEGNIRKYAAERGWDLVKVYTDAGISAKKDSHRPELAKLMQDAEDGQFDVVVVDKIDRFYRHLNGLLNALDELNGHNVTFVSVQERLDFTTPWGKLTLTMLGMLAEIYIDNLRQETRKGKKQRARDGLWNGNIPFGYCRGLCSRCEDPNGPGYCPDVGKPNKGDGKTMVEHPVDGNAVRMAFNLYLHGYRSDVAVAERLNEMKFTLPDGTEQAYRQKGIRGRKGPGSFTKDFVRGLLTRVLYTGKVAYYGQGRKRKIEALYPGKHPALISEETFQALLDLRKTVGSVASTKLGTPQRVYPLTGIIFCSSCGWPMRGTMWRPLGFAYRDSGQIDLHTACDQKPIKAITLEKKVIELLYAATQEWDKSVSPEATTKCIEDAEANLQRAQELYIRGEITKEILERETDRTEKILEPLQENSFVATLALSKKIQLAHANWKEISTIEQKRLLRLVIEAIFVRENALVAVQPTFAFLPILTTLLKKSSSSGPDGIRTRDLGLDRAAC

SEQ ID NO: 3862 - protein, 550 aa, unidentified
  source 1..550: note = uncultivated organism
MARKSRKGTAAAPAPRGMKLWRAALYIRLSVEFNGRRGDSLETQREIMEAHLAVYPDIEIAGIYTDNGITGRTFEREAFQRMLADMEAGKINCVVVKDLSRLGRNTIDTGYYIEKYFPLHQVRFMAVNDQYDSESADNSGSHITVPLKNMINEAYAADISKKVRSQAHQSMKAGEFIGGRPPYGYRKDPENCHRLLPDENAAPVVCQIFAWAADGVPLNQMVKRLNEAGILTPSRYKASCGLIKHENLMGSGVWQTMTVTKILSDAVYTGDMVQGKTTAIGHKQVPTPPEEWIIVRGTHEPLVSRELFEQARAARERAARKYTRTTKTPYSENILRGRIFCGCCGKPLHRQRSKSKNRNDDYFYRCISNDRIQRDACQRPVSVREDRLLQTILTIIRKEAEVVMGNSLRLKQHSGQLEQDKAGIGREIAKLRQSAADSRKYLTSLYENLVSGTLTAEEYHTLKANYEGRINAAAQRVRELQHEQAERTAQVAEYISIADRLACISKDSKLSALLVEQLIERITVNGPGDIEVQFRFESGFERVAEVLENE

SEQ ID NO: 3863 - protein, 560 aa, unidentified
  source 1..560: note = uncultivated organism
MRRDERKITLRCAAYTRVSTDSGLEQDFNSLDNQREASEAYIKSQAHEGWKLVRERYDDGGFSGGSMERPALQKLLDDVRARKIDVIVVYKVDRLTRSLADFAKLVELFDAHGVSFISVTQAFNTTTSMGRLTLNMLLSFAQFEREITGERIRDKVAASKRKGIWMGGAVPLGYRVENRALHVVEDEAEFVRVLFRRYLEVGSVVRLKTLLDAENVCSPIRTSGTGRRSGGAPISRGHLYWILSNPIYVGRLRHKGRIHEGLHSAIIDRETWDRVQQRLESQTQARRISRPDDHSFLSGKLYDDRGNRMGARHASRGGRRWRYYVSRAALTGRRQDAGSAVRIPAPEIENRVARAVGAHLAVQASAIDDRQISHGVVGGSQMNTQDEQTRRPATENDVRNAIERATVSATRIEILLSESVVVEGQDRVLTLPWTRSPSRRRREIIQGAGEAQQPLRAMRTKARDVFIKALRDARRWLDELQSDPSQTIESLAVREGKSERSIRMTLSLAFIFPVLAKAAMEGRLPRGFSVKRLVDLPMLWSEQWGALGLQAPVQVRAELG

SEQ ID NO: 3864 - protein, 523 aa, unidentified
  source 1..523: note = uncultivated organism
MKRTKPSTRPATAMVRCAIYTRKSTEEGLDQEFNSLDAQREAGEAFIKSQASEGWTCLPDRYDDGGFTGGNMDRPALRRLLADIEAGKIDCVVVYKVDRLSRSLLDFARLMEIFEKHHVSFVSVTQQFNTATSMGRLVLNVLLSFAQFEREIIGERIRDKIAATRRKGKWSGGFPILGYDVDRSNGSPRLVVNAREAARVREIFRLYLSLGSLLPVVDELARRGWRNKEWRTQTGQAKGGRPFDKGTLYALLTNPLYIGKIRHKTELFQGEHEPIVDAELFRKVQATLQRNGRSGGIAVRNRHGALLKGLLFCKGCGRAMTHSFTCKGERRYRYYTCTRAIKNGRKACPSGSLPASEIERVVVDQIRGIAADPGLRAEVLRQAQEQFEGELAEMAMEQRGLEQELAWHHADIRKLCSNGPATGPAGARLAELHDRVAQAETRLAELRRRIEEHQRDRLHASDIDAAFADFDNVWNALSPREQAQVLALLVARVEFDAADSTVAVSFHPTAIKTLSRQKLGGAA

SEQ ID NO: 3865 - protein, 548 aa, unidentified
  source 1..548: note = uncultivated organism
MSKRVAIYCRVSTIEQAEEGYSIDEQNVKIREYCEREGHEIYNLYEDRGISGKNITNRPGIKQLLEDATKNKFDLVVVWKLNRISRKLLDILNIVDLLNKHNIAFRSLTENFETETPSGKLQLNIMGAIGEFERETIAENVKMGLLARAREGRWNGGVVLGYDLVELPNEGKKRKNTRLEINEKEANTVRRIFELYSQGHGYKAVVNRINKEGHKTKRNGEFAVSTVKEILQNPVYIGKIRYNVRQDWSKKRRNNINANPILSDGIHEPIVDVETWNKVQVILKERSKKHNKVYDCEFPLTGILKCPVCGAGMTISRSTSKRKDGTRRVNEYYSCGNWKNKGTAVCNSNSIRVEVADEYVLSKIMELINNEYILKKVVDNINQNKSTKLKPILEQLEQINKEIEKLTSKKSKNIELYEDGILDKSELSIRVKVINDEIEKLKYREQELKQDLQLAEGDPIPFEIVNEVMKRFKEVFFEMSTSQQRKQLIHLLVSKITINKEREIDSIEIQINDDVITYLMKDRLPKEQGNLSFLHLLGMNCVNVKLVV

SEQ ID NO: 3866 - protein, 590 aa, unidentified
  source 1..590: note = uncultivated organism
MTQLIQPNTRTSAQGKTIRAAIYTRISFDDTKREEGVERQEHDCRKWAAANGWNVVAHYSDNSISASKFDVERPQYDLLCAAVLTGEVNAVIVWDVDRLTRQQGQLEWWLDMARRGRVTLADAKGGVIRTNTAEDRMVASIRGVFSKFEVDHKSERQVAANKARARTGRFFTGRRPTGLRRELFLDDDGVLQVARVIPEEAEAVRCVYRAYLEGHTLDAIARALSGEREPGLGYMPCLPRPAHTQMLEFNQRHPDRPIDVEAIRRVDPEKAKVYDPQPWNAATVSLMLRNPKYAGYVGYTPTSKSRRFGDGTAKWYSELYVDEDTGEYVRGAWEQIVDDETWWRAQEKLRAAADRVAAQPPKTRKHIGSGIFRCGVCGHTLHIQGGRNGSYVCPNNKHHPRVEGDPATGPVCVVMRLLDPIIERCVESFLTRADVAEGIDTTRKPAGEHRDFEAELDELKAAREKAGRDYAAGLIEAEDLKARREFIDAQMTKVSHERREAEAASRMPVLPEDVAASPDPAQAFRDADLAVRRAVVDYLLEVRVMPCARKGGMRGGKAGGWFDPTRIKVFAKTPDGLVSIELPAEEEDAA

SEQ ID NO: 3867 - protein, 524 aa, unidentified
  source 1..524: note = uncultivated organism
MGRKVAIYARVSTEHEAQINALENQIQYYDNKLSEHPDWELYDRYIDEGITGTSVNKRKNFMRMLKDAEKGCFDLIITREVSRFARNTVDTLLETRKLKRMGVEVYFTEDNIWTFKDEDGELKLTLMATLAQNESKKTSMRVKAGQKISFQNGVYYGSGNIMGYDRVGKDAVVNEDQAKIVRLIFQLFLEGKGVTKIKYELEQRGIPTATGLKVWNVPIISKEDFEAVQKLIKKHSIYLEDGIRKKLIGSPRNIWPQKLICHCGSRFNRRGYRGAGTDHQLYSYYCYRQKNEGSARKRKELGLDYEGFCDVVQINEWKLELMFSVLLKNLIKNKDKLRTIAKTAIESSALAETVNNEILNEIKEINIKLTTNKSRLDKLLNAYLDNMLTNEEYSSKKKELEDTIITLENRLKELEENSKNQSISVKDKINILKQKVDMLLDIDTNEISDVLIDSIVDKITVHNDRYEWKINYISSSSEENDENSNGVFFARMIITVDEIKRYNDKKRILKKVFQKEPIVMDIYI

SEQ ID NO: 3868 - protein, 517 aa, unidentified
  source 1..517: note = uncultivated organism
MKVAVYCRVSTEDQADAKTIENQVDFAQRYCGLHGLEISGFYLDDGVSGALPVESRPEGARLLSDAMEGCFAVVCVYRLDRLARTALEILKTHQRLTNAGVVLKSMTENFDTSTPSGKFFMTTLGGIAEIERETIAERMRLGKERALREGRWPGGPPPYGYKLANHRLAVDLAEAKVVRQIFRLYAGGGMSAGSIADYLNATGVPAPGSAPGKGGALKNRWYGSRIWSILTNQAYRGVFLFRRAGPREAAELSCPPLVSPLEWESAREALRVNSLDSRRSAKREYLLKGLIKCGRCGRTYCGDGSGGKGGRFYYRCAGSSSGRAGGIPCRSRSLRADLLEELVWEDICRYLLGTPGLLVRVGLRAGPDQEPAHGGRQELEAINGAFRDKEKERRRVIGLFRRKLISGEEAGAELESLSRELAALEKRRQIIETSRPGESSRLQLAERLRQRLDGAGPREKRDLVRGLVAGITVVTVEEEGKSLPRATISYVFDNPAGCLPGVETRGKYRLGVPKSPY

SEQ ID NO: 3869 - protein, 523 aa, unidentified
  source 1..523: note = uncultivated organism
MDKVAIYCRLSDEDKNKRNAFDDSESIINQKNMLVKYAMDKGWNVYRIYSDDDYSGLDWERPEFNKMIIDAEAGKFNVILCKTQSRFTRDMELVEKYLHNKFIEWSIRFVTAVDGVDTSEKRNKKSRQINGLVNEWYCEDISDSIRAVFKSKQISGKFIGSFACYGYMKNENDKNKLIIDEEAAAVVRLIFNLYLQGNGVQHIVYILNERTIPNPTKYKHLKGFKYVNSQAKDQRGLWNKTTVKRILKNEMYLGNMVQHKRQKVSYKSKKIKALSPEYWISVENTHPSIVEEETFNKVQKRLKSNVRSTGTGQAHLFASKVKCMDCNSNMQKTSNGKGYEYLRCKTYSISPKGKKLCTSHSINLSFLEEIISSKIKEYFQTLCNTENLTNELMLEKGISNKFKNLEKELVKINKEINKRTEALKDLYLEKISGETTIEQYNELASSFEKDKKQFLLKKSEIENTIEEIKQSSDDVERYTKLIEKYKSFGKLTHNMVVELIDYIEVGEKDKGTGNQNVKVYWNF

SEQ ID NO: 3870 - protein, 522 aa, unidentified
  source 1..522: note = uncultivated organism
MKRCNDKPATVRCAIYTRKSTDEGLEQEFNSLDAQREAGEAYIASQRHEGWVCLPNRYDDGGFTGGNMERPALKRLLADIEAGRIDCIVVYKVDRLSRSLIDFSKIVEVFERHRVSFVSVTQQFNTSTSMGRLMLNVLLSFAQFEREIISERTRDKIAATRRKGKWSGGMPMLGYDVISSSAGGRLAVNEDEAQRVRSIFELYLDRQSLIETCKELADRGWVTKRWVTRKGHERGGKPFCKNSLFKLLTNPIYLGKITYKDEVHDGEHPAIVDGDIFERVQRLLKRNGRSGGKHVRNQFGAILKGLIRCTPCRCGMVPTHTTKNGTKRYRYYVCANAQSRGWHSCPSPSVPAPEIERFVVDQIKSIGKDDDLLAETLAESRHQREQAIGVLEGERRALERELNRHNVELRKLAARNGQDGPTTDRMADLQDGIRVAEQRATVIRDQIIALSRELVDAREVSQACSLFDPFWETLTGREQGRILHLLIQHIDYDGQAGKVSIAFHPTGIKTLADELSQQEVTA

SEQ ID NO: 3871 - protein, 576 aa, unidentified
  source 1..576: note = uncultivated organism
MTRTSANGSSRDCAAGSRCAIYTRKSSEEGIEQEFNSLDAQREACEAYILSQKSAGWIALPDMYDDGDISGGTMERPALQRLLVDIAAGRIDTVVVYKVDRLTRSLSDFAKIVDAFDARGVSFVSVTQQFNTTTSMGRLTLNMLLSFAQFEREVTGERIRDKIAASKKKGMWMGGLPPLGYDVEDRKLVVNGAEAETVCDIFRRYATIKSVRALKEDLDDAGIVSKARFDRFGRETGGRPIARGALYLMLQNPIYRGQIVHRDNRYPGLHDPIIDEGLWDEVQAALSENRVERITRSRATAPGLLAGLVYDDGGERMTPTHANKNGTRYRYYLSQSLIKRGRPNASGAACRVPAADLEAIVEDRICTMLGDEAAIFEASGSTAIATSKALIKQAADLARRWPTLPAPDRRAMLHALVARVDVHQEVVNITVRHAVLADIVKSGPDSSVSADTSTRMLSVAALVKRTGMETRLLVQGASSGECRTPDRGLLRLIGQARRFHDMVITSQGKTITELAKEAGVTPSWFTRVLRLSFLAPEISKAILQGHQPVTLTAKALMLQGNLAPAWSRQRMELGFA

SEQ ID NO: 3872 - protein, 526 aa, unidentified
  source 1..526: note = uncultivated organism
MNTLKTQGSSALTPEREIVRIKATASENHTKLRVAGYARVSSDSDGQLNSFSAQVNYYQRLIEKNSGWELAEIYADEAVSGVSLDKRDDFGRMLADCQKGKIDRIITKSTSRFARNTLDAIRTIRELKDMGVTVYFEKENLDTATLTSENLLTLYSLFAQEESLSISKNCKKGNRMRMEKGIYVSSNPPYGYRLVDNQLEIYEPEAEVVRRIFAEYLGGSSITRIAQGLMEDEIPSKNGKMKWRHQAVSLIIKNERYVGDMLLQKNYSEDALPYRKRKNRGELPKYYVRNTHEPIVERLQYELANILLKERGEHINSEYGEYPLSRKIKCGECSTTCRRKITNQIPYWVCRQHDNNKDDCGGKRITEEAVHEAFVRLYNKLKQHYASILLPMLSALEKLQELKTRNNPEISTLNKQIAELSEQNHVMNGLLSKGILDSALFISQTDELNRKIRSLKVAKARLLSEQESDSLLDKTEDLVEIFENSPDHISSMDITLFHELVDKITAYDTQTVDFTLINGLVLTERL

SEQ ID NO: 3873 - protein, 528 aa, unidentified
  source 1..528: note = uncultivated organism
MIRASGARAALYARVSLEEQARHGFSIEGQLDALRKYCEANGIQVYDSYIDAGASGGKMAGRPELKRLLSDAERGKFDVVMVWRISRLSRNLSDLLHIVERLKQHKIALYSLNEQFDTDTPLGQFVLQMFGAAAQMERSTIADNVRLTMNHRSMEGIWNGGNSVLGYRWVRDPETGEGKVEIVPEEAAVVRQIFEWYATGKLGYKAIANRLNHAGVRTKSGKPFSIQSVRYILTNRNYIGLVRYNKTESIRTRGAVPAGWAQGTHEPIVDQELWDRVQAILAKRSHPPVRKISRSFPLSGLLKCPQCGSGMVPGHTKSRRKDGTFRIYFYYVCGAYNAKGSVACRPNSVRADDIENWFFGQLQQLLASPTAIDRITGIVNNKLNQATKPAQDQLKLLDEQLAHLEAEQRQLFQSFEAGKITGGELSAALQDIKRRRQECSEERERLERQLSSIEHRAISVEKIRSAILQLRKLLESQSIEQQKRLIELLVEKVTLPRDRNIEGAVLHGSSALLNIQLPISNNESITEV

SEQ ID NO: 3874 - protein, 537 aa, unidentified
  source 1..537: note = uncultivated organism
MPEKIIREIPPHPIDRKPRKVRKLLRVAAYCRVSTEEEEQKGSFETQCSYYTEKIQSHDEWTLAGIFADDGISGVHTKKRDDFLAMIAQCKKGKIDLILTKSISRFARNTLDSIQYVRELKKQGISVIFEKENINTGTMTSEMILTVLSAFAQAESESISQNVARGKRMGYRQGKFSFPYSCMIGYRKGPDGNPQIIPEQAETVRMIYNDYLAGDSLVKIAGNLDARGIPTPKNKGKWSSQTVMRILQNEKYAGHVLLQKTYTADLLSGTIKKNNGELPQYYIENNHTPIVSQEMFLLVQEEIARRKSKSPASQKKVRTNRGRYTSQYALSERLVCGECGCYYRRVTWNIRGKKKIVWRCINRLEFGKKYCKSSPSISEDVLHNAILRAIRELAQQQREQTQKCLHDTILQCATGGLDISLTTLKNQLEQKNRDFDRILEMALTDGAESEFVKAKMSRTSDEIIALKQQIKNAEKKSSLQQVSKEKVKNIWNLLAAEDFEITEYDDALVARVIEQVIVEENMIFVRFIGGQEIPQML

SEQ ID NO: 3875 - protein, 503 aa, unidentified
  source 1..503: note = uncultivated organism
MFDAIYTRQSIDKADSISVESQLEYCKYETRGNPYKVYSDKGYSGKNTNRPGFEEMMSNIKEGNVSRVIVYKLDRISRSILDFANMMDIFGQYNVEFVSSTERFDTSTPIGRAMLNICIVFAQLERETIQKRVADAYYSRSKRGFYMGGRIPYGFSKTSTVIDGIKTSKYVPVPEEAEQIRLMYSMYSDSKHSLGDIIAYFNEHGIKNLRGGMWSVGRISDMLRNPVYVMADADVYDFFISQGANVINPVSDFTGYNACYLYQGNKSKTRKQLDLTDKEIVLAPHQGIVSSKDWIKCRLRCLNNRQSTQTCKAKTSWLIGKVKCGKCGYGLTIVKANTKWHRYFVCATSLATKKANCQGTGGTVYADVLEDYIIKAIREKLSEFKTLTYQSEQKSKPKVNENKIRLSEIDKEIDDLLSKVVGANTVLMEYINKKVEQLDTERKNLQEEIVSLTHNQNAKDIETVTNHVETWDSISYEDKQSVVDTLIKVIRIADGNIEITWNI

SEQ ID NO: 3876 - protein, 555 aa, unidentified
  source 1..555: note = uncultivated organism
MSLALNNGKPLRSAIYARVSTEEQAEFGYSIDAQVDALTSHIRLLGNELVGTYVDAGVSGKSVKGRLELARMLQDAKDGKFDVVLVWKINRLARNQLDLLRIIDDLRACNVAFRSYSENFETETPMGRFALQMMGAVGELERNTIVENVRLGMKQRARDGKWNGGAVLGYRTESVPNASKRHPESRLIVVKDEADTVRLIFELYASGLGLKAIANRINKEGLRTKRGNMFSINGVRDILLNPVYIGKIRFNVREHWSELRRKGTNPDYILADGDHEPIISQELWDRVRAIHAAKEGKPKRSFTGTYPLTGLLRCPECGAGMVAGRSSQKRKDGTEWIRRYYVCGQFANKGSAACRANSVPADQAEKYVYERLSEVVTKKQILRDVVLNVNRERTGHIQVLQEELTQVDKMIQQATARKNKLFALFEEDKVSQDFIRERLVGLDEELTVLGDRKAELEAQIDSQDATPVPIEMVEAVLRDFSAALSACAPEQRKSLLVLVVKEITVKDRCVDKIVLTFDETIERNVRRWGDSNGEEASEGVDDDTLDRSLVVRFTL

SEQ ID NO: 3877 - protein, 562 aa, unidentified
  source 1..562: note = uncultivated organism
MHRVYMTERKVFIAVYSRKSKFTGKGESIENQIELCREYIRIQKGEEAVKNIVVYEDEGFSGGNLNRPGFKKMMTAARNRELSEIIVYRLDRISRNIGDFSGLIEELSRLGIAFVSIREQFDTATPMGRAMMYIASVFSQLERETIAERIRDNMHELAKTGRWLGGVTPLGYRSEAVNKVCVDGKTRKICKLKAAKEEQDLVLLIFQLYMKYDSLTAVEAELMRQGIKTRKGKYFTRFSIKGILQNPVYMAADLDAYQYFTDRKADLWGKKESFDGIHGMIAYNRTDQEKGRTTINRPVDQWIITVGEHVGLISGRNWVRVQNSLERNKLKNHRKPRMNEALLTGILYCSCHSKMYPKLTDRKNHDGKQVYTYICKSKERSHRKLCEVKNVSGNALDMAVWEEIKKLSGDPETFVRLLKEIRKFYMENQGEQEQNLRIQKKNKEEQEAKMERLIDSLADLKEEEARRLVEKRIKRLGEEIQKTKAQIRRSESLISCHTFDCEDRNALCKKICEWKEMADQASAAQKRECLRQLIQKVIWNGSNARVVLAGDQEKMNGSEDSK

SEQ ID NO: 3878 - protein, 573 aa, unidentified
  source 1..573: note = uncultivated organism
MSHPIKRSVRCAIYTRKSSEEGLEQSFNSLDAQREACQAYIQSQRQEGWRALETHYDDGGYSGGSMERPGLKLMLADIEARKIDTVVVYKVDRLTRSLADFAKIIEVFDGSGVSFVSVTQQFNTTSSMGRLTLNVLLSFAQFEREVTGECIRDKIAASKQKGMWMGGPVPLGYDLGNRRLDVNQKEADVVREIYRLYLNIGRVRQLKTDLEKRGVRSKIRVGPTGRRTGGGPNSRGALYKILRNELYVGEVHHKGQSYPGEQDAIVDRELWEKVQAMMTGNARARRYRTNAKAPSLLCRLVYDDEGNRFTPSHAAKNGKRYRYYVSQKLIKDGSPKSSQAGRIPARELEKVVIAELTNFFTSADRIVTALTFADDELTTIQAIVESAAGYAKRLDGSSPGIPAEILASVVARVVVHQDSVDIQLSKDLVRERLLEPDRNIRPGRTANSDSVVDPIVLTIPAKLKKCGGELRMIIPSRSGGPEPGRTVPSLLKALSRAHEWIRLIEEGRCKNQKAVAVASGLPLRYVRSILLTAFVALTIVEAIVEGRQPEDLTLTSLLGNISLSWTQQRHLLG

SEQ ID NO: 3879 - protein, 956 aa, unidentified
  source 1..956: note = uncultivated organism
MSKDNGKPKTTRCVVYTRKSTDENLDLDFNSLDAQREAGEAYIKSQQHEGWVCLDDRYDDAGFSGGNVERPAFQRLMTDVAEGKLDCIVVYKIDRLSRSLMDFARIMETLESNGVSVVSVTQQFNTTTSMGRLTLNILLSFAQFEREIISERTRDKIAAARRKGKWTGGPPVLGYDRIRDNRGSRIKVNKDEAERVRAIYRMYLEEGSLLPTLHSLKALGWKTKRYETAKGQWRGGAEFDKSSLQKLLTNVVYLGKVTYKSEVHDGEHEAIIDEDLFARVQGLLRRNRNSGGKHSRNKHGALLKGLVRCKACGCAMSHHFATRGNKRYRYYVCIRAQKNGWSACPAPSLPAKQLEDFVVEQIKTLGRDPGVLDDALRATQAHLQADVDELERQRSEVEKTIKDLGRQVGEIAARAGFDEGATRRLGHLQAEIQERQQEAADINGQISRVRQRMLRPDELAGAIEAFDPLWETLPPAHKAKLVHLLIERVPGSKASGVVISSSGMKGSDIRGQNYARADGQVVRPALVMVDDPQTTESAWSPSQSQRREAILAGDVLGMAGPSKKIAGLMACTVIRPDDMADRLLDRDKHPEWQGERTKMVYSFPSSEKLWARYAELRADSLRNDGDGSEATAFYRENREAMDAGAVVAWPQRFNEDEVSAVQHAMNLKLRDEAAFFAEYQNEPIVETEGEEMLSAEEIAAKTNGYARGSIPIGCNHLTMFIDVQQKALFWMLCGFEDDFSGYVLDYGTWPDQKRPYFTLNDMRFTLARAKPGAGLEGQIFHGLDQLTSDMLPRVYRREDGADMRIDRCMIDANWGQSTDVVYQFCRQSEHAAVLLPSHGKYVGASSIPFSEYKRKRGDRIGHHWRIPNTTGRRQVRHVLVDTNYWKSFVHARLAVAMGDPGCLSLHGRDAEKHRLNMLIRPTPTPPKITFIRSAETCLEKPAASTHTHAYDTPMKA

SEQ ID NO: 3880 - protein, 528 aa, unidentified
  source 1..528: note = uncultivated organism
MARSVRTIPATINRQTAMPITEIRKRRVAAYARVSTDHEEQLSSYTAQVEYYTNYIKSRDDWDFAGMYTDEGITGTSTKQREGFKKMVNDALGGSFDLIITKSVSRFARNTVDSLTTIRKLKAAGVEVYFEKENIWTFDGKGELLLTIMSSLAQEESRSISENCTWGQRKRFADGKVTVPFSHFLGYDRGADGELVLNEKEADVVRRIYALYLSGLSPRAICKRLMADGIPSPGGKPRWHDATVRSILTNEKYIGDALLQKRFTADFLTKKQKVNEGEVPQYYVENDHEPIVSRGVFDAVRQEMERRRKAKGSYSGVGMLSSRIFCGECGGCYGSKVWHSTDKYRKVIYRCNRKYDKEHEHCGSPTLTEAEVRWLFVKAVNQFLDGRNVVIERLDGLLAILRDTTKLEAEAEDAESVMRNLAAQMDAAITRNAHVAADQDEYRKTYSRLESEYGRAKVSHDKVEADLNARKARANMLEMFIDSLKAQKGTLDDFDERLWASLLDRITAYTRDRIVFRFKDGTETTVGL

SEQ ID NO: 3881 - protein, 551 aa, unidentified
  source 1..551: note = uncultivated organism
MDNGVKQAKKRIYCAAYCRKSVEERPDETFGSIENQHEAILNFILSHKHEGWMALPERYDDNGFTGSNINRPSLQRLINDIKEGKVNMVVVYKLDRLSRSLSDFVQILKFFEEYGVAFASITQPIDTSTSTGKLMLHILSSFAEFERQLISERTKDKMSAARKRGQWTGGWAALGYDLDKESKKLVINETEAKLIKEIFDLYLKGNSLLGVAKILNDKGYRSKTITLKSGKTFGGKKFGITHIQSMIKNPLYIGKIKYEGQIYEGEQEAIIDEEIFKRAQEILKENRVERKATKNIDCTGLLSHLLHCKACSTFMIHTYTTKNKGALRYRYYLCSNAQKRGYSSCPTKSINAQAIENTMTDHLRRIFSDMKKIENHPHKQEIEALLSPIWDTLYPQEKRRIFKALVKEIDYNAANKKLGLILNGSDLRLEYDAEFKQVRFFNKWRKEIEIEKEPKIRKNLIMAFQLQNLLEKEKIEMKQAAKWLNLSYARLSQLLMLNFLSSEIKGTIMSWENEKLSYISDNSLRKIAAEIDWQKQRLMWQALISRLTQPK

SEQ ID NO: 3882 - protein, 813 aa, unidentified
  source 1..813: note = uncultivated organism
MKKVVFYGRYSSVMQTEQSIEGQLHVCEQYAAENDLEIIRHYIDRAKSGTSDDRPEFQRMLSDSKSRAFEGVLVYKLDRFARSRYDSAIAKHKLRENGVRVISATEHLTDTPEGIIMEALLEGMDEYYSAELGRKMKRGKQESFRKGKFIGHRPPFGYAVVDHRLAIDPLTGPIAQEIFRRYAAGEKQNQILTDLNRRGIPNPKGNEWNKVNLTYMFANRIYIGEYTVSDYGTNDCPALIDRELFDTVQRVKAASVHRSRENATGYDYMLTGRLVCAKCGGAVTGSSMQKGKYHYYQCYKHHCSNRIRAEQMHERVRSALSEYLTEDKLDELAAAAYAAYEQEQRPASERALLTAELADVEKKIENAVQAILNGVQLDDLNATIDTLKARREQLKSAIADAPTEMPALTYEHFRLALELIIEKANTEDFKALVHTVVNRIIVDDQNIIVCINLTDEANVPPLEQIMVRVKRESSAVTACAASRATAGGVRLVARHFQHLDGLRQNQTTVHTLRGEEADLIGSCVQLIQTAEGTVLTVSDPIILHITEEENTLTLGDAGHEGRSADRSAEQRIRLCNVERRLPKILVVLVLQLHELEQDRLVANEYGIATVRRFQAVIQVENLIESDLRLRGGLHAKLCAAGLIEDTEGLFVAVTGEERTLLGIAHRHTETGGDIRCEVKGRVVQQLVGNLDHGAELVSRQRGLTKTSIGLRDLLTLVDPLCLHRIVGNRDLAGAAVGLDDGRHLPEDVVLLQRLNQTALELIRDGKAALGVLADIQGIAHGELVALVADHVPEGFLVLIGRCGTCIRRLAGGR

SEQ ID NO: 3883 - protein, 510 aa, unidentified
  source 1..510: note = uncultivated organism
MTKDGIINAGIYIRVSTEHQAKEGYSIEAQKTNLTNFAKSQSFNIYDIYADEGISGKNIEDRPAVKRMIEDIHQGKIDAVVLYKFDRLTRNMSDTEDIIELIQNCGIQVFTLSGGVVDVSNASGRFIVRLNGAVAQLEREQTVERIKVAFEQKVRQGYSLACGTLPYGYNRIKGKKIIVINEKEAKIVKRIFKMYINDKTLTEIAHTLNSDNVPTKLSGKYKKPRNGNKDEKKLINSVWQSKTIRLILSNPTYIGKVRYGVNTNKYFEVDGQHQPIIDKKLWDKVQDKLSKTPKIIRTSHAKEDRYYLGTLKCGICGNILTTNRTGGRIKKDGTRSIFHGYRCLNREKGLCNAIGMSHPKVEEAFLNYIDNIADLTEIENVAIDNEDDDLLEIERLQKSINSTRNKKEEIMDLFMIDKITHEQLSYMTKELDIKTKELSEQLDLLEKRYKPQSSVTKKDIAKSIKEHWEYLSKKERMEFLNNFVKEIVIVNKDKDRRSGKPKIIDVVFYD

SEQ ID NO: 3884 - protein, 517 aa, unidentified
  source 1..517: note = uncultivated organism
MKKALLYTRVSTDEQAKTGFSLENQIRSLRKYCKDNDILAVKHYEEDFSGKSFDRPKWKELRRYIREHKKTIDLILFTRWDRLSRNMSDSMNLIYEMKELGIELRAIEQEGYNSENPESIYGFAITLASAQVEREKISIRTKASYYTAKIQGRYLGKIPLGYKYEKDEAKKSILIIDKPTAAFIRDTFELYAQGNHSILEVMRIMMQKHNRKPMAKQTFINLLKNRIYVGDIVIKPYKGEPEQIVNGTHESIVSRETFEKVQWNLNARKRQKNIRKPNDERLILRRFLLCPECGKSMTGCATKKRKHPYYQCQKGHYRFNAHKVNDRFIEIISADFGKNMHLLPMYKSLLEETYYQNKAQITAEIESLDKSIKKCIENKEEKFNDYVNGRISPEAYNECFNRLESKERDWVTERTELEMGLKYDFKRYVEHSIPIIENIPYYFKNGDTDTRIRLLNTILDGKMVFKDGDYQTLNYNPAISLMLNIDKGFEEKEKGQITKSVPFSSKAPKAGLEPATL

SEQ ID NO: 3885 - protein, 542 aa, unidentified
  source 1..542: note = uncultivated organism
MRRIRCAIYTRKSSEDGLEQDFNSLDAQREACEAYIASQKHEGWELLPDHYDDGGISGGHLERPALQRLMRAVDEKRIDQIVVYKIDRLTRSLADFAKLVDRLDAAETSFVSVTQSFNTATSMGRLTLNMLLSFAQFEREVTAERIRDKIAASKRKGMWMGGSVPLGYQPDGRTLRIDEAEAETIRTLFGLYLKLGTLRDVKERAEDLDLRSRRRERAGGRISGGTHFDRGHLQHILSNPVYAGRIRHKKQVYDGQHPAIIDPAVWDKVQDMMQSGAAVARGSRQKATRSPLAGKLFDETGDRLTPSHSRKNGKRLRYYISRRLVKDRSRKHPDAWRLPADQVEGLLAELVGRHLTRPGAAIAMTEGLTAAELTDVSKRFQEQGNVTEGLALIERVDLQPGSLTVRLDMAMLADRLGSKPEQINLAELTIEAPFLMRRRGVELKLHLGEPPAEIDRTLVQNIMKGRSWLAMVIAGKTFSEIAGTEGVSKRRVQDVTNLALLAPDVLDGIATGEQPDGLTTDYLIKTRFSAVWSEQREQFAAL

SEQ ID NO: 3886 - protein, 521 aa, unidentified
  source 1..521: note = uncultivated organism
MKREDFHPAAAPTIRCAIYTRKSTEEGLDMDFNTLDAQRESAEAYIASMKHEGWVCLPEFYDDGGFSGGNMDRPAFKRLMTDVEAGKIDCLMVYKVDRLSRSLLDFTRIMETLDKHKVSFVSVTQQFNTTHSMGRLTLNILLSFAQFEREIIAERTRDKMAAARRKGKWTGGMPVLGYDVDARGGKLIVNALEAARVRGIFDLYIERQSLLATAQELNQRGWTTKKWITKKGFERGGKPFNKNNLSCLLGNVLYLGKLTYKDEEFEGEHEAIVDEKVWKAVRKLLRSNGRNGGTAARNKHDALLKGLLYCASCDAVMIQSITTRGQKRYRYYVCSHAQKNGWDSCPTKSLPAAEIEAFVIDRIRCIGRDRKLSAKTLEQAQRQYQEKIEKLTGEHRTLESDLRRQRIEQRDLVKEAAREGEGESATVARLADIQERMEGSEKRIVEINLELATLKGETIEERELAAAVASFDPVWEGLSGREKSRLLHLLIQRISYDGEKETISLTFRPSGIKALANDREE

SEQ ID NO: 3887 - protein, 504 aa, unidentified
  source 1..504: note = uncultivated organism
MKPNPASPPEPAPKSVGIWIRVSTEEQAQGESPAVHERRARLYAEAKGWTVSEVFHLEGVSGKAVMGHPETKRMLSAIRSGQISGLIFSKLARLARNTKELLELADQFRAAGADLISLQESIDTGSPAGRFFFTLLSAMCQWEREEIADRVQQSIPIRARMGRPIGGAAPFGYRWKDKRLESDPAEAPVRRLVHELFAEHKRKKTVARILKEREYRTRNGSYFTDTTISRLLTDTTARGVYRANYSKSAPEGKGKTFKPESEWVYTKVEPVVDDVLWDACTSILEGQRKGSQKSSRKTVHLFSGFAYCACGPKMYVPSTTPAYRCAKCGRKIPLADLETIYRDRLGAFIVSPDEIAAHQGAATEVIAEREKLVLAAEAELKKLSGDEKRLTELYLAAELSREDFGRLHRPYAERRAQLEEELPRLQASLDVLKIDSLSQSEAASEATNLASHWADFTFEDKRAIVEAITDKIVIGKEEIAINLLYRTSGPNSGERATQPSTCGS

SEQ ID NO: 3888 - protein, 516 aa, unidentified
  source 1..516: note = uncultivated organism
MKKPAKTSSPNIRCAIYTRKSCEEGLELEFNSLDAQRESAEAFIASQQLEGWQCLPERYDDGGFSGGSLERPALGRLLEDIKEGKIDCVVVYKVDRLSRSLLDFTRIMEVFDKQKVSFVSVTQQFNTTHSMGRLTLNILLSFAQFEREIISERIRDKIAAQRRKGKWYGGIPVLGYDVDRSSPSVKLIVNEQEAIQVRKIFALYLELGSLTPVIEELESRDWRTKLWRTKKSQQRGGRSFDKGALYALLTNPLYIGTIKHKSERFEGEHAAIIEKKIFEEVQRQLNKNGRGKGNRLINKYGALLKGLVYCKACGYAMVHTFTGRETKRYRYYTCCKAIKKGWKSCPTKSVPAGELENVVVDQIRSIAEDRSLVEDVYVQACSEHRSELQQLKEQSEQLERQLSRDHSQITRLATKHDPTSATSSTIADLHERIASNEEQLREIRDRQAELDSQQISHQEVLDAFRDFEKIWNVLSAYERAKIVSLLVARVEFDVSDSTVSISFHPSAIKSLAEGAA

SEQ ID NO: 3889 - protein, 505 aa, unidentified
  source 1..505: note = uncultivated organism
MPEVDNRIDALYGRQSVDKKDSISIESQLEFCRYETHGGSYEEYTDKGFSGKNTNRPDFERMMNDIVHGRIRRVIVYKLDRISRSILDFANMMEVFQKHNVEFVSATEKFDTSTPIGRAMLNICIVFAQLERETIQKRVSDAYYSRSVKGYYMGGRVPFGFRLEVTVEDGRKKSKFVPDGVYAEQLVKMYYWYADLGVSIGEIQRRLTAEGSPRNWCTARISEILRNPVYVKADIDVYNFFKAQGAVIINPASDFIGTNGIYLFKGRNADGSKLKQYDLVNREVVIAPHEGLIDSATWLKCRLKLMNNRKLASTKSGSRSRSWLIGKIKCAKCGYGYIVTKSGDRRYFQCSGKRYSVNCSGINKTIYADKMEEHVYNEIVKVLDNLEYISPGAPQKNDSKETVFKAQIADLDREIDNLLNKVSGANDILMQYINNRVSELDIRKRELSGKLIQISNANMPDKMEKITGYVSKWDELNIEDKKKVVDILINVIYIGDDTIEIEWNI

SEQ ID NO: 3890 - protein, 552 aa, unidentified
  source 1..552: note = uncultivated organism
MNVSKAILYTRVSTSDQAEHGTSLGEQLAACTKKAEQLGAQVVGHEEDAGISGGAYLTRNGLQNALGKIEAGHADTLIIANLSRFSRDREHQSAIKKRVQAGGGRLVFCDMDFADTPEGDLAFGIMGTFADYERKVIRERTVKGRRRRAEEGIQPGRSEAPYGYHIPTHADVLRGSWLPETLGTYQIIEARAAFAREMFARAATGDSLRSICRWLTSAGAPTSQGGKAWYQTSLLCILRNPAYKGVGVYGRTQQFTDERRRTEQGLRHVTYSRQRAPEEWQTFAVPALVDEATWNAVQERLDTNQARLSGNPRRKYLLSGVARCGLCGGPMTGFRSNGGASAYYRCRDAGGWRKDGVTSCAAGCCPMAELERLVLAGFVKIAASPDTVAGAVEAWRESRRRQAAPMQVERTRVEAELAALDRREKATISAQIAGIAAGARPESYTAEFTEIARLRTSLTEQQKAVPATPAASEPEPEKVADAVCYAVRSLAEVLAAGEITVEEKHRLLSRVIEKVVPDSKFTQGGLRAVDLYITPPFKDGPEGQTVQRIVTR

SEQ ID NO: 3891 - protein, 576 aa, unidentified
  source 1..576: note = uncultivated organism
MINYNSTKNKSRQRRKVAFYGRVSTEHEEQLNALRNQMQWYEELSRSYPEWDIIERYMDEGITGTQTNKRPEFMRMIDDAFRGKFDLIVTREVSRFARNTIDCLEMTRKLRNSKVEVFFVQEGIWTMDNEGEMNLTIRAMVAQEESRKMSERVKAGQEISRANGVLYGNGNVLGYDRVGSTYVINEDQAETVRMIYNLYESGLGMQAIRNELIRAGRKAGNGKVSWDTTKIMRVLRNTIYKGVMGYKKSQRNNFLDQKTIINRDESTYMYVKGDFEPIISEEQWEHCRQIRDSRTRVRLVEKEGELTIEKKGFRVLQDIWSQRLRCACGSSMRRNKWRKRNDGTTPVGYRCYSQLNKGANQVSKDNTIACTVHSVCGWKLELMAEMVFKKILKNEKLFDRAVKKFIDSRRIEENEIKRIKGDFYNEIKAISGKVNRLIDMRMEGELSKEEYLEMRGKVEEEKKQAEQRLADFEKQVEDRTNLSVTQEEGRELLTNMIKNGAKFVEDLVSVFVSKIQVVSDTEFVWLLSFNTNDDIMEENSFDLLVKYNDALAFRKKRKEMLRENQWSDLKVRVSLL

SEQ ID NO: 3892 - protein, 516 aa, unidentified
  source 1..516: note = uncultivated organism
MALRADDVMPAPVRCAIYVRKSTEKGLDQEFTSLDAQREACEAYIASQRFDGWVALPDRYDDPGFSGGNMERPGLKRLIADIKSGRVNMVVVYKIDRISRSLLDFARLMELFEQYNVSFTSITQQISTNTAMGKLLMNILLSFAEFEREISGERVRDKVAAAKRKGKYMGGTLPYGYDLDRERHKLMVNLEESKIVRHVFKRFTEVSSGLTVAKELNAKGITTKSWITNKGDLRPGGTWDTQHIYRLLNNRTYIGETVHKDQSYPGEHESIVSKALWDNVHSILDNPNGRKKNQPARTVPAPLKGVIRCGHCDRAMTGTYTKKGSKTYRYYVCTKASRNGYDVCPVRSVPASEIEDAVIGQLRAVFRSPEMIAQTFREAQSLESQGLAQLRDDISELKADISSLRASLDGLSETDEDYWTTRRLIDEKKDLSSTKTHELHVLQSNLLTENDVIDDLTTLDPVWNELFPAEQQRIVGLLVDKVVVNTDGLDIRIRAHGLHSLVTELTDTHSTNSERI

SEQ ID NO: 3893 - protein, 521 aa, unidentified
  source 1..521: note = uncultivated organism
MSKETLPTVRCAIYTRKSTEDGLEQNFNSLDAQRESAEAYIISQKSNGWVCVEDRYDDGGYTGGNIDRPAFQRLMADVEAGRVNCIVVYKIDRLSRSLMDFARIMETLERKEVSLVSVTQHFNTTSSMGRLTLNILLSFAQFEREIISERTRDKMAAARRKGKWTGGMQLLGYDLAHDTGGSRLVVNKAEAERVRTIFRLYLEEGSMMAALNAIRKLGWKTKQYETQEGRQRGGAQFDKSTLQKMLTNVAYLGKTTYKGDIFDGEHEAIIDEDIFGQVQGLMRRNRFSGGKYVRNKSAALLKGLVRCKHCGCGMSHHFATRENKRYRYYVCVKAQKQGWSQCPAPSLPAKELEDFVVQQIKGLGKDGELLEESLRGTQKHLQAEIDALAQQRTEVEKLIKGLSREVGTLAPRAGFDEEATRELAKLQERIKAEQQEVTRLNERVVGLRRRMLNPDELAGAVEAFDPLWDRLSPTQRTKLVHLLVDRIDYDGKEEMVSITFHPTGIRTLTDQTLEAGPCRKP

SEQ ID NO: 3894 - protein, 560 aa, unidentified
  source 1..560: note = uncultivated organism
MTASIRCAIYTRKSTDDGLEQEFNSIDAQREACEAYIKSQIGLGWKLVRTRYDDGGISGGTMNRPALRALLADIECKKVDLVVVYKVDRLTRSLTDFARIVDVFDENSASFVSITQQFNTTTSMGRLTLNMLLSFAQFEREVTGERIRDKIAASKKKGMWMGGPPPLGFDVIEKKLIVNAKEAETVRQLYRLYLELGSVRALKAEAARLGLVTKRRRRDDRITGGKPFSRGNLYRLLHNALYVGEIPHKGQNYPGQHASIIDRQTWDAVHQLLSENASARQANRNARSPHLLTGLTYDETGHRLCPTHANKKGRRYRYYISKRLMQGNSGDNEAEGGWRIPAKTLESVVVEALRTFLLDERCIHDELLQKGANPDRLRLALTNAANAADQLNDRQTLQSLIHRVTLHREKIRLEIKRSGLASLLAGVDATGNTAIDGVIVYTLPVQLRRRGVESKLVLETSHRGMESPDDTLIAFISRVHIWSEQLVKGTARSIGEIAAQDGIHPSDVGRHLQLAFLAPDIIEAILVGRQPLELTAQRLRRVGALPLDWTQQRVLFGFKV

SEQ ID NO: 3895 - protein, 512 aa, unidentified
  source 1..512: note = uncultivated organism
MAVTRVCLYTRISTDEDNQPTSLHSQRERLEAFCQAQEGWRIVAHEQDQATGTRLDRPGLQAALDLARSGAADVLLVYRVDRLSRKVRQLAQLAEELDTYGVVLRSATEPFDTGSAAGRMMLQMLAVFAEFEHATIVDRVTAGIERRAKEGRWPTGRLPFGYRRDEQKRVVPNERTAPVVKRIFELYTRGRLGTAAIARALAAEQAPAPPAGWQPAVVQLILDNEAYLGRVIWRQQSLPGLHEPLIDEVTFQRAGRLLRERGEDMALRRSNPSDYLLTGLIRCGRCRRAYVGMSARGNGGTYHYYACSRRQKLGRAGCDGERIPRDKLEHAVLTQLSALYRDGALIRRAVDEAAAKEQTGRPALEERRRALAEEIRRSERALDRYYRAFEDGDLDSSRFQTRVSALETRLAALCEQDAELAQQLAPQAAPTPDSADLEAVADRLERTIAEADPKQAKALLRLLIKDLRVNGRSEILPTYRVVMHEVCALPSSVERTGIEPVTSGLQSRRSPS

SEQ ID NO: 3896 - protein, 572 aa, unidentified
  source 1..572: note = uncultivated organism
MDQDMLKSKYAIYTRKSKFTGKGESIGNQFELCRQYIKNNYPDVRDEEILRFEDEGFSGKNVDRPHFKEMMAEAREGTIKAIICYRLDRVTRSILDFSKLIVELEALGITFISATENFDTKTSMGKAMMYIVSIFAQVERETIAERIRDNMYELAKTGRWLGGTTPTGYKSIKIKGSITVDGKVRKMQKLEQIAEEVAIVHKIIAKFLETNSLSMTETFLLQNNIKTKNDKNFSTYAVRMILTNPVYMMADEDAWNYFEEQGVEINGDKSMFDGKNGVMAYNKTQQNTSKSHQARDISEWIIAVGKHKGIISGEKWIKIQMMLEQNKSKSYKKPRSHTALLPGLVYCSHCGSYMRPKMGRGADDKGNRLFNYLCLTKEKSRSIKCDMKNPQGNMLDAMVCEEIKKLPSKDSTLNQLLEKIKRSISQHKSEFDDEIKSNQDKIQKNKKSIKALMSTLASSEGTSAKDYIIKEIDFLHNQNEYLGSENTRLQMMMKPSEIEGGEFDILKNQLLSFGNSFDKMSIEEKRSALRMFVKRVVWDGSNVQLYLFGSEDKDFDAVFSELRAEPLQMGCK

SEQ ID NO: 3897 - protein, 573 aa, unidentified
  source 1..573: note = uncultivated organism
MRSRSASATLKTHRCAIYTRKSSEEGLEQDFNSLDAQREACEAYVKSQKSAGWVALPTMYDDGGFSGGNMERPALRRLLADIEAGRIDTVVVYKVDRLTRSLADFAKIVDTFDAKNVSFVSVTQQFNTTTSMGRLTLNMLLSFAQFEREVTGERIRDKIAASKAKGMWMGGMTPLGYDAKDRKLVINSEEAETVRHIFRRYAALKSVRALKEDLDASGIVSKMRICANGTRRGGLQMARGALYLMLQNHIYRGQIVHKGTVHPGLHEAIIEEDLWNEVQDALAKNRIERATQSTATAPSLLAGLVYDSNGERMVPKQANKKCVRYRYYISQSLIKRGRPRTTDTGARVPAADLEALIEKRIRNLLKDQTALVDAVRSSTVAARKALIERAADLEQRWPTLPFAHKRVVIHALVARIDVMSDSVEVAIQSSMLLQITMPDLDLSRPLEPAASQVIVLSIPARVRRTGMETRLLIEGLEERRDPDRSLVRLLGQAQNFHDMVARNTDMSLSELAEAAGVTRSYFTRVFRLSFLAPHITTAILEGSQPPEITANKLKQVGRLDPFWPGQDRQLGFN

SEQ ID NO: 3898 - protein, 513 aa, unidentified
  source 1..513: note = uncultivated organism
MTLSTTLKPKLNGAFYARYSTAKQNINTQRKVCEEIVKKYNCFITREYLDQNVSAVNKKLIERTKLSTLLNEIEQKEFDFIIVYQQDRLARDPLEHLFIRNKLAEQNIPVIVASTEQLYDSGDIMINIFRDGLSQYEVETLRLRTKDTMASLNINGQWTGGVAPLGYQYNKKSKQLELHPFELQLVKKIFQLFREGDGIQTIANELNTTFKLPNYQFDKKINKQLVKRTLLNPIYAGYLVHHRHLPLEQWRFNKASSNVQPIMTLEQWKTIYALYESKKNNRNHLTTVDTNFLVSHLLICHSCNTPLSVKNQLKENKNTGARYGRCWYKCTNCRYKLDNISIDTQCALLLKKISTQYYTGYKHSLAITIKDKCKEIDIQINRLEQMINHKALMIRNSKQEREKLTSIKEFSEDEGDLILLLKQYEFEAENQILELKEEIEALSRSKQRFGNLELQDEMNNIVQKLSPNDYLNDRILMKKMLTHLIDIIYIAASAISKTGIPDKADLIINLKTK

SEQ ID NO: 3899 - protein, 563 aa, unidentified
  source 1..563: note = uncultivated organism
MNRNYSKIYHAAIYVRLSKEDGDAKTSAKAESNSISNQKSLVREFLEDKEDIEVVKEYVDDGYSGSNFERPAFQMMLEDIKKGKIDCVCTKDLSRFGREYIDSGMYIERVFPAMGVRFIAVNDNYDSADGREQSDEIIVPFKNLINDAYCRDISIKIRSHLEIKRKNGEYIGSFTPFGYMKSKEDYHKIVPDSYAANVVQDIFKMKLHGMSQDGIAKRLNETGVLPPAEYKASIGSNYQTGFKSKEKSEWTSVMVRRILTNEVYIGNLVQGRQTTPNHKIKKTVLKEESDWIRIEKNHEAVIGDREFEVVQRLLSMDTRTAPEQEGVYPLSGLVCCGECGMPMVRKTSTVGGKTYAYYMCSTYKSTKECSPHRIATGRLEDAVLVLLQQHIANVMELKRILSFIGTVPFQQIDMKKLEERKLKKEAEMERCTQLRTTLYEDMKEGMISKEDYKELHAAYETRRKNAQAAIRQIDLEMEKVLERKSEGFVWLDYFAEHKNMDELTRFVAVSLIRKIRVQDKNNIEITFDFDDCYQQIVEGLGSAGHEVSVDENGKLNIRVKEAV

SEQ ID NO: 3900 - protein, 542 aa, unidentified
  source 1..542: note = uncultivated organism
MRRVRCAIYTRKSSEEGLEQDFNSLDAQREACEAYITSQKHEGWEMLPDHFDDGGISGGHLERPSLQRLMQAVDDKRVDQIVVYKIDRLTRSLADFAKLVERLEQADASFVSVTQSFNTATSMGRLTLNVLLSFAQFEREVTAERIRDKIAASKRKGLWMGGNVPLGYEVDGRTLKIDEAEAATIRTLYDLYLENGLIRVVKERAEDLGLRSRRRVRGAGRASGGTVFDRGHIHHILSNSIYAGRIRHKEQVYEGQHPAIIEPATWDQVQEMLEGMAAKARGTRRKATRSLLAGKLFDETGDRLTPSHSRKNGRRLRYYISHRLVKDRSRKHCDAWRLPAEQLEGLIADLIRTQLRHHDRVARLVQGLLASEVADKTARLHAIQQTKPCLGLVERADVSPGTLTVRLTQIELAKILGCETDRINTEELKLISPFRMRRRGVELKLHLGKAPPEIDRTLVHNIVKAQKWMSMIIGGKTFTEIAQAEGTSKRRVQDVVDLAMLAPDILDAIAGGEHPDGLTSNYLLKSGVPAAWSEQREQFTKL

SEQ ID NO: 3901 - protein, 514 aa, unidentified
  source 1..514: note = uncultivated organism
MTQTTPKRRRCAIYTRKSTEEGLEQSFNSLDAQREACAAFILSQAHEGWEAIDELYDDGGFSGGSMDRPGLQQLMEDVEAGKIDIIVVYKVDRLTRSLADFARIVDTLDKRGASFVSVTQAFNTTNSMGRLTLNVLLSFAQFEREVTGERIRDKIAASKKRGMWMGGVVPLGYEVKDRRLLIVPEEAEKVRYIFNRYLELGSVYLLQSDLAEKGIRTKQRILKDGRVYGGCNFSRGALYQMLANRIYLGEIAHQGKSYPGEHDGIIDRETFEKVATRLSLNRVRRKYGEHAVQASLLAGIIWDEEGRRMTPDHASKKGQRYRYYASQKDKERPELPVHRLPANEIEKLVIHQLATKTEASWEGPTPSRELVLEYVERVTVHSDRVDILFAGTNEPVTVEAVLIRCGGEVRIDVPGQGWAEARRDPSLIKLIVRAHHAKAAIEDRAIISIDAAADRLGLSKQYFCRLLRLAYLAPDITAAILDGKQPSHMNRQFLARVNNLPLDWKRQRELLGFG

SEQ ID NO: 3902 - protein, 557 aa, unidentified
  source 1..557: note = uncultivated organism
MARTKNRGFEEKISAPQIIRWKLAQYIRLSKEDINRGKDDSNSVTNQKALLDDYYQQHIDEFESTQPPYVDDGYTGTDTNRDSFQRLLSDIYAKKVNCVIVKDLSRLSRNYTDAGSLIENLFVQMNVRFISLAEGIDSYLNPDSISNLIVPITNVINDNFCYQTSKKIRQVFDMKRRNGEFIGGFAAYGYKKNPKDKNALIVDEEAAEIVKNIYEWFLDGMSKNAIVHNLNDRGILCPSEYKKSKGLNYQNPSGSERPLWSSKTVSDILKNRLYVGDMVQGRQRVKSYKIHTQEQVPENEWYIVENTHQPIIERPIFEKVQELLKRDTRTAPQKKKLYLFSGFLRCADCGKAMSRSQVKGTVYYFCRTYKDQSKTACTKHSVKHNRLEAAVLYAIQQQVYLAVHYANTLEYISTAPLQKSQSIRLEALIDAKEKERSKIMRYKQSIYQDWKDGEITHSDYRHMSEDYERQIAALGEVLKNLHAEREELQNGITAESPCLVVFKKFENIDKLTREVLVELVDHIKVHENGNISVKFKFADELRRVMEYIEINTQSEAV

SEQ ID NO: 3903 - protein, 514 aa, unidentified
  source 1..514: note = uncultivated organism
MPQVRVIQPISEQAKKLRVAAYARVSSDSADQLNSFATQVAYYTDFIQSKDEWEFAGLYADEAVSGTTAEKRDDFQRLLADCRAGKIDRILVKSISRFARNTLDCLQTVRELKQLGVAVEFEKEGIDTGNMGSEMLLSILGSAAQEESLSISKNLKWSYRRRMKSGDFITSKDLLGYFFKNNTLVPNPKEVPIVEYIFNSYLSGKGTDEIADELNVANLKTNKKPSGRWHSTMIRYILSNEKYIGDSLVQKRYTPEDLPLRQKRNNGELSQYYIQNSHPAIISRETFETVQQLLNRRRKRHPPSVEMQQTPLRSTMQCALCGSYFHKHKSNGENCWFCALHRKSKDLCPMPNIREQEILMAFLSMYNKLLDNIDILSTMMSQLLELQAKSVCSRPDIMDLNEKISALVTQNHSLSRLQAKGCIDSAIFIERSNRNNKLIEELRQELRQRQEPDDTSSAIEGTRLLLDLLEGAKPMLEFDTSIFQSMVKQITVYQEKFCFQLANGLVLEEMRAQS

SEQ ID NO: 3904 - protein, 500 aa, unidentified
  source 1..500: note = uncultivated organism
MRAAIYPRVSSEMQLEGYSLDAQLTTCRRLAELRGWDVVCVYTDEESAKTAVGRPAFQRMMQSARSGQFDVIIVHKLDRFARSVEDMLSYLRELEEINVALVSATEQFDFSTPMGRLLLTMLAAFAQWYLDNLSHETAKGKLARAEAGMWNGEIPFGYTAQYRKDGGDGQARPDEHEAQGVHLAFERYAIGKYSDNDIADILNEAGYRPKGRGERALELFSKDSVRDLLQNRFYLGEVRYKRQRHKGVHQAIISQELFDLCQKVRASRRHQRGIQARPDSRPYPLSGLARCARCGGAMRGSYSSVARQRYYRDPAKERGQPCDQRMVRADKAEQALGDFLGQLSLPDDWKAQVLDIIQGKVGSAQQIEREQNRLQGQLERLKKLFVLGDISDVEYQVERDRLRIKLAALRPLNLPDLEEAGRMLQNFGLIWEAATGKERQRILQILLNAVYLDSGERGPVVAIEPKADFGPLFEIVQASHSGTDPACKIAILSPGASMPV

SEQ ID NO: 3905 - protein, 575 aa, unidentified
  source 1..575: note = uncultivated organism
MKRKYKIKKDSSNKDKPIRVAWYIRCSTDEQFKHGYSVEMQKDALEKETKHRAENNNWVTKEDWIFIDEGQSGADLKRPEFERMMDYVKDGEFDLVLVWKIDRLSRNLTHLLSTFEKMKKYKVSFCSIKENIDFSGAIGTLIFQIFGALAQFERELIRARSMEGIRTSAKAGNWTSTGVPYGYERVKNASGKGTTLKIISEEAKWILQMFEWFVYDGKNYEEIARLMNDKKVPKGKTSPAKTKKTKWYAYSISTMLSNTVYMGEKIKEYHDSDDPDDIEEVLVKVPPIVNKTLFRQAQHLINEIKETKGKKGGGNNFYLLSRKIVDKLTGRHFVGVPRTKGGFSYRRQAIYDVNGEKVHKNLEMPVSEIDGFVWGEIERFINDPKKFYEIYERSKYHKKELIRLLKKQEDCKQIISLNEDKIAKLYDDYYEGKHSEVEKDKLEKRFRDVITVNNKEAKSIEGQIRALTALEIASDTLQRFSDKFRKDLSKMNVVQKNQIVNLLVERIEVTENSGKIDVNIVFRFAPQVENIKTIKNEPKNSSNNRKNPPDDGLSNDSNGSGGTRTLDPLLKRQML

SEQ ID NO: 3906 - protein, 539 aa, unidentified
  source 1..539: note = uncultivated organism
MPYYTQEENILAAAYMRLSREDSKLGESNSITNQRLMIKDYIESHEMTFVDEFVDDGYTGTNFERPGFKALMEACQQGRVNCILVKDLSRLGRNATEVGRYISETFPTMGIRFIAINDNYDSNDTEFAILDMSTPFKNLMNELYSRDMSRKVRAAFEVCRQNGDYIGGLPPYGYRKDPADKHHLMIDEECAPVVRLIYDLKISGLSTSAICDHLNLTGVEPPRQRLERLYGKEMQGSQETPAVWLQASVSRILSNEIYTGTMVSAKRARPNYKIRKLKANDKALWCRVEGTHEPIISKEIFDYVQDISSRAQPALLTGLVRPLTGFLRCPDCGMLMLHFGSQNSKNEYYNCSSFVRKEGCSSHNLNLKRIEGAVLGAIRMEIEYLIRARDKLKASGVTSYRGETLAKLDAEIEEVLKEERRFMNLKTHLYEDKVNGIVSAEEYKDLEQHFSESLREVEEKIAALQEKRNAICNEQMNIIPWIDSIVQFRGIEKLDRRVVVMMLDFVYVHKNKSIDVHFRYQDEIKDLMTATIQRVEESA

SEQ ID NO: 3907 - protein, 550 aa, unidentified
  source 1..550: note = uncultivated organism
MNATILRAAIYCRKSSEEGLEQDFNSLDAQREACAAFIASQRHQGWRLLPQRFEDGGFSGGTLERPALQRLLAAIRARHLDIVVVYKVDRLTRSLADFAKLVEVFDARSVSFVSVTQQFNTTSSMGRLTLNVLLSFAQFEREVTGERIRDKIAASKRKGMWMGGTVPLGYRVEERRLQVVASEADTVRRLFALYRREGTVQALAAAAAQEGLTTRTGKPFFPGHLYQLLQNPLYRGEIRHHAIVYPGLHEAIIEPATWQAVQDQLAAHRVRRRERRGMQHPSLLAGKLVGADGNAFTPSHAVKAGRRYRYYIERLPQAEAGTKRRRHQRLAAAEIEALVTATVIARLRSTPDLLAAARVETPSSEAARALTERAATLAENLTTGAEPCARWQALLQRVRLGPESVQIELDINALRSALALPPVAAGEAPHHTIEVAAHLRRRGVEVKFIIEGPATARASRPDPSLIRTIVRAHDWWRRWCAGQGDTLTSIARAEGVTDRFVARVVALAFLAPDLTTAILDGQQSPALSTDDLFKQWLLPPGWDEQRRLLG

SEQ ID NO: 3908 - protein, 504 aa, unidentified
  source 1..504: note = uncultivated organism
MTSMTRALTATRISQRKDDSTSLTRQDNACDRLTDSRGWEVIGRAVDDGVSASKVSPFDRPKLGPWLTDPVLINKYDVIVWWRLDRAVRSMRDLHALAGFAKDHNKKLMFTEGPGGGALEFDMSTPLSALIMTVLAFAAEMEAQAIKERVQSSHDYLATQPRWASGAPPYGYRIIDRMVDGVARGKTLELVPEEARILQEIADYLFGGESLWSVARLLNQAGVPAPKAGSAYVDRTPEWHPATLGEMLRSEKLLGYKVSKGQAVRTADGEPVIMADPVFDETTFRRLQHVLKERSNYGSHTRNTAPLMGIAFCGMCGGPAYRQPEYVNKKTGRKRRGFYLCYGKWQQGTTSCKGVRIFEEDLMQRVNQAFLENIGPLDRPERQFVPGSDHMAELEGIEQALKNLRAESDAGLVLDQQEYINRLTALTTKQKNLAALPAEPDRWEERPSGKTWGQWWEESDVDARRDLLLSAGFRVCLLPGGDSVAYWPGKSRLTLEEFLESMKG

SEQ ID NO: 3909 - protein, 573 aa, unidentified
  source 1..573: note = uncultivated organism
MNDAGTTCRGRALRCAIYTRKSSEEGLEQEFNSLHAQREACEAYIRSQRHEGWVCLAHHYDDGGLSGATIERPALQQLLADIRTGKIDAVVTYKVDRLTRSLADFAKIVEIFDQKGVSFVSVTQQFNTTTSIGRLTLNVLLSFAQFEREVTGERIRDKIAASKQKGMWMGGVPPLGYAAKDHKLILIDSEAETVRHIFRRYAALGSVRLLKEELDAAGIRSKCWTSAAGNSWGGKPLARGALYLMLQSRIYRGEIGHKGQHYPGAHVPIIDQELWDEVQAKLAANAVERRSGRRVKHPSLLAGLLFDSEGHRMTPTHAIKKGTRYRYYISRPLINESRANARDGLRIPAGDIEQLVVTRIGQFFSERAQLVETLAHQVGTAAQQRQLLQRAAEFAADWPTRPMLAALVRRIMVRINRVDIQVLPSRLAALLRDELPKPISPDSADDEEQPVVLSVQAQLRRSGLGIRMLIDEAAPPGRAARPDPKLIKLIARAHLLNNKLAESGSEYLADVAQGERLTSSYFTRVLRLTFLAPDITRAILEGRHPRDLTARKLLAHSRLPLTWPEQRRTLGFA

SEQ ID NO: 3910 - protein, 500 aa, unidentified
  source 1..500: note = uncultivated organism
MNVAIYSRKSVFVEGSISIETQIALCKEYINKNYDNVNFKIFEDEGFSGGNTNRPAFQKMLKLIELKEIDAVVCYKVDRIARNTLDFLKLLEIFKEKDVQLISVNEGFDPNTQMGRMMLILLASFAEMERSNTQQRVKDSMLSLAKKGKWTGGSPPTGFRIASGGGLEIDNEEMIKDIFRMKYNKENMSTIITYIKNTYNHTFFNNTLANTCRKPIYVKSNKDVSIYLKSKGYTVLGEENEFNSYLTYKDNDIKYAIVSDIPGIIDPHIWININKTMDSSIRRESNRFSADYWLTKTLRCPCCGKTYAGKTKHTKTKYTCKDGTIKEYHSTQMYYMCRDMFKGKLKTCTNTKRILKGYLEGKIDEYIYSLKNIDNFRSLYNKNKVDNSFLIKDYNAKIKNIDRTIDGLTDKISLLSNDAVSIFINKIEQLIEEKRILKEKIVSLEIEELDSINHDADKIFNNIMLYDKDMTNDEKRNIAMNVFERIVYDPKTDTFEVAFN

SEQ ID NO: 3911 - protein, 553 aa, unidentified
  source 1..553: note = uncultivated organism
MNATVALRAALYLRVSTARQAEHDVSIPDQRKQGEAYCLARGYQLVETYVEPGASATNDRRPEFQKMMEAGTAKPPAFELVIVHSFSRFFRDHFELEFYVRKLAKNGVRLVSMTQELGDDPMHVMMRQIMALFDEYQSKETAKHTLRALKENARQGFWNGSLPPIGYRVVDAEKRGAKVKKKLEVDPLHADTVRLAFRLSLEGDGVSGRMGVKAIAKHLNQRKLYTRTGGRWGVGAVHRMLTRPTYIGRHEFNKRSKAKTLKPADQVIAVPVPPLIDRETFDAVQAHLKSRNPKVTPPQVVGGPTMLTGICFCADCGGAMTIRTGKSGRYRYYTCSTAARQGETGCKGRSIPMERLDDLVAAHLEERLLDPERLEEVLSIVLDRRHERAERRAAHAVELRKKAAEADARLKRLYDAIEKGVADIDDESLKERIAELRALKSQAQVDAERVVAALEGIGAEITPAKLRAFADAARQRLRGPDGGYRRDHLRALAQRVEVAEGEVRIIGSRSNLLRALAAASGVKPATAGVPSFVPKWRRGWDAPLNGEKRHKVR

SEQ ID NO: 3912 - protein, 548 aa, unidentified
  source 1..548: note = uncultivated organism
MNTAIYSRKSKISESGDSVENQIQYCKDYANVHFKDSKYTIYEDEGYTAANTDRPEFQKMMEDIKKGKIDILICYRLDRISRSVSDFSTTLNLLDKYDVAFVSASEHFDTSTPMGKAMIYIASVFAQLEREMIAERIRDNMLALSKTGRWLGGRTPMGYVSKEEVFLDSDLKERKLYSLVQDAKEMKITRMLFAKYLEVQSLSQVEYHCLKNKIQTQTGSDFYKGSIAIILENPVYCVADEAAYNYFKNLGCEICNDKIEFDGTKALMCYNRTNQANNKSVNRPPNEWIIAIGTHKGIISGVDYVKIQGIIEANKSKGNIRSETSNIAALSGLITCNECGSKMRIKSASRRNGRLQFYYVCEMKVLSKGTRCTMKNISGVKFDRIVISTLKKILSDPNKGTLKKYLKDKGNLLTERAQSEEIKTLEEAYNENIKAIDNLVMQLSKSASSIVADYITPKLEELHNKQLELEVQIARAKDTESYIASKKENIDLIHDNLLNFTTLIDDADFNLKKFLLRSIIRNIAWDGSNADIELHEYDSQYGKHCRGH

SEQ ID NO: 3913 - protein, 549 aa, unidentified
  source 1..549: note = uncultivated organism
MYFKSQNSYLAAVYLRLSRDDGDKVESDSIRNQRSLLRDFANQHNDITLVKEYIDDGYSGANFERPGFQKMLEDAKEHKINCIIVKDLSRLGRNYIETGRYLEKIFPVLGIRFIAVNDHYDSADTENDADQIIVPFKNLINDAYCRDISIKIRSQFDVKRKRGQFISNYACYGYKKDPDNKNHLVIDEYAAEIVRTIFNMKLDGFSAQNIAADLSDMGVLIPTEYKRSCGINYNNGFRAGKNPKWDAGTVLRILKNELYTGTMVQGKTRKINYKVKACRMIEPENWIRVEGTHEPIISREVFETVQRLMALDTRTSPEEESIYVFSGLLRCGDCGQNMVRRSVKKKGKRYFYYHCSTYKRGEGCSSHNISDIKLKKIVLEAVRNQIALIVRADNILSQIEDIPQQQFGVKMLDTQIKTLYKEMQKYEELKNNLYEDMTDGIISREEYRDIKQTFSKKIETAKNTRHELEEKRKRMLSNEMCTQQWVEEFKKYHNIESLNRKVIAILIDRIIVYGTDRIEIHFNYEDEIAEFVECAAMHENETERKAGSL

SEQ ID NO: 3914 - protein, 512 aa, unidentified
  source 1..512: note = uncultivated organism
MNRTNERRAGGQPIRCAIYTRKSTEHGLDLEFNSLDAQREACEAYTKSQASEGWQAIPDRYDDPAYSGGNMDRPALKRLMKDIEAGLVDVVVVYKIDRLTRSLADFAKLVELFDAKKVSFVAVTQQFNTTTSMGRLTLNVLLSFAQFERELASERVKDKVAASRRKGKWMGGNVPLGYDAIGKKLIVNAAEAETVRMIYGRYLALKSIQMLIDELNEKGIVSKKRSVKGKQIAGVPFTYGPVAYLLKNRTYLGETGHSGKWFAGEHEPIVDNKTFQAVQNLMKENSAGRTGKRYRSGALLTGLLYDDRGNRMSPSFSVKNGVRYPFYVSQALLKGRKTEAGAVPRIAAAAVEAAVLQTISAAHPVGAREPAEPRDRLDALIKRIVITPDGTKLIYADERPPLHVKRQWKDRNDSDVYGPPRVPKSDQPHPKCQALIHSFVQAHRWVDMLSSGGANDIDELAKKEGVHPKILRNRIRLAFLAPRVVSALLGASLSDAQPIRADEFALKWSDQR

SEQ ID NO: 3915 - protein, 538 aa, unidentified
  source 1..538: note = uncultivated organism
MQIYKAIKYIRLSYTDDKTVESDSVANQRKLIDDYVAKHPEIEVVGEKVDDGYSGVLFDRPAFLEMMEEIKEGRANCVIVKDLSRLGREYIETGRYVRRIFPAYGVRFIAINDNVDTAGDSGDELTVSVKNIMNEAYSRDISIKTRSALDVKRRSGDFVGAFAIYGYFKTGDKHKKLEIDPYAANVVRTIFRQRMEGVSASHIAAELNRMGVLSPLAYKKNNGLPHAKNGFTDKKDCQWSATTIIRILRDETYTGTLVQGRQSTPHFKLKERESKPADEWVRVENAHEPIVERQDFDLVQRLRRVDTRTSPKADKVYLFSGLLVCGCCGGRMIRKTNHYNGREYHYYYCPTGKKGGCKSPSMLKESELIECVLASVKGHIDNVVSLDSLLSSISRDRVNRELAQEYAGQISANENMLAKVEGYKAALYENLVNGILSKDDFLSYKNKYNADIERLRQAISELNEKMTDVLENRSERNRWITHFTRFATMQELDRRAVVQLIQSIRVLGKNDLHIRFNFQDEYEKAITLVRQAEERMVG

SEQ ID NO: 3916 - protein, 538 aa, unidentified
  source 1..538: note = uncultivated organism
MTKKRCALYTRKSSDEGLDQEFNSLDAQREACDAYVRSQKSEGWRALTTRYDDGGFSGGSMQRPALERLLADIAAGKINVVVVYKIDRLTRSLADFARMVELFDLHDVSFVSVTQAFNTTSSMGRLTLNVLLSFAQFEREVTGERIRDKIAASKAKGMWMGGNVPLGYDLPEGPSRALVVNEGEAVIVRTIFHRYLELGSVHALQRWLAENHIRSKRRQTQRGKTIGGHAFSRGALFHLLRNRTYLGMITHKDEVHPGLHPAIVDIGLFDAAQAKLDGNRRRHQDANQSNPRAPLTGRIFDVDGQPMSPTFTYGKRGQTYRYYVSAPLQQGRPQSDDDSIRRVPGPAFEAMMAAAIRRVLPASSAEPLSLPVRIEVLKNAVHLLMPVEYLASMRDRLEVGETADLDAADPKLLRLVLPMRLRLRGGRCWIVGGTAPSARRDPVLIKALRSAHAMLKTDAAGLPVLDAAPPSPYLRRLIRLALLAPDLQREILAGRQPPGLTLEQIMHAPMPELWSDQAQMFEALGVGGKLVRRTSRPY

SEQ ID NO: 3917 - protein, 580 aa, unidentified
  source 1..580: note = uncultivated organism
MVKMGSSSATQIRCAIYTRKSSEEGLDQNFNSLDAQREACEAYIASQAHEGWQLLPEHFDDGGFSGGNVQRPALSRLLEHISSNKIDVVLVYKLDRLSRSLADFVRLIERFDQQGVSFVSITQNFNTSTSMGRLTLNVLLSFAQFEREVTGERIRDKIAASKKRGMWMGGRVPLGYDLDDRELHVNEIEAKTVRHIFDRYMALGCVRKLKAELDAGGYRSKPRPEHHKIQGEQRFSRGNLYSLLKNPLYIGKIHHDGELYEANHAAIVDSGVWHAVQARVSKNRTQHRTGQNAKHPSLLAGRITDTSGNRLSPTYTQKKGKRYSYYVNQALLQFRDDDVDGVTRIPAKELDTAVEYLLLNLLRNPTTLIDNLSNFVSKAFQVNRLMSQAEALTMNWTGYNTCERATVLEALDAKVVVSDCNITVTLGARSLCDFLLKKIRSDKSSQRSEHDSDVIRLSAAVKLRRSGIGKKLIIGNSPSKLTNAHPRSVVALQRTVLQAMRWNEELTTGQVSSIEALVQRDGLNRRQVYRVRQLAFLAPDIIARIAEGDVPETLTLEKLKKGFPMEWQKQRVLFGLAPPF

SEQ ID NO: 3918 - protein, 536 aa, unidentified
  source 1..536: note = uncultivated organism
MKRTVAIYARVSTEHEAQLSALDNQVQYYDEILSRHPEWTLYDRYIDEGITGTSIKKRKNFMRMMRDANEGKFDLIITREVSRFARNTVDTLQETRKLKKIGVEVYFTEDNIWTFKDDDGELKLTIMATLAQNESKKTSQRVKAGLRIAFTNGIYMGSGNILGYTKINKNQMVVNEKQAEIVRYIFREYNRGVGTTTIARDLERKGYRTSTGLERWTAPYITRVLRNPFYAGTIVYNKQYIPDYLEQKAKKNRGEVEQIVVEGNHEPIISKEEYEKAQARLDRHSKPKPNGDRTAIGVAKFVWSKKMICECGSTFNRRKDHETRKGRTYSFACYNRKTHPKSGQYEYGYKFCEVKEVQEWKLEAMANFLFRALTEDDNNRLELEMTLIKGIKIDSYEADEINKEIERFNKLISENSIKLDRLLNVFLEKLIEPYEFESYKKELSDKIELYKLQKEDLEKKLKRIDPPELKVEKAKQSVRRLLDFNYNGIDDKLIEEVVEKIIVHQGWFEWKLCFLPEPIKLKIRGKKKDYIIEEIK

SEQ ID NO: 3919 - protein, 530 aa, unidentified
  source 1..530: note = uncultivated organism
MRVERGVAMPVRCIIYTRVSTDAQERDGTSLETQERACVHLATQRGWDVVRCIRDAASGGALERDGLEELRGMLRHGEADVVVAYAVDRLSRNQNHIGILFDEFEQAGIQMEFVTERFEDTAVGRFILAARAFIAEVEREKIAERTMRGKEERARSGRIPQATGRGFFGYRYDAATGRRTVEETQSRIVRRVFEQFAGGASILGITNALNDEGVPSFTGATWSAWTVRNMLRNPAYAGRTIFRRTKASYRRDPITGKRHRVVETRDPSEWIEVPDATPAIVSDALFETVQDRLSDPERRRAAQRKYDYPLAGTVRCDVCEASMVGQTSLGKYRYYRCRRAYAGPHHDRCATRYVRATDLEDAVVSKLTAALSSPEVVLAELERAANGTDTDRKRSAARQRLTSLDKQHQRLLRLYQLGEVDDAYLEREVVAIRAQRASLEAAIDRQGAVTSVPLPRNPEEFARTCATLRELVLAEVEAGRLKQIAEAFQLSARIACTGDQTSGVLEGVIPHSFDEDFSHHCTNIGMTVRL

SEQ ID NO: 3920 - protein, 511 aa, unidentified
  source 1..511: note = uncultivated organism
MVSMETITKTCAIYTRKSTDERLDMEFNTLDAQREACEAYILSQKSEGWAASKDYYDDGGFSGGSLERPALMRLIDDIKTGKIQTVVVYKIDRLTRSLTDFSKLVEVFDEYDVTFVSVTQSFNTTTSMGRLTLNVLLSFAQFEREVSGERIRDKIAASKAKGMWQGGRAPLGFDIGDRRLIVNKEDAPIAKQIFELYLELGCIRKLTSELKRRNIKSRERISQKGLKYGGHYFSRGAIYSMLTNPVYIGKIRHIDKIHDGLHNAIISQDLWDKVQIRLQEKSAYDRGEKRQSHNNLLTGLIFDENDNPYTPVFTNKTNEKRYRYYCNDALANDKDHPDYSRARFPAHEIETIIESAIRQKLSEWINDTDESTKKYFKEHQIEIPPYELVRSLLTKVIVHHDKLALHISLTELPKIAHKHMNIHLTCCQDEAFIEMPYQLHRSQAGAQIIKAEGRDVFDMPPNALKKFVQGTIWRDEHFDGMAIAKIARREGCSRDYVSSAIFSSLKIIQNA

SEQ ID NO: 3921 - protein, 533 aa, unidentified
  source 1..533: note = uncultivated organism
MTNQNRVCCLYRVSTGKQMDYTENHEADIPMQRKACHSFAAKMGWTIVHEEQEEGVSGHKVRAESRDKLQIIKAMAARGEFDIFLVFMFDRIGRIADETPFVVEWFCKHGIQVWSTQEGEQRFDNHTDKLLNYIRFWQADGESEKTSIRTRTSLGQLVEAGHFKGGFAAYGYDLVKSGRFNKKKHELLDLQINEEEASVVRLIFDKYTSEGYGAQRIATYLNRLGYHTRAGKNWHHASIRGILCNLTYTGVLRSGDSRSEVIPELQIITPQQFETAQRIREERADHAREQPTVPLNTRGQSLLAGNVFCGHCGARLSLTTSGKYRRLRDGSMDKTPRIRYVCYGKTRKQTECDGPTGYTMHILDDIIDKMIREIFRKMKGISKNDLIQARYAKELNLRKSHMVTVKAELSKATETLNILRSEIVRSIQGESAFSQDTLAGLIRDSEAKCSELRNQYEEAEAAVLIEEQLLNQLTDQYEELISWADLYDHATFEAKKMIVNCMIRRVEVFRDYKLNVEFNFDLNQFLNGLDISA

SEQ ID NO: 3922 - protein, 586 aa, unidentified
  source 1..586: note = uncultivated organism
MSRDQKTALHCAIYTRKSSEEGLEQSFNSLDAQREASEAFIASQRHEGWRAMPTRYDDGGYSGGSLERPALKRLLDDVAANKINVIVVYKVDRLTRSLADFAKIVEALDAKGVSFVSVTQQFNTTTSMGRLTLNILLSFAQFEREVTGERIRDKIAASKKKGMWMGGLVPLGYNLEGRKLAPNRKEAELVAKIFSLYLELGCVRKLAERLDREKIRSKVWITQTGARLGGVAFARGALYALLRNRLYIGEIRHRDQWYPGEHEGIVPRVLWDRVQSQLNSNLRKRRNKVRERASSLLTGLVQDEQGTPYTPSFTVRRGRRYRYYVSQLAIKNVASEGIGPTRVPAQELESRVIEKLLAFLQSDAEVFDGLSLAGERPAVASRLVTAAKQLAMRLASMSSQDLRDLLASFIWRIILRENKIEIKIRSKELRPQLESRGKVSSSSVKNPVAPSDLISLSVEAKRKRCGGEVHLIVPPSPSVSDEHPKIPLIKALARAHGWYEKVIEGKAFDIRSLAREAGLTDRYVGKVFRCAFLAPDIVEAILAGRQPHDLNFDKLCQEIPLSWVEQHEQLGFSSANAHRPRTLRVQ

SEQ ID NO: 3923 - protein, 513 aa, unidentified
  source 1..513: note = uncultivated organism
MANVTYIAPVKAESTIHKIRCAAYCRVSSSSEDQLHSYAAQVKFYSEKFIGSETEELVDIYADEGISGTGTAKRTEFQRLIRDCKRGKIDRIYAKSLSRFARNTKDCLNTVRLLRELGISIYFEKENIDTAKTNDELIITVMGGLAQEESTSISQNMRWSARKRMESGTFIQSIPPYGYTINDGRLEINADQAEIVRIIYKWYLSGMGISQIAIKLSELSIPTMRDNDTWKPCTIRHILSNERYIGDSLFQKFYSTDTLPIRLVENKGERDKFLVKNTHESIISKETYERVQDMFKKREDKYYKGIGSKSIFTSIIKCSKCGASYKRKKSRDKYYWVCKNHDMNAKYCDATEIPEELLKQLFVSMCNKLIKNYREILLPVRRSLQELNIRRFSGNTKVLDIHKNIADIKEQRYVLSRLRKKGFMDEKKYAEKLTVLENQLARQERELKKTAKADNVDDTLEQLDILIDCIESKSSILTEFDEELFRMVVDKIIVKDRTLEFTLISGIAFNEHI

SEQ ID NO: 3924 - protein, 528 aa, unidentified
  source 1..528: note = uncultivated organism
MYATNLAQTAPPKITVIESRTQNAAKLRVAAYARVSSDSDDQQNSYIAQVDYYTRHIATHENWEMADIYADDGISGLVASKRDEFNRMIQDCRDGKIDRVIVKSISRFARNTKEYIQYVRELLRMGITIHFEKENIDTGKMTSEQIATIYGAFSQMESQNHSNNMRISVKIRMEKGDYLSPSVPYGYKLEERTLEIIPEEAEVVRRIFAAYLSGRGKDDIARELNELGIPRTNGKEMWHPSTVAYILNNISYTGDMLWQKSFATNDIPFRQVRNTGQKPKYFVEDCHEPIISKEDFERVQALFQSRRNQMKGEKSAKNALLAKKIHCGNCGTLFRRKVVNHKVYWTCRNHDRQKDFCELSQISESEIMAAVLRFYHKLKNHYEEILSPILSQLIALRERELRSNRKINDIDKEIAQLTEQNLVLVRLKSKGYVDSALYSSQIGEINLKLNEFRRQRRRIMEASGEDKQIKATEAMLDYFEGSPDFLEEPTAELFETLVESINALSETELTINLYNGLAFKETMERTVR

SEQ ID NO: 3925 - protein, 514 aa, unidentified
  source 1..514: note = uncultivated organism
MIIGIYPRKSVYRDNSDSVEVQIKQCKDYAKIIFADQNLEFRVYDQDEGFSGKNTNRPSFQELMSDVKSNKLDVVMVYKLDRISRNVKEFSEMYDIMEKHGVSFLSVKESFDTSTPIGRTVMYILAAFAQLERENTSERVADNMLALGAAGRWTGGKLPMGMTSVRRKIGDKTHSFLLVDENSIPIVKTLYSMYLDGYTITKLERYCRDNGIKSPTGKYMNNSQIHYILSNPVYCSNDKEAYYYFREKGYRIPDVALFDGTKGLIGYGKTSQKDGLCKTDTWTISIGIHNPVIPAKDWIAVQGRFGQNKFFRSNKYEEGILKGVIRCSCGSRIDVRTYNQKGKLFSYYYCARAARQGKEYCDTGFIRTGEIDNAFLSQLEQMRTDPDKIIPRMTTDLQITDVPSLKKELRGIEKSIENLTATLMENMGSTASVYIIKQIEKLDKEKKTIESTINQAEIKDAMAKSAEETRELLLSYIGQLLDNIDSMSYQEINELIKKFIKSCIWDGENLLVEV

SEQ ID NO: 3926 - protein, 576 aa, unidentified
  source 1..576: note = uncultivated organism
MNTNHKAAARQTNTRTVRCAIYTRVSTDDQAQGEYSSLNAQKDICEHFIAIHKEEGWVSALHIEDSGYSGSTMDRPGISSLLAEARAGHVDMIVVYKLDRLSRSLQQFYGLWEELRQHNVNFASATQQIDTATPHGMLFLNMLLSFAEFEREQTRERTRHKLVQRAQQGKWNGGWVPTGYDYDKKTQKLILKPAEQELVTKAFDAAIRLKNPTAVAKFLNKMGWRTRKRTLVQRDGSIREVGDKRFISCRVQAMVANPIYKGIVINGSSEYPSEHPAIVSPQLWQAANEALSPKEKEGSILLHQDRHVHLLKGLLRCGHCGLSLTPKPAGKKDKNGNQYLYYTCTNVSKEGGEATCSVRNIPARPFEDLIIGYIGEIGKHPDIIQATIKAADETKSKGVKPLKAKLAELDRRFEQLSLAVKNFMDTAKKAGAKRIGDEMIREAEQLAEEKRQVELEREKVKIDIQYREKVVTDARLIADSLLQFEKVFRSLPPGDQKELIRLLVKDVTVNHFDPEKDQIPAEVGVFKARIRTKWYRVNMTLFATDLFARLNEKGGDKFVSDVSWLRGQGSNLQPSG

SEQ ID NO: 3927 - protein, 620 aa, unidentified
  source 1..620: note = uncultivated organism
MEVRCIKARDVETLREQGASRKKKYAVAAYCRVSTDDPDQKTSYDSQISYYTQMVAEHDDWELVDVYADEAITGTIAEKRPGFIRLINDCREGRIDLVIMKSISRFARNVQDVLRYVRELQSRHIAVIFEEEKINTLYMDGELLLSILGAVYQQEVENISAHVKKGLRMKMERGELVGYAACLGFDYDKEKKILVINEEEAEIVRYIFKRYIEGAGANKIAKELEALGKKTKRGGTSWVASTVNNIIRNEKYIGDLLQGKTYVTNPITKKRRSNKGEVDSYSKENTHDAIISREDFNLAQQIRTSRGAVLASSEAGALTRFGRRYAFSHMVECGYCHEMYVRRYQHTGTCYAKAVWKCGGATREGRNKCPHSRTISEKELEQLFLSSYNKVNASGNKETQRMLGELVADNIDKQERGESIGQLDSKIEAVRKKISTLVDMHLDEVIVEEDYLSQYDLLRKQIDELEQKRKNLVLINKSALTPAQRLRRMMDFLAQEPQLEEFNREHFEAVIEKVVIGIKDEDGHDMPNVARFFYVNGVVDDVIFKGAGRAEKHSGHDATGETFEINEERVAYGIESELTEMQKKSLNSMLKGGVIDRKVYNETAERLVNANRLTAGFTGG

SEQ ID NO: 3928 - protein, 500 aa, unidentified
  source 1..500: note = uncultivated organism
MVKKSAAAPVVAPLSVEALANAADLYVRVSTTEQAEEGYSVGEQEERGRAWCAAYGIAINAVHVDAGYSGATLDRPGIKNLIRDVRRGNCKKVIVWKLDRLSRSQKDTLVLLEDVFLANGCDFVSIMESFDTSTPFGRCIVGILAAFAQMERENIKARMMMGKQAGVKEGRYFSGVTPYGYRYELQADGRRALVVDPVASCVVKDLYAAYDSGKSLSAAARMVREKYGIDSGRDPAYTCSHFSGLLRNPVYAGRVRLKDKEYPGKHEAIVSPELWKRVNDRLEMNKKEYKRVYGKSDGLLSGLLFCGDCGARMALRKWGGTKEKPKRKYICHSVSRANKLMIRSDNCSNRKNLLAEELDALVLEEIKKLSVDPAALDALIAEGREDSGPDLGAVRERLAETEKQINRLLTLYQSGIVELEEIQGRLADLKEAREAAQACLEEAEKESSGKLPKADALAALGSLAPVVDSGDAEALFSLVHALIRKVEVLNEEIKIYWAFC

SEQ ID NO: 3929 - protein, 585 aa, unidentified
  source 1..585: note = uncultivated organism
MLDRVAKTRSVRCAIYTRKSSEEGLEQEFNSLHAQREACEAYVASQRHEGWKALSNTYDDGGYSGGSMERPGLRRLLADIQAGLIDTVVVYKVDRLTRALGDFARMVEAFDANSVSFVSVTQAFNTTSSMGRLTLNVLLSFAQFEREVTGERIRDKIAASKKKGLWMGGFVPMGYAANGRTLAIVETDAAVIRRIYERFLALGSILRLKDELDRDRVTTRAFTSASNRNWGSRPFSIGHLRRILSNPIYVGAIAHQGERFAAQHQAIVATETFEAVQHLLASNKRERRLQINAAEPNLLAGLIVGADGQLFRSDHAKKSSRRYRYYVGGCQSEKTLRIPAGELEALVTKGIASHLCDQTWLLAALLPLDAAPELIGHLGREAATLAADLQHHERTRQRSAVLMLIDQILLHPDGLSVRLKPDPFGIAVLNHASDGDWSHDAATMEISARFVARGQELHLVIPPQTGAEPERRLDKPLIKALARAVTWYDDLVIGRASSIREIAEQENVSERYVAQLLPLALLKPDSIEATLDGLGSLAIASGDIAKGLDLPMAWEAQEQERWLARGGRYIRGQAALLMAPPRRSI

SEQ ID NO: 3930 - protein, 534 aa, unidentified
  source 1..534: note = uncultivated organism
MLWYCVLLQREVNRRMAQENTARVITIAATEQPRDIRLRVAAYARVSSSSDEQLNSFAAQNRYYTELISGKDNWQLVDIYADEGITGTSIEKRDDFKRMLRDCERGLIDRIFVKSISRFARNTTECLETVRSLKARGVSVYFEKEGIDTGKVSGEMLTAVFASLAQAESESISKNMRWSYQKRMQMGTYIPASIPFGYVLKDGKITIEPEEADVVRKIYDMYLSGSGRVTIAQNLNRRGIFNRQHKPWNSSAILYILSNERYTGDSIWQKTYQTNVLPREHKRNNGEIPQYYAKNTHPPIVSHEEYMAVQSLREQRTLSETPVQHPSIFSKKLLCGNCGASFRSMTNKNVKYWLCRTHAENTGLCSVAQIPEEKIEEAFLRLCYKLKHTPEILQRVLSNLYEMTNHRMLWSPDVIELNKRISDILSQNQMLAVLKQQGLVDPDIFISKTNELAEQLRKLKFEKERLLEAKTDDTLFQTKQIMEVIRDAPDCLEEFDSELFCELIVKIIVEDNTHLRFRLKNGLELRETIRRAVR

SEQ ID NO: 3931 - protein, 571 aa, unidentified
  source 1..571: note = uncultivated organism
MTLDVRALGASEQVRKKRCAIYTRKSSEEGLEQDFNSLDAQREAGEAYVRSQAGEGWLALPHIYDDGGYSGGTMDRPGLRALLADIEAGKVDVVVVYKVDRLTRALSDFARLVEVFETNHVSFVSVTQAFNTTTSMDRLNLNVLLSFAQFEREVTAERIRDKIAASKKKGMWMGGLTPLGYDCREKKLIVNDAEAETVRRLFALYLDLKNVRRVKAEADQLGLRTKPRKPNNGRSQGNLFFTRGHLYKLLANPLYAGLIAHKGQHHDGQHAAIIDRATWDQVQAHMTQSGVSSRSAKNTKIRLAFSGRIFDETGDSLRPHHANKKGRRYHYYVSGRVLAAPGSHDLSGWRLPAKELDRAVIQIVIEWLENREKLESTLLSPDALIAERNKLAAAASLLVDEWKQGCETRMPIVNLVGRIELAPAEIRITLDHHCLIEAFKMSAIDTIEMEEIVIGAPIALKRRGVEAKLVIGGDSALTARPDASLIAALASAQNWFSNLQTGEAESVLELAVRHNVDRSHISRSLPLAFLAPDIVTAIIDGRTEPCLTLSHIKRLKLPASWQAQRKLLRIR

SEQ ID NO: 3932 - protein, 519 aa, unidentified
  source 1..519: note = uncultivated organism
MSKLRNWDVAIYLRKSQADRDAEREAAARGEVYDTLEKHRAELLRVARREGYNVVDIFEEVVSGGFIGERPEMQKLLKNVQDLKYDGVLVVDVDRLGRGDKMDQGRIERAFKESDTLIITPTEILDLNNESGEFAVEVKTFLARMEYKQIKKRLLAGRRRSQEAGKDTSQKPPYGYRKDKNKRLVIHEEEARIVRLIYDWCIDEGLGRVQIAERLSEMGIPSPTGRPIWSHVTVRKILGNPKYKGDQVFGRVKWTKQETGKYKTALVKDPGKLTIVEAAHEPIIPRERWDKAQEIINGRRRASVRDDLGMVNPLATILRCKKCGNAILANNPANRPSIYLYCDTPRCPQKRITLHRVEEVMLQQLNQLMSRLKVLQDRIAKRQKARKEVTQLTERRIRKLKDELAKKYRQRDNLHDLLEDGTYTKEMFLERSRKVQESIDLLEKEISEAEQDLKKMRAESETVSNLIPALARGIEAYQLAETAEEKNRILKSFIKEMRYNREKDWNGPYQFELEIELYE

SEQ ID NO: 3933 - protein, 564 aa, unidentified
  source 1..564: note = uncultivated organism
MSGKRVMAAALYARVSTKGQATEDRTSLPDQLRRSREVCAQHGWEVHDEYVDGGVSGEKLDQRPQLMRLLADAEAGHLDVVVAVDLDRLARDEFVFAQVFKTLDRAEVAVHADGNLIDPENLSQLLTRGIKAVVSAHDRRSLVVKMAKGQRARGLAGGWPGGKPPYGYRLVWPESNGGGKPLPVVQIDQAEAEMLRVAVDAILDEGASTGQACTRLNALGYKTRGGPHGQGGQGGQGGPWGHQNLRRVLASPALVGELTWGNPAGRGDHRTKLRRDGTPWYGDTVSITLAPLIPRDRFDALQQALLERGYGEKRPDQPYPNSGAASFCGGRLGGVYRRDRALRQYRCNRSKWSATGQQRCECPRLDANGVDGQVWDAVTEMLADPDRLLALADEYLGLRGETAAGETDQLATLDRKITELERARVESARDALKAGLDPELIRQAVEGIESELAALVAKRERVQAIRADEQAQEARAVAIARFAQRAAQRLPLLPLEDQREVLELLQVRVTLLDDSPAPALRIEGELPGGGELFGDEPIITGGDGGGFLTGAGGPDPANVGPRLP

SEQ ID NO: 3934 - protein, 538 aa, unidentified
  source 1..538: note = uncultivated organism
MSDKKIRCAIYTRKSTEEGLEQEFNSLQAQREACEAYIKSQKHENWQLLPTEYDDGGYSGGNMERPALKRLLSDIRSGLVDIIVVYKIDRLTRSLMDFSKIVEVLDKHNASFVSITQHFNTTTSMGRLTLNMLLSFAQFEREVTGERIRDKISASKKKGMWMGGKPPLGYYRKDKKIYPDEEKAKLIISIFQKYVDIKSTTLVKEWLNKQGHNISVGNLNCILRNKAYIGLVGHKGTWYQGEHQGIIDESLFEQVQAVMADNRINRQHYDPKKSLLSGKLYDDKGNAMSPSWSTGCSGKTYRYYVSQALIRKEPGKVGKVSKVSLPQLENFIDSWFDQFLCEKPKIHPYIQHFEVSKQKKLLKLLFSYTITRDIEKSLIRHIKLRPNEVEITLHTEQVLELFNAIYENREMHQLKPEELKQESTYTEPYHIGTIANGEKIIVGQFVEPRKRPNTELIKILNQAYAWHQDILDGKTTQEIANREKVCVQYVRRILNLSFLSPKIVRSILNGTQPADCTLKKLLSIRIPNWREQEEILTK

SEQ ID NO: 3935 - protein, 762 aa, unidentified
  source 1..762: note = uncultivated organism
MLFVSMKSGCPDLSLLVPILLLKSFGVNLKPTIEETKRVTNHSSDSSLLTPLLLCGKLCYLKEGIFMVKCFVYARVSTDEQAEGNYSSIESQIDICKHYIEIQKEKNWKYAGKYVDPGVSGKNLERPAMQQLISDIKSNKIDVIIVYKIERLVRSIRDFYALWDLFEANNVTFVSATQQFDSSNAMGKLMLNILLSFAQFERENTAEKTRDKMKARARLGLWHGGWMPYGYDYNKETKKLTINKKETSAVKKIYSLYLEEKKPSQIANSLNNKGLRTKSREIVTKAGKKKTVGGNRFNEDMIKKILTNPIYKGYVHLGGVEYKGQHQAIISEKVWKEANKTFHSKRPRKITYAKDDHTHLLKGIMKCGQCETALTPYPSGKKDKSGRPYLYYACGKVVDFGKHSDCKVRLLPAREFENTIKKALKELGKNKSLIESTIRNTTKHNKKRIKPLETERETAIHKIIKATAEINRLIKVMKQSDMAGKEITEEYKKLLQEKTALETQKETLTLDIERCRQDMLDADMIIKTLQNFDKVASALSLDDQKDLFTLLIKQITVWSFDPEKEKAPAKNARAFISKIRTKWYRVKLDLYQFPEIDSVYKSISKNQPSSDIRKNWLPKTDSRLTTQPQVIQLLVKMYILRGKRKSISLGVPFPAKPKPPEPVYKNIVIEALRVQAFLEEAPSQTQTDAGQHFNVTRARISQLTKIVNKLPDDFIEKMRECEDRSMLKTFSGKRLLKLAAIENEKERQNEIENLLSNIAVTS

SEQ ID NO: 3936 - protein, 535 aa, unidentified
  source 1..535: note = uncultivated organism
MKKIRCAIYTRKSTEEGLEQDFNSLDAQREACEAYIKSQMHEGWVLLDKQYNDGGYSGGTMDRPAFKELLKDIENDEVDIVVVYKVDRLTRSLMDFSKIIDVFDRHETSFVSITQQFNTTTSMGRLTLNILLSFAQFEREVTGERIRDKISASKKKGMWMGGKVPLGYLKEDKKLIIHKEDSRKVQMLFEKYLELKSVPKLMQYLKEHEIKTKTDKYFSKGQLYHLLANKIYIGKITHKDKVYDGEHEAIITDEIFERVQKLLYENKVDKTCGAKCSSNSLLAGLIYDDLGNKMTPSHSNSHKRRYRYYVSTALKNYKSSNAGSVSKIPAGEIEKFVVETTKEFLQNKEQIQNIVSDYKISKQNKLIYTAQNIRNYSEPKLIRTLVYKIVVSKNSIKITYNKNSLINALNALSNNQEIVMPNKNEEIFPITISKNIKFIQRSRNDNIIILNTKENDSPEPNPYLVNAIVKSYYYHKQIQEGKTIEDLQNEEGLMDSKYIRNILNLKYISPELTEQIFNGTQPKNLSLQRLITKYC

SEQ ID NO: 3937 - protein, 522 aa, unidentified
  source 1..522: note = uncultivated organism
MKSTAPKLLRCAIYTRKSTEHNLDLAFNSLDAQREACEAYIKSQTHEGWRLIPHRFDDGGLSGASLERPALQCLLEQVRAHKIDIVLVYKVDRLTRSLADFAKLVELFDENDVSFVSVTQSFNTSTSMGRLTLNVLLSFAQFEREVIGERVRDKIAASKKKGIWVGGPVPLGYRSKDKKLEVVPEEAALVVKIFQDYLRLGSVRELAASLNGEGLKPKPRVLSNGSTIAAERYRVGPLAHLLKNRFYVGEVVYRSETNKGEHAAIVDRDLFEAVQAKLADGAVERKLRRSPSPSVLAGLLMDDRGNPMSPSHANKKGVRYRYYVSQALLQGRKQEAGSIARVSAPEIEEAILQVLRERDAKHQESGDGDLINRCIKQIVIKPDRLSVDLLEEEPEHLCPSDSGRIEIPFRSNAPFRKGVAHEPSSKNLIDEHERDALLQTIAKAHGWVEAIISGQAPSFEAIASREKLGVRHIRRLATLAFLAPRLIDAIADGSAPSGLTVSALTTVLPLSWSAQERMIGLA

SEQ ID NO: 3938 - protein, 546 aa, unidentified
  source 1..546: note = uncultivated organism
MKFAIYSRKSKFTEKGDSVENQVIMCKEFIEKNFKDIESILVYEDEGFSGKDINRPQFQKLIKDAKAKKFNVVVCYRLDRFSRNVADFSTSINLLLSQGIDFISIREQFDTTTPMGRAMMNIAAVFAQLERETIAERIKDNMLELAKTGRWLGGTPPLGYKSEPILYKTEDGKSKKMYKLSIVPEEIETVKLIYNLYLEKRGFNTVATYLCKNHFKGKNGGEFSRATVEQIVINPVYCIADEKILDWFRKQGAKVCGEPNGVNGLMVYNKREGGKKDKPVNEWIISVGQHEGIVTSDVWLKCQEIINFNKEKSSPRSGTGEKFLLSGMLVCGECGSGMASWSKYNKKYDYMERYYRCNLKNRASNRCTNKMLNASKAEEYIVDYLKNISPEIVMKELALDKDTLINTNIIKSEINNLQKQIEENEKVIKGLIRKIAILDDDMVSIIQEEIQTLKQENINLNKKIQELISSLDETNDKYNIINNIVDSLNNIKKFYDYVDINTKRQLINELVDYIVWHGETETLEVNFKGSIKTLPNGKVKRRNKNN

SEQ ID NO: 3939 - protein, 567 aa, unidentified
  source 1..567: note = uncultivated organism
MIKTRKDDTRKIAIYSRKSKYTGKGESIGNQVELCKNKINSIYEDVDFEKDVVIFEDEGFSGYYTKRPAFQKMMEAVKNKEIKCIFFYRLDRISRNVKDFCEIKEILEDYNVNFYSASENFENITPSGKAMIMMTSVFAQLERDTLAERVRDNMLELAKTGRWLGGTTPTGYKSEAVESINFEGKKKKLYKLTQIADEIKIVKLIYDKFLELKSQTKLETYMIQNNIKTRNGVDFSRWGLKNILTNPVYAIADMDIYNYFVSKGVDIFSDVENFDGSCGIMAYNKTEQKRNKANKERDILEWIVSTGKHKGVVSGAKWIEVQELLTANEDKRYRKPTKNNSLLSGLIRCSKCGSYMRPKLKTNYTADGELRFDYMCELKEKSRKQKCDCKNINGNEADKLVMQTIKELIAPNSTFRKKLSSLAKNKFDGTSKDSVELKALETTLKKNEQAIENLLDRIKFIDIALLEDITTEIKKLKADNLEIEKRIAELKSIGSDNVNTQDQAQIVLNIIDSYFTTFDTLDLTTRRNLLRIIISSIQSDGEDLELNLIGVREESVRDNVPLCEDSK

SEQ ID NO: 3940 - protein, 507 aa, unidentified
  source 1..507: note = uncultivated organism
MKTAIYSRKSVYSDTGESVENQVALCRAYLQEHFGQLEAQEAEIYEDEGFSAKTMDRPQLQCMLAQVRAGNIRRIICYRLDRISRNVSDFTALLEQLERLGVEIICIREKFDTSTPMGKAMLYIASVFAQLERETISERVRDNMQLMAQMGRWLGGQAPYGYRSVKYRLEAGEQRGKYACFLMRYPEEWETARLIFRIFMQCGNLSETAERLRQKGKYSRTGIAFSTAALRSILSNPVYCRADAQSYRYFSEKDATVCFEENAAANRGILAYNKRDYRCSRGKRQRESAWIIAESKHEPLLSGKAWVQVQELLAVQSRSQYRRNAAALCSGKLFCAICGEAMLPKRRSTGDAFDYICVRKLKHGAAACCGKNLPGTWADALVMREIARNLPWERYGLLLAAELETNTEKRLVHDRLKSCRQKMERLLQGLEQTALSREAQQQLYVRLQKLDAERQRLERELLSGEEQEIQSDLLEAETMPVEFRRRFVQYAVRKMQWDGTQLQIFLQ

SEQ ID NO: 3941 - protein, 655 aa, unidentified
  source 1..655: note = uncultivated organism
MPVALVYVRVSTEDQAVRGNSIAAQIEDCTARALALGYREQDILVFKEEGYSGDDPERPALLKMREAVRQRLGDIVIIYDPDRLARSLAQQLIITDEITSAGLKLEFVNFEWKNTAEGRLFYSLRGAIAEYEKAKIKERTVRGRVQKAKTGRLNGNPRVYGYTFNVDTDTLDLNPAEAEVVKLMYRLLLVGEDGTPLTCRTIAKALAQKGIPAPRGKAWYPATVSKILQNETYLGTYWHYKCDYHTGTKRLRPRDKQYPIPVTPIIDRETFDAAQAMIADNARTKKGRPSSTFMLRSLVVCGECGRSLCGVTSKKKGEKSHRYYVCQGYGHGNRGFEPGEENDETKRCTNRWRMERLDKVALEAIDDLLSEPDTIAEKLKGLDGAAEPSFGTELLTLNTTLEQAKKEKQRLLRLFTTGRVEEDAYDAEAKLIDKRIEATSRRLAQIEQEMAAYRQGQERMQAQVDLMRRIAVNYKNLNEEGKKAVVQQLVERMVVFKDGNCRLTIRALSLVPMEIAASWQSCGYRMDGSGHGRPAQRADADFGRLSGGDGLVPGPEPRAPLPVPDRCGVSRLHGRRAPGHRRRYVAEAAVRTDARRPGLFAAGAAHCGRRHRRRRGERPGRAQPDGALAPLPGAAACEPVRPDAGRIGGSDPGRP

SEQ ID NO: 3942 - protein, 516 aa, unidentified
  source 1..516: note = uncultivated organism
MPAPTITTIPAVEQEAKLLRMAAYARTSSDSTDQQHSYAAQVKHYTEFIGRNPKWILADIYADEGLTGTDADKREDFQRMIADCKRGKIDRILVKSISRFARNTSDCLSVFRLLRSLGVTVFFERENLDTAHMTDEFVLTMHGMAAQEESLTISSNLRWATRKRMSNGTFIPGSAPYGYQLVDSKLVIHEPEAVIVRKIFNWYLSGQGIQSIMIRLNIEHPEKRWHRAGIEYILSNAHYIGDALFQKKFSTGTLPYRKLINRGQLPQYYVEEYNEPIISAEDFQAVQRLREQRATQGYGHERRHPLSGKLRCACGSGFRRRIVRDTVKWDCKNHMLSTADCPMKALPESLIYNAFTAMINKLASHRAYILTPMIAQLEQMQTRHSGTQQKVYELDRQIAELNTQSHTIARLHSKGILDSADFAAQTSRVNQQVSALRSERNRLLREDENNDALADLRALDDALSAVTETQTTFNESLFADIVQGITAVSLTELRFRLLGGLELTETIYRQERRRAA

SEQ ID NO: 3943 - protein, 535 aa, unidentified
  source 1..535: note = uncultivated organism
MKAKEFYNAAIYLRLSRDDISTGKGKTESDSISSQRDMIRSYIRKQNNMEIYDIYIDDGYSGANFDRPEFKRMMKDIEAGNVDCVIVKDLSRLGRDYIEAGRLIQRTFPAFSVRFIALTDHFDSLTADYNEKSLIVPVKNFINDSYSRDISAKVRSHQQIKREKGDFIGAFAAYGYKKCENNRNMLVPDHYAADIVRKIFAWKIEGYSNLAIAEMLDSLGILSPMEYKKMQGEKFQTGFITGIKAKWSAVAVKRILTNESYIGTLVQGKEEKVNYKVKKSVRKPEEEWTKVPKAHEAIIHQEDFEIVQDLLKIDIRAGGGEKKSHIYAGMLFCGDCMEPMIRRVNRYKGKESVSFICPTKNKGGKCSRHTILEEDLNHLILTGLRTQISLLLNKNNVLRSIGQMKINFDEVAAFAKEIERLHSEQDKYLGLRAGLYEDLKKQIITEEDFKSFGEIYEKRYQELQQAIINQEETIKKLFKSGVTAGINLERMKTIMQVTELDRLTLVSLVKRILIYEDKRVYLELRYKEMFSKIIS

SEQ ID NO: 3944 - protein, 531 aa, unidentified
  source 1..531: note = uncultivated organism
MKRVMCLYRVSTKGQVDKQDDIPMQRRECKEFIDKMDDWVFVGERMEKGVSGYKVSAANRDAIIEIREMAEKKQFDILLVFMFDRLGRKEDETPFLVKWFIEHGIEVWSTREGEQKLDNQVDRLLNFMRYWAASGESEKTSMRVKAAHTQMTQDGLWRGGLCPYGYKLVHKGRIGKKNRQLYDLAIDEVTSPIVLEIFDLVSAQGYGTQRVANLLNDKYPNPDKVWTRQTVLSLIRNPIYTGRLHMNDTLSEPIPELRLISDEQFAFVEQAVQARIPTRYREEREAENEALPEDATTKTSVYGATLLSGIIYCAHCGKKLVGSYCTKQRGGGAYHRPIYRCYNGSIKAKNCAGQTVYSAMKIEGAVLPVVRDYFATVNQAVDDEWKAQARKRLRDSAKARQKAAESRLAKLQAQQTALKAEIMKSITGESDFDTALLKEMMNENKQAQADAESEITECQEEVEKEESRITLLSSRYKNIQDWAAEFDKSPLDTQKMILSRLIEKITVDRDYNIDIHFFVTLEDFTGAIPTA

SEQ ID NO: 3945 - protein, 548 aa, unidentified
  source 1..548: note = uncultivated organism
MKKFRCAIYTRKSTEEGLEQDFNSLDAQREACEAYIKSQQHEGWILIEKQYNDGGFSGGNLDRPALKELFNDIKNDRIDIVVVYKVDRLTRSLLDFAKIVELFDAHSASFVSVTQNFNTTTSMGRLTLNILLSFAQFEREVTGERISDKIAASKKKGMWMGGRVPIGYERKDKKLIIETSGATKVKKIFEKYIELKSVPKLKTYLACENIRTNTGKNFDKGQLYHILQNKTYTGKIVHKNNVYEGEHAAIIEENLFNLAQDLLQANKVDESRKHNASNSLLAGKIYDDKNNRMTPSYSKTRNKKYRYYVSQPVLKFDKTKAGSVSKLPAEETEKFVTDEIRSYFFDTKQIHNYIAELSVLEQNRILEAVKSGKFDNYALVRSVLEKLTVSKEWIELILSKNGIKKFLYDLNGNVQDMRGDKEQAEDYLIIKREIRIKTGTSKGCNTLIIRNDKAELPYINEALIKAIVKSFYWHKLLLEGKVKNTKGIQKLENLKDNSYIKQVLNLRFLSPRIIEAILNGTQPRELTVTKLFNIKTLNWKEQEELIML

SEQ ID NO: 3946 - protein, 575 aa, unidentified
  source 1..575: note = uncultivated organism
MNAGGAPGANGLPTRMSPTRSVRCAIYTRKSSDEGLEQSFNSLDAQREACAAYIRSQASEGWSEIATRYDDGGLSGGTLERPALQRLLGDIAAGGIDVVVVYKVDRLTRSLLDFAKLVERFEASGTSFLSVTQSFNTTSSMGRLTLNMLLSFAQFEREVTAERIRDKIAASKARGMWMGGIPPLGYAPNGRSLAIVEEHARFVRTVFERYLELGTVRLLADRLAAEGLHAPTRTTGTGKTIGARPLSRGQLYTLLKCRTYLGEVQHKEQVYPGLHDAILSRDLWDRVQAQLAAHVQGSRAGTRATTTSLLAGKLVDAAGQPLIAVHAGKAGPDGLKRRYRYYVSRGLHHKDAATGLRLPAREIEQVVTERLATLFDDPLALTGSAHLQVRADQFATLDQRCRELAAKLRQRDAATASQLLAEVRIDEAAVALACGTAQIAAALGVAPTPDAPERITLTVDAALRRSGRAMRLVRPSGAPAHHQADPALVRLLVLARRWWGELREGQLDVTTLAAREQRTPSYVTRVVRLAFLSPAVVDAILKGEQRHGVDVAALTLREPVPVAWTEQGRLILADA

SEQ ID NO: 3947 - protein, 599 aa, unidentified
  source 1..599: note = uncultivated organism
MKKEIETIAIYSRKSKFTGKGESIGNQIELCKEYIRMHYGENALNHLVIYEDEGFSGGNLNRPDFKKMMTAARQRKFQAIVVYRLDRISRNISDFSSLIEELARLEIAFVSIKEQFDTGSPMGRAMMYITSVFSQLERETIAERIRDNMHELAKTGRWLGGTTPTGFASEGEEKVTVDGKKKKAFKLKLISQEAEIVHLIYELFTQTNSLTMTEAELMKRHILTRNGVYFTRFSIKAILQNPVYMIADQAAFDYLTEKEADLFSDRAAFDEKHGLMVYNRTDQEKGKTTQYNPVSEWIVAVGKHPGLIPGKTWVRVQEALEQNKSKAFRRPKSNESLLTGLLFCRCGNRMYPKLTKRRTADGEVIFTYVCKLKERSQRSLCNNRNVNGNALDLAVVEQVKQLCENNAEFIRQMEKSRNFYTGNRARYEEQLASLQKEKAEVEKRIEGLVDSIGILGDSIAKLQVAKRIEALAAESDDIGRQIQELVALTSQHALSDIEFDVLRQLLSVFRENIDTMPLEQKRAAIRTVVRKVIWDGENAHIVLFGAADDEIEMPDLSKLVNAGEQEDGSEPLEPFADVDYEDNLEHTEDSEGGRYDAFV

SEQ ID NO: 3948 - protein, 541 aa, unidentified
  source 1..541: note = uncultivated organism
MTEKKIYHTAIYLRLSKGDGDVDGVEKAESNSILNQRMIIDRYLGQHPEMQVIDTYIDDGYTGSNYKRPELKRMLYDIDDGRVDCIVVKDLSRFGRERIETGNYISKVFKEKGVRFIAINDHYDSLTADGSETHLIMPIKALTNDNFSRDISLKVRSSLAVKKEKGEYVAPFAPYGYKKDPENVNHLIIDEPAAEVVRKIFARKIDGLSANAIADELTRMGVLTPADYKRSCGDNYKKGRKPEKSVWCATQVIRILKNEMMIGNTVQSKSSLVSYKVKKFIQKPREEWDIVEGTHEPIISEADFYIVQSLLERDVIKIADVENPNIFAGLIFCGDCGKSLIRRKRMLKSGPVFHFLCSGYNRKSECTSHNISEADLTEIVLESLNRMIRKLCHYDELARSLEELHISKDAALVQDKEIQKLKEELAKYGRLKAALYQDLKEGLISEAQFDRYRNQYTDREIGLQKAIQEQKALVEKIYKNGIAAESILRQFKENPQVDELNHRLLVSLTNRIVVYEDNTVEIIYRYTDEMKKCEQILHSVS

SEQ ID NO: 3949 - protein, 557 aa, unidentified
  source 1..557: note = uncultivated organism
MKENKIYKAAIYVRLSKEDGDVSDVSKAESNSISNQKELIREFLKNKEDIAVVSERVDDGYSGVNFERPAFQLMLEDIKQGKVDCVVVKDLSRFGRNYIESGRYIEKIFPMLGVRFIAINDNYDSLIGKSQTDEIVIPFKNLINDAYCRDISIKIRSHLDVKRRKGEFIGSFTVYGYRKDEQDHNHIVIDEYASGIVEKIFMWKIEGMSQQGIADRLNNMGILSPAEYKKSCGSNYRAKFQTKSKASWSAVAVTRILTNENYTGTLIQGKYTTPNYKVKKTVVKSEDDWVRLENAFEAIVSREQFAMVQELLKRDTRVAPDKKTVYLFSGIAVCGDCGRQMSRKVSTVAGKKYVYYMCSANKKDGSCSSHRIREDELEKAVVTYLNTYIRELCSIKRLLDCVEKLPLQESNIKRLELRIVQLEEEAQRHEKLKISVYEDLKDNLITKDEYVTLKNEFEARRRDALEAIAQIRIEIDSLAKRNGKHHEWIEAFVSKKEVESLTRNVVVELIDNIRVYEDKRLEITFRYADRYAEALYLLSNMDCTHSDEENKTLQEVS

SEQ ID NO: 3950 - protein, 566 aa, unidentified
  source 1..566: note = uncultivated organism
MTQGKVIRCAIYTRKSTEEGLEQAFNSLDAQREACVAYVASQRHEGWVLSPELYDDGGFSGGNMNRPGLAQLMAEVEAGRLHVIVVYKVDRLTRSLADFAKIVEVLDKAGASFVSVTQSFNTTTSMGRLTLNVLLSFAQFEREVTGERIRDKIAASKRKGMWMGGPVPLGYDVQDRKLIVNQSEAETVRLIFDRYLRLGSVVATVESLERDGVKTKLFAGEGKKRRGGITWTRGGLAHLLVNRIYIGQIRHKNEHFQGEHDAIIAPEVWDAVQAQLAGNGVTRKHDQILRHANLLGGLLFDGLGRRMKSSQAAKGAKRYHYYVTAVDAVVKAPGAVWRIPAHDTEALIINRVHAFLRDRQAVQEAVIATANTDASARALETLLSRALSLSLELAASPLTLRSIVRRVDLKEDHAAVSIGLQPLLPTTGELSVDVTGTDEYEAESYMLSVPILKLRRGPEVRLVVAEPQSNEQTAADPALIRLLATARAANSAMHAARDMSLAEVAKAQGFTNNYFTLLLRLATLAPSIVQAIIEGRQPASLTRQRLAKITNLALDWDEQRRLLGFA

SEQ ID NO: 3951 - protein, 587 aa, unidentified
  source 1..587: note = uncultivated organism
MRERPERIAIYSRKSKFTGKGESIGNQVELCREYIRAHYGSGLAETAVVYEDEGFSGGNLNRPDFKKMMKAARDKQFKAIIVYRLDRISRNISDFSGLIEELARLDIAFVSIREQFDTGTPMGRAMMYIASVFSQLERETIAERIRDNMHELAKTGRWLGGVTPTGYASESIKSVTVDGKTRKACKLALIPGEAEVVRTIYSLFLKTDSLTLTEAGLMKRRVVTKNGKYFTRFSIRAILQNPVYVMADSDAYQYFTDKGTELFSGLDAFDGEHGLLAYNRTDQEKGRSTIYLPVSEWIVCVGQHPGLIPGATWVKVQDMLEHNKAKAFHKPRTNEALLTGLLHCRCGGRMYPKLSARKTAEGKAIFSYVCKMKERSQGGVCDGRNVNGNTLDGLVLRRVKELEGDVGSFIAQLEHSRRLQTGNQAEYEESLVALRQERSEAERKLAGLVDSLADLPDGTARSLVAQRIEQLNGECGSIDRRIRELSGLTTQHALSDVEFDLMRQRLSAFWENIDGMTLQQQRTAIRAVVRQVVWDGENAHIILFGSEELIEFPAMTGLCADKDEELIGFADIGDESDAMLPLREDSK

SEQ ID NO: 3952 - protein, 505 aa, unidentified
  source 1..505: note = uncultivated organism
MPQVQVIQPIQQQPKRLRVAAYARVSSKSADQLNSMSVQVEYYTDLIQKNPDWEFAGVYADEGISGTSLKNRAGFNHLMDDCRLGLIDRIFVKSSSRMARNSVDFLSAVRELKSLGVVVEFEKERFDTDSTEGELLLGMMCAVAQEESWSISKNLRWGIRKRMESGTYHTSSAPYGYKQVNYDLVHIPDQIEIVKGIFNAFLQGKSTTKIADDLNRLRPDADKHWHHTTIERILKNEKYAGCSLYQKSYTSDDLPFKRTENNGEVLSYYAPDTHNGIISQADFDKVQALLQRKSVGPCPRKDTAFSKMLYCAKCGSMLSRKINRSSQVTWICRTHLRCAADCSTSPIQEERIQHVFLTMHNKLIVNHAQIFTPALHDLYAAQKILDDKESRRQELNQQVQLLAKKLHNLSRLREKNCITAAQYWERRNPLERELTDVKAAISKAATNHPLLRTLAQTKQLAEHYTFPEASAWDSATEDSPSPTRKCSATAKVQTVNRRSYPNRLN

SEQ ID NO: 3953 - protein, 545 aa, unidentified
  source 1..545: note = uncultivated organism
MSTCSINQTLAFGYVRLSKEDMKLGESESIANQKQLIEKFVAEHTDIALVDIFVDDGYSGTNYERPGFKDLIKALKEGKANCVIVKDLSRLGREYIQTGIYMQRLFPQMGVRFIAINDSMDSKEKSQADDLLIPIKNLMNDSYCRELSRKLRKQFRIQRSNGEFLGAFAAFGYLKSSDNKHKLVVDENAAEVVKGIFSLKLQGYSQQKIADRLNQKDILSPVAYKRQLGMKYKTSFGDENSCEWSGVSILRILRNRIYIGELIQGKRYKPNYKAKKTMLRDKKDWVVIEHNHEPIIDPWVFEAVQRALDSDTRCSDRSMTVAPLAGMVFCADCGEPMVQKTVIRGGKEFYYYVCKGNRMKNGCLPHSISVPKLESTVLTSLQSYISSVLELNTLLEQVNHAQLQEEKLRTLTRQLAEKQAARDKIEQVKEKLYEHLALGILEQDEYKMLKAGYEKQFKAAQEEIRLLEQKVNAVTMENQRNTSWIDHFLLHSGAVILDRETALLLIHSVRIGLNKQVEIEFACQDEYNALVRTLSEVKEDAQYGS

SEQ ID NO: 3954 - protein, 528 aa, unidentified
  source 1..528: note = uncultivated organism
MKALKTQGSSALKPEREIIRIQATLAPEAAKLRVAGYARVSSDSEDQLNSFSAQVRYYTGLIEKHDGWELAEVYADEGVTGVSTEKREDFNRMVADCRKGKIDRVITKSVSRFARNTLDSIRVIRELKDIGVTVLFEKENLDTAKLTSENLLTLYSLFAQQESMSISQNAKRGNRMRMQSGTYVSSNPPYGYRLVENQLAICETEAEIVRRIFAEYLGGSGGCEIAKGLMADGVPFRDGRMKWRHQAVVCIIRNERYAGDMLLQKSFAEDEMPYRKRINKGELPKVYIRNTHAPIVSRVEFELANILLKERGQGVTVGKPMQYPLSRRVRCAECGSAYRRKITNGIPYWVCRQHDDDKDACGGERITEEALHQAFARMYNKLKRHSAGILPPMLGSLEKLREARTRSNPEISTLNKQIAQLSEQNHVMNGLLTKGILDSALFISQTDELNRKLRALKVAKARLLEEQDGDSLLERTEDLMEILENGPGRISGMEETLFRDMVEKITAHDTLTVDFTLINGLVLTERLC

SEQ ID NO: 3955 - protein, 561 aa, unidentified
  source 1..561: note = uncultivated organism
MKNIRCAIYTRKSSEEGLEQDFNSLDAQREACAAYVLSQASEGWKLLHEHYDDGGLSGGSLERPALQRLLGDVKESRIDIIVVYKVDRLTRSLLDFAKLVEAFDEAQVSFVSVTQSFNTTTSMGRLTLNMLLSFAQFEREVTAERIRDKIAASKAKGMWMGGTPPLGYEPDGKNGLTIIEDHAALVRDIFRRYLSKGNVRHVAEALEAAGITSPLRTTRKGKTYGGCNFTRGQIYHMLKNPIYAGDIPHKGKVYPGNHPAIIDREEWEAVQTRLASHVKGRRTRREASKALLAGRLFDEDGKPLIPVHTSKLQQVEGARKRYTYYVSKVAHHRSAGNSGPTMRIPAEELEQAVRTELAQIMAYPHTLFEQAQLSIQSHRYEAMTSQAKALHHQILSGAKRIVRSLLKCAAVESEHIALTIDLEQLAQLIEGKLEEGAPTELIHHAAIRFTQTGHTLKLVDDQGCPANTWPDPTLTGLLVRARQWWNELSQGEIDIAGLARRDEVSPSYVTRVVRLAFLAPSVAEAVVAGQIKAGIGGAALLATGAVARDWNEQEAQVLPQR

SEQ ID NO: 3956 - protein, 526 aa, unidentified
  source 1..526: note = uncultivated organism
MQIAMVTPRQKTAAIYTRVSSTRQEVEGASLETQEAACRQHCAQMGWEVSEEHVYRETHKRWLLHERPRLTELREAVRARKIDIVVCFCVDRLSSQDSHVYILDEEFGRAGVEMAFATEDFEQTAIGRFVRSAKVLAAAIEVEKIRERTVRGRIARVKSGKLIPGGKPLYGYRWPDERDHNGRLIKARLIEDPDTAKVVQRIFELLASGRTLRAIANTLTADHIDTPTKINRQWTTSVIARMAHRPAYKGEAFGWGNTKSNGIRPQHFDPEKAIPLPEGTIPPLVDVATWESVQTVLENNKKRAVRSAKNPEAALLRGGYVRCGYCGTTMYPRPRSNGSYDYVCRRQGTYPGACPNPTIVCHTLDTAVWERIREIILNPDLIRKQLDRIQVDNHLEVQSEAVQAAFKHLEKRKTNMVETLSLIDDADARAPLLAHLNELTRDGKKLRNELDSLQTQMDGFKERCHDLRSIEQWCQRVGDNLDVSDFAQKRMILDALGVSACLFRKDHEPRYVIRCEIDASLVSTTT

SEQ ID NO: 3957 - protein, 529 aa, unidentified
  source 1..529: note = uncultivated organism
MTNDQPAPRRAAAYCRLSREDGDKPESDSIVNQQHVIEDFCAAHEEFRLVSVYADDGATGTNFDREQFRRMLAAIEAGEIDCVIVKDLSRFGRDYIDMGYYLERWFPARGVRFIAVGDGVDSADGPYDMLLPLKNVFNTQYARDISDKVRSAFKAKQRRGEFCGAFACYGYLKDPADKNRLIVDPVAAEVVRRIFRMAADGIGQVRIARALNDEQIPCPSDYKRLMGMRYTNSSRLRGTCYWTYSTVHKLLRNETYIGSMVSNRSVRATMHGKAKAADRSEWIVVEGTHEPVVSRELWDAVQAMIAKNARSVDFAGHVGLFTGFLRCADCGRSMSKRSCKGRTVYICGSYHRYGSAACASHSVGEDDLRAIVLGDLNRVVAAAGSLKKLVERHSAQAPPAQRGEDCRRRLQIALDRVQRLKQGAYEDYRDALLSRQEFLCYKADYAAQEEALTRQLERRTENGAKAPPRQTWADGLLTLGRLETLDRATLAQTVEVIRVFEGRRVEVSYRFSGELGPLFAPASSASRSS

SEQ ID NO: 3958 - protein, 537 aa, unidentified
  source 1..537: note = uncultivated organism
MRAAVYARVSSEEQAERGTIKNQIEFATKYCDLHQIEIVDFYKDDGITGIIPLEERPEGKRLLEDAKNKKFDLVLVYRLDRLGRSARIILNAVHEMEQNGVKVKSMTEPFDTGDANGRFLLTVLAGVADLERETILERMWHGTNRAARTGKWLGGIVPYGYRVNEDGFLEINEDLLPGLEMSEADVIRTIYYLIAEQGYSTIKVADYLNALGVPTAYVKDGRQVTRGKRKVNTSGIWTPGRIRNMIVNTTYKGIHYYGKRSKKNRELIPREVPAIVPEEIWEKAQQKLKENQLEATKNAKRKYLLRGLIKCGLCGLTYQGQSYKSSGGKSRAYYVCGGKTAYRGPLQGKCPSKNLPAEWIENLVWEECVKFIENPGETIKELANTMETKKTQRKELEQEKQMALKALKERELERQDILDLYRKKLITADDVEKQFQKIKEEMETLEKRVREIEEQIITEETLLSSFNTAEELLANLRAKLENNPPFEVRREIVRTLVKEIVVDTKFDEKNRPYAIIKVKYNFSDVPRTVKDSSRGSI

SEQ ID NO: 3959 - protein, 549 aa, unidentified
  source 1..549: note = uncultivated organism
MNAVIYARFSSYSQTEQSIEGQLRVCREYAGKNKINIIAEYIDRATTGTNDNRPEFQKMIADASKKEFQQILVYKLDRFARNKYDSVVYKHKLAQYGVKVISATEMISDTPEGALMEGLLEMFAEMYSKDLSQKVKRGIKESVIKGNFIGGTTTYGYKVENKKLVIDEKTAPAIRYLFEEYANGKSKKQIMQELNQMGYTINGKPFTYNSLQNNLKNKKYIGVFESEQITNENYCPPIISQDLFNRVQIKLNEHKHAPATQKAKTEYLLTGKAFCGHCGSPMVGTGGTSKTGKTHNYYNCSKQHKFHTCNKHSENKTYLEDYVVEQTIEHILKPEQMEKIADGMLKLFNHSSTAQKIAGIEKSILKIEKDMDKCFNSFINAQEDYLQKRLNEQIKSLAIQKQDFENEIKKMKLAEQVVHTKDEIIEITSQYLDYDKNDFDFKKKIINTFVNSVYIFDDKIAIYYNLFGSDKITYEEAKENITQNESVHILNGTLRHKRTVRTPRENEKCVQFFFLHECFGAIIPFEKPKIKSPSHSNWINLQVDFKIEI

SEQ ID NO: 3960 - protein, 556 aa, unidentified
  source 1..556: note = uncultivated organism
MRYAAFYGRYSCERQTEQSIEGQLRICNEFAERNDLKIVDTYIDRAMTGTNDHRPEFQRMLSDSDKPQIWDIVLVYALDRFGRNSIEIALNKQKLKKNHKMLISATQRTSENIDGTKNLDGILLENMYIGLAEYYSAELSQKIRRGLHENRVKGYYSGGIIPYGYYVEKKKVYIKEDEATIVRQIFQYYAQGITVKGILQNLAGKGITYRGRPFAMNTVYQMLRLEKYIGICRYDEGVYDNIFPAIVPKQLFDDVKAILAKNKIGSRSGQTDFLLKGMLICGLCGKNMHGESGTSHTGKISHYYKCMARKRDRSCTKSTLPKDKFDKLILDVTIQLLSDQDQLNRIADGIMRVYEKKMKDTSVLSLLENERKETRRALENIMKAIESGIFNTTTQTRMNELEKQLADIEDKIELEKYNEQKILTKEKVMAYLTNAILKKPKTLIHTLIQKIIVYEDKVEIFYNYTDETNPGDDSPRDLSYWLGSDSSAIPGSPDCSGSDSSVIQGSNTTNPNQNEKNYPKGSDSSVMVDRNHTNSNPAFRFSEKWFCAVVDLPEKL

SEQ ID NO: 3961 - protein, 538 aa, unidentified
  source 1..538: note = uncultivated organism
MKRVLCLYRVSTLKQVDKKDDIPMQRRECMDFIARMDDWEFYDERMEKGVSGYKVSANDRDIIVEIRELAEKKRFDVLLVFMFDRLGRKEDETPFLVKWFIDHGIEVWSTREGQQKLDNQVDRLMNYMRFWAASGESEKTSIRVKAAHTQMTQDGIWRGGTCPYGYKLVHNGRIGKKNRPLYDLMIDEETAPIVQEIFDLIVRQGMGTLRVANYLNEKYPNSKKIWTAQTVRNMIRNPIYTGRFHMNDIVSEPNESLRLVSDEDVEFGKTAIAKRIPRKYISKLEAEKLDVPEGTTKASVFGATMLSGILYCGHCGKKLVGGYNTHYRIGWTDHRPIYRCYNGAVKAKECDGPTTYSGVKVDEAVYAAVMHYFNTVGSVAGQIWKEKARKQFKDGAKAQLRRAQSQLERLQKEQEGLKKELLLVVTGESAFDRDLLREMIDENQEAQKRAQEAIHAAEYDFDKEENRIKYMESMINNVKSWAEKFDFVSPDIQKMIMARLIERIDIYRGYEMRIQFYIDEEEFDGVKEESSSSMANVS

SEQ ID NO: 3962 - protein, 528 aa, unidentified
  source 1..528: note = uncultivated organism
MKKQLLFNVAGYIRLSREDGDKAESDSIGNQKKLISDYLKDKPDLILYDLYIDDGFTGIHFNRPSFQRMIADIEAGKINCVIVKDLSRFGRDYIDTGKYLERYFPDHNVRFISITDHIDSIKHAYDILLPIKNIFNEQYARDISDKVHAAVRTKQQAGEFIGAFASYGYRKSPADKNKLLVDEYAAGVIRTIFTLYINGCGKNRIAHILNGRGIVCPSEYKRINGDNYRNSNRLDSTCYWTYSTINRILQNELYIGNMVQGRKTQHMRGKQQTCDRENWIVVPNTHEAIIDKDTWEKAQSLLKRQTRALDLHSGTGVFAGFLKCGNCGRSLVKKSITDAHGNSLITYYCGTYVRSGRQYCSPHAVSHELLENIILDDLNALIGSIGSLRDIVEQNQTPGTAKPALSGERNRLLTELKKIRKLKQAVYEDYREELISQKEFSAYRQDYLKKEAFLTKQLESLEEQPNTKTMTDILESPWIKRLLESKSIEKIDRGIISEMLHEIKVYQNNTIKITYNFSNEQENLYPIE

SEQ ID NO: 3963 - protein, 604 aa, unidentified
  source 1..604: note = uncultivated organism
MNKQQIQLRAAVYLRVSTDDQVEKYGIPLQKAAVDAVVNSKGKLDDGSPAMVLAGEQYVYKDEGVSGTTPLDERQGFLQMKEDIENAPDGAKPFDIVAVYRIDRFARKLKILLEVIDYFEAQNIQFISANESIDTSTPFGKAMLGIIGVIAELERETTKARTQAGKEQAIERGVYMGASAPYGYIKDKDKRLQILLPEAKIVREIFELFVVEKRNTQQIADRLIDKKILTPLPSAIEHNKRRPGRTKVNDPHFWRDSTVRDIVKDEVYLGIYYHNKNQGSKRLDRSLWKKSPYTHDAIIDFGTFELAQRRIQEDIALRNSLKTAENHVYLLSGLLKCHACYDPYSEREPLNWTGTNHIVKKSKKRAYYYQCGAKNTKKYSTVCRAIPFPADEIEEFVANFIKDLLSDPESVYRHISSLQSTKVRKRQLEKKQSEITKILNTLPRSRQNTKRMYGRGDISDAEYDEKMESIKKKEAELKNDLGAIQYQIGEGKVSDIYIRTLKLFAKKYKPFLDGLMTDRKEVSELIHLIVDRIHVYTRKATKNDKIAGRKKEDQVIPYQVRIDLRLPQDMMKRFAQQGKFEVKNANLWAMIESNYRHLFIRQES

SEQ ID NO: 3964 - protein, 538 aa, unidentified
  source 1..538: note = uncultivated organism
MKTPAIKTVRCAIYTRVSTDHGLDQEFNSLDAQYDAASAYIRSQAHAGWTLIRSRYDDGGYSGGSTDRPDLQKLLDDIRARKLDVIVVYKVDRLTRSLADFAKLVELFDAHGVSFVSVTQQFNTTTSMGRLTLNVLLSFAQFEREVTSERIRDKIAASKRKGLWVGGTLPLGYHMKDSKVAVIDNEAERVRQIYRRYLELGGVNALVRDLRERNIRTKSRLLATGITRGGIHFSRGSLSYLLRNRFYIGEVKFKDEILPGAQPAIIDRALFDAVQKRLTDQWTSQSTLRSASDHLLTGLLFDDAGHRMVPTHATKSGIRYRYYVSLPHLRGESKTASVGSVSRIPAIEIEGVIIKFLHEYSIAKSEKPSSCAPEIGDRKVVHDSVARIDVHEDRLAIRLKSTDAEEPDAADGPTLSIAWQKPPFRRFREILLPHGIPRHEVRPIRVERRARLVSAIARGRRWLDEIVSGSVTDVQQIATRQKCSARQVNMTLSLAFLAPDLVRAAVEGRLPRGIGVERLRDAPAEWSRQFETLGLNPR

SEQ ID NO: 3965 - protein, 529 aa, unidentified
  source 1..529: note = uncultivated organism
MNSNSRTAIYVRLSKEDIDSCERDSESIKNQKLMLIEYAERNRWSIYDIYCDDDYSGAYSGNENTRPEFNRMIRDAQNSRFDIILCKSQSRFSRNMEVVESYINGKFTEWGIRFVSIIDNADTEIKGNKKARQINGLINEWYLEDLSENVRAVFRDKMRRGEYIAAFPPYGYSKDPEDKHHLIIYPKTAEVVRQIFEWHSQGYGAAIISRMLNDRNIPNPRKQQEIDGMRKTFFYAPDEAGKWSTTTVGDILNNQVYCGDVVQHRKEKVSYKSKRLRKIAPEDMIIVKDMHEPIISRSLFEETQKRLSKRRYSSGTGRVHILAGKVFCHCCGKPMQKTHSKSTRGDINYLRCRDKYAYATKMKCSTPNIRIDTVLYAVQMELIDKFKDIATDELTDEQISSMLSKNSGKTALKQRELAMQYKEAEQLERSLEHLYSDRLNDVISLEQYISYNRSFSEKLTSLKEKISRTEKELDEEKDPNTTAIKSTVNEYLDSREINRRIIDNLIDRIEFGEVNPTGKYILKIFWVWD

SEQ ID NO: 3966 - protein, 539 aa, unidentified
  source 1..539: note = uncultivated organism
MKIKQNYNAALYCRLSVDDGNYGGSVSIETQKIMLEQYCKDHMITNYTFYCDDGASGTNFDRASFHKMYNDISNGKIDLVVVKDLSRFGRNYIEVGSYVEEFKDNGVRFIAADDNYDSLTNGDDLMFPMKNVINEMYARDVSKKTKAAKKAKARAGQYIGSKPPFGYKLDPDDRHHLVIDEPAAETVRRIFRLFSQGYGYNKMAKLFREEKVLTPIAYFNLHNPDYFKSDYWRKEFDWHVTSIRVILENEVYLGKLIYGKQRNKSMKSKQKTRNDREDWIIVENCHEPIISQELWDTVHKIMKSKHRPSNTGKIQIFAGLLYCADCGHALTYSQRKRNDGTYHGAYSCWMYKTHGKEYCASHYITYDTIYALVLDDLKRVLAGFQHDEKKFRTFLESRYKSSAETEINNLMNEYEMKQKRCTDLDKIISRLYEDSVLGKIHESRYRSMSEEYESEQAKIRSELPDIKAKIDKLKIQTNAADKFIRVIKRYTEISELDVPILNELIDKIFVHHKEKTPDGKTMQQIEIFYRFVGKLDNRS

SEQ ID NO: 3967 - protein, 505 aa, unidentified
  source 1..505: note = uncultivated organism
MPQVRVIPPLPEQVKKIRVAAYARVSSNSADQLNSFITQVEYYTQYIQSKYEWEFVGLYADEAVTGTATDKRTDFQRLIEDCRAGKIDRILVKSISRFARNTLDCIQTARELKLLGVAIEFEKENIDTGNMGSEMLLSILGSAAQEESLSISKNIKWSIRKRMQSGDFLTCRAPYGYILKGNTLEIFPPEAEVVHFIFCSYLAGMSLEELVHELNRRKSPKRWESKGWHVYHVRYILTNEKYVGDALVQKKFTPDELPLQLQKNIGQLPQYYIENSHPAIISRLDFDRTQQLIQEKNHTSSLRQEYPLSQRMICSDCGSVFKRRSASGTWICRKHYKDKAQCPMMPVSEADVYRAFLHLFNKLLEHQEKVFKPLISDLERLKAKKGTDERLMSIDKQMVELMRQYHTLARLRTRGCIDDSIFIERTTRISQKLNVLRSEAKQFSNKSNVDKVLEKTNYILALLEKAEPLSQFDEKIFLSMIEKIEVGQQCFSFKLLNGLLLKEDR

SEQ ID NO: 3968 - protein, 587 aa, unidentified
  source 1..587: note = uncultivated organism
MSTDSKQVMRCAIYTRKSSEEGLEQSFNSLDAQREAGEAFVVSQRHEGWQLLPARYDDGGYSGGTMERPALKRLLEDVEAKKVNVIVVYKVDRLTRSLSDFARIVEALDAKGVSFVSVTQQFNTTTSMGRLTLNILLSFAQFEREVTGERIRDKIAASKKKGMWMGGQLPLGYDLESRKLIPHDIEAELVRKIFALYLKLGCVVKLMADLKRENIKTKTWVTKAGARIGGASFARGHLYYLLRNRLYVGEIRHRDKWYPGAHPGIVPRELWDKVQARLDSNLRVQRKRTREQSSSLLTGLIEHGEGNRFTPSFTVKCGRRYRYYVSQTVIPNSNGEQSKAIRLPAHEIESRVKERIQTFLRSDAHVFDELNAGADNPALLHQLVAESKKLAARMSSLPADDLRDLLACILRKVIIQEDSIEVMLKKPDLRELLEHGDKIIAASLLGVRKSTEPDELISLSIEAKRKRYGGEIHLVVPPHSSAPVSHPRPALIKAVARAHDWYEKILQSKVTDMRSLARETGLTPRYVRNVFACAFLAPDIVEAILEGRQPLTLKFEHLYKNIPQSWDEQRHHFGFSERPRAAESRFQ

SEQ ID NO: 3969 - protein, 513 aa, unidentified
  source 1..513: note = uncultivated organism
MISDKKKIRCAIYSRKSHEEGLDQDFNSLDAQRAAAEAYVQSQVHEGWKLLPARYDDGGFSGGNMDRPALNALIDDIRAGKIDCVVVYKVDRLSRSLLDFSRLIALFDEYQVSFVSVTQQFNTTTSMGRLTLNILLSFAQFEREIIGERIRDKKLLTARQGKYIGGQPKLGIDIVDRRYAINEDEAKLVRRIFKLAVQLQSCQKIADTLNGEGIRSKVYNTKTGKTFGGNLYSGRSVYNILTDAKYIGRIVHKGVSYKAEHQAIIAEDLFEQVRKILAANRTYTHEHQATRFAMLRRLVYCGECGSLVLPAWTNNHGREYRYYTCSKKVKTGYKKCSLPSLPAGELEKIVVEQLRSLLRHPDVIAHTFREVCASSQSGPDATTVSRLEELRGRRQKAEQAARSLLNLNDPEGPFVQTELKRINGEMKLLGDSIRGLESVPNSTRAVELSEVTKALQQLDPVWEVLYPEEQSRVLELLVESVTVSKHSVDIHFRANGIEQIVDELTPMSERTDG

SEQ ID NO: 3970 - protein, 523 aa, unidentified
  source 1..523: note = uncultivated organism
MHFGIYGRKSVYSDKSDSISNQIRMCREYIDFKFPGQAESVTEYTDEGLTGANTNRPQLKALLKDASDGLLDALVVYQLDRLSRDVRDFANIYATLEERHIMFVSIKENIDTATPIGKAMMYVTMVFAQMERETIAARVTDNMLGLAKKGFWTGGTTPAGYTSERIDIGGKKHVALVPDPEGTEWVRWLFDTFLENNYSLARMVTAFKKQGIKAPGGGFFASGQLHRILTMPYCVEATPEVYDYYTEIGCQIDPDSPRERWDGKHGVMTYGRHSVNAKKVSVQPKEEWTVCIGFHDPIIPADKWLAVQERLRSNTFSKKQKYDMPLLKGVLRCAKCGCLMKVYRKKTKSGISSAYSCTSRAIYGKERCDMSQVICKRLDEKAMGIFRKIDADPAAVLQYVGEPEHEAQTEWKDYASQIAPYQAKIARLTDFLSEVEESSAAKHIVAQIEELDANIEALKREASLQEVEKRRTVNVKQSAEQKAAEVRRLMHGLSGFTAEERNEIIRGVVREMTWDGETLFLRL

SEQ ID NO: 3971 - protein, 619 aa, unidentified
  source 1..619: note = uncultivated organism
MSTNTYTAIYVRVSTEEQAQKGYSTKNQIDQLTQTTKKQGWKYRIFDDMGYSGTKYDRPGLTAMLDLVKEGKIERILVWKIDRLSRKLSHLLSILELLEGNKVELISISENFNVNTPMGKLLLGLLGSVAEFERDSIIQRIKAVKNTRKRVKRLPLGHVPYGLKLNEEKNKLMPDDGPGCEIVKKIFDLSLHGIGMVGIAGYLNDNGFRTKYGKRFDSSTIGRMLGNYTYAGMIEIDKELEHGNIDPIVTFDTYQEVRREIQKRTRTPSHPAAKHLLTGLLKCNVCGSGLVSTGNYKIGKRFYRCGRSANEGRSACPLKSFHAERIETSITDRLIETIEKDKTEILESMINGEAEYRNQEKTAAQNIQRLKTLIQKNIKSINKYFEMFESEFMDKAELKDRIEALKADNETCQNQISELKFSLPELDPLETRKQYETALENFWLILDLTELSEKRNLFQVIIEKITAYNDHLAVHLKTGYSFRVDYPRKIRRFTRTLADWEITALEGMNTKRAKAVLMANNGMEVREIAHTLEVDFSKIQWILKAVGKRGIASCFKNFGENQPIPFESFLLENIDTYKYLSFSKIADVLRKEGYSFSNQQLRNFWYRHFTQKTVLPPPA

SEQ ID NO: 3972 - protein, 525 aa, unidentified
  source 1..525: note = uncultivated organism
MSKPPLKRCAVYTRKSSDEGLDQAFNSLDAQREAGEAYAKSQIGEGWRVVPTRYDDGGYSGGSMDRPALQRLLDDIERGRIDVVVVYKIDRLTRSLADFARIVERFDAKGVSFVSVTQAFNTTSSMGRLTLNVLLSFAQFEREVTGERIRDKIAASKAKGMWMGGVPPLGYDIPEPGSRTLRVNDAEAVTVRHIFARYLELGSVHALQRELHTSGIVSKRHTTLAGRTTGGATFSRGALFHLLRNRVYLGQIVHKDQVFAGAHLAIVGDPVFAAVQQLLDGNARRHRLSEGGRVMRAPLTGRIRDAVGEPMSPTFSRSHTGRLYRYYVSASLQQGGRANPDGIVRRIAAPRIEQILTDSCRRWLRDPAAGLEAIRAVQIHSDRVDVTIARPKGLHVELASEERLLGADRMTAQILVPICLGSDRCASTTRGAAPTDGPDSTLIAALRRAHRMLARDSRGPLLDAAPVSIYERKILRLALLAPDIQRDMFAGRQPHGFNLETFVNGDVPLAWTAQRELLGCGLIVQ

SEQ ID NO: 3973 - protein, 567 aa, unidentified
  source 1..567: note = uncultivated organism
MLYNRTMKKEELHIYLRVSTDQQIEDGFGIDNQKELGLRVSKKLNMIPIIHNEGSKSSSKDDITERPILTELLYDVNEGKIKNIWVYNNDRLSRNENVWTHIRLTLKKNNCVLYVGEGTKYELSSYLDDFIFGILSEVTKYDNSLRTERMRRGKTSKIKNGGWKGGCTPFGYDLENGQLVVNEFESKWVKFIFEEYLKGTSIYQIQKVLILNGVKSKRGKKNIISLNSIRRILDNTHYEGYWIYTDKLSEEVINVDCDRILPSTLVKKVRKKLGSKKSYSHHTKTVTLLKDFLICGHCGSKFGQNIKGKYKSHYYCRGNMEKNRKELGFQCKVKDSDVRVRSLKIDRTDKFIWDTVIDVIENSHIFKEMIKKEVMGNSKSFGQSMYEVKMKEKKIKELTKNINQIDEVIKTNEINLIWKDKGLKELKDYLKSLKETKRDFEVNIDELNSEIEFLKKEVKWVNWVDEFKDKINNLKNENLTTEEKKSFLDGLIDKIVVHTVNNQTHTLEIRFNSPMVDDKFEWKIKGNIKKGYKLIDGHKKVTLKYRQLDGNVSEKKTLEYQNSIQIH

SEQ ID NO: 3974 - protein, 522 aa, unidentified
  source 1..522: note = uncultivated organism
MAKTEQNKERAKVAFYTRISTDEDHQKYSLDAQKDRLEAFCKSQYGDEWELAKLYRDTESGTHMHRPGLEEMLYDAECQVFDTLLVFRVDRLSRKVRELAQMVEELDKYGVALKSITEPFDTANAAGKMMLQMLGVFAEFEHATIVERTRAGMEKKAQSGKWVGGNVPYGYRLEPEKGLVVHEEEALLVKKMFKMYVFGKDGCTAITNKLNEAGYRKRSGKKWDMRVINRIIKSPIYAGKIQWREIVYEATHEPIISDDLFEQAQDILKERQQELNGRMFHNGDERLLAGIIRCGKGRSHMVGVSTLKNDKKYEYYLCNKRWATHDCEQDYIRGDLLETAIIQDLKNMFMDEQFMLRIWEEANKRLTAEKPDLEREIRRIETQTAKATASVNRYFEAFEAGTLKPEMCNEKVSDLNARIRELEIEKKGLEARRERLELPAIDKEMLRGILADFEKVMEEGTNPQKKHLMQKLINRVVVHDRRTVEIWYWLPNRRSFGSHSYLAPGEGLEPPTKWLTATRSTD

SEQ ID NO: 3975 - protein, 550 aa, unidentified
  source 1..550: note = uncultivated organism
MGKVVAPNLIRGRKIRRRGAGEEPTTQVRAVGYVRCSTEEQQARAEYNTLESQKDYISGYVRTVHPDWELTDWYEDPGYSGKDTNRPGLQMLLRDLQRGRFDVVVVYKLDRITRSLADFFDLDRIFSDHGVSFISVKEQFDTSNAMGRAMRNIALTFAELEREMVAERVKDKMIATVKRGKWPGGTVPFGYDLQDGKLIPNPVEAPAVKMMFETFVRTKSHAAVRDKMNALGIPPKGPKSPKLSAGPYAHVWNKQKVAYILRNRTYLGHIHYDGIEIPNTHEPLVDEELFNCAQAIIAAGYRKPRLSMDHDYFLTGKLHCRDCGCRMTPKSTNHPKRSKPFTPYYECYRLSKYRGHPCKVKRINAEVLERVFLQTIDRLVWDRDLVCEAASQVGADAPDSGGLAAQEASTRERLAEIDAKIQRLVSAVEQGLAGTSVQARLRELENQQATLKSELAEIRTRSKQMKRDPLDPNEAMALFARFAELFEQATAEEKEALADTILKSATVGPDKSVEFEFYAGLDPCTVVQNDKFGSPEGIRTLDLMAENHAS

SEQ ID NO: 3976 - protein, 556 aa, unidentified
  source 1..556: note = uncultivated organism
MASSLGTVKRVLGVVRLSDDTDATTSPERQRAIIENWARANGHVIAGWAEDLDVSGKVSPFDRSGLGPWLKRPERFDVIACWKLDRLSRSVIHFARLMEWCDNREQSGGKTIVSVTEGVDMSTPMGRLFAHIIAAFAQGELETMTERVTASHARLRQDGRYAGAPLPFGYVTAPRADGKGLTLVQEPEYAALLRRLVKDVTEGVSTHELARRLNAEGVRTWGWKRAQMAGLVLRTSDKKVDLAKQRWSADVIQQVLKSPSCCGQKVQKVKTENGRYLRTPVPVRDEDDQPVMATAEPIVSPEQWRAAVAAMSSRARPGERSARTDSLLQGVIVCACCKTNLFVHRMTKTVRGEQKVYSYYRCQADRKGGECAHPAALPMDAAEAEVTEQVLSLLHGKEITRTEYDPGEDYAAQINEARGRLDELEDDYLQGVYDGPEAKRRYERLHRRTSERIDALEALPRRTAAVRTVGTGETYDQRWEASTRLERRAFLIEQGFSVLAAAPGVKCGTYCNPDDCTVPHVRTVFPESTWTMEASADGSLITYTSGVPTGARLGSA

SEQ ID NO: 3977 - protein, 503 aa, unidentified
  source 1..503: note = uncultivated organism
MTLYDAIYTRQSVDRADSISVESQVEFCKKEVVEREFRVYTDKGYSGKNTDRPAFQRLMGDVEAGLIRRVIVYRLDRISRSVLDFANVVDIFQRHHVDFVSAMEKFDTGTPIGKAMLMIVMIFAQLERETIQQRITDAYASRSRRGFFMGGPAPFGFDLKETVIDGVHTKMFVPNPQEAAIVRQIFSLYADPQTSLGDVMRYLEQNGLHSRNGKLFSRSRLRDLVICPAYGRFDHRMYEFFRAQGTVISNPPGDFIGVNGAYLYTGKDAGRKTVSLQGQTLVLAPHEGLIDAETWLKCRSKCMNNKSVARPVKAKATWLAGKIKCAYCGYSLIAKVAHRKVKADKRYLLCNHKYNSGGCTFGSVDADAVEAIVFAEMQKKLADFKVLTKAEQEGCNPQTVQIKARIEELDTEITSLLEKIASANETVLRYINDRIAALDAEKQALALQLSQQEEDTRRENIGELSGYLEHWDTLQIRDKITVADCLIDRICATETSLEIKWKI

SEQ ID NO: 3978 - protein, 541 aa, unidentified
  source 1..541: note = uncultivated organism
MRNFRGNYKDHAEDISRIINYLRRSRQDVERERRTGEDTLSAQKKLMKNVLDSYGIPYVQKEEIGSGDKISTRPVFIEIIEELKENKYDAIAVKEISRLGRGSYSDMALIYDLLKDKRLFVITPYRIYDCTNESDLKQIRFELFMSREEFETTRERLTTARYNSALEGKWMGNVPFGYRRNKNTMFLEPIEEEAEIIKLIYNLYLNGYEGKQVKEKAIATILKEHGIKTAKNCTEWDSTQVKRYLTNDAYIGVAKFRTTKRNSDGKVEVRPEEEHIIVEDAHDPIISVEDFEKVQEIKRSKKKTSRKDAEIFALSGVVTCKKCGRKAVVNRYKRKRQSGDYYDIYIKCNVGNCLTVKYQFAEEAILKLLKRLKDAPAEELLEMYKEQVMAEKAEEIQVSKADLETHMKKELAKRKKSAEDRLEFIVEKHFEGTYSDDMFKKFEAKILAELEEIKHLEENEGRQEIASAEETIDYDGNLIKTNLIKVIDVYESNVSNDEKNELLRSMICELKMEVTKAGTKKNKPEMNLDIVLTNRIWEEEL

SEQ ID NO: 3979 - protein, 541 aa, unidentified
  source 1..541: note = uncultivated organism
MIQDATRAATEGPKPVRCAIYTRKSTEKGLEKDFNSLHAQREACVSFIRSQAAEGWTLVDAEYSDGGYSGANTERPALERLLRDIDAGKIDCLCVHRVDRLSRSLLSFAMIIEKLNRRGVAFVSVTQQFNTASSMGRLTLHILLSFAQFEREMIAERTRDKIAASKRRGAWCGGHPPMLGYDIDARGGRLVVNPEEAGRVRQIYSIYLEKGSLLATVAELARRGWQTKTWTSKSGRTRIGRPFDKVAVSRLLSNPVFRGQVEYRGEIFDGKHEAIVSPEQWQRAQTMLAKHARAGGSETRNKHAALLKGVLRCGPCHCAMTPTHTTKGSKRYRYYACTRAQKEGSTVCPTRIVPAGAIEQAVIDRIRGIGQDPVLVAAVIAQARERLKSETEAFAAERDARADEVRRVNAEIRRLVGDAGPDSGTRIADQLAEVQERLRAAEGALADAERRLDAIRDTRVDDTDLMAAVGAFDPVWDALFPRERERIVKLLLESIDVGAGAEEMRLNFRPSGIKTLAAEVAAGESERDADVEGGEPLSAER

SEQ ID NO: 3980 - protein, 515 aa, unidentified
  source 1..515: note = uncultivated organism
MPQVQVIEPLHSREPAKLRVCAYARVSSDSADQLNSFASQVRYYTDLIDGNEDWTLVDIYADRGITGTSTAKRTEFQRMMEDCRKGKIDRILVKSLSRFARNTQDCIAALRELRQLGVTVVFEKEHINTATMANEMLISMMSAFAQEESASISKNMRKGAVMRMQNGTFRISMPPYGYRYDESGVLAIEPSEAAIVQEIYAAFLSGTNIVKIAEEMQARGVPKLRGECKWCKHGIRYILTNERYMGDQRFRKSFRTDTLPYKKIDNRGQLPQFYMADSYPGFIGREAFQKAQTLLAQHSQQFGHDPVKHDSPWAGMLYCAECGAPLYHRSVNGRECWVCSRHLKDRQSCTLPIIAKTDLVICFYVMLEKLQKNSCGILEDHLERLTQIQERLLASSPGRAGLQLQMADLLSQSHTLSRLLANGCVDSAFFIAQNNGIQKKLVEIKDQIQQQQCENDLEEEICRTRDLIAYIQDIQLSHENSVLLEPVITKAVVKDSGVVFTLANGLKFEERWMKR

SEQ ID NO: 3981 - protein, 517 aa, unidentified
  source 1..517: note = uncultivated organism
MPKVRVIQATKGTLSDKLPVAAYCRVSSNSEDQRHSFVAQVKEYTARIAENEKWELAGIYADKGITGTSAQKRPEFQRLIEDCRQGKVKRILTKSISRFARNTQECLEYVRELKILGVSVYFEKEGLDTADIAGELLISVFGSLAQEESTSIGGNMRKSYEYRMKSGKFNTCCAPYGYRLSGTTLEIHESEAAVIRWIFESFLNGKGRYQIVSELNEKRVPSPNDSTWQMGTLYYILDNERYCGDALLQKTIALDGLSHKRQRNKGQSEQYYVESSHPAIVPPEIFLKVKELRRNRDIKKRIITRKVPLLHRKIKCTCCGQFFKRRERKAGKVAWVCSQHDIDKTLCPSPPVAETMIMSSFENMINLLMASIDTILVPMAAQLRRLRERSIMGNEDINALNQQILSLTDQLHAVSKLHSMNILDISAFREKSNAINAQLDEAQRKRKLLISGTVKDDKLEKTEAIISILQDIKQSPASLEDGGVFEQIVNKVLVDKDKKIVFRLINGLELTGAGGKQ

SEQ ID NO: 3982 - protein, 536 aa, unidentified
  source 1..536: note = uncultivated organism
MKIAIYSRKSLFTGKGESIENQIQMCKEYIISNISKEAEVFIYEDEGFSGGNTNRPKFQELMKDIKARKIDRIVCYRLDRIGRSVSHISNMFDMLDNYNCSFTSITEQQFDTTTPMGRAMINIASTFAQLERETIAERVRDNMLQLAKTGRWLGGQVPLGFTPEKITYIDEEFKERTLMKLTPEIKELEIVKMIFNTYLKEQSITQVVKKLNLSSIKGKNGGIYNSSQISRVLRSPLYVISNEDTHMYLARIGINVFGTANGNGYLTYNKTKKITIDRDVSEWIAAISKHRGVIEPNDWLKVQEFLDKNKGKKIIRTGTGTNNTSILSGVLKCSKCGANMVIKHGHKSSSTKLRYDYYVCSNKENKFTDKCDNPNIRVDRLDSIVISNIKAYNKELLIDSLTETISKSDTSYENDNLDKINSKIEEKQKSLKNLIKRLALAPSEEIADMIMSEISNINDEIKELQKSIENINSSKTNINFKIKNLELLLDTLSKFNKNIDKIKDISQKRFLIQAVVEKILWDGEIYEAKVKILDMS

SEQ ID NO: 3983 - protein, 597 aa, unidentified
  source 1..597: note = uncultivated organism
MNSVEVIKGQGLVARRGNIQEFERQRVAAYCRVSTDSEDQLSSYKSQVQHYTEYIKSKNEWGFAGIYADEAITGTQTKKREDFQRLINDCMNGEIDLVITKSISRFARNTLDTLRYVRMLKEKNVAVFFEEENINTLTMDGELLLVILSSVAQQEVENISANVKKGLKMKMQRGEIVGFQGCLGYDYHPEDKSLTVNEEEANIVRYIFQRYIEGTGCTILSNELKNLGYKTKRGLTSWPASTVINIIKNEKYKGDLLLGKTFTVDPISKRRLVNFGEEDKFYIKGHHDPIVSEEVFAKAQEILAKRGYPRRLNPDGKREKYSRKYAFSSLLQCGFCDTTLSRRSWHAGERHKKLIWQCTLATKKGKKYCPESKGIEESIIEEAFLEAYKLLCGNDKSIVDDFLALAEETLTEANVEKIISRTERDLVAAENKKSKLIDLRLEGTIDDDAFSSKLFDLDKNIDTLKSTLNGLSVTKNQQDDLRSRILSFKAILESNQVLEKFDRFVFESIVEKVVIGGYEEGGAPDPGLITFVFKTGYKQKLHKNNYGIARRQFDQDGNAILPSSSSQTEDFSASSYASANTCGDGGFVVQIDIDQHN

SEQ ID NO: 3984 - protein, 572 aa, unidentified
  source 1..572: note = uncultivated organism
MARKKTGQAPFIQNGRRGALYVRVSTKYQVDKDSLPLQRKKLKEYCKLIDIPNYEIFEDDGYSAKNTDRPMFQEMMNRIRAGEFTHLIVWKVDRISRNLLDFASMYQELKDHKVTFISLNEQFDTSTPIGGAMLKIILIFAELEREMTSERVTATMLDRAENGLWNGARPPIGFTVDPETKTLVPVPDEKETVNLIFNLYKKMHSCRKVARFLQQNGPAPKYHHEWLPEYIRRTLRNQLYIGTYIYNRREFHGPERPKAEWIVKENNHPGIVPKELFDLCNDIMDKNTQTRDVSEIRQTKHVHIFSGKIFCGMCGGNMNASKDKPRENGLRPSVYRCGRRARQMDCENKRTIGDFALGPFVFNYVANLARIQKNFENIDSPESLESALLTGDVFAGVKLAPESLENTFSLLARKGVKKGAYIPDICDSGENENIEERIAILEKEKEKCKNAVSRLTELYMFDPDAITKEEFSEKRRELNRRIRELSDRAAELKESGGPSAADLSFIKKASAFLVARKISSTEYIDFIQLYADLDAEILKDFIDQIIDKIHIQDGRIVRIRFTSGLEHEFIYQ

SEQ ID NO: 3985 - protein, 553 aa, unidentified
  source 1..553: note = uncultivated organism
MLDNVNMTSIRKKPLRCAIYTRKSHEEGLEQEFNSLDAQREAAEAYIESQRMLGWRALPDRYDDGGFSGGNMERPALQRLLADVDAGKVDVIVVYKIDRLSRSLLDFMNLIELFNKKGVNFVSVTEHFNTTDPTGRMFLGILITFAQYEREVIAERIRDKVAAAKRRGKYCGGPAILGYDVDRENKKLLVNPDEAPLVRHIFRRFTQLASARKLAQELNEQGYKTKSWVTKKGKRREGTEWNTGHIYRLLGNRIYIGEVVHKGESYPGEHQAIVDKELWEKVQSILSENTRAKLSKARSKMISPLQGVIRCGHCDCSMGPTYTQKGERRYTYYICEKDAKRAVSRCPLKRVPAGDIEKAVLEQLGAVFRTPTLVAKTYFAAREMEEAERERLMKQKEQLEEDLAAVRKRALELMSAVHGSPPSGAPLARPNPLSCGFVMSSGNNEPDREEKLAKVNQRAVTLTRHLANVSARLRVFEGDQVTERDVSEAFESIETFWEDLFPLERNRLVRLLVEKVEIRESGIDMELKTNGLTTLITELTGLACEVRERRNGK

SEQ ID NO: 3986 - protein, 544 aa, unidentified
  source 1..544: note = uncultivated organism
MADKIWNVAAYCRLSRDDGDKAESNSIGSQRDIIREFLKDRKDMVIVKEYVDDGYSGVNFERPGFKDMMEDIRKKKINCIVCKDLSRFARNYIDSGRYLEKIFPFMGVRFIAINDSYDSNGEKTQADSLIVPFKNLINDAYCKDISMKIRTQLDIKRKMGDFIGAFATYGYRKDPDNKNRLLVDEEAAQVVEMIFRYRLQGMSNTRIAAKLNSMGILSPMEYKKSKGMNYGSGFCTNAQATWNASSVQRILTNRIYLGTLTQHKRGTPNYKVKKEIFYEEDDWITVDENHDPIVKETDFETVQSLLGKDVRVAPEKEASHIFAGFVYCGDCLHSMARKTVPGNGKRYQYFTCSTHKAKQGCRAHSFSESKLEKIVFQLVRDQINMVCEVDAVLDYIASLPEQQRKVFDYDAQLTRLEEEIRRYQDLKLNLYSDMADGMISKEEYLEFRAGYDRKIQERQKAVVQIKEERQLTVENGGRHSEWIDLFRQYENITELQRAVVVNLIERIVIYDSKHIEVVFRYQDQLNEAVQYIDRYKEILPAKEA

SEQ ID NO: 3987 - protein, 513 aa, unidentified
  source 1..513: note = uncultivated organism
MERAKDPRAETKPVGIWIRVSTEDQAQGESPQHHEMRGRSYAESRGWEVREVYRLEGVSGKSVMEHPEARRMMADVRRGRIGGLIFSKLARLARNTKELLDFSEFFREHGADLVSLQESIDTSTPHGRLFYTMIAAMAEWEREEIASRVIASIPVRAKLGKPMGGVAPLGYRWVDKRLEVNPDEAPLRRLIYELFKEHRRLKTVAEILNAAGHRGQNGRPFRDTTVEKLIVDPTAKGLRRASYTRLVKGQRVLKPETEWIWVPCPAIVSEELWEQCNALLLKRRASRKPVAKRAVYAFAGYVYCACGEKMYVRSNTPKYVCKACHMKIPIVDLDNLFRDELREFTFSPEAIAAWLAQGAEVLAGQEELMDALFRERERLTKEADKLYHLYQEDALSVDGFRERHRPLEERLAALGGEIARLQGEIDFLKIRTVMEEDIVSQTRDLADKWQTMDIPEKRRVVESLLRRITIHKDVVDIDLANLPPLSEIMAKGPPIPGGEGRKSRLKQRGSKSS

SEQ ID NO: 3988 - protein, 553 aa, unidentified
  source 1..553: note = uncultivated organism
MEEPYNNTSLQVPTLATAVYTRVSTEEQAMQGYSLDAQLAAAMKYIETQPSLGFVEHYTDPGISGKNISGRPGLKRLLNDVTNGKIKAIVVWKNSRLTRSLKDLLTIMDTVASNNVTLYSVSEGPVVDNATGRLQVNLLAALNQYERENIAENVRSGMACRAQEGYYNTRAPLGYNNEVDDNGTPSLVVVPEEATIVREIFEEYTKHGKGYKAIANKLNNLGYKTKRGNDFSIDSVKGILLNPVYVGKIRWGQYENWEKYRRSRGKSANVILAEGKHEAIISEEVWTAREKRTAAATKTPAWDRQGTNVLTGVLRCPACGSGMVRTNSTGKKKDGTRVQRRYYSCGAWVRKGSAVCSANSIRVDEAEQLVEQRILEVLSLTHFGQDVVDEMNDAYKAKKEELRTAITNKETDKRKILENISKYQTMIDRDPALSAALTNTIEAQRRTLESVVLDIETLNAEREALLSIPSQATVETALQIVAESAKEARGNKAKLKELYKKIVDNATFDKKKRKFFVNLKLDKDIVAELKDRLAKGESIEGSPFFAGLIRVHL

SEQ ID NO: 3989 - protein, 502 aa, unidentified
  source 1..502: note = uncultivated organism
MYCRISDDREGERLGVERQREDCLARAQREGWEVVEVFIDNDVGASTRSRKPRPAYRQVIKAAENGEVDVILSYSNSRLTRRPLELEHLINLHNSTGVLLRTIVSGDADLSTADGRAVARTIAAWDAAEAERIGERVARAARQRREQGLRHGGFPPYGYLNAPGGRLAIHPDRAAVVREAAGRILSGESLYGVWTDLNRRGILTAPSPRAPHGARWQAQTLKRVLTAPATIGCVQSDTGELREVSAPILDRKSWQRLREALYDDQRFDQTRKPDWSNRRKYALSGLLTCSLCGHWLSGSTRAPSRTNGGRTRPKVQTFSCQPANGGCGKLRIDYAPVEAWVLGQVFARLDVPSLRDALAAGGPQVDDDELRQQIQEDERLLERLDDDHADGLLDRHRYVRQLNRIQQRLHAARRKLAEVRRANFVIDTGGRTVRDVWCDRDIPWQRTLLKHVIDKIVIEPHPAGVTTNLSRRRAETDEDVAQRRAQHRERLLLQRVHISWKA

SEQ ID NO: 3990 - protein, 523 aa, unidentified
  source 1..523: note = uncultivated organism
MPNVGIYCRLSIEDKDKDGEDNSASIQNQKAMLRDYCTERGWEIYDIYVDDGFSGIDRARPAFSRLLRDCEQGKIDIVLCKDQSRFSRDTVIIEQYLNDKFLEWGIRFIGVADNADTDNESYGTMRLFTSAYNEMYVKDISAKIRRTLAYKREQGQFIGSFAPYGYRIDPDDKHHLIVDPETAPVVQQIFELYVSGEGYRHIVQALNAQGIPSPSTYKRQQGSKYVNCNAEGSNARGLWTQSTVSKILTNEVYTGTLVQGKSHHVSYKNKKRKKVDPAEWVRIPDTHEAIIDADTWARTQARLQSNTRVGSRMQELSPLSGKVRCAVCGRPMKRNVYYNTSRTIKYYGLQCATYKTGAMNCPNTRTMSGKVLEQMILDELNSIISQYCQSDEIRFTDLYVEQLRELESDLAKLREKQAAARNRLVAMYKDKLDGAISAADYSLFRDSLTAEEHETADRIKAAQKQIADCRERMKNAESQKALIEQYSHFERLDRSVADEFIDYIEIGLPDDDGQREIHIHWKL

SEQ ID NO: 3991 - protein, 514 aa, unidentified
  source 1..514: note = uncultivated organism
MALITKIENNKAVRRKKRVAAYCRVSTDQSDQLMSLETQKAHYESWIKSHSDWKYVGLYYDEGISGTKMDNRPSLLKLLEDCEHGLIDYVVTKSVSRLARNTADFLTIVRKLLDLNVCIYFEKENIDTGSMENELMLSIMSSIAESESVSISENNKWSAQRRFSNGTFKCSYPPYGYDWDKEKGEMIVNEDQAEVVRFIFAQTLAGVGTHDIAKMLAAKGIPTKRGGKWTGHTVNGIIRNEKYTGDCLMQKTYTDDSFVRHRNLGEKNQYFVENHHEAIISREDYEAANAVVDRRRSEKGIVTESGKYQNRYPLSGKVICGECGGTFKRKTYTHKVVLACTNHIDDKDSCSMKYVDLEDVEIAFATMMNRLVFGKNKVLRPFLKALQESNQTEALVRLKALKEELETLSEKKNTIKGLFSQGIIEPAVYTQSTNVVVAQMERVTLEMDGISYIANGELSHIEEAKKLLDYAEQGVYLQDFDADIFEKYVDRIVVRSRNELEFQMKCGLKLIERI

SEQ ID NO: 3992 - protein, 501 aa, unidentified
  source 1..501: note = uncultivated organism
MYIAVYARQSIDKVNSVSIETQVEYCKATLPPDERRMTIRCFADKGYSGKDTNRPAFQKLMQDVRRGSVSKIVVYKFDRVSRSIIDFSDMLQVFKSCGVTFVSAQESFDTGSPYGEMICKILMIFAEFERASIIGRIQDAYEKRSDLGLYPGGRKIYGYDLEDAVIGGIRTRRFVENPAEAAQVRFLYDTYALPGVTLRQLQDELLARGMRPLCGKDWTTGKLSSLLRNPVYVCADEQVYHFFAARNARIIGDLRDFDGTRSLRLFGRTKHDRNLEDWSDLKVVLLESYGIVGADCWLRCQQKLLQNRQIGNATANHTSWLGGKLVCAKCGHTMTTVKGASRRYFLCAGKSHKKTCTGVKATLYVEDLETLLDACICRKLQIQTESSASRSRENAAQLHALRQQAAEIDAQLAGLGDAVIASGVSPELLAVLNARARSLTAERQQILERMDALSAAPEIADTDLVRQWRRASFSKKRAVCDLLIKAVVIAENGDPEIIWTV

SEQ ID NO: 3993 - protein, 513 aa, unidentified
  source 1..513: note = uncultivated organism
MSDHRPKTRCAIYTRKSHEEGLDQEFNSLDAQRQSCEAYIESQRHEGWQCLPRRYDDGGFSGGTLQRPALTELIDDIHAGQVDCVVVYKVDRLSRSLLDFARLVALFDERNVSFVSVTQQFNTTTSMGRLTLNILLSFAQFEREIIGERIRDKKLATARQGKYIGGQPKLGLDIVDRRYVVNREEAKLVRRIFEMFLKVQSCRKVAEALNAEGTVTKVYTTKTGKTFGGTSWKGRTVYDLLIDQKYIGKIVHKGIAYDAEHPAIVDVPIFEKVQEVLRANKTYTHKHQATRFALLRRMLKCGHCGSLVQPAWTRNHGREYRYYTCSKRIKTGYGKCPLPTLPAGEIERMVVDQLRSLLQHPDVIARTHREIQSRAATGPSGDVLERLEHLRRRREQTQGSIRAVLDLGEHDGGFMAEELKRLNGELKSLEQAIQQAESQSDRAEPMELSRVTEALGRIDPIWEMLHPEEQRRVLELLIEKITVSKESVEIRFHTGGIEQVVEELQPIGAPSDD

SEQ ID NO: 3994 - protein, 530 aa, unidentified
  source 1..530: note = uncultivated organism
MKTMAASVRQRCAIYTRVSTDQGMDQDFNSLDAQREAAEAYVKSQRHEGWVALKAAYDDGGFSGGSMERPALQQLLSDIRAGLIDTVVVYKVDRLTRSLADFAKLVELFDAHQVSFVSVTQAFNTTSSMGRLTLNVLLSFAQFEREVTSERVRDKIAASKRKGLWVGGMVPLGYTSVDKKLVVVPEEAERVKLIFQRYLELGTLDKLLADLYARGVTTKRRPLANGQIRGGIPFTRGGLAHLLRNRFYIAEIDFKGSVWPAEHEAVLDRELFVAVQARLDLQRSQARSARQPSAALLTGKLFDDRGHRMTPSHARKGAQRYDYYLSSALNQGRKTEVGSLARVAAAQLDPLVTGLMRAQCLDGVALSTQQLVEQHLIRCVVGRAELTITFQPTSPERQHTDRANDPASPVTITAPWSPRVQRRSREIFIPQNGFPSQSSKDALRRTRLVRSIALGKRWLQEVVGGSVTPEIIAQRERCSGRSVMQTISLAFLAPDLVKAAVEGRLPKSIGFARLAEPPMEWSQQRARLSL

SEQ ID NO: 3995 - protein, 523 aa, unidentified
  source 1..523: note = uncultivated organism
MNGLGRPSVRAVVYTRKSSEEGLDQEFNSLDAQYEACTAYIASQRHEGWKLVKQRFDDGGVSGGTMDRPALKALLAEVDKGLIDMIVVYKIDRLTRSLSDFARLIERLEQAGCSFVSFTQSFNTSSSMGRLTLNVLLSFAQFEREVTAERIRDKIAASKKKGMWMGGTVPWGYQVHSDPKVQSLEPHPQNAPDIQRVFDLYERVGCLSKLKREVDQLWPTRSYSRGRLYNILRNPIYIGKVRHKVEIYEGLHDAIIAQDQFDRVQEQMQLRSVIKRGTHHSRGPSAFLVGKVFDETGDRLTPSKTRKNGRTTRYYYSNRLTITGADPTGWRLRADMLEEALRDMVKQQLTQTLKRMQIAPLMKPHEVAAALEVIDTLDVMQTLELIAHVDLSAVVLIIKLNHEALVNHLGINQDDLDHEYLSFEQPVTFQRRSNGTKMVWADYKSEPNHALIRAIVQARSWVESLKAGQSVSDITKSEGISEGRLSKRIRLAFLSPKLVTAILDGTTGQELTIKKLSSKGYPP

SEQ ID NO: 3996 - protein, 589 aa, unidentified
  source 1..589: note = uncultivated organism
MDNSKRFVIYSRKSRFTGKGESIENQIEMCRQYIRVQFGDDAADSALVYEDEGFSGGSLERPKFKRMMADAAKGTFQAIVVYRLDRISRNIGDFAKLIEQFNAMQIDFISIKEQFDTSSPMGRAMMYISSVFSQLERETIAERIRDNMHELSKTGRWLGGVTPTGYTSESISHVTIDGKTRKACKLKIIQDEASIVKTVFEKFLETSSLTKTETYLLQNHCTTKNGKQFTRFAIKGILSNPVYLIADEAAYQYLTENQVDLFSEQSDFDGVHGIMAYNRTLQQPGKANQVKPMEEWIVSVGRHPGIIEGKAWVKAQRLLAQNKSKSYRKVRSNVALLSGLLICGSCGSFMRPKVSGRLNAKGEPIYTYLCSMKERSRGHVCKMRNCNGNLMDADIVNQLKALSENGSDFLQQLEHSKRVLAGNRQSYDEEISKIEADIATNDDAIKNLVSALGKASGTSAEGYIIRQIDELHDKGEGFQRRLNQLKELTADHVLADIEFDLLAQMLASFKDTVDDMTVEQKRAAIRTFLKQVIWDGSRAHLVLFGSNYEYEFPEIPFSTEDMAAEDGENANFEMAAERGSVEPLREDSK

SEQ ID NO: 3997 - protein, 556 aa, unidentified
  source 1..556: note = uncultivated organism
MPERKCGLYARVSTVRQAMVEEGSLDAQFDLLQKRVEYETQANPEEPWVVADKYRDEAASAKDLHRPELKRLMADIEDGKISVVVVTKLDRISRSIRDFYDLIEFFNKHGVEFVSLKEKFDTTTAFGEFQMNLHLSIAQLERKQTGERTAATMSYRATKGLPNGGRICGYVPDPMKKGHLLIDPEHAEIVRTAFEKCAELGSGCAAHRHLMKIGAKSPVYISRRDKKHGGKPFNIPAVLRMLRNVKYIGKIKYDGDVFEGQHEAIIEEELFNQVQATLDRNNEFPNATRKAKTHTFLLQGIIRCGRCGSLMTPRWSTGRHGDRYFYYECTKRSKTQKQECGVRYLPAKSAESFVIDRMKEAVINEDEINRIIKRANRLRSKTLKGIEKDIKATRKSLREVEEKIQKIITAVENGEGFDSLKSHLAELEGTKKELKSDLDMLLMKRDKTESAILSADVVTKEYASVPRIVDELILSRDFDRLKRILNQYIEVIEWTEDENDSKSGTMRIMLFEHGRDDDGHKIKEPSGTSEDVALGYNNWRPQGELNPRCRRERPVS

SEQ ID NO: 3998 - protein, 513 aa, unidentified
  source 1..513: note = uncultivated organism
MNQAGDQGRIDRDDADAARWAENREDVEIVATSEDAGVSGATSPFRRPSLGPWLTDPSLRAQYDEIVASGVDRLGRNARDLQTLRNWAEDNGKTIRVLKPPMEWPPPPGVEGMPSRIMWELLAILAEAELEATKERYEVARRDLIGKGALVGPPGWGYIVVGDKFNKSLAPDPALVPHLRGMIELAMRGDSYLSICRWLDAEGVLSSRGAKWSPSSVASVLHNPALMGRRYENGKVVMKFDSLLSAAEFAALQAEFDRRPKKRGPVATDTAMLTNVIRCAMCGGPMYRNNSRSPRKDGTFSVYTVYRCKGPDQAPSRCVNSIEAQDIDAWVNAWFMEDGTFAHTEIVETITVPGDDHADEIAELEADLRDLDFDAVDYAERHATLLAERARLRSLPSEPAQVTEHGTGRTVGDVWAALDDQQRRRFLIHGGINVFVMSNAKLRAMGDGRRQVSSGTAGRVMLPRRMVLPAWGDEKDMSSVVPRPGRATPPEREVVYVTGNPARIEGALSRLLD

SEQ ID NO: 3999 - protein, 646 aa, unidentified
  source 1..646: note = uncultivated organism
MPKEDKKVNRVAIYTRVSTNYQIDKDSLPFQRSELINYSKYVLGIDDYEIFEDAGYSAKNTERPKYQEMMARIRKKEFTHLLVWKIDRISRNLRDFTEMYDELKECGTTFISKNEQFDTSSAMGEAMLKIILVFAELERKLTGERVYSIMLSRAEKGLWNGATVPLGYKWSSEKKFPVIDEEEAEVVKYIYNLYEKNASTSKTAFQLNSEKVKTKRGGKWTAKTVNDVLRNPFYIGTYRYNVKSSPNRRWKDEKEWVVVENNHPGIIDPEQFERVNKMLTDNYRGNGKFQRENTNTHIFSKLLYCGKCGLNFNAGLDRERKDGYRPSRYTCRYSKYDNINNCNNFVSDITLLPFILNYISNFINLQSKITRKHSLRDIERMLLRGNHFIDVIGIDKKGLEETYTAFAIGFQDETYGRSEEEETEANYELEALKKEKMKYEKALTRLEDLYLFSEEAMSEKDFLFKKRDIMQNIDRINGELAELHKKSSDMKLTTDISFLNKASHFLMTMELTSKRDIDYRKLLETVDKEVIKDFIRTVIDKIIVVDKKVYSITFQNGITHKFVYKEKLKQQTRTKEKILYKSYEPMLLKYLFKHKSVTRREVETLTGMSRTGATSILQEFMDRGLIERKGNSVAIRYFLKEKGSLE

SEQ ID NO: 4000 - protein, 514 aa, unidentified
  source 1..514: note = uncultivated organism
MPRVGIYCRLSIEDRNKHEYDDSQSIHNQKAMLRDYCRERDWEIYDIYADDGYSGTDRKRPEFIRLLRDCENGRIDIVLCKDQSRFSRDTVVIEQYINDKFLEWGIRFIGVADNADTDSESYGTMRLFTSAYNEMYVKDISSKIRRTLAYKREQGQFIGSFAPYGYCIDPDDKHHLVIDTETAPVVRQIFELYAGGEGYRRIVQRLNDGGIASPTEYKRMKGSKYVNHNADYGNARGLWTQSTIARILANEMYTGTLVQGKSHSISYKNKKRKKVEQADWVRIPDAHEAIIDADTWERTQERLSSHARVGKCSQELPPLSGKVKCAVCGSPMKRNVYYNKAKTRKYYGLQCAACKTGAMNCLNVSSMSGLVLERKITDELDSIVEKYCKADDIKLSDVLSEHIAGLEKNLSAVKKRHDSARERLLRMYKDRLDGVISGEEYVSFRQELVDEEQELASRIEDMTRQIAEIRENTAEISLHFENLDRTIADEFIDFIEIGMANEKGEREIHIHWKI

SEQ ID NO: 4001 - protein, 546 aa, unidentified
  source 1..546: note = uncultivated organism
MAERKTYRCAVYTRKSTEYGLEQDFNSLNAQREACEAYIKSQAHEGWRLLPALYDDGGISGATLERPALQALLADVKARKVDIIVVYKVDRLTRSLADFAKLVELFDAQGVSFVSITQQFNTTTSMGRLTLNVLLSFAQFEREVTAERIRDKVAASKRKGLWMGGNVPFGYVTRDKKLVVEEHEAEQVRTIFRLYLEVPSIKALKQDLDAKGITTRVRNLSNGQTIGGIPFYIGPLAHLLKNRLYVGEITHADKIYPGKHTPIMDRDLFEAVQAKLANSATTRRHKRTASGSILMGRIYDDAGNRMTPVNAQKGPARYRYYLSAPLNHGAPGRPGSISRIPARHVEGAVVAAVRERLSKSTDGGGDAGNPNLESDISDHQLIEKSVTRVVVSRQSVAITFNAGNKQNEDSGSDDQEPEIVIAPLNLKNRKPRREIIRDREETSDPDVGMRSERHQTLLVAIAKARCWADDLITGHVADTEALARRENCSERRIRMTLSLAFLAPDIVAAALANRLPPHLVMTRIWSDLPLSWVEQRKVLRLGSPIL

SEQ ID NO: 4002 - protein, 518 aa, unidentified
  source 1..518: note = uncultivated organism
MPENFICCTYGRASTNKQGDTIDHQIDIVQEYIKRENQDNKDKNNNITWILPSDFIYTDEAFSGYKLGLLDRPSMKRLISDAKNNKFQIAIFKSISRIARDTQESLKLLSIFETLNIKVISIEENFNSDKQSSEFFFTIYSALAQEESKKIGIRVSLGNKAKARSGKWSNSRPPIGYKVDKETKKLIYSDNIQHIETIKKIFDLYVNEGLGTFKIAEILNNLQWYTSNNKKWDRSSVAKVIKNRVYIGEIVYGKKRYKSVQKIEGEGKISKTIKINEDDWVVCENAHPSIINKEMFYKAQSILNSRNIGQTFKHVIHPLTGILFCSKCKNGFVCQKRSFKNKDYRYYICKTYHKYGRETCSQANINADELEKFIYNDLLSEIKNYKKHENEINQKTFFAEQNLNKLKKDLQECEKNIEKVKRESLNLVKLADKLTEEQFQYSNDELKNELKNLNDRKQNIQEELINFNLVNNNEYFKKEMEDFIENPNPDLRKYFHIFIKEIFILDNEIESIEYNFFS

SEQ ID NO: 4003 - protein, 601 aa, unidentified
  source 1..601: note = uncultivated organism
MKTNQPVIAIYSRKSKFTGKGESVENQVELCREYIKKHYGDRAAEEAAVFEDEGFSGGNLNRPGFKRMMKDAREHKFSAIVVYRLDRISRNISDFSSLVEELSRLSVDFVSIREQFDTSTPMGRAMMYVSSVFSQLERETIAERIRDNMHELAKTGRWLGGTTPTGYTSESVKTVTVDGKSKKACKLALLPEEAELVKRIFDRFLATNSLTVVETELLQQRAKTKMGKDFTRFAIKNILQNPVYLIADDDAYRYFVDRQAELFSQQSAFDGVHGILAYNRTDQEKGRATVYLPVHEWIVTVGQHPGLIPGRDWIRVQEALERNKSKAYRKPRSNEALLTGLIYCRCGSRMYPKLTKRFNADGEPIYSYLCRMKDRSHGSRCNVRNANGNVLDAGIVEQIKQLGEDNSAFMAQLEKSKKFYTGSRGDYEAKLDDLRKEKAETDKKIAGLVDSLAEVSDSAVRKPIVKRIEDLTRAGEELDERIAEWEGLTKQNILSDIEFDLMRQLLCNFRESIDGMDIEQKRAAVRSLVRKVVWDGAYAHVVLFGAPEDEIEYPEGLFPAADTGETDDSEELTPFLDVDYDEDDDGARDTDAPPLSGEDSK

SEQ ID NO: 4004 - protein, 533 aa, unidentified
  source 1..533: note = uncultivated organism
MKKQQHYKAALYCRLSVDDGNFGGSVSIETQKILLEQYCKDHKITDYKFYCDDGCSGTNFDRPSFKKMLSDIDEGKINLVIVKDLSRFGRNYVEAGMYVQRFTDSNIRFIAADDNYDSLVNSDDLLFPIKNVVNEMYARDVSKKTKAAKKAKARDGQFIGSKAPFGYKIDPNDRHHLIVDEPAAQVVKRIFRLASEGVGYNKMAKIFREEKVLTPIAYFNLNNPDYFKSDYWRKEFDWHVTSIRAILNNEVYLGKLVYGKQRNKSMKSKEKVRNPKEDWIVVENCHEPIITQELWDTVHKILNAKHRPAKAGEVQMFAGLLYCSDCGHCLTYSQKQRKDGSYHGAYSCWMYKTHGKEYCASHYITFDTIYELVLIDIQRNLFQYRKNTDKFKSILSRKYQSDSQKQKRCEELDKIISRLYEDNVLGRIGDERYESMSQSYELEQVEIKKALPILKSKIDELKRQSDCADNFINVIKKYTIIDKLDAAILNELIDKIVVHHKEQAEDGRTFQQIEIYYRFVGKLGTENELSKAA

SEQ ID NO: 4005 - protein, 539 aa, unidentified
  source 1..539: note = uncultivated organism
MSRRNGNGNGKNGTAKEKPRCAIYTRKSTAMGLEQEFNSLDAQREACEAYIRSQAANGWQALDERYDDGGFTGANIDRPAFQRLLADIAAGRVDVVVVYKVDRLSRSLLDFATVMDRFGRAGVEFVSVTQNFSTSDSIGKLTLHLLMSFSSFERDMIAERTRDKMAAARRKGKWTGGSVPLGYEVKDKHLVINPVEAPLVRDVFDLYLDHKSTVAVARILNRDKRKTKRHRAGNGNVRGGERWNKNAVLRVLRNPVYAGHMPYGDELHDGEHEAIIERTTFDRAQAILETRKECGRRRGRNPEYLLTGILQCACGGSLTPASTRTRGKEYRYYRCVTRDKRGGEACNARSLPAQAIEEFVVQRLRESVATPEMAAQVEAELLEQVERTRVSLARQRRRLREHVPRKEQEYRRANEETLTAEGKAWTVAKERADFLAAELNDAEAQLRDVERMLATLDQAEIDGLWVARMLRDFNQVWDVMTVENRGRLVRALVRQVVVDDAAGTCEVELLDVTHAIPEVHGAESPTADDGLTSEQQVQP

SEQ ID NO: 4006 - protein, 555 aa, unidentified
  source 1..555: note = uncultivated organism
MEKNILKTYQAAIYLRLSREDGDVDEGTKLVSNSISNQKALIMDFLKSHTEIKIHSVYADDGYSGVNFDRPNFQRMLEDIRKGIVNCVIVKDLSRFGRNYIEAGRYIEKVFPMLVVRFIAITDNYDSFEAQGGYGGDMVVPFKNLINDAYCRDISIKIRSHLEMKRKNGEYIGAFAVYGYRKDERNKNQLVIDEYAAGVVRDIFAMKLCGLSQQAIAEKLDADGILSPMEYKKSIGIRLETTFKKGTQAKWSYNSVTRILKNEIYTGTLAQGKQTTPNYKIKTRMMKPEEEWVKVENTHEAIISVKDFALVQELLKQDTRISPERDALYPLAGMVYCGDCKEPMVRKTIPAGGKKYIYYVCSGNKKDKSSCSPHRIPEAELSSTVLSLVQMHIKRVLTLEKAMEAIERAPKMRADVAKFDGRIRRKKEELEKAEKRKMNLYEDLKDGIISKKEYFQLKAEYDRRAAEAEAFICSYEKEEKLLLESRSSLHEWVSGFKEYSNIQSLSRNAAVVMVKKVLVYSADRIEVIYNFEDEFDRCSEYAAAYGDVPERKEAV

SEQ ID NO: 4007 - protein, 504 aa, unidentified
  source 1..504: note = uncultivated organism
MKGRPEFQKMLNDMCDGTINMICIYKLDRLTRSVRDLEEILSLIEEYNCGLVSVTEEINTKNAYGIFFIRMVILLAQLEIDQTRERTIMGLVGTVKQGIPIGKLPLGYKRDENNKDPKLRKKTIINEEEAPTIRRIFNLYLKGCSYYYIAEKLKEEGNNLMQWKDWAIQQILNNRLYCGDIEHRKTLKDKPTEIYEDVVPAIISKDVFNDCQVWMEKNKQSFGGSLDYMFGKTLYCAKCGSTLCVSSNKSKNIKHYICKKCNNSRINENKVEEQLLDKLENIAQFNMALTYNALMVDNDRLTEILNNVELEAPDERLKERKDELRDLLDDIVIKDIEDKNNHNKKWTDMSYEEKRTFVQSTIEAIYISKIKGSNQQDYKVAIKKIKFKTSRINAFFDLIRKGVIDMYCRNDFTTWSMATIDSKEELEDYLKRIRKKHKIKVVEIPIRGDEYKNKKKSAELDDLIESVVNNPKCFKTIKVTRKNEMLKGKFEKELHIHLCLENEE

SEQ ID NO: 4008 - protein, 569 aa, unidentified
  source 1..569: note = uncultivated organism
MDYINTTEKGNTFSTQTKVVAIYCRVSTTEQAEEGYSIGEQERLLIEFCNHNGYEVYKTYADKGISGKDIQHRPAIKELLLDASGRKFNMVISWKINRLSRKLSDAIKIVETLEKYGITYRSYSEPFESDTPAGRMQFQMMALIGEFERSTIAQNVKMGMCAKARAGEWCGGIAPLGYNWVPMEGTEDSGRRKSRLEIVETEAETVRKIYELYASGKGYKAIVNQINKAGYRSKRGNPFSVAQLKTILTNPVYIGKVRFDVRRNWNEKRRQNINPNPIIAEGIHQPIISEELWNQVQKMMAQKSGKPSRIYDGEYPLTGILRCPECGAGMVISRTTNTLKDGTKRRIVYYACGAWKNKGTAVCHSNSIRVEKANAVVFHELEKIFSNEKFLKMVLKKVNEERQRQSARTQKDCAKAEKELQNYEKRRRKVFEAYEDGMINGEEFLKRKSEIAEETEQLQKKIKNLTLLEGQEIQSEIPYELVKDILQNFSRVLNSKGIERGLKKQLLHMLISEITIDKKREIDSIHIRLTGELVQFLQNTGGISIRGVPPDFFICGKMEIPAFYLEFAI

SEQ ID NO: 4009 - protein, 580 aa, unidentified
  source 1..580: note = uncultivated organism
MARKATEIPAVRCAIYTRKSTEEGLEQEFNTLDAQREAGESYIASQKGEGWVAIPDRYDDGGYTGGNMERPALKRLLEDVKAGKVDCIVVYKVDRLSRSLYDFAFIMNLLERREVFFVSVTQPFNTSSSMGRLTLNTLLSFAQFEREIIAERTRDKIAVTRRMGKWSGGRPVLGYDVAPEGGRLVVNEEEASRVRSIFSLFLTRKTLLPVLEELDELGWTNKQWTTRKHRTQGGSPFSRTTLRSLLGNILYCGKIRYKEEIHDGEHPAIIEPEVFEQVQALLKTRETGKAGWMRHSYNSLLGGRLFCASCGKVMGHTYTDRKGTRYRYYLCQTVQKGGRHRCTARSIPAPKIEAFVADEICRLGKEPRLLSTELKELEPPPSKAAAIELKTALETFATEWGTLPPAEQSRIMHRIVKKATCDSEKGRISIEVDFRYLLTEKYGEFQTFAGEPGGDSACFLIERRLPFRRPTKQQQPQQPKGRVPRISKVLAMAINFNTQLQNGEVKNLADIARLHRVTRARVTQIMNLLSLAPDIQEEILHLPRIEKGRDKITERSLRPVVAEVVWEKQRLLWEELKSGL

SEQ ID NO: 4010 - protein, 551 aa, unidentified
  source 1..551: note = uncultivated organism
MARKSRKQNIAANPQEDVRCCKAAVYIRLSVEDTKTGSGSIETQKLIIGRYLQQHPDILVIDTYIDNGCTGTNFNRPSFQRMLSDIEEGRINCVVVKDLSRLGRNSIDTGYYIEQYFRVKNVRFIAVNEQFDTADPESADQGILLPLRNMINEAYSLDIGRKIKAQQRQAMKDGKFVGGRAPYGYKKAEHDCHQLVIDPNTAPIVLQMFQWAAEGCGLNTIVLKLNEAGYITPSHYKKLCGEYTNDKQLGNGKWQTFTVAKMLHSRIYTGDLAQGHTKTVDHKQVKSDEDLIVVEGTHEPIVSHELFDKVQKILDGKAAESKAKTVKPYAENILKGKIFCGCCGKPLHWHRNIRRKTADTYYYYCLSKTRVSKDACDGLLINEVTVMSVLTDTLLYSLDVVLGKYALHSPESSQQKALRQEMSEKIESRTQEIRRLKQLSRNLYESFVEGIITKDEYRQFKERYDQQIQKLEPEVEQLKQGLTAMEAHRLKCESLARDAAAIRKNRGLTAELVERLIDQVVIDPSKEFHISLRFSSEYNEYVEVLNRCRNM

SEQ ID NO: 4011 - protein, 570 aa, unidentified
  source 1..570: note = uncultivated organism
MRTIEAELHNQTTQEKKFEVAAVYCRVSSEEQEQNQNIRNQTSSIKTYVDLQRANDSKLEIFDWYLDDGVSGTIPMEMRPAGAKLLADAGEGKFNVVLVWKLDRLARKPYITLNTIEALEGYGISVRSITESFDASTSAGRLMLNMLASFAGFERDNIVERSIEGTNRRARDGQWLGGITPYGYEVVGKKKDARLVVSERMLPNHSMNEADVVRLIYRKLVDGNESCVRIADELNALVIPPAYTKDNRQLQRTLDGGKRKVNTAGIWRPSRIRNLVVNPTYKGTHIYGKRSQKQRELITRAVPAIVSEQDWEKAQQVLSANRLLSNRNSIEKYLLRGLVKCGICGLTYTGCTYHDYSGGRKRYYRCNGKTAYRGPCQGKCQSKAVKADVLEDAVWKEIEKALLDRNATLEKLNLSYLNQEKRSAVSKVETTLVEKSIMSKHGEKERMLDLYRRQLISVGDLENQLVKIAAEEKSLSVRLNELQISAREQERVEEKLSKAGDLIKRLQEALKSPPPWEVKRKVIELLIWDVKVNTMIEDNRKRAEIIITFAFDENMLSANRRGRGSSLPPA

SEQ ID NO: 4012 - protein, 579 aa, unidentified
  source 1..579: note = uncultivated organism
MALAVEVIKASRKMIDRKAEKLSDVLRVAPYARVSTDSEDQLNSYKSQVSYYTDLVSNRSDWVLVDMYADEAITGTQVTKRENFQRMINDCMDGKIDMIITKSISRFARNTLDTLKYVRMLKEKNIAVFFEDENINTLTMDGELLLVILSSVAQQEVENISANVKKGLKMKMKRGELVGFKSCLGYDYDLSTKEISINKEEAELVRYIFQRYVDGMGAYVIAKELTEAGIRTPTGKIEWQDTSILGIIKNEKYKGDLLQGKTFTVDPISKRRLENYGEEDQFYAKNHHEPIVSEEIFEMAQAILHRRGENRRRSIKGKREKYSRKFAFSSMLECVFCKSNFSRRNWHSGTPHEKAVWQCVTSTKKGKKLCPHSKGLDEKIIEDAFVESYRLVCRNHTDIIDELIKRMEIVFSDQNSQRRLNKLTSDIQILEQKRCKLIDLCLDEKIDRATYEQKYVELDTSLSALLEEKEQLEHSAQEEIDLGKRLEHFRKVLRTNELLPSFDRSVFESIVDKIIIGTDADSENPNPYKLTFVYKTGFHNTVQNKMHKQIQKKLLKNERGELCSYSAYDTCGMLCITAL

SEQ ID NO: 4013 - protein, 510 aa, unidentified
  source 1..510: note = uncultivated organism
MAQITRIDPQAKQRKEKLRVAAYCRVSSNSADQLNSYTRQINTYKAMIAKKPDWTLVEIFADEGITGTSAEKRTEFLRMIKLCELKQIDLIITKSVSRFARNVKEALEYVRKLKLLGVGVMFEKEGINTCSLADEMLLNTFAAIAQEESTSISQNLRMANLKRMADGSYSNGSAPYGLVFENGTFKVYEPEAAIVREVFERYLSGWSTLKIAENLKARQIPTSSGKFNWTETHICNIIKNEKYVGDTMCQKYYTTDFPFKLKVNKGEKDKYYTVNTHEGIVTREAFDAANELMKRNSAKYASKKERTVHPFSEMFRCAECGGMISRKNSKGRERWCCRNHFNGGDCNAHYIQTYRIEDGFITIINNLRFGSDILGQAERYLIYAIQQFRINDENSQNINSEIAELNGQILMLEQLNAKGYLEAEVYQIRYRDLAKRISELKSKKSLSSLALLEDTLKKLRELKSILFAINDPVTSFDEALFKETVVSGTISADDELTLEFIGGIKITEKI

SEQ ID NO: 4014 - protein, 530 aa, unidentified
  source 1..530: note = uncultivated organism
MKKAVIYTRVSSEEQVKGNSLSEQQLKCRYFIKSKDGDITGVYVDGGRGGETKERPELQRMLEDAKKGIFDAVVVYKIDRLSRSLRDFLEIQDYLANLNVELISVSETYDTSTPQGRLFVNMLGSFAEFEREQIKERINMGQIASMKKGNWKGSPPYGYDVKNKKLAINKKEAEIVKRIFKIFTDNYGSVDRITIKQAQKIVNGWNVPTKRAYDKRFKKTIPNYWHTSSIYSIIKNPIYTGNTFIRKITKNTNPKIDVKKVIRPKSEWIPLSVPQVIADKTFEKCQIVLRKNSEFALRKGKPESETMLNKLVYCSDCGKKFHICNRVSYNQEYKKAVYYCKGIKNPIRERRCYAKSFISTRLEKPLWEKLTEIITRPEVLNKYVNRQLEGETREENQYKTDIQELEQSLQEARLKKERLFNLYISGKNDVVYYKGKEQELTKEEDRFLDKINDLKQSNLLLDGLKRKSLDFGVLYKKLKANLNLINISYKDKCRITKLLVERVETNGEGFVKVFGVIPKEVVLQPSQLVD

SEQ ID NO: 4015 - protein, 583 aa, unidentified
  source 1..583: note = uncultivated organism
MQKMNDRLYRAAIYLRLSQEDGDISVSGKNESNSISTQRDLIHAYLQKQPDIMYVTEFCDDGYTGTNFERPDFEKMMAAVREKKVDCIIVKDLSRFGRDYIESGKYIQKIFPTLGIRFIAINDGYDSANTENSTNDFVLPFKNLINESYCRDISIKSRTNLEVKRRNGEFVNNFAVYGYMRSPDDKHKLIVDEEAAVVVRNIFNWKRDGWNALQIADHLNKLHVPSPMEYKRKCGQNYRTGFKTKTTAQWSAVAVLRILKNAVYTGVLEQGKTTTPNYKVKVRIYKDESKWARVENAHEAIITPAQFELVQQVLEMDTCRAESNNEIYPFSGMIYCADCQSPMLHRAATTSGKKYHYYVCSGNKRDKNSCTTHNIRCDLVEAVVLATVQAHINLAIDIDDAMNQMEALDWEQREVRKINAQISAMELDVEKHSRIKLELYEDLKGGLISKEEYRSFKEEYDLRIQSIEQQISCLASQRNAIEGGLTSAQGWFAQFRQYENIEKLTRNTIVSLIERVEVDDNKDINVKFRHADQFAAALEYLELQKQTQSKITTIKEADRYGKNIPQTANSVAQSVSYCTDKAL

SEQ ID NO: 4016 - protein, 528 aa, unidentified
  source 1..528: note = uncultivated organism
MRNGNGRRPPVHLDSKPATTVRCAIYTRKSTDEGLEQDFNSLDAQREAGEAFIASQRAEGWQLVPERFDDGGFTGGNMERPALKRLLAAIEERRVNCVVVYKVDRLSRSLLDFARLMELFDRCGASFVSVTQQFNTTASLGRLTLNILLSFAQFEREIISERTRDKMCAARKRGKWVGGHPVLGYDIEPGGRRLVVNPEEAHQVRIIFDLYLELGSMVPVLQELERRDWRTKRWTTEAGQVRGGKPFTKSLLYGVLTNAIYTGRVNHKGTFYPGEHDLIVERIRWEQVQELLDRNGRCNGGGSKNKYGALLRGLLFCAPCGTAMVHTYSTRGTKRYRYYVCYRAQQRGWKNCKTKSVAAPAIEGAVLEAIGRLGTDSELVTEVVRQAQTQAAQRREQHGKDVAVAEAALRHLNGAMTALAGNTVLSPTVRLDRLLELQREIQDAEHRLNQLAIEATELDADQVDEADARRMLEAFHPVWENLTTRERVRLIQMLVAKVGYDGQTGKVTVDFRSAGLKELCEGGGANEG

SEQ ID NO: 4017 - protein, 539 aa, unidentified
  source 1..539: note = uncultivated organism
MKAPSVKPVRCAIYTRVSTEHGLDQEFNSLHAQYDAASAYVKSQAHAGWTLIRSRYDDGGYSGGSTDRPDLQKLLDDIRARKIDVIVVYKVDRLTRSLADFSKLVELFDAHGVSFVSVTQQFNTTTSMGRLTLNVLLSFAQFEREVTSERIRDKIAASKRKGLWVGGTLPFGYEMKDGKIAIVEEEAELVRLIFRRYLELGGVNQLMRDLKERNVRTRAKRLATGATRGGIPFGRGALNYVLRNHFYIGEVKYKNEILPGEQPPIMDRALFDAVRQKSLDQWSHRTIVRNKSDHLLTGLMFDDAGHRMVPTHATKAGIRYRYYVSTPCLHGEAKTAPTGSVSRVPAADIEDVVVTFLTEHLAVKQDKSLTGEMHLGDRGALAQLVAGIVVHEDKLIVRLKSYHTDEASDFPDDRSFSIPWRKPPSKRSRQILLPLNVSRSKVRPEQFERRARLVSTIARGRRWLDDVVSGRVTTVTQLCTRDKCSVRQVNMTVSLAFLAPNLVKAAVEGRLPRGIGIERLRDPPTEWSRQFEALGLNPD

SEQ ID NO: 4018 - protein, 580 aa, unidentified
  source 1..580: note = uncultivated organism
MNCYIYTRVSTEVQVDGYSLEAQKERLRREAAHRGMKVVGEYSDEGRSGKNITGRPEFKKMLQDIKSSKDDVDYVLVFKLSRFGRNAADTLNSLQYMEDYGVNLLCVEDGIDSAGASGKLIISVLASVAEIERSNIQEQTMAGRQQKARDGLWNGGFAPYGYKLVPVDGQKSKMLVINDAEAELIKLIYKKYLGGMGVGAVAKWLNENGYTKTVRQNGTVPLISAHFVKGVLDNPVYAGKIAYGRRKTEKIEGTRNEFHVVKQDKDDYKLYDGQHEAIIDEDTWYRVQVKRAKNAFKREKTHSLMHEHILSGLLRCPVCGAPMYGVVNRKKKKGSDEFYTDMWYYICKNRKMVSGHLCDYKKHIRQDEVNTEIMQILKFTIDNSELKDMFEEKMGSRSNMDDLQAEKERIEKEREKLFAKKEKQLRRINDLDIDDDLYDDLMKSYRAHLSEINEQIANTDNLLYNVEMKIDNAQGVNLSAEVYKRIAEEFIQNIDSLTDEQKKILAKMMIEKIEIFTEKQEDGRWVKSVQFKIPMKIGDEIVDTLEIEPLESYQQGDDDSLSNEEHVETVCLMSKVNPDK

SEQ ID NO: 4019 - protein, 521 aa, unidentified
  source 1..521: note = uncultivated organism
MTTITKIEPKKKDTEQKQRVAAYCRVSTNKDDQLESLDAQREHYEQVIKNNDHWTFAGIYYDEGLSAMQMKTRPKLMKMLTDCKQGKIDLVLVKSISRLSRNVTDYLSIIRDLNSRGIGLYFERENINTLTEGDEFILSVLSSLAESELVSISENEKWSIKRRFMNGTYKQSMAPYGYAKKDGELVIDENTAPVVRFIFNEACLGKGVRQITKELNAKKIPSRRTDHWNETTVKGMLQNERYVGEALYQKTFTDDNFKRHTNRGYRDQYLHNDHHPAIVTKEQFDKAQELLALHRKEKGIDAEHINYQERYTFTGKLTCAECGAHLKRRIITGRNREKCVLWTCVTHLSDTKKCSMKGVPEEAIQSAFTTVVNKLIVSKNDLLIPFVKAERECDGDETQGIIKGIERALDENSNKTQKLATLVADGLLDPVKYRQALSELSAERNELNGKKEILVNQLQNKNLGISEGGELLKRIRQKEVTTEFDDALFTACVKTVHVYSREDFGFEFTCGLTFREVVNLK

SEQ ID NO: 4020 - protein, 546 aa, unidentified
  source 1..546: note = uncultivated organism
MKLQSTYDVGVYCRLSRDDNNGNLESMSIANQRQMLIDYVREKGWNLREIYTDDGYSGTNFERPDFKRLLRDIADGKIDCVITKDLSRLGRNYAKVGYYTEEFFVEQGVRFIAVNDSYDSMREEENEIAPFKNVLNEWYPRDISKKVRQVKKSAARQGKFMGSQAPYGYRKSPEDKHILLIDETAAAVMRRIFSEFVGGDSARMISERLNREGVDCPRFYHAKYGGGQTPKPNENNNWGSASILQMLKNQAYIGNMVQGKRQVASFKTKKRRDVDAENWIRVEGTHEPIIDRELWDRAQKRMDTKSHRVQRKHDDHELSLFASVLRCADCGSILAYSTKYLKDSKVGIYRCTRYVNNGKTACSTHYIQEDTLTAFVLNDIKFHARLAAADRERITKQLVTSMDQSQGQETRVLEKQVRETQNRLDTISANVKSLYEDKCLGKLPENIFQKLLAEFITEQSDLEDKAQALKGQLSNRECTESEIGKWLRLISQYMEIRELDRPTVMELIDSITISEGNRENGKRTQEITIQYRFIGNLLSDAKEGIA

SEQ ID NO: 4021 - protein, 662 aa, unidentified
  source 1..662: note = uncultivated organism
MNREGKKCVLYSRVSTEMQVDGFSLEGQLNRMKTFADREEMIIVNKYEDAGKSGKSISGRPAFQAMLSDIKSGAQVDYILVYKLSRFGRNAADILSSLQTVQDYGVNLISVEEGIDSAQASGKLLISVLSAVAEIERENILEQTMNGRREKARQGLWNGGPAPYGYSLKDDSLEINEEEAEVVRIIFDKFANSDLGYNGVAKYLNLQGIGKNRHKESDITVWSARSVQCVLDNPVYAGKIAYGRRTKEKVKGSRDDYRTIRSKDYLLFDGKHQALIDNETWEKTRAKRDSTGVKSPSRVGRERIHLLTGVLRCPKCGSPMYCNRHYWQKKDGTDKDVYYYYCSHNGNPRGYVCDYKAKLKKTDIEPYVIEAIIELVRGESFAKEIESRIGQPVNTQAIDKELANFKKKLLEVESNKANLEEAIDNLPLDAKYRERKLRDMSARLDGLYDAMAELEENIADAELRKTAMEEDAITLDNIYKLLLSFDEIYDIMSEKEKKDLISYLIKEVQIYPNDEPAVMPLKSITLNFPIYIDNKEVNKLLWDKQGSIETLVLLSKKKPDSHIVVDVEFGEGEGKISLKDALKRAEGRKPKSKTTYKDIQNYVEENYGFKVHTAYIAEVKRNLGLPMYDAPNAVEELKRPRSHPTEKMVLAIKETLAHFEII

SEQ ID NO: 4022 - protein, 576 aa, unidentified
  source 1..576: note = uncultivated organism
MRKPDRPKSGQIFRCAIYTRKSSDDGLEQEFNSLDAQREACEAYVTSQRHAGWVALANMYDDGGLSGGTIERPALQQLLSDIKAGKVQIIVVYKVDRLTRSLADFAKIVDVLDAHDASFVSVTQQFNTTTSMGRLTLNMLLSFAQFEREIAGERIRDKIAASKAKGMWMGGNVPLGYDVRERKLAVNEAEASTVRMIFQRYAELGSVALLKAELERAGIVSKRREGAGGELSGGKHFSRGALYLMLQNWLYRGNVAHNEKIYPGQHEAIIEPELWQIVQDKLAASRRERSMAVGAEAPSLLSGMIVDADGARLSPTHAVKKGRRYRYYVSTVLITGSRSEHPKGRRIPAGDIEGLVLDRLRALFASGGEISDAIAPLGLDAATQRVVLDRSAKLAERWAKLASLELREFVHSLVQQIQIGDAQISVWLNRTAIVSSVMPDAAPKPIDCMPAVEPLVLSITASLRRAGKGVRLVVGNGAAKAIDDGLASLIARAIATRNMLLAGRDDSIDAMASRLGVRRDYLAVLVRLSYLSPEIVRAILVGQQPIELTPTRLVALSRNLPHDWQEQRRLLGFAPA

SEQ ID NO: 4023 - protein, 535 aa, unidentified
  source 1..535: note = uncultivated organism
MTRPATKRCAIYTRKSSEEGLDQAFNSLDAQREACAAYITSQAGEGWRPLPGLYDDGGISGATMERPGLQNLLAEIRSGQVDVVVVYKIDRLTRSLADFARMVEVFDTHQVSFVSVTQAFNTTSSMGRLTLNVLLSFAQFEREVTGERIRDKIAASKAKGMWMGGTLPLGYDLPAAGSRALRVNEAEALRVRQIFDRYLTLGSVHRLEAELAQAGIRSKARITAKGRALGGQPFSRGALFHLLRNKTYLGLIVHKDAVHPGQHPGIIEPELFEAVQARLDANARRTSAAAQTRTRLALTGRIFDADGDPMSPTTARGSKGKLYRYYVSAPLQQGKPRQPSDTGIRRVAATQIEARLADVVNRLTGEEHAAPLALVRRIEVHADHVRIRLPADRLTSVRERLGKGEAISRVEGDRTCRQLLIPMRLKPHGGRSWIEPVSDSPRQPDPALVGALRQAHAMMTRDARGLPTLLSAPAGPYRRKLIRLALLAPDIQKQILDGRQPHGLTVSQLFACDLPLSWPAQRAMIQALATTAAKS

SEQ ID NO: 4024 - protein, 566 aa, unidentified
  source 1..566: note = uncultivated organism
MGRPRTRKVVKAAIDTGRPLRALLAVRLSRLSDDTTSPERQLREGKAYIKGRGWTFVDVAEDLDVSARTTRPFDRRQLGDWLRNRADEFDVIVFWRLDRIVRSVADLSEVLNWAKRNGKHLSSVTEEYFDTSTPIGYIIAILIAWVAEMESQATSERTTAMHADFIDDGRYRGGTPSWGYRPVLITDSCWVCTNAGIPCRHVGQKRLEHDPVMAPLAQECARRIIENRERPMVIVKDLTARGILTPDDHYRVSRKDKDGKPRKPKGRPWEVAIFVALLRHPALMGYQVRREVVGVDQQGKKMYGPAEIVRDEQDRPILRAQPILDPVTFGKLQERLDEMNKKRGPYKGTNAVLLGVLKCGVCGQNMYLFRGRSASYYRCRSRSSGRPCGNKSIRADIAERFLFDLLLGEFGDMERCVKVFEPGEDHASELEQLRTTLDDLTNLLTKPTYRSGTTQRERLDRQIELLAQREAALEAMPARPAGYRLEGTGETFGEFWDSLDLHTKNTYLRDNGVTITFRGTSQAPEWGFELANLRDILRSINPSIEVDQYWQQQEHQARRAREAIGA

SEQ ID NO: 4025 - protein, 564 aa, unidentified
  source 1..564: note = uncultivated organism
MLKGADFLDNNRKFAIYSRKSKFTGKGESIGNQVELCRQNIFLSFPNVTDDDILVFEDEGFSGGNTKRPKFQEMLKLCRKKQIKCIVCYRLDRISRNVSDYSALIEELNKLDVSFISINEKFDTSTSMGRAMMYIASVFAQLERETIAERIRDNMIELAKDGRWLGGNPPTGYKSAETIGSITIEGKKRKARMLEIIPTEAETVRLIYKKFLEFNSLTKTETFLIQNNYLTKTGKRFSRFAIKNILTNPVYLIADETAWNYFEMKKADVFSNKSEFNGQHAIMAYNKTSQKTGKTNEIRDIKEWIMAVGKHQGIINSSQWIKVQTILEQNKSKSYRKARSNTALLSGLLYCGNCRSFMRPKLSQRKNKNGDLIYDYLCELKEKSKCEKCSMKRSNGNKLDKIVSDEIKKLTEDKKEFISIIKTELNNLNICEDSYQDNIKSLKKSITDIEIKINALVKSLSQTKETAAEHYILQEINGLDGNKQLLLNQIQEIENVSENNAFTDADLDNLTNILLSFSKSFDYMALNQKRTALRTLIYKIIWDGADIHIYFFDSNKDFIKKAAG

SEQ ID NO: 4026 - protein, 564 aa, unidentified
  source 1..564: note = uncultivated organism
MNQIIDQTYRVAIYLRLSKDDGDFSLSGGGKTESNSIHNQRELLMNYLASHPEMALVGEYKDDGYTGTNFDRPDFQRMMMDIRKGLINCVIVKDLSRFGRDYIDCGKYIEKLFPQLRVRFIAVNDHYDTANQGHADSLLVPFKNLINDSYSRDISIKVRSNLAVKRQQGECISNFVVYGYRKDPENKNRLLIDNYAASIVRDIFRWKIDGYSPNAIAERLNLAGVLSPMEYKQSQGISFETSFKKSSVAEWSHVAVRRILKNEIYTGVMVQGKRTTPNYKTKTQILKDESEWVRISGTHEAIITRTDFELVQRLMQEDTRACSTDTAVHPLSGRLFCADCGAPLVRKTVSSRGKKYIYYICGSYKNDSSSCTQHRIKEELLHSTVLVAIQQQVSLLLDMEQALKKVKSSTWEEAELRKIDQSIEIQEQIVERNNSLRMGVYEDLQAGILSKEEYASLKEDFSARIAAARQAIGQLQSRRSAIQDGLNNQKTWLEQFRQFAEVKELSRKLVVSMIDRVSISNRNEIAVEFCHKDQFQCILEFLEEQKTAAKRKENLTLLPRLEVV

SEQ ID NO: 4027 - protein, 514 aa, unidentified
  source 1..514: note = uncultivated organism
MNKQKRCAIYTRKSTDEGLEQDFNSLDAQRMAAENYIASQKHEGWICLPERYDDGGFSGGNLERPALKKLLEDVEKGKIDIIVVYKVDRLSRSLLDFSRIIEILDKHKASFVSVTQHFNTTDSMGRLTLNILLSFAQFEREIISERTRDKMSMQRKLGKFTGGRPILGYDTVPGGGAITVNPEEAELVRQIFGVYLERRSVLETVRAIRANGWRNKRWKNRDGKMSGGSEFTTSTLYGLLTNKTYTGKLDFNGREYDGEHEAIVAPEIFERVRELLRGNRNAGGGKTGARGPGGGILGTKLKCSHCGTTMFHTYTRRNGKKYNYYVCAGAKQNGFHTCPHPSLSAVEVENFVVNEIAVMAHDRELHREMEEIATEKHAANISALKARMELLKKEHADQDEILRNTASKLSVAELADIQDETARLETEMKLLGRELADLEKHAFEPLPFEWFRKNFTRIWEAVTQPEKSRIVELMIESIVFDAERGTLKINYRDHGIQAVVDHITYSGGNHGAGN

SEQ ID NO: 4028 - protein, 545 aa, unidentified
  source 1..545: note = uncultivated organism
MRKNEEATAVYSRKSKFTGKGESIGNQIELCKEYVRVHDGDAAADSIIVYEDEGFSGGNLNRPAFQKMMEAAKQRKFKAIIVYRLDRISRNVSDFSGLIEELARLDIAFISIKEQFDTSTPMGRAMMYIASVFSQLERETIAERIRDNMHELAKTGRWLGGMTPTGYASESVKSITIEGKQRKACRLKLIPEEAAVIQTIYDLYVETDSLTLTEAALMKQGMKTKNNKYFTRFSIKAILQNPVYMIADEDAYHFFIQHGADLFSEKDAFDNKHGIMAYNRTDQEKGRAAKYLPPSEWIVSVGRHPGLIPGKVWVRIQDSLERNKSKSFRKPRSNEALLTGLLFCSCGERMYPKMSRRKTADDKVVYTYVCKMKERSQRSVCSGKNVNGNTLDAAVVEQIKMLSEDKDTFIAKLEQSRGFYTGSPGNCEQRLFRMQTEKTEMEKKINSLVDSLADMGDSPARAHVIKRMEQMNEEYQSLERRMEELEKANLQQALDDREFDLLYQLIAIFENCMDEMTVEEKRAAIRVLVQKVVWDGADAHVILGV

SEQ ID NO: 4029 - protein, 514 aa, unidentified
  source 1..514: note = uncultivated organism
MAKVATKTRCAVYTRKSSEEGLEQSFNSLHAQREACEAYILSQRHEGWTVIPTPYDDGGFSGGTMDRPALKALLADISAGQVDVVVVYKIDRLTRSLFDFAKIVETLDAHSVSFVSVTQSFNTTTSMGRLTLNVLLSFAQFEREVTGERIRDKFAASKKRGMWMGGNIPLGYDLKDRKLVINKKEAETVRTIFGLYVDLGSVRKVKAEIDRLKLRTKLHTSESGATRGGLPFRIGHLYTILRNHLYAGQIKHKDEIYAGDHEPIIDQILWDKAQAQLASNAAVRRSGKSSKEPSLLAGLLFDGKGNRMTPSHAVKNGKRYRYYISNHLIAGTNKNRETKSGEGLRTAAHEIEGHVITAIALFLADQQRVVAELCPGDAAPGITKAALHQARVIGEALKAEGMPDRYEFIRCLIVRVAIDDASICIELRRSTLIEKLGLPIDAASRDNDGPLQLKMPAELRRLGKEKRLIVAAHMPKSNPDQALRPICALWHPPTRPHPECTCADLKPLLLILSP

SEQ ID NO: 4030 - protein, 557 aa, unidentified
  source 1..557: note = uncultivated organism
MGVNMNIAIYSRKSKYSEKGDSIDNQIQYCKDYVNMHLKQITEPNFILYEDEGFSAATTIRPKFQKLIEDIKTQKIHVLICYRLDRINRNVSDFSKTLELLEENNISFISATENFDTTTPMGKAMIYIASVFAQLERETTAERVRDNMLALSRTGRWLGGLSPLGYKSESIIYMDESLKERQLYKLVPIEKELNKVLLIFIKYMETRSLSQLETYCLANHIKTQKNCDFTKNSLSLLLQNPTYCIADKDAYEYFSDLGCIIPCSVKDFNGQHGILCYNRTKHLTGNRQKKRPSKEWIVAIGKHHGIITGKDFAFTQNLIKHNRTKGTPRKDTSQVALFSGQITCSCCGSRLRIKNIRRNKYKTTFSYACEMKVLSKGSRCQNKNLPGTLFDDKLLAIIRNMLFSLDITDTAIRILLQKEYLIKSEAETVAFQSNALKQELAAINEEIANLLKQLSQNSSPLLAKYILPQLDKLDEKKKRLEEQLHNLTMNNSKADTQLPDVLKSYNILTSLETLLACHDVKNLQTLAGVLIKSIYWDGITASIELNIPCHEQFCIDC

SEQ ID NO: 4031 - protein, 525 aa, unidentified
  source 1..525: note = uncultivated organism
MYLEISNPMDYHVGLYIRLSKEDENEGPSESVNNQRSMLEEFVKQHRLSVFDTYVDDGWSGTNFDRPDFQRLIADIEAKKVNMVITKDLSRLGRDYILTGHYMERYFPEHRVRYISLLDGIDTGVDSTANDITPFRAIMNDMYAKDISKKISSVKHDKQRKGLFIGGKPVYGYKMHPAEKNKIVIDEGAAPTVRRIFAMAQEGISCRQIAARLNGEGVPTPAVYARLPAGRPGASLWSGERIADMLRNETYAGNMVQGRSRKVSYKSKKCRRLAPEDWVVVAGTHEPLISREAFDQVQRLLESRRHTRSRTYDFPLKGLIFCHECGRPLAVVNRKNAKGEDVLYFVCRTYQRFTKAGGCTCHSVKEAAVMEAVAGTLRRLCGQYLLPQTLLPAAREALRQAAGGGQSVKGQMQELQKRLELLNARLERLYGDRLSGLLDEEDFRRLYERYREERAALAQRQQALAQEEAPASGRDAAESLARRFADGAFTSRELLVRLIERVELTEDKELLIAFRFREPENPPAG

SEQ ID NO: 4032 - protein, 562 aa, unidentified
  source 1..562: note = uncultivated organism
MDRTKKIVRCAIYTRKSTEDGLEQEYNSLDAQYDACTAYALSQRHEGWTVTKDRYDDGGFSGGNLERPGLKRLLADIEVGKVDIILLYKIDRLTRSLSDFAKIVEILDRKCASFVSITQSFNTTTSMGRLTLNMLLSFAQFEREVTGERIRDKIYASKRKGIWMGGPVPLGYDVIDRKLVVNKVEAERVRHIMQLYLKVASVPELVDTLAKSSSLTKVQQRKDGGTRGGCHFKRGNLYHLLSNRIYRGMTVHKGEAFEGEHEAIVSEDLWDQVQVKLAKQGQGGSSRKVSARTGVLAGLIYNAEGTPMVLTHTQKGNRRFHYYANRYEALGDTTASRVNARDIEDIVVGQLSQTLALGIQVQSVLLDGTYTADQLHNLISRCRQLGTELTAAKYIRKQAIVRNVLGRVELHEDRVVIKIDNRSLLNVISAEGAIQPSSSDLIIEREAIRLRRGKALRLIIPAASAGEGVSLRDDKLVMLLAESRAIMAQIATNPDKSVPTLAAEQGRCRVRMMKVAKLVCLDPYIVTAIVEGRQPLKLTPSRLLAADLPLAWADQRQLLGVG

SEQ ID NO: 4033 - protein, 580 aa, unidentified
  source 1..580: note = uncultivated organism
MANRLALAANRAPARLRCAIYTRKSSEEGLEQDFNSLDAQREACEAFIASQKREGWALISDLYDDGGFSGATMERPGFQRLLSDVGAGKIDVVVVYKVDRLTRSLSDFAKIVDIFDRHAVSFVSVTQQFNTTSSMGRLTLNILLSFAQFEREVTGERIRDKIAASKKKGMWMGGLPSLGYDVKDRKLVVNGTEAETVRHIFRRYTELKSVRELKDDLECAGVVSKVRTAADGSQYGGQSLSRGALYLMLQNRIYRGEIVHKGNGYTGEHEAIIDEALWDKVQAILSENRVNRANGKTGHEPSLLMGVLFDAQGGRMSPTHANKKGIRYRYYISRSLLGGLPKGRTEGQRIPAAALESLVVRRLRGWLTDPAAILEAVQYAAGDAATQKRLIERAKHVASGEIDALHAFVRSSVVGVHVLMDRIDVTLDQDRICGCLDAAAGQTEPVERARPEANRRATTLSIPARLKRTGKEMRILVSDGSESVVPDAGLVRLLVRANAIREQLLADRSLTLEEIAKSESVVPSYATRLFRLTILAPDIVSAILGGKQPPELTARRLMDDTRLPLDWNEQRRRLGFAPAY

SEQ ID NO: 4034 - protein, 555 aa, unidentified
  source 1..555: note = uncultivated organism
MAKRGASVERPRSAIRCAVYTRKSSEEGLEQAFNSLDAQREACEAYIVSQRHEGWTLVKTAYDDGGYSGGSMDRPALQRLLADVDAGRIDVIVVYKVDRLTRALSDFARIVEILDARNASFVSVTQAFNTTTSMGRLTLNVLLSFAQFEREVTGERIRDKIAASKAKGMWMGGNPPLGYDVKDRALVINEVEASQVRHIMTRYVTLGSIRLLTEELLRDGYRTKRLHGRGGIPFSRGALSHLLGNAIYRGKVVHKGTVHDGQHEAIVDEELWKEVQRKLAERRNNGSPTRSPKRSLLAGLIHDGEGRRMTPSHTNKGGKRYRYYVTHPSALIGTGAVAWRISASEVERIVIDRLKGWLVDRRAMIDIAGVSAVATALSKAAQTAADMDRPDRRAAIIAMLLTQIDIMEDSIRVTIDPSGLKQMLGLERLVHDHPIQLISRATRVRQGKDVRMIVGDDQDRSTGTINKPLVALIAEALELHQALLAAPHHRVTSLADAQGKCRKRSAQLLRIAMLAPDIIAHCIAGTQPVSLTTKRLLNIDLPICWDQQRSLLGIA

SEQ ID NO: 4035 - protein, 555 aa, unidentified
  source 1..555: note = uncultivated organism
MKSDRQATKTQAQAAGLRAALYMRVSTGRQAEHDLSIPDQRQQLQSWCRGHGYAVSTEFVEAGASATDDRRPVFQRMIERACDGEKAFDVIVVHSYSRFFREAFEQEFYLRKLAKHNVKVVSITQPVGDESEPVHAMMRKVIALFDEYQSRENAKHVIRSMKENARQGFWNGATVPLGYRLVEVERRGTKIKKKLDVDPVEAEYIRLIYKLYLYGDGTSGALGIKEVVKWLNRNGYRTRRGQHFGVAAVHKILTNTIYIGECRFNVISSRTRQRKPDDEVVKVSVPAIIESHVFEQIKAQLRARSPRVVAPRLTTGPILLTGLAVCATCGGAMTLRTGTSSSGAVHRYYACSTCARKGRTACKGRSIRMDRLDGLVTDGLVERLLHPERLAVMLSSLKARRAEKAESENKRVMTLQREMMDAEDRLKRLYRLVEDGMTDLDDVLKERLDRLKADRDRAKAALDAAKSLHGAAIRIDPALIESFGRAMRENLTTGSTPFRKAYLRSLIDVIEVDDTQIRIKGSKEVLERAVLASRSAAEPRSQMSTKWRARRDSNS

SEQ ID NO: 4036 - protein, 549 aa, unidentified
  source 1..549: note = uncultivated organism
MKRVLCLYRVSTKGQVDPKDDIPLQRRECQDFIDKQDDWIFFEERLEKGVSGYKTATGKRDAIIEIRNMAEQKMFDVLLVFMFDRLGRREDETPFLVQWFIEQGIEVWSTREGQQRLDNRVDKLMNFMRYWQAGGESEKISMRVKASHTQMTMDGIWRGGPRPFGYKMVHKGRLGKKNRQLLDPIIDETEGPMVQKIFKMSCNEGMGTLRIANYMNEAYPHLDKVWTAQTVRSMLRNPLYTGRLHMNDTMSEPIETLRLISDSDFHFAQLAMKRRIQHRYAEQRKLENDLMPIDATSKTSVYGATLLSGIAYCAHCGHKLVGSYCTKQRADAAYHRPIYRCYNGSVKAKNCAGQTVYSARKIESAVLQIVHQFFNDMQQSVDLVWRERARQQFRNKQNAQSRIAQAELEKLQKQQITLRQEVMKSLQGESAFETDLLRSMLDENKSALVQAESKLIACQQEKETEDARLQYLSEQYRSITDWAKEFDHADNDTRKMILARLIERIEVGRDYHLTIKFFVTIEEFNLSHLPDQPQLLSSESDTGIQAAAV

SEQ ID NO: 4037 - protein, 543 aa, unidentified
  source 1..543: note = uncultivated organism
MPETTCAIYTRKSTEEGLEQDFNSLDAQREACAAYIASQRHEGWIASPENYDDGGISGGTMNRPALQRLFEDIRAGKVNTIIVYKIDRLTRSLADFAKMVELFDQHKVTFVSVTQQFNTTTSMGRLTLNVLLSFAQFEREVTGERIRDKIAASKAKGMWMGGTVPLGYRVEDRKLIPNRAEAEVIRHIFEKYIELESVHRLRDYLSQNNIKTRSGGHFFTGMLANMLINPIYIGRVRHKDKLHIGNHKPIINIDLWEKVQGLRKESHKRYHHKHRAQERSLLSGKLWDAEGHPMSPVHAQKTGRRYRYYVSQGLVQGRALAEGTIARIPAGELEEAVSQSVQQIFQNDDLLSQLFPIFSLLNRQRAQALAAGWNQISPLQKHIIIRTVLAKVSLHSEHLHLSLSRAGVMAGLEEKQHDTHPADDALSHLIPIKLKPVEGGATYIIGSVEPPRAPNKELVRAIARACIGNRLLLTGEVPNQTELAKHLKIDRRTLVRILPLAWLAPTIVQKVLSGTQPPHLSILNLCQAAEAPDWQTQHHILGL

SEQ ID NO: 4038 - protein, 538 aa, unidentified
  source 1..538: note = uncultivated organism
MKEENYDAGVYTRLSHDDAREGESISIENQREMLTEYVRAQGWNLAGVYTDDGISGTTFDRPGLNQMLEDVRQGKVNLVIVKDLSRFGRDYIEVGKYMDIIFPAYGCRFIALNDHVDTINKGDEMVTIFKNVFNDFYARDTSNKIKAVKQSTFRAGKYIGAYAPYGYIKDPGDKHRFLIDEPAAAVVRRIFELRGSGMGMRRIAKILNEENVTPPRDYYYQCLGRPNPYRQNGKWNDVTVKTILRNEAYIGNMVQNKRGTLSYKNHKAIYKPEKDWVRIEGTHEPIITPDAWALAREIDSRNTHPRQTRQGEVSLFYGMLVCMDCGFSMRRQTGRRRDKSGTEHLHGVYMCGSYSRSGHTACSTHFISQDALEKLVLADIQEKAGQAALDEDRLAETLAKRLTEQGDREAEGARKTARRLEKRLGQLDVLIKKAFEEKVLGSMPESLCSELMDRYRDEKAEKSAELQKIQEQLDKLQGIHDSAKTFASTISQYSGIRTLEREPLLRLVDKIEVGERHIVDGRKEREIRIHYKFVGYIG

SEQ ID NO: 4039 - protein, 579 aa, unidentified
  source 1..579: note = uncultivated organism
MPTVRKLTGRNAIDLGFKRIVTPPAQPTPMETASEPQEISAHKTVIIPVDGKKRIHKIDAVPAAQTQQQKLRVCSYSRTSTAEEIQRSSIESQQRHFEQMIAAHDEWEFAGSYVEEGVTGTKAEVRPELQRMLKDCRDGKVDKVLTKSISRFARNTTDCLEMVRELSGLGVTIYFERENIDTGTMGSDFILTLLSAYASAESASISGNIKLGIHHRFQSGTYNQPCVPFGYARTPDGVVIVPAEAEVVKEIFSLALTGLGTANIARVLNDRGIPTAEGKQWVASTVQTILHNPYYAGDVLLQKYYNDDQYKSHKNKGERDQFFVPDHHEPIISHEEFENAEALIAQRAKESSASNRAAEGHYPFQSKLFCAECGSPLHRVKTKTSITHVCDAFARNVGGCERGTRVLEDDVKNAFLTVLNKLAFSQKLGPGNRIIDLYINSIRERERIKNREHLTEIDAELETIRGQMETIGASIRFKPGDRAKLNGLKARAEALKREKMALETKPSDTAKAERLRSFVHSFGSDGETGFPDTAFTEFIKRAVVKGGEYIEFEFSCGITLRQSIEQPAVQDAIPTAVAS

SEQ ID NO: 4040 - protein, 548 aa, unidentified
  source 1..548: note = uncultivated organism
MAAPAPARPRPRGKRRRPGAFLGDMPVGVRRIAICLRRSTDDEHQPFSISAQEAALLNYIGSQAGWTLVAKYSDDASGATTGRPDLQRALTAARAGRFDVLLVVRVDRFSRRLSDLLALLAELDDAGVAFVSATEPFDTSTSIGRMLVQLLGVFAEFERETIIDRVTKGMAAKAAKGKWPGGRRPYGYYADRDTQKLIPHPEEAPHLKEIFRLYAGQRFGTRAIAAELNRRGVRSRTGKSWSGHAIARILANPAYAGDIARGDVYVEDAHEALIDRQTWQRAASIAAERAGPQTQRAASNSDYDLTGKITCPGCGHKYIGTSATGRSRTYRYYTCFSRVRYGTHGCDAARLPADDTDTAVLRALAGFYAQAPGLITDAVTRAQARHRDGHADRHAEAGAVLAQIKNKQAAIDRYFTAFENGTMDDTTAGPRITALQAEIDQLQARHREITDTIGDQPAAPPPHTIERLGTYLHDILDAGTPAERKAAVEALIAEIRITGEGIIPVFRIPGPRSPIPGETSTTSTSAVPVRAMVRSVGRVGLEPTTGGL

SEQ ID NO: 4041 - protein, 515 aa, unidentified
  source 1..515: note = uncultivated organism
MANVTVIQPTIIEEKMNKIRIAAYCRVSSDSADQLNSFMAQMSYYSEKFNCSENDELVDIYADEGLTGTKIDKREEFKRMLCDCRKGKIDKIITKSISRFSRNTKDCLVTLRELKELGISVFFEKEQIDTGMMTSEMMVAMMGSMAQEESISISNNVGWGIKKRMEDGSFIASSVPYGYILENGILKIHDEQAKDVKKIFKLFLSGLGAYAIAQQLNAEGRRKEGLIWNKNTIRYILSNEKYIGDCLFQKWYTPNVLPFRCVENKGIADKYYVQNHHEQIISHDDFNNVQKVLNQRGQSRIGKENREYSFSNKIYCGNCNTLFKRKKRKNETYWVCRNHDDKAENCPSKQVSESILKSVFINFYNKLKSNYKIILIPVLNQLGELKLKKFNGNTKILEINKEIAELKEQSHVLSRLQRKGFIDSALFIEQSTEINGKIDKLSKELRQITRLEQEDEVIDSVKMLINLMEKDNDLMQEFNENIFESIVEKMILKSESELEFQLLGGLKFTERIGVQ

SEQ ID NO: 4042 - protein, 534 aa, unidentified
  source 1..534: note = uncultivated organism
MEKVGVYCRLSDEDRFKKNKNDDSESIANQKSMLLKYAIEQGWEVIDIYSDDDFSGAGTYRPDFERMIKDCESGRINIVLCKTQSRFSRDMEIIEKYLHNKFVEWGVRFVSIVDNADTNIQSNKKQRQINGLVNEWYLEDLSDNIRRSLKNKREDGMWMGSFAPYGYLKYPNDKHKLIIDENVAYVVKEIFDKYNSGLGYYKICESLNERGILPPSLYKKSIGSNFVCCNFDYETTGIWTPDTVAKMLRNEVYIGNLVQGKRTNISYKNHKAKQVPKKDWCRTENAHEPIIDIETWGAVQRRLGKHEKPMKNGKIHMLSQKVYCEECGRIFMRNQCNIKCAGGVMEKREYLQCKGNKKYHTCDNNRSIRLDIIQEFVLNAINDLLDKCNKTKLKEEVAKEINKDNKQETKITNLNKEKANIEKKLNEKKLYFKNLYEDKLKGILTDDEFKMLREDYSKDVENYQTRLDEIVQELDNMEVRKENSVDIESILKKYKNIKELNKTIIDEFIEKIYIGTLNKETNTREIRIEWNLDL

SEQ ID NO: 4043 - protein, 526 aa, unidentified
  source 1..526: note = uncultivated organism
MTRQRAASVSPLPAVKRCAIYTRKSTSVGLDQDFNSLDAQREACALYVRNQVCIGWQLSSEAYDDGGFTGANLERPAFARLMQDVEGGKIDVVVVYKVDRLSRSLLDFAQAMDRFNRAGAAFVSVTQNFSTADAMGRLTLNMLMSFAEFEREMISERTRDKIAASRRKGKWTGGAPPLGYDVVDRKLVVNPVEAALVRQIYELYVGTHSAVAVATALNAEHRTTKLRVSRSGNSRGARAWDKNAVLKVLSSPIPAGFMPSAGQLYGGEHEAIIERCLYDRVQLQLAERSGPRSIRYGSNPDYLLTGLLRCARCGRSFTPASNRRGEKIYRYYRCSTRDKLGKGACASAPLPAAAIEGFVVQRIREVLANGTLVPAVAKAAQERLRRERGPLDAERAELPTRIAALSTEGKRLIETASNLTGPARRLFDAKLQEVGEQLGRLEARYVEVQRRLALLSDTALETQWVARCLADFDKVWDALSPGNRVRMVRAIVERVEVDEPSGDVRAFLTDLGADVEKAARAIEVTA

SEQ ID NO: 4044 - protein, 555 aa, unidentified
  source 1..555: note = uncultivated organism
MNQGLPKKVAIYARVSTEEQAEHGYSIDAQLDTLRKYCELYGGEIVDEYVDRGVSGKSIKGRYEIQRLLKDAEENKFNEVIVWKFNRMARKSIDLLHIVDLLEKNNISFRSFTENFETSTPMGRFALQMMGAVGELERNTIVDNVKMGHRQRAKMGHHNGKVPLGYKVIAGTGSSRESKSIVVIAEEEAVIVRHIFEQYASGHGLKTIANELNHKGHRTQTGKPFSTTAIRDLLDNPMFVGKIRYNRYENWAERRRKGKNKEPILVEGHHPPIISQELWDKVQLLREKKATLPKKRFEGEYLLTGLIRCPECGAAMTASRTINRSKDGEKITRMYYSCGRFRSQGSAVCHANSVRKVEAEQAVTERIRQAVVNPKILQRVVHNVNERRSGRIIPLRDELSVVQTRITNLEDKKRKYLELYEIDDIDRDMFSERLSALNKDLDTELTRRSKLQLELRDDQADPVSYELVRSLMTKFDALLRYSPFQQRKTLLHLIVKRITLDDSKRVSCVELAFNEETEKHFLSAAPSAELIAEGAFPLPGKGKGLKLKQKLIINL

SEQ ID NO: 4045 - protein, 513 aa, unidentified
  source 1..513: note = uncultivated organism
MSEKPRAPVRVSFYTRISTDEDHQKYSLGAQKERLEAFCKAQWGDDWRLHKVYRDTESGTHMNRPGLEEMLFDAEAQAFNMLLVFRVDRLSRKVRELALMVDELTKYGVALKSITEPFDTANAAGKMMLQMLGVFAEFEHATIVERTKVGMEKKAKSGKFVGGYVPYGYQLDPEKGLVVHEEEALIVRKMFKMYALGKEGTSAICKQLNGAGHRNRNGRKWGRRVVLYMLRNPVYIGKIRWLEILHEGTHDPLVSEVLFEKARNVLEERNEDLKGRQMRHGDDRLLTGVIKCAKCGSRMFGGGGHKNGVSVPYYVCSKRFNDHDCEQDYVRSDLLDGAIIEDVKGMFRDEQFMSRVWEEANRQLTAERPAIEKEIDSNFAEATKAQAAMDRYFKAFEAGKLDPALCNEKVRDLRTRLEELEGERRNLDVRRERLELPAIDKEMLATLVDKFEHVMAEGTNPQKKDLLRRLVKKILVHDRRTLEVWYALPNHQRFESCNNWLPKRDRTHSTVLA

SEQ ID NO: 4046 - protein, 589 aa, unidentified
  source 1..589: note = uncultivated organism
MKKEVRTRKVAIYSRKSKFTGKGESTENQLKVCREYLHVQFPKISDDDVLEFEDEGFSGAHTKRPQFQKMMDACNNKEIDMIICYRLDRISRKTLDFLEMMESFDKLGISFMSVRDRYDTTSPAGRAMMGMTSIFAQMEREIIAERIRDNMYELAKTGRWLGGNPPTGYSSKPIQKVDDNGKNRTAYKLDIIEEEARKIKTIFQKFLEVNSLSATQTYLLKSVIKSKKGVNYNPTTIKAILKNPVYMIADETAWNYLVEQEIEVFAEKADFDGKHGLIAYRKTKQSTGKSHEYLDMTDWIIAIGKHQGIISGADWVKAQTLLEQNRSKSFHKPKSNVALLSGILLCGDCGSFMRPKLSQRKNDKGEFKYAYLCETKERSRKELCDMNRPDGNALDEAVIDEIKKQSTDPLVFRKKMEQGKKEFNSANADFTDETASLTKEIDRLDTQIKKLVASLAEAEGSVTFEYVDKQIKELDAKKKTAEIRIEEIKCITKQYTYPEEEIEIMTDMLSSFAKACDTMTVEQKRAFLRLFVRNVVYNHDGSIHIYFFGCDDGFGLPNNGELSDNNAENNKASDSKFEAEAIVLQMKYL

SEQ ID NO: 4047 - protein, 606 aa, unidentified
  source 1..606: note = uncultivated organism
MEKKFAIYSRKSKFTGKGESIGNQIELCRQYIEAHNGIDEANTALIYEDEGISGATLNRPNFIEMMKEARTGRISCIICYRLDRISRNIGDFAQLIEELNHMGINFISIKEQFDTSSPMGRAMMYIASVFSQLERETIAERIRDNMHELAKTGRWLGGVTPTGYESESIQRVTIDGKVRKACKLKAIPAEAQIIQLIFEKFIETHSLTKTEAYLIQNGYTTKNGKMFTRFTIKNILINPVYMIADQDAYQYLIDSDVDLFSDESDFNGVNGIMCYNRTEQKSGRANRIRPMDEWIVSVGKHEGFISGFTWIRIQKLLETNKSKTYRKPRSHKALLSGLLICGGCGEYMRPKLANRFTHDGEQIYTYMCNLKERSRSHSCKIKNINGNVLDKAAIEEIKKISVDNSQFMKVLEKGQRALENKRIEFDRNLQQLQREIKEIENEIVNLVTSLSKSAGTIAEEYIIQEIDKRDQKKKSIQSRIDEFIALNSKRYLDEMDFDLTRNLLVNFKSTFDDMTIEQRRSAVRTFVEKIVWDGENVHIYFFGSNDNNGGDGSSITPPENDGRFAQNNNGNSGLNGNFDVPLGENSKRDIDVFPQSKEIQPGHVYK

SEQ ID NO: 4048 - protein, 545 aa, unidentified
  source 1..545: note = uncultivated organism
MNQINNSKKIYHAAIYVRLSKEDGDVATAGKRESNSISNQKDLIKNFLKDKKDIVVVSERVDDGYSGSNFERPAFQMMLEDIKKGIVDCVVVKDLSRFGREYIDAGKYIERLFPALGVRFIAVNDHYDSLEGKSQADEIVIPFKNLINDAYCRDISIKIRSQKDSDNKNKLVIDVYATGIVKEIYRMKLSGMSQTAIANALNKQGVLSPMEYKHSLGIRIQDNFKTHEQAEWSAMSVKRILENEVYTGTLVQGKRTTPNHKVKKLMKKPETDWVRIEKNHEAIVSEREFALVQRLLGIDTRTSPNEEKVYPLSGLVVCGDCGAMMIKRDVPAGGKVYAYYICSRHAVTKACAAHRIPMGKLEETVLELVKIHIENILDMKKIMDFIHEVPFQELDIKELEIRKEAKEKEAVRCRELRDYLYEDFREGIISKEDYKELHDGYTEKRKKAEEAVRSIDQQISEVLESKSDKYHWLDYFAEHQNIQELTRTVAVELIDQILVYDKKHIEVRFNFDDCYQSLLRQIQSVGCDVSTGMDGRIEIQKREVV

SEQ ID NO: 4049 - protein, 516 aa, unidentified
  source 1..516: note = uncultivated organism
MAEVQVIPPKAARPDTLRVAAYCRVSSDSADQLHSYAAQIRAYTQAINAHDGWDLVDIYADEGLTGTRMDKREDFNRLMADCRKGKIDKIVVKSISRFARNTRDCLTTLRELSSLGVTVKFEKENIDTGTLTSELMVSVSASLAQEESISISKNQRMSYQRRMERGEFITCSAPFGYRLIDGKRLEIEEKGAEIIKWIFASYLEGHSTDWIAETLNEDGLLPVHKGKKWHRRTIQKILTNEKYVGDTLCQKTYTTNTFPFNRETNHGEADQYYVECTHPPIISNEDFEKVQDLLKRRTFTSGYSICENNPLAKKIICGQCGTLYRRRVTKSGRVTWVCRKHDQKADYCSNGRISEDSIHTAFLRMYHKLRTYDGIVLAPVLKQVDTLSDTLHHGNPAMLAINTAIAAASEQSYHLTKLHTAGLLDKAALSTKQAELNAKLTDLRRERRKLLCNEDMDEQADALRLTIDTIRNGPETLSSFDEALFSKLVEGIVVDTQSTIRFQLYGGFKFQETLEA

SEQ ID NO: 4050 - protein, 542 aa, unidentified
  source 1..542: note = uncultivated organism
MKELKNYNACIYARLSRDDGDKLESDSITNQKALIRDFLSKHPEIRVVSEKTDDGFSGVNFDRPAFQEMMDEIRSGKVNCVVVKDLSRFGRNYIEAGNYIERVFPFMGVRFIAINDSYDSLDKNQSDSLIIPFKNLINDAYCKDISVKIRSQLEIKRKNGQFTGAFAVYGYLKDEDDHNKLVVDAYASEVVRAIYKWKLKGMSQGRIADRLNMQGVLCPMEYKLSLGMKVQTNFKVHKKALWSPVSVTRILTNEIYTGVLIQGKSGTPNYKVKKVMQKDEQDWIRVEDSHVAIIAREDFETIQRIMQKDIRIAPLEEAVYPFSGYLKCADCGQNMVRKHYRAGEREYTYFICSTHKAKKGCSTHTIDEASLMESVLGAIRSQVELVMEIERVMEIVESLPENQQNIFNFDAQIVKLKEEIERNKSFKLKLYENLQEGMIGQDEYFLFKKSYADKIEAAETAIRAIEMEREQVVDRNRDRLSWIDVFKKYQNVEKIDRGIVVDLIEQIRVSEGKCVEVVFRYGDECRRIIESLSDEMKMQAAV

SEQ ID NO: 4051 - protein, 523 aa, unidentified
  source 1..523: note = uncultivated organism
MATPRRATGVAATFDLKAYQHVKGYVRVSTDEQAEEGTSIQAQIKQIKHFAAAFGVDLVDDDLYVDDGWSGKDLHRPAMDRLRTDARAGLADCVLVAKLDRFSRNLRDTVNLCLGEWQDDAPDGRRVALKSVSEPFDTHSDFGRMVFGLLAMFAEFERRRIADRTWSGKAARAEAGRNAGHRAPYGYALAPAPDGRGSFFRPVPEEAAMVEYICRLYLQGYGDQQIAVRLNEEGRRFRGGRLWQSQQISRIVTNPIIAGVYAYGRTAAEPHGGSRRLPEAEWIRCAGPGAPEPIISPDTFARIRRLRAGRWTGGRTSSGSSLLSGLLRCGRCGSACALKLSGPGGRYRYYRCLQRKQSGPAACDQPQIRADEVEQQVLAAVQGVLLASGPALADIVGHRLRVRSEGLQRRAQELGVELQGVAELRARYYGWLETGQMRPEAVQARLDELAAREMALSGTIRQVSAEQESPELPRSFADGWDRLAPYERKRLLAALFSHIEVDGLDLVMTWAHNAHTVQFSGPE

SEQ ID NO: 4052 - protein, 502 aa, unidentified
  source 1..502: note = uncultivated organism
MQNSPIKHCAVYTRKSSEEGLEQEFNSLDAQSEACLAYITSQKIEGWRAIKEEYNDGGYSGGNMNRPALNKLLADIKAGKVNIVVVYKIDRLTRSLMDFSKLVEVFDAHGVTFVSVTQSFNTTTSMGRLTLNVLLSFAQFEREVTGERIRDKIAASKKKGMWMGGVPPVGYEIKNYQLIPNKSEIKTTQHIFNRYLELGSVGALKQELDSNNIKSPIRVSQNNNSYGGANFSRGALYAILKNPAYIGKVAHKDKTYEGTHEAIIPIEIWQEVQVKLKEQSVFRTEITKGHHILQGLLYDFEGTPYSPTFTKKGNKQYRYYISQNLLQYKDHPNGLIARLPSHEIESIIEKALRSNIDKLGNGENFKYILEHQSDIPTYDLIRACLKKAVVYPDKILLQINPKNFKKLVEGYLKVSINDLNDAFEITLPYKAQRASKGAIIIEPECGKDALDLPSDKLKKLVQGIVWRDEHFKGRSMIDIARKENHGINYVRECIYLSLELAS

SEQ ID NO: 4053 - protein, 554 aa, unidentified
  source 1..554: note = uncultivated organism
MKKQFQPLTPAALYARVSSDRQDVDLSVAAQLRALREYAKSNGYSVAREYVDEAESGRIADRPQFRNMIDEGGKAKAPFEVILVWKFSRFTRKREHAVAFKSMLRRKGIRVVSITEHADDSPTGKLMEAIIESVDEFYSENLAEEVKRGMREAASRGFFLASRAPFGYNRVKVSDGVKDRPTLEIDPVAAPIVKEIFESSRRGNGLMEICKELNGRGITNRGRRWQKNVVHYLLTNEAYTGAAVWGVKSKNENAGEPVRVENAWPALVSRETFEAVQQALHERAPAKQRPGRVGSQYLLSGLLRCGVCGKPYSAQGAKSGQFAYYVCASLFREGAGACSNGKYLNASKVEDLVIEKVRERILTEETITELVTLVAEEIDNLAGEVNGRLTAINSELSDVDTRLENLYQALETKQLPIEALSPRILALKSRQDQLVAAREGAEAQLEQRRAELPTSKEIKGYVSDFREFLMEGTFPERKALIRNFVQGIEIVEDEAVLTYTIPMPQDGVTSESASVLDFVQSGPPISPFASCYFVAPLPDYKAKACQSLVATVCA

SEQ ID NO: 4054 - protein, 587 aa, unidentified
  source 1..587: note = uncultivated organism
MEEKKRKKAIYSRKSKYTGKGESIENQIETCKDYLKRYMNINISDDDIVVFNDEGFTGANTDRPQFQEMLKSIRNNEIDTVICYRLDRISRSVVDFVNLYEEWQQYDVNFVSVKEQFDTSTPMGKAMLMISIVFAQLERDTIAERIRDNMYELAKTGRWLGGNVPLGFMSEKMEKLNINGKKTNLFKLVPVDDEISIINTIFSKFLEYKSQTKVESYLIQNDFKTKRNCDFSRWGVKNILRNPVYAIADKDVLDYFLENDVEVYNDVDDFDGQHGIIGYCKTEKTKTGRVKYKDLQDWIVAIGEHKGIISGKDWVEVQNILKMNEDKNYRKPIKNNAILVGVLRCQHCNSLMRAKLKQNKTSNGDLRFDYICDLKMKSKGEKCSCKNINGNEADNLVIRGMKELANPTSEFYKAIEKIVNDKDYDINNKKDELQTLERNYSKNESEINSLVNRLALVDDEVFDVVQAKIKDLKVRNKEIVANIQKIKQEQPTQIINDQKTANIVFEILTKYMSRFDKLDIISKRNLIKLFVGNMETDGKKIYMDLIGSRNHTITTKPQLFDNDDNEKQDELSATHNGKIVLSSESGE

SEQ ID NO: 4055 - protein, 548 aa, unidentified
  source 1..548: note = uncultivated organism
MTQYKAAAYLRLSYITVRGEKTGQAREPGYQESDSIGNQRKLIEDFVANQPDIELVSEQMDDGYSGILFDRPAFLAMMDDVKTGKINCIIVKDISRLGREHVETSRYLCRILPAYGVRFIAINDNIDTAHEQSGDQLLIAIKTMTNDSVCRNSSVSTRSALQAKRKSGAYVGACPIYGYQKDPENRNHLVVDEYASLVVQDIYRRRVEGTSAYKIAEELNRQGVLSPLAYKVSRGLPHPTKGFADSPDAKWSPTTIIRILQDETYTGVLIQGKTTTPNYKLKNTVQKPVKDWARVENTHQPIISKQDFELVQQLARLDTRAAPEKDSVYMFSGLLICGCCGRRMTRKTNIYKGQRYIYYHCPAGKSQGCQHPARIREDDLVQCVLSCLQTHIKSVVSLSELLNSISKEQINHDLVAKYTTELADNSRQLEEAGRMKATLYGNLVNGILDKKEYRNLMDYYSAQEEQVQAAIALLREKLAQVQDDSSSRLKWARHFEQFSSMTELDRRAVVTLIQSVMVRNKKEIDVSFRFQDEYENTLKMLSRYKEVS

SEQ ID NO: 4056 - protein, 551 aa, unidentified
  source 1..551: note = uncultivated organism
MNDKTFYAAMYLRLSRDDQEKQAGEKSESGSIAGQRELIRSFIREQPDMELYDSYVDDGWSGGNFDRPEFKRMMEDVEAGRVNCVVVKDLSRFGRDYIEAGRYIQKTFPALGVRFIALTDHYDSFLAGTGESSIVLPVKNFINDSYCRDISTKVKSGLEAKRRNGECISPFAVYGYKKDENNKNRLVVDEYAAGIVKEIFEWKISGMAVSAIADRLNQNGILSPREYKNSMGQKYKSGFSGPGHSKWGSASVKRILTSEVYLGHLVQGKSRKINYKVKKTVEKPEAEWDRVENTHEPVISEDDFQIVKELLKTDSRKSPQMGQFGFFTGLLFCGDCGEQMIRRVVRYKGKQKVYYICSTKNRGEGCSRHSIEESVLKMLVENTVKRHANAFLEEKRLFDRAKGQEADFAAVSGYDMEIRRLKQEQDKYYALCAGLYEDLRAGVVTKEEFERLHAGFQQKAGELGKAQEKQENLIRDMFRKGVLSAGRLKAFQDCVELKEIDRHTLSSLVRRISIYEGRRVEIEFYFMDQYGVMLGLNGRQEQADKNSERGA

SEQ ID NO: 4057 - protein, 543 aa, unidentified
  source 1..543: note = uncultivated organism
MKATSVKPVRCAIYTRVSTDQGLDQEFNSLDAQYDASSAHIESQAHAGWTLVKARYDDGGYSGGSTDRPDLQRLLDDIRARKIDVIVVYKVDRLTRSLADFAKLVELFDAHGVSFVSVTQQFNTTTSMGRLTLNVLLSFAQFEREVTSERIRDKIAASKRKGLWVGGPLPLGYEMKDGKIAVVASEAEQVKLIYRRYLELSGVNALVRDLKERNIRTKARLLATGATRGGIPFERGTLFYLPRNRFYVGEVTYKGDVLPGEQTPIMERALFDAVQQKLTDQWTTRSSVRNANDHLLTGLLFDDAGHRMASTHATKAGIRYRYYVSLPCLHGEAKTAKVGSVTRVPAPDIEEAVVKSLNEHRTSENGTPVSAITGHSAIAEMVDRIDVHKDMLTVRLRSRENPGATNLPDGIEPTGDRHLSIPWQKPPSKRFRQILLPHGSSRKDIRPERPERRLRLVSAIARGRRWLDEMISGSVTDAEQIAMRERCSVRHVNMTISLAFLAPKLVRAAVEGRLPRGINIERLRDAPAEWSRQFEALGLNPQQ

SEQ ID NO: 4058 - protein, 507 aa, unidentified
  source 1..507: note = uncultivated organism
MEAIYARQSLDKKDSLSIETQIELCKLESTGDTKTYIDRGFSGKNTNRPQFTKMMEDVEKGLVSKVIVYKLDRLSRSLLDFSSMIDTFKRHGVAFLSTREKFDTGTPIGNAMLSIIMVFAQLERETIQVRVQDSYNARSEKGAYDATAPYGYKKAKALVLGKPVSTLEIELNTSVIVKEMFKTYAFTEQSLGAMAKALNRKQVPSPNGVEWDSGKLSRIMANPIYVKADADIYRFYESTGVKLTNPIDDYLGTNGCVTYGAWDRKRRKFSQWDSLALSIGLHPGIIEPDVFLRCQRKLINNVQVGNEGKGKHTWLTGLLKCGYCGHAMRVVASGRCIPRISCSGKTNYGTCDEYERRWLVSEIETFIETELFRMVRQKQELAAKIEHEEDIRDKRLKIQIAKVEQKINNLVDGLADASGVTMKYINEKITALEEEKRRLLQERQENRASNMTEQQICQFGDILVLWDQMSIEQKREIGKLLIERIMVYNDKAEIIWKYNFMEQKASA

SEQ ID NO: 4059 - protein, 561 aa, unidentified
  source 1..561: note = uncultivated organism
MKTINKIYHAAIYVRLSKEDGDVSNTAKTESNSISNQKSLVREFLKNHKDIVIEKEYVDDGYSGSNFERPAFQMMLEDIKKGIIDCVCTKDLSRFGREYIDSGMYIERVFPALGVRFIAVNDHYDSLNSSNKSDEIVIPFKNLLNDAYCRDISVKIRSHLEIKRKQGQYIGNYVSYGYRKCDDDKHKIEIDTYAANVVKDIFRMKLQGMSQDAIACKLNENGILCPADYKKSEGSNYQTSFKIKDKSGWSSTTVRRILTNEIYIGNLVQGKHTTPNHKVKKMYVKDESEWVRIEKNHEAIVSERDFELVQRLLAMDTRTAPGNNEVYNLSGLVICADCGVPMVRKNSISGGRHYSYYMCATNKYSKNCSSHRISVNELDNAVLELLKVHISNILEIDKIIELIGIIPFQQIDMKKLEERKKVLEVEVERCTELRSMLYSDMKEGVISKSDYIELHAAYENKRKDAQIAIHKIELEMESILGKNNDSFKWLEYFKENRNIKELTRSIAVSLIREIKVYDKKNIEVTFDFDNPYKTCLKNIENMGYKIDVDLSGKLNIEKEAV

SEQ ID NO: 4060 - protein, 538 aa, unidentified
  source 1..538: note = uncultivated organism
MEIYKAIKYIRLSYTEDKTVESDSVGNQRRMIDDFIAKHPEIEAVAEKIDDGYSGVLFDRPAFTEMIEMVKRGEANCIIVKDLSRLGRESIETGRYIRRFFPAYNVRFIAINDHFDTLQEDGDDLTVSVKNIMNEAYSRDISIKTRSALEAKRKNGDYVGAFPIYGYIKTGHQHKKLQIDPFAANVVKEIFRKRLEGYSALHIAEELNQMGVLSPMAYKKAEGQPYAKGGYGDQKDCKWSATTVLRILQDETYTGTLVQGRESTPHFKIKVRQAKPSAEWLRVENAHEAIVSCHDFDLVQRLKNIDTRTSPKSDAAYIFSGVLICGCCGGKMTRKTVRYKGEEYFYYYCRTGKKNGCDAGTMIKEADLIHCVQESLRGQIENVASLEDVLTSFSQERINQALIHEYQEHIEQCSRQLEEINQYKMGLYENLVNGCLSKEDYLTYKKQYTEKYDLLKKAIAQWEEKIRAVAENQGDRNRWISHFLQFAEMETIDRRVVVQLIQYIKVISKQEIHIEFRYKDEYRKAAAFAEQLMRREAV

SEQ ID NO: 4061 - protein, 533 aa, unidentified
  source 1..533: note = uncultivated organism
MNRSRPAPPRSTAATVRCAIYTRKSSEEGLEQEFNSLDAQRESGENYIASQTGEGWTCLPDRYDDGGFTGGNMERPALRRLMADIEAGKVDCVVVYKVDRLSRSLLDFARMMETFERRKVSFVSVTQQFNTASSMGRLVLNVLLSFAQFEREIISERTRDKIAATRRRGKWAGGRPVLGYDIDPRGFRLVVNEEEASRVREIFAHYIEHQALIPTVKAIDERGWLSKHWTTRKGAECGGKPFDKASLFKLLTNVVYLGKVRYKTEVHEGEHAAIVDPEVWQRVQQLLVRNGRTGGAAVRNKYGALLKGLIRCTPCGCSMGHTYSSKRETNGTGSVQYRYYVCLNAQKRGWHTCPSKSVPAAEIERLVVEQIRAIGRDPELIATTLRHARKQATDALAALEADQKTAERELRRHEREIRQLAAEAATNPIASSRLGELNERIRDVEQQMTEMRERAVVLSREVVDEREVARALTAFDPLWETLSPREQARVVQLLVKRVDYDGAAGTVGVAFHPNGLRGIALGAAVPDEEEVAA

SEQ ID NO: 4062 - protein, 543 aa, unidentified
  source 1..543: note = uncultivated organism
MNRIRCAAYVRKSTERGLDQEFNSLDNQELACKAYIASQTFQGWEYCKTYADGGISGGTMARPALQEMLEDVRAGKVQIVLVYKIDRLSRSIYDFKRMMKEDFEPHECNLVSITQSFDTSTAMGKLTLNMLLSFAEFEREVASERIRDKMLASKRKGMWVGGMPPLGYDVVDRKLVPNQAEGPIVKEIFETYLSVPSLLELRKVLIEKGIRAKQWMTQKGQSKGGEELLVSMLRRMLANKLYIGKIPSLRTNEVFDGQHQAILDRDLFDMVQAKLEESNRRGDAPYRRGTPLLTDKIITPDGIILKNRKGNKGNKKHRYYKAGKVSLPAGDVELIVKDTMEKFLNSDMAAMGHAARLAFKQMTPCDDLIKAMVEKIVYHENRLTMFVPIADLGYLAPFKKLDYMNTAAEQMQDYYITDNKSHAVIEREIHIHKNITITHRYGGTGVSVFTKTENAGVLIRSLAMGWGFRKSYEQGTGIKEMARTENKHKRTIYKYMNLAYLSPCIINAVMNSEIPSHVNLQALFSIASKYENFSEQEKEFFGY

SEQ ID NO: 4063 - protein, 518 aa, unidentified
  source 1..518: note = uncultivated organism
MYKAVIYARFSSAQQTEQTIENQIRICSDYANNNKMQVIRTYIDRKKSGRSDNRPEFQKMLQDITKGEFKYIIVYMLDRFMRNTYLALTTEHILEKNGVELISVCEPIQKDDTGVSDIVKFILSWNAEKFSKTLSRRMRDVHKDILLKGKWTGGHLPFGYKVENKKIIIDDEKADIIKFLFINYAKGINKKAIADEIFKRWQIKLNLNSMSCYINNKKYIGIVECNGEEYTNIYPPIIDKNLFLEAQQKMSIKKYKPALGNTKTEYLLQGKIFCAKCGSPMICDSGTSHIGKKYHYYTCSSKKKDKSCNKKTENREDIEKKVIEVTQDYVFDFQFLNEYADKLLEIYNQKYDNTYLIEIKKQYNSVDKKMTKLTNAFVDAERGSTLRTKIQTDIKEIEPLYLDLKNQVEMLEISQQNKITKERLIEMFMELSKKHNPKTLIDLFVSRVFVDDDSILVSYFLDGTECLNFEQIKKGSNLNLLGSSKSLKNEPLQALLINNVFCVKKFFKKFIKFTWLDK

SEQ ID NO: 4064 - protein, 590 aa, unidentified
  source 1..590: note = uncultivated organism
MSADSRSAIRCAIYTRKSSEEGLEQSFNSLEAQREACEAYIASQRHEHWRCLRNQYDDGGYSGGSMERPALRQLLADIDAGKVDTVVVYKVDRLTRSLADFAKIIEHFDASKVSFVSVTQQFNTTTSMGRLTLNVLLSFAQFEREVTGERIRDKIAASKRKGMWMGGRVPVGYDVKDQKLIVHAAEADQVKKIFRLYLKFGCVAKLKARLDHDGIKSKVRISSSGAKSGGKFYSRGALYTLLQNRIYLGKIPHRDATYAGEHDAIIPQELWDKAQDRLSSNNKVRRNGGNAKSPSLLVGLLYDDLGNRFTPSHAAKRGKRYRYYVSQAAIHHKASATGPTRIPAEEIEGLVCRRIQSLLSSPEQLLQSIGVESDGAATSKLLITAGKQLAKIWHAKSPTEFREFLSDVIARVVVCETNVEIVIIQPALREVLLGDQSSRLAKRERPLEKRTNDVFKLVIDARVKRCGGEVRLLVPADSATEAPTRPVPSLIKAVARAHPWPEEIIRGELTGLRSIAQLTSLDEHYAGRILNCSFLAPDIVEAILDGRQPADLTIQKLLRSLPLAWADQSKLLGFSSNERCSWRINTSTIS

SEQ ID NO: 4065 - protein, 510 aa, unidentified
  source 1..510: note = uncultivated organism
MADTMKAACYYRVSTDEQAKKMGPDMQRTRCRALCEARGWEVAEEFEDLGLTGRNMDRPGLQGLLRAAADGQIGVVVVYRLDRLARKSRHLQEIWEDHLAKHGVELASTTESIDTSNPMGRAMMGMVGIMAQLESEMIQERTSDGRREKAQQGGFGLAVRSFGFRWDRGDKETGRPKRPVIVEAEAEVVRTIFDMAVGGHSAEGICKALNRQDIPRRQGGKWRNPEMQGLLANPAYMGRFVTWRDPETGEETLADPELCPPPIVDAAVWQAAQAVTRAYRGHRRPWVKRTFLLSGFCTCGNCGERTLTIRQPDEKHAYYACNGVPQGECDAKHIPAAALDAQVWGFIRRLQDDPEMVKAYARQTTEDLLPKWERELVRVGEQLKRWRNRERTAREKLETGIYTDEAYAKTMAEYDLHWGDLQAEAAALEEKITHARQERADVDWQAEVLRRAGSLDALDQDGKRRLLSALGVAVTVWTVKDERGKLVDVRVKLETYAVPVSALASAGTMS

SEQ ID NO: 4066 - protein, 511 aa, unidentified
  source 1..511: note = uncultivated organism
MAQVQIIQPYQPQSDALEKVAAYCRVSTDSKDQLNSYRTQIGYYTNFIVQHPGWELVDVYADEGITGTFLEKRDEFKRMLQDCRAGKITRILVKSVSRFARNTLELIETTRELKDLGVVVVFEEQGIDTAQMLGEMQLTLLAMAAQEESSSVSKNVHWSYQKRMESGQFLGCSAPYGYKLENGVFTILPEEAAVVQRIFDLFLSGNGILTIARTLNEEGIKTRQGANWATSSIEYLLSNERYAGDSRLQKYYSTDFLPKKRKINHGERLQYYVQDTHEGIVSKETYEKTQVLLQRHAHYTPPLSKPFQKKIVCPDCGNYFRETTIRGKKYWICRNRRNNQAPCKPIRFTEQQIQRAFLNLAGKLYAHGDTLLSPTLSLLEEIAARQEQGNAKLYELNTALADLNEKAHTLQRLHNKGFIEDGDFREQTEALASQRKKLSDQRGKIIHGSKALETLDKLRELQDTLAALPAIPWEFDIVLFDQLVEKIVPVSNTELLFKLKCGLELKEVLPK

SEQ ID NO: 4067 - protein, 527 aa, unidentified
  source 1..527: note = uncultivated organism
MTRPRPTTSAPAQPSAAKRCAIYTRKSTAIGLEQDFNSLDAQREACELYVRNQACLGWELLEERYDDGGFTGANTERPAFQRLLADIAAGRVDVVVVYKVDRLSRSLLDFAKVMERFGAAGASFVSVTQNFSTADAMGRLTLNMLMSFAEFERSMIAERTRDKIAMARRRGKWTGGPAPLGYDVVDRRLVVNEAEAALVRRVYELYFDRRSAVAVAHALNAEHRTTKPQVSRRGNRRGARSWEKGAVLHALRSPIAAGLMPCGDELHEGEHQAIIDRAVYLQVQRLLDTGGGRGVRHGVNPAYVLSGVLRCARCGKAFTPASTRKGARTYRYYRCVTRDKRGRGGCASAPLPAAAIEDFVVARVREALADGALTAALGDAVLQRLAGRRAALQAERAGLPATIAAASSEGKRLIEGAGRLTGTARRLLDARLQEVGGQLDQLEARLAEVQRELASLDGDALEIGWVRSCLRDFDRVWDALTTENRGRLVRAVVARVEIDEPSNDVRVVFAELGPDPAAAPGREGASR

SEQ ID NO: 4068 - protein, 518 aa, unidentified
  source 1..518: note = uncultivated organism
MNITEISTEKKEARTIRLAAYCRVSSASEDQLHSFAAQIRYYTDYAGKQAGCKLVDIYADEGLSGTDMKKRDELNRLIRDCKKGKVDRIITKSVSRFARNTQELLTMLRLLKELGVSVYFEEQGIDTDNMNAELIVTFPGMAAQQESEAISGNMRWSYRKRMEAGTFNCCTPAYGFDLVSGQLTVNEEEATIVRRIFDLYLQGYSYERIAKQLNEEKVPRKRAGEKWTRNGISYILNNERYMGDALLQKSFTTDTLPYKQVRNRGEKPQYYVENANPPIVSREIYAAAQMRQKTKNTACSEKQDRYPLAKIMRCPDCGRTFRRQITAQIAYWMCSNRSTGSSDCQMRRVREDMVYDTFLTVLYKLCDNRVDLIGTLIRQLELMQSRSSGAHEEIHELDKQLANLSAQNLVLARLHNNGILKAVEYAVQSDEISNKISALRARRRRILAEDTDEELLTELKELNGLLESHTLVEEFDKELFAQIVERIVVNENANLTFKLLGGIELTEEICERGRCRSL

SEQ ID NO: 4069 - protein, 526 aa, unidentified
  source 1..526: note = uncultivated organism
MSISAAIYVRLSDEDRDKRFKGDDSESIQNQKAMLTDFCRERNWDIYDIYSDDDYSGTDRNRPEFNRMIADCENGRVNLVLCKHQDRFARDNEIVNHYIHDKFLEWGVRFKSVIDHIDTDNEGTKKQSQILALTSEWYCEDTSKKIRSVLQHKREQGQFTGSFAPYGYAVDPQNKNHLVIDSAAAETVRLIFALYAQGKGYRAIVLELNGRGLPNPTLYKQMNGSKFHNANEENNKRSKGLWTYTTIYNIVRNEAYIGTLVQGKSHFVSYKNHRKKKAPESEWIRVLNTHEAIIDPLTWQTVQDRIAGRVRADKTTQTVSPLSGKVRCAVCGAPMKRDVYYNKARTIKYYGLQCGTYKNGAMNCANTKTMSGKQLEAFLVEQINLHIRKYCASDKLTLTDRHREQIDSLTDTLNLIEEQIKDKEDKLTKMYEDYLDETISADQYKVISRKFSDTVTELTERRDSIKKQITNIENARESELDRKAVIDKYLYVDTLTRETADDFIDTVYIGEYSEDGERQITIDWKF

SEQ ID NO: 4070 - protein, 509 aa, unidentified
  source 1..509: note = uncultivated organism
MPQVQVIQPIQQQPKRLRVAAYARVSSDSADQLNSLSVQVDYYTHLIQENPQWEFAGIYTDEGITGTSIKHREQFNRLMDDCRAGLIDRVLVKSASRFARNTADALTAVRELKSLGVTVAFEKEGFDTETANGEMLLSMICAVAQEESLSISQNMKWGIHKRMQNGTYVNASTPFGYRQENHKLVPYESEAVTVRFIYEQYLAGKSIVAITRQLNEQFPQKSVSWNAPAVQSILTNEKYRGDTCFQKRYTTDVLPLQKKRNRGELPQYYMQESHLAIISPADFEKVQALLSQKRSTRSPMQKYPLTKMAVCASCGKILYPKVRANGVRIWNCKTHFEESSKCPVKPVLETELYGAFLLMYSKLYTNCDTLLLPIQADLQQVQRLKRQRSEENNKINSEILRLSKQLHNLARIHAQGSIEETVYQERHRQIEQQLIEKKAQLTLFNETGRIEKMLQQTKQTIRYLQNHVPPTEATEEALRMLVKQILVDRDAFTFVLNNGLRLREERKTV

SEQ ID NO: 4071 - protein, 564 aa, unidentified
  source 1..564: note = uncultivated organism
MKAALYVRVSTHYQVDKDSLPFQRQELVNYAKYVLGIDDYEIFEDAGYSGKNTDRPKFQEMISRIRAGEFTHMLVWKIDRISRNLLDFTKMYEELKKCNVVFISKNEQFDTSSAMGEAMLKIILIFAELERKLTGERVYSIMLSRAEKGLWNGAPVPLGYTWVEDEETKFPAVCPDEAKTVKFIYDSYEELRSTSEVKHRLELHNISTKKGRTWTTKTIADILRNPFYVGTYRYNYRESARGKIKPEKEWIVVEDNHEAIISKEQQERVCSILDSNFCGKNVIRTQHVHVFVQLLHCEKCGRNLISTIDSPRKNGYRPSLYRCYTYVNSKKEHRTCKCAISEAALGNFVLNYIANMVRAHDEAKATGKTNKIERLLLRGDNFKDIAGIHKEDLQHIHKAFVSTSDILFDKIEIEDESKTVEKDFAIDTLKEEKKKYERAMQRLEDLYLFSDDAMSEKDYLVRKHDLTAKIESASKKIKDRSVEYSKNLPGHDLSFIKRASQYLLTQNLLKIKHIDYNKVVTSIDKQLLKDFMQSVVSRITVRENKQIASIEFTNGMKHRFIYRG

SEQ ID NO: 4072 - protein, 516 aa, unidentified
  source 1..516: note = uncultivated organism
MPQIQVIEPLARPQVQKIRVAAYCRVSSDSDDQRNSFSTQVQHYTQLIQSHPDWEFVDIYADEGIAGTRADKRDDFQRLMADCRAGKIDQVLVKSLSRFARNSKDCIQAVRELQSLGISVFFEKEHLDTGKLHNEMTLSMMSAFAQEESISISQNMRRGALMRMKNGTFRISQVPYGYRRKESGELIPIPEEAEVLRWIYHSFLSGKGIASIAKDLESRKVPKLRGEPVWSKHGVLYILTNERYAGNELFRKSYRTDAIPFRKVDNRGEKSQFYAEATHEAIVPFQTFQLVQKLLQKRKEQFGKQQQGAFYPLSGKITCGLCGGTYYRRLTSQGTSWVCENHLASRCPAKGMGEKEILSTIQRFLHRLEEHRDSILSPYLAQLETLWQKERSLRPSVLQLQQSIAALLSQSHTLAQLRAQECVDSDFFVSQNNQLQKELENLRQQLKREQGQTNLVEKLQSTRFLLNTLGSPLPDEFSPTLFQSVITGITAQPEGMVFHLVNGLSFAEPIGGFHHG

SEQ ID NO: 4073 - protein, 529 aa, unidentified
  source 1..529: note = uncultivated organism
MVSLPKKMEGAESEMAEVQVIPPKAARPDTLRVAAYCRVSSDSTDQLHSYAAQIRTYTQAINAHDGWDLVDIYADEGLTGTRMDKREDFNRLMADCRKGKIDKIVVKSISRFARNTRDCLATLRELSSLGVTVQFEKENIDTGTLTSELMVSVSASLAQEESISISKNQRMSYQRRMERGEFITCSAPFGYQIVDGKNLAIVEDQAEIVKWIFAAYLKGYSSEWIARELSENGPAPLHGGQKWHQQTIRKILTNEKYIGDALCQKTYTTNTFPYRRKDNHGEADQYYVEHTHPAIISYEDFQKVQELLKRRAERQSIPHDQTPLARKIICGQCGTLYMRRISKAGYVSWVCRKHDRKAADCPNGRISEDSIHAAFLRMYRKLRTHDGIVLAPVLRQMDTLSDALHRGNPAMLAVNTAIATASEQSYHLTKLHTAGLLDKAALSAKQAELNAKLTELRRERRKLLCNEDIDEQVDAIRLTIDTIRNGPETLSSFDEILFTKLVERIVVDTQSTIRFQLYGGFEFQETLEA

SEQ ID NO: 4074 - protein, 602 aa, unidentified
  source 1..602: note = uncultivated organism
MENVAYDIRSRIVSNKYRTSLNDTVRVCFYARVSTQHEAQINALSNQLEWYNSVLRDHPNWEKVDIYVDQGSSGTQAENRQGFMRMIHDAANNQFDLICTREVSRFARNTVDSLSYTRKLRNMGVEVYFYNDNIWSCETDGELRLTIMSAMSQEESKHISERVLAGQKISRQKGVLYGNGNILGYRLIKGKTSTENTYEIVEEEAETVRMIYDMYLSGMGVKAIASKLVMLKRKQAYGGYRWESSSVLRILNNKTYAGYIGYNKSYTKDFLEHERVNVYDRSQYEYVKGDFPPIIPEEKWNRVQALKSKKVVCINGENRGKAIPKDKWCRHLVCECGSSYKKYKWRTNQSGEECNGYQCRHQIRYRKKSFREKNGLDGTGYCDVPSICEWKLDFMAKNILYRLWKDKKASVEELLRDVHDNYVIEEEVRNNEYQAEKLQRELERLRNRKSNLMDMRLDNMIAKPEYEMKYNAIVERMEEVEKELSMISHVQPVIEPVDVEKELGRIKEFLERVCDLEQKQLSDELIDSLVARITPTEEGVFKWYIQSEDYDMETTFGESNYVLYDKFTLTFEEAKQYRKSFGNFIRARQWKDLIVEVYVRNS

SEQ ID NO: 4075 - protein, 510 aa, unidentified
  source 1..510: note = uncultivated organism
MHNTLYDALYARQSIEKKDSISVESQLAYCRYETRGEPCMEYTDKGFSGRDINRPGFAQMMHDIRTGKIKRVIVYKLDRISRSILDFANMMELFQKYHVEFVSSTEKFDTSTPIGRAMLHICIVFAQLERETIQKRVTDAYYARCRRGFYMGGRVPYGYRLTSTVIDNVHTSMYEEVPAESEQLKLIYSLYADTDNSLGDIVRYLNEHQIKNLRGADWNTSRISEMLRNPVYVKADIDVYRFFQSQGANIYNPADDFTGQNACYLYKDAASTAHKQSCLSDKEVVLAPHKGFISSHVWLACRVRCLHNRQSAKTCKPKNSWLAGKVKCGRCGYALTIRRAKTKWERYFVCSHAGAHGSCAGTCCTIYADVLEEYMLHAVKEKLSEFSVLKESPLSYPAASDENPQNIHKKMRLTQIEEEIGKLLSKVAEAEDVLMKYINEKVSELDIERKVLQEELAASNVTAPENRLNQITNHAIIWETLSFSDRQAVMDVLVTVIRIADGRLEITWNL

SEQ ID NO: 4076 - protein, 525 aa, unidentified
  source 1..525: note = uncultivated organism
MKKQIRCAIYTRKSTEEGLEQDFNSLDAQREACEAYIKSQMHEGWILIEKQYNDGGFSGGTMERPAFKELLKDIENDEIDIVVVYKVDRLTRSLMDFSKIIEVFDSHNASFVSITQHFNTTTSMGRLTLNILLSFAQFEREVTGERIRDKFEASRKKGLWLSGTSPYGYKTDEHHILHPEKPYADNVRIIYESYLEIKNVLKLKTYLAKTGILSRNGKPLAKGSLYHILSNKVYLGKITHKNKEYDGQHIAILSEELFNKVQNLLKANAVQRKHTTNAKTGSLLAGLLYDDKANKMSPSYSSGNSKQYRYYVSQALKNPTNYERGEITKISAGEIEKFVKEDMRKLLDNSYLMQKHLEPYSVPQQKMILTQMKTFEPDKVFLRTAIKRVDLSVNSISISYDINFIINYFATMAFNAVFKYSEENEYIITNKVNVKISLTPQKQNKIIIPGKCNYDMKLIQAIVKSFWYNKLGAERKLPLEARNGNNKRLRKLRFLPPDIIESIMNGTQDPELNVKKLIEMANECC

SEQ ID NO: 4077 - protein, 501 aa, unidentified
  source 1..501: note = uncultivated organism
MVELRQNGSPTRAKARCAIYTGKSSEEGLEQAFNSLDAQREACEAYITSQKHEGWTALATLYDDGAYSGGSMDRPALQRLLDDIRAGKVDVVVVYKVDRLTRSLADFAKIVEIFDAQRVSFVSVTQAFNTTSSMGRLTLNVLLSFAQFEREVTGERIRDKIAASKKKGMWMGGQPALGYDVKERKLVVNEAEAETVRNIFRRYLELGTVRALRDDLGARGVVSKCRTAADGSPYGGQQFSRGALYLMLKNRIYRGEIVHKGIAFPGEHAAIVDEQLWRRAQSHLEENRTERREGDKALEPSLLAGILLDASSQPMTPTHAVKKGTRYRYYISQRLITRPATDSSRGQRVPASNLEALVISRLRALLADPVEFLNAISNGERDASMQKRLRDAAAALSARWEHLPTERLHDLARSILVRAQVHANRIDLDVGSVRLVSWLLSEGVGEGINDRNRASNANADSTEQTLIRLSIPASLQRTGKEMKFIVDGVANSTPSDTTLIR

SEQ ID NO: 4078 - protein, 526 aa, unidentified
  source 1..526: note = uncultivated organism
MVEKHLTDGTTALAGQPRVIKIEAAEKPRNAQLRVAAYTRVSSDSDDQLNSFAAQNRYYAELISGKAEWRMVDIYADEGITGTSAAKREDFQRMMADCRRGLIDQILVKSISRFARNTKDCLEAVRELKELGVNVRFEREGIDTANVSSELITAIYAAFAQKESESISGNMRWSCQRRMEAGTFLPSSMAYGYKLVGRKIEIDADAALVVCRIFQWYLNGVNRIAIAKKLNEEGISSGQRKKWHSASVRYILTNEKYTGDSLWQKTYTSDTLPATRHKNTGEHEQYYAVGTHPPIIPRETFDQVQTLMQKRSVGQAVTHGRLCVRMHCSCGSRIRAKQVNGRWYWCCCRHDETGDCAIKPVPEAQTDEAFCRLYYKLKHQSLPILEQMLETLRTIRDHRLLWSEDIVSLNKKISELSSQNQTLVFLKQNGLVDPGIFISKSNELTRQLRQAKLDKEKLMDAEGDATAQRTRELIALLDDGPDFLDHPDTELCGALVAEIIVESNDTLRFRLHNGLELRESIERTVR

SEQ ID NO: 4079 - protein, 606 aa, unidentified
  source 1..606: note = uncultivated organism
MSTPVRCAGYTRKSSEEGLEQSFNSLDAQREAGLDYIKSQKHQGWVAVPAQYDDGGYSGGNVDRPGLKRLLEDIRDGRIDVVVVYKVDRLSRSLADFARLMQTFDEHKVSFVSVTQQFNTTTSMGRLTLNMLLSFAQFEREVTGERIRDKIAATKRKGVWAAGLPPLGYRVSRPDEPPGDRRLRIVEPEAAIVREIFASYLESHSLLGVAKKMNEAGYTTRPWSSAKGNRHGAKPFRAGWVYKILTNQVYIGKITHTRGGKTEVFDGLHEPIVDRETWDMVHSTMRTIERSRPPTWTHTHLLRGKVRTYEDSAMSPGSVLKRRRHPDGTVSTRRVFYYASQKAMKQGYKNCQIKSINAGHLDDLVRSLVLEHLHATHQIDLHTLDAPSRDHWIREVLDRVIVAPETITVELDPARFEACRAATTTPLSQPGTSAADATDDPGSARRSPNTPQATIPRCFFTPTVEERHGRVLLTLHIKLKRHDGRRVLVAPDGRDLYLTYTENGAPIPQEHLVRAIGQAFAWRREVVKGRATIEAVAKAAGLRPGRVSHLLHLTRLSPTIIRAILTGAVGARITPRDLHAAADHLDWSLQAAALMLRPGQVGLNER

SEQ ID NO: 4080 - protein, 501 aa, unidentified
  source 1..501: note = uncultivated organism
MKRINAIYARQSVDRADSISIESQIEFCKYELKGGTFREYKDKGYSGKNTVRPQLQQLLEDIRRGEVEKVIVYKLDRISRSILDFSNMMELFQQYQVEFVSSTEKFDTSTPMGRAMLNICIVFAQLERETIQKRVSDAYYSRSQRGFRMGGKPPYGYRLEEIIMEGIHTKKLVEEPQEAAIVREIFQMYERPDTSYGDITRYYAEKGVQFYGKELIRPMLAQLLRNPVYVRADMDVYRFFKSHGTNVVSSSEQFDGIHGCYLYQGRDSVTDKQQNLKGHMLVVAPHEGLVSSEQWLNCRIKLLQNKTIQANRKAVNTWLAGKVKCGYCGYALMSIKIQSGKQYLRCTKRLNNKACPGCGKIYTEEVENYVYGEMVRRLRDAQTPVGYTKLKENPQVKKIYREIEEIEEEISVFVDSLTGAGETLAAYINQRVEELDHTRQLKMEALTVLAENHVMPEQIEKVVSNISLWDQIGFEEKRFTVDKMITLLKVLPGSIQIQWKF

SEQ ID NO: 4081 - protein, 518 aa, unidentified
  source 1..518: note = uncultivated organism
MTKAPKPEVPRIRCAIYTRKSTEEGLDQEFNSLDAQREAGENYIASQQQEGWVVIPKHYDDGGFSGGNLERPAMNRLLADISNGEVDCVVVYKVDRLSRSLLDFSRIMEAFDKQGVSFVSVTQAFNTTHSMGRLTLNILLSFAQFEREIIGERIRDKIAAQRRRGKWAGGIPVLGYDVDRSGPSPKLVINGDEAARVRRIFGLYLELQSLTPVVEELERRGWTLKEWRTKSGKPKGGRSFDKCSLHGLLTNQIYIGRIKHKAECYNGEHTAIVDEKLFDDVGAMLRSHGRGGGSHLRNMYQSILRGLLFCPACNRSMVHNVSKRNAKVYRYYTCVTAIKRGRKHCPSPSLPAAAIEAAVIGQIRLIAADDNLRRDVLQQALEQVGEERNELQTQRSQLQTQLSRTEEQIENVISRKEANASSRLIALHDQREQTRRLLARVEAEFNQLDAERVNELDVNKAFADFDNVWNALNTLEKSEVLSLLVSRIEFDISDSSLSIEMHPAGIKSLASNLEESTT

SEQ ID NO: 4082 - protein, 532 aa, unidentified
  source 1..532: note = uncultivated organism
MAEKHLTDGTTALAAQPRVIKIEAAEKPRNTQLRVAAYTRVSSDSDDQLNSFAAQNRYYAELISGKAEWRMVDIYADEGITGTSAAKREDFQRMMTDCRRGLIDQILVKSISRFARNTKDCLEAVRELKELGVNVRFEREGIDTANVSSELITAIYAAFAQKESESISGNMRWSYQRRMEAGTFLPPSTPYGYRIINKEIEIDPEQAVTIRKIFQWYLDGNSKERIARRLNEVGILSGQNKEWGRGGIHYILTNERYTGNSLWQKTYTSETLPTTRHRNKGECEQYYAEGTHPPIITTETFERVQNLIQARKQNYGKTPPEMTHLLSRKVVCGCCGTMFRRKPQRGKYYWCCIKHDENREKCHITPITEQSIYEAFCRLYYKLKHQSLPILEQMLETLQTIRDRRLLWSEDIVSLNKKISELSSQNQTLAFLKQNGLVDPDIFISKSNELTRQLRQAKLDKEKLMATEGDATAQRTRELIALLEDGPDFLDHPDTELCGALVAEIIVESNDTLRFRLHNGLELRESIERTER

SEQ ID NO: 4083 - protein, 539 aa, unidentified
  source 1..539: note = uncultivated organism
MIKTNMVNSYRNIRVAKYIRLSREDGDDRESESVENQRDIIDNYIQEHEELIEAEEYVDDGYTGTNFNRPGFRRMLKDIEEEKIDCIITKDLSRFGRDHIDTGYYLERYLPTNNIRYIAIGDNVDTLKADGLQFLTFKLSFNDYYAQDISNKIKSVKQRKIEKGEYQAGIPPYGYKKSAEKKNHLIPDEYSSKIVKEIFDMYVNKGMSTIKIADELNKREIEPPAVYLQIPTYMKKKSANPSGKYVWLRAQIGKILRNEVYLGSVVGRKFQKVSHKIAKVRCTKKEEHIILENMHEPIINIETWNKAQDKLNGYTKTRERKHDHILKGLVYCGECGNKATLRCREEKRKNGNVWRATYFICSKRNNYSGLCDCKQISATLIEELVIGKIKEETKKIKFSEDEIKKIYNKAEEEANSINNLYKIKLQEMQKQLKKVESSIEEIYQDKINKLIQVEDFKIIYLKKQKEREKIVKEINKIEDEFKKASNMQSKVDLKEIRQIAEDLLNMKEPNKLVLQELIKKIEFDTNKNISVKLTFKNTI

SEQ ID NO: 4084 - protein, 543 aa, unidentified
  source 1..543: note = uncultivated organism
MEEIKCAVYTRKSTDEGLEKEFTTLEAQREAGENYVKSQKHQGWVLIKEHYDDGGFSGGNMNRPSLKRLLQDVEAGKVNMIVVYKIDRLTRSLTDFAKMVDIFDRYKCSFVSVTQNFNTADSMGRLTLNMLLSFAQFEREISGERIRDKVAASKKKGIWMGGCVPYGYEPIKCKLVIKPDEAKAIKFMFEKYLEYKSPLAVSKLMEEAGMKTFARASIDRMLKNPIYMGKIKHQDVLYDGQHEAIVSEEIFKAAQNVVAEKPKKQRTCMYDKNEVGIMRGLLTCGCCHSLMTPTSSQAHGMKRYYYTSTVAKMYGHHKCINGSVPVVTMDECMIKIVSQLFLDPKVFQGLLEKVAPNKSMELLRVLRSPERVFNKLSERHQLLLMRLMITGVTVNAETMEINWTDLGLSLLPDRLLQKTTGHQTILPMPFVKHKGRTEIHLPENIEVEPHFDNELIKGICLGFKYQKMMDQKKISIAEFAIKENTDASHIGRLLRLTSLSPAIIRTILKGHQPPKLYLRNLLRKTIPPIWEDQIKQFGFTILD

SEQ ID NO: 4085 - protein, 558 aa, unidentified
  source 1..558: note = uncultivated organism
MEKKAVMYLRVSTEMQVEGYSLDAQLTSIGKYAKAYDIEVVKTYKDEGKSGTSVAGRDDFIRMLEDIEEGTVNVDYVLVFKLSRFGRNSADVLNSLQKLQEHNVNLICTEDRLDSSTGSGKLMITVLSAVAEIERVNIVEQTMAGRRQKAEEGKWNGGFPPYGYSLGKDDILKVNEAEAKAVRVIYDKYINDNMGFNALAKYLNRQGINKIPRTNGTLTSWSAKLVKDIIDNPVYKGYIAYGRRTKEKVKGTSNEYKTVRQEDYIVAKGKHKPIISTEAWEEAHALRLETGVASPSSIGRERIHLLSGILRCPECGGPMYTNKNSWTRKDGEYVERHYYVCSRAYQARGVECNYKASLRKEVIESDVLNAVRGLVKDPLFAEEVKAKIGKEVDTSEIDKELGEYRKSLRQAKTAKDTLENEIDQLPYDTTHRERKIQDMNRRLDRAYDELVEVEEKIKDLLLKREAVESNALTLEQVYEVLENFDLLFDKMSEEDKKRTVVYLIKEVEAYKEPQVKTLSRLKSITFNFPVFYKGYSTDKVLWENETTVECVVLMSRNM

SEQ ID NO: 4086 - protein, 620 aa, unidentified
  source 1..620: note = uncultivated organism
MDNERSIAAVYIRVSTEDQAREGFSLGEQKEKLLQLCAFKGYEVFKIYEDAGVSAKDMEHRPAFQEMLSDMKKGKINYIVAYKLDRVTRSLRDLEELISVFEQYHCFLVCDRDDVNTSTANGRFFVRMLTVLSQLEIEIVSERTKFGLNGAIKSGHLPGVLALGYKKDGNKKTIIDETTKPVIERIFKMYLEGKSFQQISNIFNDERVLNPKPWKDTTIQKIIDNKIYMGDYEQYKRIAKNKQIEPVVYMNVVEPIISRAVWEECQHQKEKNQRTYTRDRVYLFFQKLECPNCHRIMKYKGSGGKKRKYMYYTCEKCHINYREDKIEELLTNFIYDMVEYDMAVKKYFLPVLADHKPTKTDDIDKEIKQLEKQKERIKKAYMSGIVEMEDFSEDYKLIEEKLEILEQKKNESLDLDNMTFSPQQLMADRDIERETMIRLDTLNSMVKTTWESKSKEEKQEFISKLVESVIITKDSNNELHVEKINFRRSFVDMLAKLLGNGILDVLVPVEINGKEEFVLGTGNITDEQVQEYLDRLNEYYETKFYQIYEKVDKETGNIIGEFIPKKDEKIIRILPISPTESTTKSPITKDDIDTKYGIVTYNPTKPKEKVLEGVNDYTTS

SEQ ID NO: 4087 - protein, 581 aa, unidentified
  source 1..581: note = uncultivated organism
MRKSNNGKTADRKIVTRCAIYTRKSHEEGLEQDFNSLDAQRESCEAYIASQKHEGWTCLPGMYDDGGISGATLERPALKRLLADIEADRVDTVVVYKVDRLTRSLGDFAKIVEVFDRQGVSFVSITQQFNTTTSMGRLTLNMLLSFAQFEREVTGERIRDKIAASKKKGMWMGGTIPLGYDVQDRQLVVNEAEAETVRHIYRRYAALGSVLALADELDRDNIVSKTRLDRFGRTTGGKPLARGVLYLMLQNRLYRGEIVHKEASYPGQHDALIDEALWNEVQRRLAENRIDRATGADAAQPSLLAGLIYDDAGERMTPSHANKKGTRYRYYVSQGLIKGSRRSAPRGRRVPAGDLEALVEDRLRQFLTSETELFGAIEARIGDVNDCAEIITRAGDLARRWPGLAAAGKRAIHTTLINRVDLLRDKLEIHILPDCLPPILEDGWAPHDRIRSAKENQPTITLTVAARLKRAGMETRLLIDGAGGGARNKPDHSLCRVLAQAHRYHAMVMRNGGKTMAELAAEAGVGGSYFSRILRLSFLAPEIVKAILRDRHPIELTATRLTNEIQLPTVWKDQHALLGTS

SEQ ID NO: 4088 - protein, 548 aa, unidentified
  source 1..548: note = uncultivated organism
MDVKVIKASDEPVIRDRKFEGNALEFNRKRVAAYVRVSTDDEEQLNSFTSQKQYYQEKISQSKEWILVGIYADEGITGTKTKKRDDFLRMINDCMNGKIDIILTKSISRFSRNLVDTIQYVRMLKSKGVTVIFEKENINTSTMESEMQLALLSTLAQNEVESLSANVKMGVKMKMRRGELMGFNGCLGYDYHKEDKSITVNEEEAETVRLIFDLYLSGMGGISIAKELKRQGRLNKKGVCKWSDSGVIGIIKNEKYKGDLLLGKTYTVDPISKRRLENRGEEDKFYIENHHEPIVSREVWDRAQEIRKGRYRSAVNNDPVIRIRNNKMYALSSMCECGFCGEIYTRRIHHQSRSTLKPVWKCSNQTRNGIATCEHSRAIDESIIENSFLEMMSLMADNFDDVLDNLLATIEESLNSDDCVNKLKRIDKSLAKQEDKRNKLTDMMLDDKISEEAYNKKYEELSYNISKLKNEKRMLTDNNLNQKTIKNRMCEIRNNIKDANVFDEFDRVVFESIVKKVIVGTVLDDGTIEPYKLTFVLKGMSDVEVTCK

SEQ ID NO: 4089 - protein, 517 aa, unidentified
  source 1..517: note = uncultivated organism
MKVAVYCRLSEEDRNKQSETDDSSSIQNQKSMLLQYAMEQGWEVYNIYSDDDYAGADRKRPEFNRLLEDAERRKFDIVLCKTQSRFTRELELVEKYIHGLFPLWGIRFVSIVDNADTANKGNKKARQINGLVNEWYLEDMSENIKSVLKNRRENGFHIGAFALYGYKKDPEQKGHLIIDEEAAAVVREVFTLFSQGYGKTAIARMLNDRGIPNPTEYKRLHGLRYQQPRMKNSTLWKYSAISEMLINEIYIGNMVQGKYGSVSYKTKQNKPRPKSEWYVVEGTHEPIIDRALWDGVQALIAQRSKPFDVGTIGLFARKARCANCGYIMRSSKNRGRRYLQCSNRHVAKDACIGSFISVDKLEQAVIVELNRLSQEYLDKDELGRSLELCGNLQEQKARIQSDIAIYEKKIAEYSKGIKDLYMDKVKGLISQSDFIDLSKDFATGRERLERVVIDGQNQLAEIDKKIEVGDNPWELIEQYTNIEHLSREIVETLIDYISIGKRIPRTRNVPIEIHWNF

SEQ ID NO: 4090 - protein, 530 aa, unidentified
  source 1..530: note = uncultivated organism
MNRSATHEYPITSEPALKNNGTIRCAIYTRKSTEEGLEQEFNSLDAQRESAEAYIKSQRHEGWICLPDRYDDGGFSGGNMERPALQRLFADIEAGGIDCVVVYKVDRMSRALLDFSRIIDLFDKHRVSFVSVTQQFNTTNSMGRLTLNILLSFAQFEREIISERTRDKMSAARRKGKWVGGMPVLGYDIAPEGGRLIVNEDEATQVRAIYQLYLEHKAMMPVVHELNARGWRAKRWITKKGRERGGKLFTKGSLFRLLTNVIYTGNIEYKGTIYDGEHAAILDTGIWQQVQDTLQRNGRTGGHEVRNKYGALLKGLIYCTPCGTGMVHTYTSRNRKRYRYYVCLNAQQRGWSSCPSKSLNAQEIETAVVQHIRGIGNNEKIIAATVAKVRQAGDRRLADLETEQRAGKRELKRLNTRVQKLVSGSFSTGSNKGLALDQLADLQDRIRALEQRMTVVREEIITIQKEAIDGKDIRQALAAFDPVWESLTPREQSRIIRLLIERVGYDGRNGQVTVTFRSPGVKALCGEAGS

SEQ ID NO: 4091 - protein, 560 aa, unidentified
  source 1..560: note = uncultivated organism
MKAATARPSLRCAIYTRVSTDARLEQEFNSLDAQREASEAYIKSHAHEGWSLVRARYDDGGFSGGSMERPALQRLLSEVQTKRIDVIVVYKVDRLTRSLADFAKLVEMFDAHGVSFVSVTQSFNTTTSMGRLTLNVLLSFAQFEREVTGERIRDKIAASKKKGIWMGGVVPLGYRVEGRALHIVEDHAELVRQLFRRYFDVGSVARLKELLDAENVRLLVRIDGKGRSTGGGLFSRGHIYKIFSNPIYIGQIAHKGLVHEGQHPAIVDRELWNKVQQRLEDHRAAKTQRRERQSTNALLVGKLFDDRGNLMTPSWSKRGSKRWSYYVSQAILRGDRANAGSVARVSAPEIESRVIEAIGSLDRRQNSRAIHPGRHLPRDDIPPAQNADTPPAHHERIRSRIERVTLERAAIRIALSHDTDQEAEAKVLTIPWAAPSPYRRREIIHGTSAGSSSVRPMPTSARLVLIKALRKAHRWLDELLTDPKQTTELIAAQESKSERSIRMTLSLAFLSPDLVKSAIDGRLPRGFGLTRLIDLPIAWSDQWAALGLKAATDHRSDRIA

SEQ ID NO: 4092 - protein, 506 aa, unidentified
  source 1..506: note = uncultivated organism
MAMITVIQPSIMTETVKRRVAAYCRVSSSSEDQLNSYQAQLTYYSHKFEDSTTEELVDLYADEGITGTRDDKRDEFQRLMKDCRHGKIDRIYTKSISRFARNTKDCLKNLRELKALGITVFFEKENIDTANMTDEIMITILGGLAQEESVSISKNMKWSYRKRMESGRFVTNHAPFGYRLVNHRLVVDEQEAEVVREIFAYYLSGHGAYCTALHINERYPQFRKWNSYSIQYVLKNEKYIGDALLQKTYTPDRLGAHSKENRGEESQFYVTQTHEAIIDKTDFEATQKLLQSQRIEQSEHHEHHFSRKIRCAECGCCYRRKQWNDIVYWICTTHDRNTADCSAVRLREKDIEKAFLTLHNKLLHHYRSILLPLQQTLQELKCKKYGGNVRVMDIHKEIAKLREQNHVIARLRTKGFMDESKYQEQSKELNNKIRKLQAELKKITRSDDEDDILEQLDMLIDYFEKREHMMVSFEPETFDSMVDKITANQNELTFHMLGGIELKEKI

SEQ ID NO: 4093 - protein, 522 aa, unidentified
  source 1..522: note = uncultivated organism
MIRAAAYCRVSTDREDQANSFESQQRYFREYIGGRPDWELYRIYADEGVTGTSTRKRTAFNQMLRDARAGAFQLILTKEVSRFSRNILDTVACTRELRTLGVGVLFLNDGISTLEPDAELRLSILGSIAQEESRRTSSRVKWGQTRRMEQGVVFGRSLLGYTVKDGNLTVNPEEAELVRLIFHKYGVEKKGTTVIARELEEAGFRTHRGGSRWRSGCLVKILKNEKYAGDLVQKKTITPDYLTHARRRNRGEEELVALRGHHQPIVSRELWDAVQAELARRNRKGARGAGPSSRYALSGKLRCGVCGACFVSRQRRRKDGTSYRRWSCGGNQAGCGVGMTLRDETALDMVRQALAALELDTGGLADGVTAAALEAVRAAAQGGAERRRERELALERLDRKREAALDAFLAGELTGEELRRMTGRYDREAGALRERLEGEGPPSCPPPGLEQAIRTRAAAIAAGDTDSEAFFQTLVDHMVVCRDRRVEVRLSRLSGVWRFTLEKPARNGAEVPMSVSSPLSSG

SEQ ID NO: 4094 - protein, 512 aa, unidentified
  source 1..512: note = uncultivated organism
MARVTRIDPTTRSEIEKKKVCAYCRVSRSTADQLNSYARQIRVYTDLIKRNPGWQLVEIFADEGITGTSAAKRPEFQRMLKMCEQKQIDLIITKSISRFARNTMEALEIVRRLKILGIAVQFEKEGIYTLSLGDEMLLNTFTAIAQEESIAISERIRYSNTKRMESGEFVDGNAPFGYRMVDRVLVPEESESQIVRDIFDQYLHGASTHEIARNLNEAGILGKFGNSWKATTIRYILRNEKYIGDMLCQKTYHTNTLPFMQKRNRGEADQYYVEGSHAGIVDKEVFDKVQEIINGRKVKYQTDAEVTKYPLTSKMHCTECGAFFIRKKTNGCISWVCTNHGINKDNCPTHYIREIRIYDAFIAMINKLRFGREKILEGTLRRLDDAIRRYRLNNAEAYEISKQISEINAKLLMLEQLHQKQYLAADVYRTQSNELQVQVNKLKSQRAQMLNSKLEDTKNAIQGVLTEIEKINEPLEEFNESLFASVIDSIAIDKNDNIRFTLKGNISFTEEL

SEQ ID NO: 4095 - protein, 576 aa, unidentified
  source 1..576: note = uncultivated organism
MNSEPRVIRCAVYTRKSSEEGLEQSFNSLDAQREACEAFISSQKHEGWKILPSRYDDGGYSGGTIERPALKRLLQDVDAGKVNVIVVYKVDRLTRSLADFAKIVETLDAKRVSFVSVTQQFNTTSSMGRLTLNILLSFAQFEREVTGERIRDKIAASKKKGMWMGGIVPLGYNLDGRKLIPNPKETQVVSKIFSLYIQLGCVRRLAEQLDREKIRSKIWTTRTGARLGGVAFARGALYALLRNRLYIGEIRHRDKWYRGEHKGIISQNLWQKVQSQLDSNLKARHKRALESASSLLTGLIGDTLGNRFTPSFTVRHGRRYRYYVSQGVVERPGEPHTGVTRLPAHEIESRVLERLIRFLKSDADVYDTLGADGQTPAKLRQQVTAAKKLAEKLSSLSSSDLRQLLPSFLRRIVIGEDQIEMAIDRNELRRLLTNGGKPITNEPATDTSDLISLTIAAKLKRYGGVVHIVVPPNPTIESISKTKPALLKALARAHSWYETVLEGKALDQRALARHAGMTERYVGRVFECAFLEPDIVERILEGHQPDDLTFARLTNKIPLSWSEQRRQFGFAPPPSR

SEQ ID NO: 4096 - protein, 577 aa, unidentified
  source 1..577: note = uncultivated organism
MKKQLRIGAYLRVSTDKQVQVFEGSLDTQKYRMQEFVKAKNRDNKNWGAIVDFYIDEGLSAGTVNRPEYQRMMKDVRAEKIDLILVADISRLSRSVHDFSVLLKDLEQYNASYLSMKEQFDTTTPAGRLMINMVVNMAQFEREQTSERVSINCNSRAMRGYVNGGRTPLGYDRDEERNGTFKINEVEAEQIRIIFNTLRDQGSVGKTIPIIESLKIYPKSTEQKKVGIENKKWSYVQLKALLSNPVYVGVKEVNKKNKDADPDSLKPWEAYQMVKASWPAIIEEKLFYEVQNILEENYKLERRRLHDVEKRIFLLSGILVCGACGRPLCGQSAHGKDQVHRYYAHSFKRNDGTKCSVKRIRADDVEQVVINHLTEIVGRVGYFENLEKLLNNSINESPKQIQSEIHKLNKAVAETDEEISSTFKLQLQMSHGTEAAQLTAEHLDKLGKQKKVLLNRIVELEEMNFAQKDSTEICNDIENNVIEFKRGFKKAPPSMRRRLVHKVLGKLVYTGKGFETYFKFNEQHGEKVQEPFKKTNDKIIPFRAKKIPSSNLSEAEESLNLSFANLLIGRSGWGRRT

SEQ ID NO: 4097 - protein, 662 aa, unidentified
  source 1..662: note = uncultivated organism
MKYKKVSEVFKQRKKCDIYIRVSSERQVQGFSLDGQKRELIEYAKMKGLEVNNIYVEPGRSGKDIDGREEFQKMLNDVLRVDSEVGYILVFKLSRFGRNVRDILNTINLIHRYGISLLTKDEGIDSSSNMGSMLIAILGTVAEMERENISTQTMLGREEKAKQGGWNGGFAPYGYDIVDGKLVANENAYIVKMIYQKYIDENMGMKAIADYLNRNGIKKQRPKNKQDYKFDDWSDHTIKAILDNPVYTGYIAFGRRRTVKCINEEGEIVDKLLKQEDYITSDEQSHEALVSKELWDKAQQKRKSRAVRGNKRIGQAPKHLLSGILKCPDCGCNMVINYNKWCNQDGSNKQTRTYICGHYNRSGAHGQCKRNGVNAEMIEREVVNYTRRLISNPQFTSYVKEKIGYSTDVSEIEKEIESYEKKLKILERNKESLYKDIDNLADDDKIASRKREDMNKRLDNIYKDIEEIETLKLECEDKIDIIRKQEFNRDKIYEMLLHFDKIFDKLDDEEKQQLIQALISKVEVYKKDEIKTTKTYIKEITYAFDVFDLDTNFLGNKSNNVETVVKLSLKKDTPKIEVTMEPDEESNYTPEEKATYQKIKDYVKDKYGVNVHTSYIAQVKRMCGLDMGKNYNKSKKENPEVKQCPQEKVEYIKDALRHFKLI

SEQ ID NO: 4098 - protein, 546 aa, unidentified
  source 1..546: note = uncultivated organism
MSMTLNEGSYTQAEQARGTGAPLQRRDGLVRCAIYTRKSTDEGLDQDFNSLDAQRESAEAYILSHKHEGWVCLPERYDDGGFTGGNMERPALKRLLADIEAGEIDCVVVYKVDRLSRSLLDFARIMETFEKHGVSFVSVTQQFNTTNSMGRLTMNILLSFAQFEREIIAERTRDKMSAARRKGKWMGGGLVLGYDVAPRGGRLVVNEEEAAQVRAIYELYLEHRSLIPVVRELDRRGWRNKRWITKKGNERGGAPFTKNTLFRLLTNVIYIGKVSYKGTIYPGEHDAIVDAKVWKRVQELLRRNGRNGGKEVRNKYGALLKGLLYCVPCNTAMVHTYTAKKNGRRYRYYVCLNAQQRGWDACPTKSVNAHDLETFVVDHIRGLGSDGEIVAETIRQVREKSEKRMIELERERRTLERKLRRLHAKLRELATKAAAPGSDVSLTADRLADLQDQIRSIEQRMTSIREEVLSLERETVDESDLVKALSIFDPVWESLNSRERHRVMHLLIDRIAYDGRDGSVTVSFRSLGIKALCNEANMVYGGEHEA

SEQ ID NO: 4099 - protein, 518 aa, unidentified
  source 1..518: note = uncultivated organism
MAAVKDNLARKQIFIPANVPEEEIVLRGAAYCRVSTDSDDQINSFTAQNSHYMEMITDHDRWELVDIYADEGVTGTSAKKRKDFQRLLADCRNGRIDKVLVKSISRFARNTTECLEAVRELKSLGISIFFEEHNIDTKMVSSEMLTAVIASCAQAESESISRNMRWSVQKRMESGTFNTCRAATGFRLGEDGLRIAPEEAPVIYGIFADYLQGKNSREIAERLNAENALGRVWNRQTIDYMLKNERYAGNALLHKRYNTDTFPKKTKVNRGERPMYYVANSNSAIIEQELFDQATELRKARRKPAIQGQARFLARRLRCGCCGSLLRSKQVGGIWYWVCRTHEESIKACPLFPVSETEIFGAFLRLHFKLRNHPEVLYFLLKQEQRIRNRRMLWSPAAIELNKEISDILDQSHTLSLLNRQGMVDPDIFITKNNQLAEQLRQAKQQKIRLQELESSETIDATRQTQEALLAGPEILDAFDEELFCELIDRITVQSNTQVRFRLKNGLELTESMERTVR

SEQ ID NO: 4100 - protein, 541 aa, unidentified
  source 1..541: note = uncultivated organism
MRIYIYSRKSVYTGKGESVENQIEMCREYISAKIPESDKAEIVVYEDEGFSAKNMNRPQFQKMLRDIKLNKPEYVVCYRLDRISRNVSDFSSLIEDLNSYNISFVCIKEEFDTSKPMGKAMMYIASVFAQLERETIAERVRDNMLMLARTGRWLGGTTPTGFTSEKIQEIIIDGKIKTSCKLKDNPEELKTIDCILEKFLELRSISGVSKYLIKQGIKSRTGKIFSLLGIKEILQNPVYCIADEDAWVYFTEHHSDVCFEKTECSNKYGLLTYNKRNYRKKNAPRQGMDKWIVAIGKHKGRISGKKWVAIQNILKDNIPTGTKPAIMHNDYSLLSGLIFCDKCQSRMFAKQRSGKGGNRELYYYICNNKLRGGLKLCDCQNLNGQQADDIVCEYLMQYTDENSGIYKLLEKLKQDLQGQTQKSPLSVLDDKITKCNSEMDNLINTLSHGNLGTAFIERVNARIMELDKELASMKEEKKRLQKDVSVITDREIQVDMLSTALSSFKDNFYTLTIEEKRTLIKLMVKKIVWDGKDLHIFIDGE

SEQ ID NO: 4101 - protein, 509 aa, unidentified
  source 1..509: note = uncultivated organism
MKVSKIVPKPIETKKLRVAAYCRVSTDSDEQQNSFETQKAHYEAWIKIHDDWEFAGLFYDFGVTGTKTEHRDGLQNLLLECKAGRIDYILTKSVSRFSRNTADCISLVRELLDMNIPIYFEKENIDTGSMESELVLSILSSMAQDESRSISENNKWAIRQRYEKGTYKFSYVPYGYIRDDESFMVINPEEADTVRFIYQSVLNGYGSDKIAKILNERHIPTRKGGKWTNSTVRDILTNEKYYGAAAFQKTYTDENFHRKKNYGEVDSYFVEDHHEPIISKAVFERVKEIMEQRASEKRIISGSDKYQQRYVFSGIIFCVECGDKFRRKIHDSGKEIAWSCNTHIQNKDKCSMKYIRDDMLKAAFVTMMNKLIYSRKQLLLPLYESISIQGCDESINRTHCLQGELQKLSAKKDTLRKLRAQDIIDSVVFNQEINFIDTQAAEYRTEITNLCGETKDFSELNNLICFTDREMLTEFNDEIFEKFVIKIVIINRNCAEFHLRCGLKIKEAL

SEQ ID NO: 4102 - protein, 612 aa, unidentified
  source 1..612: note = uncultivated organism
MRVALYARVSSEAQEARGTIGSQLEVLRARVATEGHELVGEFCDDGYSGATLSRPGLDALRDQAEAGAFDAVWCLSPDRLARAYAYQVLVLDELEAFGVRVLFSDAPSLDDDPQARLLTQVQGVIAEYERAKISERNRRGRLFRARAGEIVTWKAPYGYRRVPRDGTGPARLEVFEPEAVVVRRIYDDYVNGGLSIRQIMRNLNAEQIATPTGKAEWWHSTLCRILTNEAYVGRVYFNQTETIPTNNATNSGRRRRATSQRRRPREEWIEISCPPIIDDAIFEATHRVSRDNSRWSPRNLHDEAWLLRGLVRCGACETCLNSHKLGRNSDGGKVHRYYTCRNKARNGLAGQQLCPERSVRADVLDAFVFEQVKSALISPAVLCAGEAALKATTSSSDDELLTTELHRLARKLDANRAERRRLADLYQSGLLELNEVQRRARDVDIRHDRLAKQRDELIAQRQQLASDNRLHHRVAEFAQRAAAGIDKLDFQQRQQLLRLIVDHVSVTGWQVEIHLRISLDDDPRGPSPESNWRPHYGHRRRTTGPAPSDEDHTGGAASSKDGLRSLHRVDVAEISRQQRHPSPGVVAVLVCLEQTAHGETVAQVVDARPARA

SEQ ID NO: 4103 - protein, 570 aa, unidentified
  source 1..570: note = uncultivated organism
MTKPHVRCAIYTRKSSEEGLEQSFNSIEAQQEACRAFILSQKHEGWIALNNRYDDGGFSGGSMERPALKQLLSDIQADKVDTVVVYKVDRLTRSLADFAKMIEIFDSHTVSFVSVTQQFNTTSSMGRLTLNVLLSFAQFEREITGERIRDKVAASKKKGMWMGGVAPLGYDCVERRLILNQAEANTVRTIFRQYLRLGCVKRLKDFLDHKQIRSKVRTSMAGRTCGGAAYSRGALYHLLNNRIYIGEIVHRGQSYPGQHRPIVPRELWDKVAARLHANNQAHRTGKSHSTPSLLGGRLFDGKGARFTPTHTVKNAKRYRYYTSQTVIRQGGPKPVITRFPAEELERFVKSQIHLLLQAPDKCTAGMEDSPSKDAAAERAQELSKEWPKLEISKQHEFTRNILKRVVLGQTTVRIEIDKSKLLRTLLAENSEALAFLHMHKLDTLKLTSDLQVLRRGSELHLVTAQNGSCFEGARVPSFAKAIARARDWYERIAAGKVNTIAQLAQETGLTRRYVRRILQCATLSPQITEALLTGRHRPNITLKEILHNVPLNWREQEQKPFGHRERTPLR

SEQ ID NO: 4104 - protein, 535 aa, unidentified
  source 1..535: note = uncultivated organism
MKRVYCLYRVSTKGQVDKDDIPMQRQACHEFAEKQNEWVIVKEFYEKGVSGYKVSAEDRDAIQDIKSAAEHGEFDILLVFMFDRLGRRQNETPFVVEWFNQQGIEVWSTQEGQQRFENEADYLINFMRYWQANGESRKTSTRVKTRLSQLTAEGVYTGGNVPHGYKLIPSGKTNKRGKELKQIVIDEDEAEIVKLIFSKTLKEGLGSHQLATLLNNRGIRSHNGSKFQCNTINRILKNRMYCGYLISGGTTSPHLPYLQIIDEHEFNEVQKILKQRSRKNDEKQQIAKTTRGHALLSGNIYCAHCGGHMISTSHIDKYVCADGSIRESRRTRYMCLNRTHSKTCKDAQSVYSAEKVDKAVESVILEYLEKIKQTPKSIAVEKRYQAGLQAMRKKVNGLKADNDNLKKQLVQLSDEIANALMGNSKFTPEMLSNAIESTKKKISDNTDSISKYELQIGNQQAAINNLDHYYDDFRSWADEYQFATKEQKKMIACKLIKEVRIGKGYNIDIVMDMNYKQFLECEEEGNIPTELKVAS

SEQ ID NO: 4105 - protein, 544 aa, unidentified
  source 1..544: note = uncultivated organism
MAKQTENNVGIYMRLSQEDMREGESLSIENQKMLLTKFVRDKGWTLISEYVDDGYSGTDFERPAVQKLLADAQSGKINTIVVKDLSRFGRNYIEVGRYVDYIFPMNNIRFIAVSDNVDTAERNSMALEMMPIINLFNEWHSSSTSKKIKAVYEAGAKQGKYFAAKAPYGYVRSDTPNHTPVIDPETAPVVKRIFDMRASGMSSLRIANELNKEGVLCPSEYFYQQTEKENTLRNRHLWCRTTVEQMLKNPMYLGHMVQLKVTSVSHKNHKKVQKDESEWAVVENTHEPIITQEIWDKCREIDRERSTGRVTNQGVVRPLSALMYCADCGFRMKNSSRAGRKSENGQRKQFYVCSSYSNFAKDTCSAHYIEGDVIEKIVLDDIRSMLHLVAEDEDKARKIFLARKQKNIDVQNTADKDKLLMAKKRITELDKLIQSAYEDKVSGEMPASICAKLLEKYEAEQNALSSQVQEIETRLAAMKQDERDVDEYISRLKKFKGAEVLTREMCLELIDSVTIDEYHKGKTDRDIHIYYKFIDKGYSDKSEK

SEQ ID NO: 4106 - protein, 595 aa, unidentified
  source 1..595: note = uncultivated organism
MPRKPIKRCAIYTRKSSEDGLELEYNSLHAQRDAAEAFIKSQKHEGWRVIKQSYDDGGISGGHMERPALQQMLNDLKAGKIDIVVVYKVDRLSRSLADFAQMMKVFDDHEVSFVSVTQQFNTSSSMGRLTLNVLLSFAQFEREVTGERIRDKIALSKKKGRWTGGVPPLGYDAAGGKLVVNDNEVEVVKQCFELYLESSGLIETINKLNNKGLKTKHFVSAKGRVYEAKPWIAKQLHRLLTQPIYHGMVQHKGELFQGVHEAIIDDELWNRVQAKLRDHQPEFQQGADSKGSSLNANSRLQHPLKGFLHTDDGFALTPTYTSKKIKHPDNTTIRKRYRYYVSQQAIGQGYESSKIKTVNALILETSVQQIIAQALPTLADYISLENFSPEKIKQNLEEHALYLSSIEVHESDFVKIIHLLAPKITLGTDSITIRLELTNLKLLMSPEPKRDIVHLKPPSEQFDLKVDVKNEVVVLKANVNLRCSRGKTELVSSETGKVITPIHRVPNTTLIQVIVQAEFWRQQMIDSPTKSLTEIMRPHKVKPNYVRRLINAAYLAPEIKRAIFQGTQPPELQAQDLIQKHSMDWQVQKKELGFV

SEQ ID NO: 4107 - protein, 507 aa, unidentified
  source 1..507: note = uncultivated organism
MDKYDAIYGRQSVDREDSISIESQIEYCQYETRGGAYKVFQDKGYSGKNTDRPQFQEMLSAIRRGEVKRVIVYKLDRISRSILDFANMMEMFQEYDVKFVSCTEKFDTETPMGRAMLSICIVFAQLERETIQMRVTDAYISRSRKGFYMGGRIPYGYKKEPFMIDGKRTSHYVIDPAEAEVVKLVYSLYAEPQTSYGDIVRYLMEQGITNSRTKDGAWDRCRIADMIKNPVYVKADLDLYRFYKDQGTNIHNSPEDFVGIFGCYLYSDKDAGRKQCNLEGQHIVLAPHEGIVPSDIWLKARLKCLNNKQVAKPLKAGNTWLAGKVKCGKCSYALTIRKCKLKTKTRRYFICSRRMQTDKCEGVGGIDADVFEPFILEQMKDHVKEIESLSSQKRIRENPKIYELNIKIETLSDEISKLLDKVADANDVLMDYINKRVKELDAQINVYRQQISELSPLQNAEKIDTKELKNYMDHWEELSFDDKRNVVDKLIVVIKATMDSCEITWKF

SEQ ID NO: 4108 - protein, 527 aa, unidentified
  source 1..527: note = uncultivated organism
MQEKRAVLYLRLSKEDADKVSKGDDSASIKNQRLLLTEYALAHEFEVVKVYSDDDESGLYDNRPGFERMMMDAKSGEFNIIIAKTQSRFSRNMEHIEKYLHHDLPNLGVRFIGVVDGVDTDNEANKKSRQINGLVNEWYCEDLSKNIRSSFKAKMKNGQFLGSSCPYGYKKDPDNHNHLVIDEYAAKVVRKIYELYLSGYGKAKIGSILSSEGILIPTLYKIEVLGENYHNSRALDTTRIWSYQTIHTILNNETYVGHLIQNKVNTLSYKDKKRKLLPREKWIIVKNTHEAIIEPEMFDMVQKLQKTRTRSVGTLEENGVFSGIIYCADCKHAMSRKYARRGKKGFTGYICKTYKTQGKKFCSSHNIENSDLEDAVLSSVKREAGKILKEEDVEELKKIQICNESRGDFHIQLESIQKRLEKIERFKRKTYDNYMEELISKEEYIRYVSEYEAEIKELQNQRSVITDRVDLQQKSDERHDEWAEAFKDYMNVKTLTRDMVLELIERIEVYEDGSITIYYKFRNPYAD

SEQ ID NO: 4109 - protein, 506 aa, unidentified
  source 1..506: note = uncultivated organism
MASNGTGTPTTIRCATYTRKSTEEGLRQDFNSLDAQRDAATAYIRSQVGEGWKLLPDLYDDGGFTGANMQRPALRRLLADVEAKKVDCVVVYKVDRLSRSIRDFAKIMEILEKSGATFVSVTQQFNTTSSLGRLTLNILLSFAQFEREIISERTKDKQTLARKRGKWTGGHVPLGYDLDAGRLVVNPEEAARVRQIFEWYLEDHSVFGIVTKCEDLGWLNKQWQTREGKASGGHALRKCHLYPMLANPIYAGRIRADGEVVKAAHEGIVDEKTFDLVQQKLQANARNAGTERRPKRDPLLRGILYCASCGGQMAATYASSKHRQYRYYACPQSTQRRADACVTRSVSAPVVENAVLESVKRFATTPEVLEVAASAARLRLMAELDQQRKELKEVNIILRNARSQLARAGSKDPGREAMLRDKIDAAQRKADGLRESVTRGERLRLDDETVGQRLRNFEEVWKVMAIEEQSRLLRTLIERVGYDGRRESVRITYHSNGVRELCKGVA

SEQ ID NO: 4110 - protein, 538 aa, unidentified
  source 1..538: note = uncultivated organism
MQIYKAIKYIRLSYTDDKTVESDSVANQRRLIDDFIEKHPEIEVIGEKIDDGYSGVLFDRPAFQEMMQMIKEGEVNCVIVKDLSRLGREYIETGRYMRRVFPAYGVRFIAINDNVDTANDAPDELTVSVKNIMNEAYCRDISIKTRSALEVKRRSGDFVGAFAMYGYLKTGDKHKSLEIDPYAANVVRDIFRKRLEGFSASHIADELNRLGVLSPLAYKRNNGLPHAKGGYTDRKDCKWSATTIIRILQDETYTGTLVQGKQTTPHFKLKEREDRPSSEWVRVENSHEPIIEKHDFDLVQRLRRIDTRTSPKSDKVYLFSGILICGCCGSRMTRKTNRYKDKEYHYYFCPTGKKHGCTSSVMIKEEDLVVCVQDSLKGHIENVASLEALLSGISQERINRELAQEYAGQIKVNERQLAQAEGFKTKLYENLVSGILTKEEYLTYKQKYNSDIELIQKAIEEWNGRLMDVMENRSERNRWINHFMKFSTMEEIDRSAVMQLIRSIRVLGKDELHIEFNYQDEYQKAVSLLEQMAERRAS

SEQ ID NO: 4111 - protein, 570 aa, unidentified
  source 1..570: note = uncultivated organism
MNASALTPAPIRCAIYTRKSSDEGLEQAFNSLHAQRELCEAYVRSQAGEGWRIDPEFYDDGGHSGATLARPAMRRLLADVAARRIDVVVVYKVDRLTRSLSDFARVIEAFDRAKVSFVSVTQAFNTTSSMGRLTLNVLLSFAQFEREVTGERIRDKIAASKAKGIWMGGAVPLGYDKPTDPISRALVVNIREAETVKLIFRRLLELGSTFALQTWLHREGIRSKRWVTMSGRTLGGLSFSRGALTHMLKNRTYLGEIPHKAVSHRGRHSAIVDRQTFDAVQAILAQNARVRRERVPKTQSMMLSGKVFDADGEAMAPLIHKGPKGRTYKYYAAPAAMPGEFGAGDDDTIRRVPAAAIETLVTERVARLAPGISAHDLEIDVRPLVARVEIHASAVHILLRLHHLATAANKRIGMDKLRARLAPGDQVVADANRPGCARIILPVRLKVRGGRTWTDGPTGRVSIKVSRPDRSGILRLRTAHSILRSCGIHPDEQLDRLRHARAPCSAHQVQLARWAFLAPDIQRGILTGSIGPDAVSRLKENGAIPLSWDDQRVLVRGPQSSATRLQSRAT

SEQ ID NO: 4112 - protein, 523 aa, unidentified
  source 1..523: note = uncultivated organism
MSARGRTDGPAAGTPPKRVAVYTRKSTSAGLEQDFNSLDAQREACDNYARSQAHLGWKLVAEKYDDGGFTGANLERPAFQRLLADIDAGRIDVVVVYKVDRLSRSLLDFARVMERFNRAGVAFVSVTQNFSTADAMGRLTLNMLMSFAEFEREMIAERTRDKVAAARRRGKWTGGPVPLGYDVKEKKLVVNELEAVLVREVFALYLANRSTLAVARELNARKHTTKHHRTGSGRIQGGRRWKKGDVLRTLRNPVYAGLMGCGSEVHQGEHPAIVDRETFAKARELLEENRCMRKDHGRNAEYFLRGIIFCQCGAAFTPGSTRRGEREYRYYRCVTRDKEGKEACPAAPLPAGAIEEYVVERVREAIGNGGFADEVAATAEARIDAKRAALAVARKELPGKIAALSADGRALVDGTRGVEGRARALLDERLKEVGEQLARAEARLAEVQRETAALDAVEVETGWVVRCLAEFTAIWDVLTPLNRGRLVRSIIERIEVDEPANRITVAFAPLGGGDPMRGDKEAA

SEQ ID NO: 4113 - protein, 510 aa, unidentified
  source 1..510: note = uncultivated organism
MTGNKKRAAIYSRVSTKDQLTRTSYDSMKSHLDRCQHYIQAQEAWELVKVYEDPAESGDKWEREKLQEMLADVKNGQIDVVVTFKLDRISRSVRQFHEILKTMEENDVALVSVTQGFDTSTPAGKLLRNILIDFAQFERDMISERVKDKRLARAQKGLWNGGTPPYGYKAENAKLIVKPEEAETVKLMFDVYSKTRSRAKVREELDLIGVKTRQNTPFSKGTIERILSNPIYAGKIFENEEYFPGIHEPIIDGEMFFAVNKLIPVRTHRGKPLMDRTFLLRGLVRCGHHDCKMTPYYVNKKGKPFYYYTCTKNMQYRKLKCPVAYANADKLEAYVVEMLKEVSQQKQIFTDIIDQVKLDIENETQPLKNQLTETKKRISELNRQIDNLVEAITASGSKGVTHLFEKKVQKLQDQLASLEKKKSELAITIANSPTEVAAQVVLDHLKDFKEVFDEISDEEKVSYLQCVIQRVTVNEKSIDIRIHTLPEPPASVNGSKNRLAWLGDKDSNLG

SEQ ID NO: 4114 - protein, 513 aa, unidentified
  source 1..513: note = uncultivated organism
MPQIKLISPLTQQTVKKLRVAAYCRVSTNSADQLNSYASQIRIYTKKIQQKPEWEFVDIFADEGISGTKSKNRPEFQRMIRMCELRRIDLIITKSLSRFARNTKEALEYTRKLKLLGVGVMFEKEGINTLSLGDEMLLNTFAAIAQEESQAISQNQRLSIIKRMETGTYVDSNAPYGYRLINKQLEEYQPEADIVRWIFKSYLNGMSTAEIAREMSNRGVLTKGGKEKWKSSKIAYMLSNERYVGDSKYQKTYRTATVPFTQYKNRGEEDMYYATETHIGLIDRETFEKVQTLLKCRRERFSQITEQNIYPLTSHIRCSECGSSFHRRIKNGSIKWVCAKHNENAKACNSFCYNEERIYDGFVTMVNKLRYGAENIIGQTISLLETAANTYKMNNQTARNMSQSIAELNAKLLMLDQLQGKGYLANEVYQMQTRNIRKQINELKLQRQDSYESKILETLVEIKKIKALLDEIDEPLEEFDQKLFEQIVCEITISRNDELTITLIGGLKFTEII

SEQ ID NO: 4115 - protein, 610 aa, unidentified
  source 1..610: note = uncultivated organism
MNLSNEKKVAGIYIRVSTEDQAREGFSLGEQEEKLRSLCEYKEYEVYKVYCDAGISAKDMAHRPQFQEMLNDMKKGKINYIVAYKLDRVTRSVRDLEELINLLEENNTYLVCDRDDVNTSTANGRFFVRMLTVLSQLEIEITSERTKFGLNGAIKSGHLPGQIPFGYKKDGNKKTVIDESLKPIVERVFNLYLEGKSFQQIANIFNEENILNKKWRDSNFEKMINSRIYVGDYVQYNRIHKKINKEPITYMNVVEPIIPRYVWEECQLQKVKNQRTYTRDRVYTFFQKIKCPNCGKIMKCKGSGSKDKRYTYYNCESCHENIREDYVEEIFKDVICEFLKFDETYNKKFLPLFADKENVNNDTSIQDEIKSLNKQKDRIKKAYMSGVVELNDFEEDLKVINEKLDNLNKELEEKNKNKNYKSYSVEKVMVDRDIESIFNDSRKDKEFTLKEWELKSKEEKQEFIARYVESVTFKKDSNKKYGLDVVDIKLKSIFQEKVNNLTNVGASEFFLPIVINDKEDKLIKANCPITRTQLNKYLEELHNYPNLFFTEIDDFYETIDTMDKAVPITLDDGEDIFKVIPILEDNYIKDKEFRFKIGILSVKKIDLENK

SEQ ID NO: 4116 - protein, 547 aa, unidentified
  source 1..547: note = uncultivated organism
MKIAIYSRKSKFTGKGESIENQVVLCREYIQRNIPEAKDSDILVYEDEGFSAKNLDRPQFRMMMQSARKQPFDYIVVYRLDRISRNVGDFATLIEELNGMNTAFVCIKEQFDTSTPMGRAMMNIAAVFAQLERETIAERVRDNLVLLARTGRWLGGVTPLGFVGEKTAVTDAEGKNRSAYKLTVVEGEMSRVRTIYAKFLEFQSLTKVATWCIQNNIKTREGSEFRMRTVRDILTNPVYCTADEAAFDYFTKLGSDVCFEREKADGKHGLMPFHRTEQNGKKQLRLPPEEWIISLGKHKPIIPSEEWIKAQEIISGNAGKSFYRPVRNQVSVFSGLVRCANCGSIMRPRINSNARREADGSQTFYYMCELKERSRLKNCQMCNVNGNVLDKLLCDEIMNFNKPSSNVGKQLDSILRQIEKKTGGNREQTEELTKQLSEKKRMIANLMKTLAMNEPTSTLFEYTKNEVERLDSEIKNTENELAKLSYISEQDDKRSEHVDMLVRSLGEFRERFAELSVVDKRDFMRKIIDRIEWDGENAHIFLRRTAG

SEQ ID NO: 4117 - protein, 530 aa, unidentified
  source 1..530: note = uncultivated organism
MKNTVAIYVRLSKEDLDSGERESESIQNQKSMLFNYAIEHEWQIYNVYCDEDYSGAYAGIDNHRPEFNRMISDASQNKFNIILCKSQSRFSRNMEVVEQYIHGRFAEWGIRFVSLIDNADTEVRGNKKSRQINSLINEWYLEDLSENIKAVFKYKMEKGEFIATFPPYGYSKDKDNRNHLVINPNTAPIVKQIFEWHSEGYGAAKISRMLNDRGIPNPRKQQEIDGLRKTYMYGPEELGCWSTTTIGDILNNQAYCGDVVQHKVEKVSYKSRVIRKVDSDDVIIIKDMHEPIISREMFEETQERLSKHRKATGTGKVHILSGKVFCHYCGKPMQKNHGRTTKKGHIGYLRCRDKYSYATKDRCPTPNIRIDYILDALQMQLITKFKNVAIENLNDEYIAQLLSRHSDENVLIETELSNLKQEQEKISNNQKNLYNDRLNDIISLSEYLDHNKGFIERLNEIEKRITEIEKKFKAKDDTRKRENIKTALMSFLEKKCLDRKIIEYLVERIEFGEINEETGNPMLKIYWAWD

SEQ ID NO: 4118 - protein, 509 aa, unidentified
  source 1..509: note = uncultivated organism
MPEVIVIEPRKVQQTAKKRVCAYARVSTERESQMDSYEFQINYYRDKIMSNPDWTLVDIYSDQGITGTSAQKRPGFQQMIKDCQAGEIDTILVKSVSRFARNTVEGLFYIRELKKLNVNVVFEKENIDTGQVNSELWLSFYNSMAEEETHNISRHIRWGYHKRMETGAFITACAPYGFTLINKTLVVEEVERPVVIWIYDRFLNGKTCEEIAFTLNYFAVPKGKNRIWTADGIRYILKNEKYIGDALLQKKISTDVLPYKRIKNNGQQNQYYIENAQEAIIAKETQEKAKRLLQKPEAAVKTDKQKRLLSGYVFCECGTKMRYKTSGEKVYWVCQKHVKDKNICVVKGMEEQSIHQACTTMYHKLKANYTKVLVPALQQLELLYSNEEPYNKPAEKDKEIMRIMKQIQVLNQLQSKGHYESAVFMQKIRELTEELKSLKEQNGMQQLKNNKTLQAVRSLIKTIEQGPEHMTVLNEDVFRKVIEKIVIQEDRTIIFYLSAGFQFEEKVEK

SEQ ID NO: 4119 - protein, 547 aa, unidentified
  source 1..547: note = uncultivated organism
MTAYNVGIYCRLSREDLKNGKKDESLSITNQRDMLVAYANQQGWSVYKVYPDDDVTGTTFQRKRFQEMMDDIEAGKVNCVITKDLSRLGRNYLEAGRYREFFIENGVRYIAIHDNYDNAIRDSYDIATPIKEIVNEMYAADISRKVRSTKKLMAEQGKFSNSRAPYGYAKSKENKHVLVVDDKVSHNVVRIFDLYLSGMPARAIADVFNREGILPPNEYFYSVRGLPNPYKNNKNSWGSGSIMGIIKNPAYYGAISNGKREVKSFKNKKISCKSFDDWVIVENTHEPIISKERWLEARSIGKKNKRETVRRSADGEVSIFAGIIKCSDCGGNMIFNRKELKSCTSEFYRCGTYQQKGKAVCPPHRIDFDVLYQAVLSDIREYAVLAVEDETKLIDRIIKENDDFRVKNVSRYEKHIREGNNRIREIDGLVQSLFEEKQSGNVSGEMFKRMTAKYEDEQRKLVADVEQMETELDECKRVQQDLSGWIARIKECLTIDTLTRAIAVEMIERIEVSETYNVGGEKTLDLEIFYKFGLKSDNHGETEKRAS

SEQ ID NO: 4120 - protein, 522 aa, unidentified
  source 1..522: note = uncultivated organism
MSKVNGKATGEKRTIRRCAIYTRKSTEEGLQQEFNSLDAQRESGEAYIAAQKHEGWVCLPDRYDDGGFTGGNMDRPAVHRLMKDIEAGKVDCVVVYKVDRLSRSLMDFARIMEAFEKHQTSFVSVTQQFNTSTSMGRLMLNVLLSFAQFEREIISERTRDKIAAARRKGKFAGGKPVLGYNLLSSPAGPKLVVNDDEAAQVRAIFELYLKYEALIPMVVELDRRGWTTKVWQTKDGRRVGGRPFDKNMLYHLLTNVVYLGKVRYRDEVHPGEHPAIVDEQIWGRVQAVLQRNRRTGGALVRNKHGALLKGLLRCAPCKCSMGHAYTAQGTKRYRYYVCLRAQKRGWHNCPTKSVPAGEIERFVVEQIKGIGKDPTVLAETLRQARGQGQRSLAELEAEERGLGRELARHNAELRKLASSVQNGEQASELANLQDRIRAAEQRATEVREQIVALSREMLDEREVETALSVFDPVWDTLSPREQARIIHLLVERVDYDGKLGTVSVTFRPNGIKTLAQQLEEVA

SEQ ID NO: 4121 - protein, 540 aa, unidentified
  source 1..540: note = uncultivated organism
MIVALYARVSTTRQAEKDLSIPDQLRQMREWSKARFYQISAEYVEPGASATDDRRPVFQQMINDACIAPPPFDAIIVHSLSRFFRDMIEFALYERRLKKYGVVVLSMTQQTSDDPAGEMARRIFSLFDEYQSKENAKHTLRAMKENARQGFFNGSTTPYGFRAVEIENNVGKGKKKRLEVDPAEGTIVNKIYQLYLDGYEGRYLGVKGIASYLNNRGFTMRGTIWRKTMISKIITNRIYLGEYVFNKRNSHTLKIKPESEWITINVPPIVDADTFNRVEQKRKERCSINTPSRIVNGPTLLTGLVKCGICGSPMTIATGKGGRYRYYKCTSKVNNIGKKECTNKNVRMETLDKLVLQAVAEKIFTPDRVEIMMDQVKVKIKGSVPKNHNTINHLIKELETIKSQTDKLYEAVEKGFIPQNTSLHERVHKHETRRQEILMEVAKLKSQKEIPLARLTRKNITAFCSALKELFKDKSVQFGKEYLKLLLDEIRVTQKEVHLKGGYAALTSALSCVSKQGLTKVPSFDPYWLPSADSNHGHAG

SEQ ID NO: 4122 - protein, 537 aa, unidentified
  source 1..537: note = uncultivated organism
MDKLCGLYARISNTKDAGVKDNSVDTQVDRLKDNIAHRAKYSTDGTWKVVDVYRDEGKSGKNTDRPELQRLINDIRSGRLNTVVCTKLDRITRSLLDFYKLHEIFTKHNISFISLGDNFDTTDSGGRAMLKITLVWAELERELASERTKAKMLWRAKQGLWNGGHVLGYDLVDKKLVMSKKEAKFVNLIFKKYLEKGSVLKVVEFLNDHGYRTKEYISRRKNTKKGGSKFYNQYVLHVLSNHLYLGEIEQHGQIYKGQHSPIVTKELWHEVNRRIKLQAPKRTSAKRDVEHVFLLQGLLKCGWCGNYMSTKYSTGRNGRHYYYQCTRNANSGKSACEMKYVPAAQMEKAVLGELKKMSTDKQRIQRIVDEANKDTSSTLSGLKKERKGQEVKLTGIKGKLKNILYNISSSTDLKNSKSIKAELSDLENQQDQIDKDIQNIDFEIGQVQQQTMNARVMYESLTKFSQIYDSADPVEIKELLPLFVERVSWTPSEIEIALFEQEVQKGQFQPDVNHSSGGALEVKKWLPREDSNLGQSG

SEQ ID NO: 4123 - protein, 568 aa, unidentified
  source 1..568: note = uncultivated organism
MKVVAAGYIRVSRDKSKHGKVRVEEVISPETQREFFVRYAQIRGWDLPADRIIEDLDYSGYRIHYSKRPGLMELMRLADQGKLQFLLIYKIARLSRRLREFLEIYEYFEKRGVAVISVTESVDTSTPYGRAALNMLAVFAQLQSEELGEYISNTKKTQANQGIVPGTPPSYGIVRKGGKILKHPGQFPHLEEMFRLAAAGMSAVQIRKALEDAGAPPFKGTIWHDKVIRDILRNPLYIGKFRFGGQVLDGKHEPLIDPKVWHQAQRELDSRKQTQADRHHRLLSGLIVCGRCGALYNVHYGGGHARRVSYQCRRRFRPGCKSLRVDAVSLEVAVSARIKALVTNEAILKRAERRLEAQAPKAAQTLEKDKRRLEAHLGSLKAAISTLFDDYHLRRIVTATQFGERNKEYLAAAQSAEAELALVNEKLSNSRFEAEEFASNRAALAGLVEVWGRIPHEEIRELLARAGVHVTVRPDGAVLSALGVEEVLPGYSHISTLFFGDHVDDLHHQGPLWSKAQADFLLANWNAHDANWIADQIGRTERGVRQKVWNLRREGRLKLKRIISTKAQ

SEQ ID NO: 4124 - protein, 525 aa, unidentified
  source 1..525: note = uncultivated organism
MAKRVTAIPPTISRFTAAPINSQKKRRVAGYARVSTDHEDQQSSYEAQVDYDTTYIKGRDDWEFAGMYADEGISATNTRHRDGFNNMVADALDGKIDLIITKSVSRFARNTVDSLTTVRKLKEKGVEVYFEKENIWTLDAKGELLITIMSSLAQEESRSISENTTWGQRKRFADGKVSVPYSHFLGYERGPDGNLVINPEQAESVRLIYSLFLSGLSLHSVASEMTKRGIKTPAGKDKWSQTTVKSILTNEKYKGDALLQKNYTVDFLTKKQKKNEGQVPQYYVENNHEAIITPQQFEQVQAELLRRSKSKGKYSGVSLFSNKIKCGQCGSWYGSKVWHSTDKYRKVIYRCNHKFDKDKLCDTPHFTEDEIKQMFIKGINKLVEDRDSVIEALEETIPLLCENEELLRQQSELSDEMGVLVEMTQTVVAENARIALDQTEYQKRYDGLVSRYDAAKAKYDEVTEQIADKNAKQEILTSFLNTLRKVDGAIREFDEVLWSSTVDFITVFSSKDIRITFKGGIEIQL

SEQ ID NO: 4125 - protein, 539 aa, unidentified
  source 1..539: note = uncultivated organism
MAKRRAGDIRAGIYARISSDRSDTRLGVDRQVKDCKALCADRGWIVDEVFIDNDVSATSGKRRPEYNRLLRAIESGDIDAVAVWDLDRLTRRPAELESFVATCEKAGVSQLAFVGGGVDLGTGDGMLVARIKGAVAAEEARKTGQRMRRKKQELAERGLPSGGGRRAFGWERDGQTVRELEAALIREAAEVVLRGGSLRGIATDWEARGVKSVGGGTWRPNSVKAVLRNPRNAGLRQHGREVVGTTKSGRPAFGRPVIVGDASWPPIIERDIWERLQLLFENPERSQVKVQTRSYPLRGVLECGVCGMRLTSVPRKKPIPSDPDRRMRYYGCRSDQGGCGKIFVDAQHAEHVVDGVILRLLSNRGAESIALASQKGDEAEVAKLLQQNAKDNERIADLEDAFGAGDLSREGLQRNARPLREQVADRTSRIAGLQGFSVLHPFTGHVDEHWDQLSADERRSVILSFLVSVKVKPKARGGFNRFDPKRLLFVWRYGGLARLHEQRGTSKTTSTSGDEDLRWLGGLVGNTIRQQRQMASGQQ

SEQ ID NO: 4126 - protein, 676 aa, unidentified
  source 1..676: note = uncultivated organism
MFKRISLSMRCMKTVIATTLCAAVYFLIDRNPIFACIGAVFGMDSYVANAPQTGGNRSIGTIIGGFTGCVCFILCQRYPGNISKTLIMFLGLLIMIVICQLLNATGSVQAGSVVFFILLLNTPADNYMSYAINRMIDTLVGEAVAFAVNYIVPPTHHSLKARKAKKIRGKSSDFLYMPKPPNIIYRRCFMEKYEAIYARQSVDKKDSISIDSQISFCKREACTQTKIYSDRGFSGKNTNRPQFISLMDDVKKGLVSKIICYRIDRISRSILDFGEIWQTCKEHGVEFVSVNEKFDTSTPMGRAMLYIIMVFAQLERETIAERITDNYYERVKCGAWPGGPAPFGFECCKKDGVPSLKLGKDSETVSEIFSSYSEGASLGKIAKELNSKGIKSPAGKVWHSASLGRILRNPCYVKSDLDVLRYYLNGGARCLSPAEAFDGTSSLSLVGKSKDAQKERRCDGCTLSVSNHPGIVDGKTFLLCQNRLDGNRQLKNSGSSGISWLSGLLKCGYCGYGVKLYRGRQSKEPKIYLLCSGKTNYGICDPKFYFSLCDIEQAVSAQLEKYILPPQDFMCLKSPKTERLENEIKQIEHRIHDLLSTKELSSPGVIKYINREIEEMETERLNLVKCLEWESEKSSSCPDMEDIDFNCLDRELKKEAAYALIDKILLYKDGIRIMWK

SEQ ID NO: 4127 - protein, 549 aa, unidentified
  source 1..549: note = uncultivated organism
MTKAQSAIRLAKEILVAIYLRLSRDDMNGNTESMSISHQRDMLIAYCEERGWTVYDIYIDDGFTGTNFDRPGFQRMIKDIESGCINIVLTKDLSRLGRNYVMTGQYTDFFFPEHGVRYVAVNDSYDSDKDDNDIAPFKNILNEMYAKDISKKVRSVRQTSAKQGKFMGSKPPYGYVKSSDDKHVLVIDPPAAEIVKRLFNDFAGGDSGRNIAETLNEEGVDTPAEYYFKQTGKRATRGDNGGQWGSATIMQLLRNQVYIGDMVQCKRKVSSFKTKKRLVTDPDSWVIVEHTHEPIIDEYTWTCVQRRMDSTKRAPANNRISVRDTDDTNIFSGIIRCADCGAAMTLVRKPRKSGNEKRLYRCSRYTNSGKSACSTHSIDAEVLESVILADIQHQAKDVVQDESKLLGRLLSYSGKEHQSKKAAQEKALRDAKCRIEFIEEASKRLFEEKITGNVPDGMFKKMLADYERELSELEDKAADMRHDLEASESGEADVQRWMALVKDCASIKRLDRATAYQLIDHVDVHEQADEYGHTIQNVQIKYNFVGCIS

SEQ ID NO: 4128 - protein, 509 aa, unidentified
  source 1..509: note = uncultivated organism
MAIVLYARKSVERENSISCETQLEYCKLVIKPDERDEKILTFVDNGFSGGNINRDGFQKMMRLVRQGKISKVIVYKLDRISRSLSDFVNILQEFKANKVEFISSQESFDTSSPYGELIVKILMVFAEFERTSIINRVTQAYAHRSEMGFYMGGRQPYGFELIPAVINNIKTKKLSPIPSEVEQLRYIFEVYAQESVSLRRLLNILIAENRKPLNGSDWTTAKLSTLLKNPIYVRADSDVYDYYERRGVQMITDMSMFTGEYGAQLYGHTKHKPDDPDWSDMKLVLLTHNGVVDSDIWLKCQRKLEKNKQIGNSVSNRTSWLSGKIICEKCGHTMTTIKGKINKDGEIRRYFNCTGKSHKKSCTGTKVSIYAEDLENMVYDCISDKLSDLKEAKRTSTNSSAGEINDLKLKIKAVEKAEKQLVDTMLSGGFNDDLLVLANQKATQLKRDKAALYDRIEELKSRNSETDVVVNLAKTWKTADYSRKKEVAMIMIHKIIISENGDAKVIWNI

SEQ ID NO: 4129 - protein, 557 aa, unidentified
  source 1..557: note = uncultivated organism
MAAFNTQSEPPVYAHALTRPEGLAADPANLVDLYIRLSVDAEGKDSMERQEADLREWASRSGLTVRRVWRDSGKSGYKRDVKRPDFDAAITAVTSGEVRTLAVWKLDRLSRQGSGQVGTVLDQVDAVGGRLYFLKDALDSTVYGHRMVIVVVSEQARNESANTSLRVKAKKAAQRKNGLYLGGRRPYGYVVGDDRKLRRHPTEAPLVREAYERLMAGETMLSICRDWNDRGIPTRFGGSHWRSSALSTTFRSPTLAGLTPDHRDRETGDQGVDIMPWRDPDTGETVSLMADGEEPIVSEGERMALLQVLDSRLRRYGRGMRAHKQPETLLGGGLVLCAECRRTCNSFGSSYRCRKRDFVGNECKHPLNVSVQVLEEAVKREWAFRMARLEPDDERLAVIADRWLARNNPATMRERTELADRVKTLEAKVAAADFDLYVRSTLTPERHALIVEELNRQVARARADLAELPRPTADLGALLDPEVSLPAIMAAPVLEARALLRLAIDKVIVTAAPAPGARFHPHERIHIVWAGEDVDPTTVDVSHLRQADTPCGRGVAA

SEQ ID NO: 4130 - protein, 551 aa, unidentified
  source 1..551: note = uncultivated organism
MKAEEFYNAAIYLRLSRDDGDIDGSKAESNSISSQRDMIRSFIRKQDNMEIYDIYVDDGWSGANFDRPEFKRMMKDIEAGNVNCVIVKDLSRLGRDYIEAGRLIQKTFPAFSVRFIALTDHFDSLTADYNETSLVVPVKNFVNDAYARDISGKVRSCQKIKRESGDFIGAFTAYGYKKCSDNRNQLVPDDYAAGIVRKIFTWKIEGYSNHAIAEMLDGLGILSPMEYKKVQGERYQTGFMTGVKTKWSAVAVKRILTNENYIGTLVQGKEERVNYKVKKSVRKPEEEWVRVEQAHEAIISKEDYGIVQELLKVDTRAGGGEKKAHIYAGLLYCGDCGEPMVRRVSRYKGKEKISFICSASNKSGKCGRHMISAEDLKKVVLAGLKTQVSLFLDKSRVLEVIDQMEVNFEEVASFDSEIKRLRAEQDKYIMLRSGLYEDLKKQIITEEDFKNFKEIYEQRYQELEQAVHNQEETIKKLFKSGVAAGVNLERMKSVMQITELDRMTLVSFVKQIYVYDDKKVHIELRYKELFSKITMLADYLEAKQAAGREAV

SEQ ID NO: 4131 - protein, 534 aa, unidentified
  source 1..534: note = uncultivated organism
MEETTRVGIYARLSRDDERFGESMSIENQKLMLTDYCDRQGWEIIDVYADDGFTGLTFDRPEMQRLIEDAKNGRINTVLVKDLSRFGRNYVEAGQLIDDLFPLLNIRLVAPNDGVDTHTNQNTDFIPIRNVFNEYYCKDISRKVISARKASAKQGNFMGSSAPYGYWLDTNDRHKLIIDEDAAVVVQRIFRMRADDCSYNQIADTLNREGIPNPRDYYYHKIGKPNPRVMRHYWSEITITHILKNEVYIGNMVQFKSGVVSYKNHSIRAKPEETWIRCENTHEPIIDKKLWDAVQSKFRKKQTKQRRTQNGELPLFSGLLKCADCGGLMHFKPNMNKRKDGSCLGHHSYCCRTYKQSGASACTSHWTGEQQLISLVKSELAEFAKQIEIDEQGVRDRLIAERSKNVKTEQSAMKSRRQTISNRIAELDTMLSRLYEEMLLGQLPRDVLMDLSNRYSSEKEEKQNELAELDARLAEFRSAVEDVEKWLSVLKQYLSGMELDRALLHKLIREIKVGAYTKVNGVKYQDIEIAYSFQ

SEQ ID NO: 4132 - protein, 520 aa, unidentified
  source 1..520: note = uncultivated organism
MKSASVGATRCAIYTRVSTDHGLEQDFNSLDAQREAAEAYVKSQAHEGWRLIKGGVFDDGGFSGGSLERPALQRLLALIEAAEVDVVVVYKVDRLTRSLADFAKLVELFDGHGTSFVSVTQSFNTTTSMGRLTLNMLLSFAQFEREVTGERIRDKIAGSKKRGIWVGGNVPLGYRVEDRKLVIDKVEAATVRMIFQRYHALGSLPLLLSELCAQGVITRPRRLASGRIIGGIPFTKGPVAYLLRNRTYLGEIKHKNQSYPAEHEAIIDPMLFAAVQARLDDNRNHHRRRYAASEALLLGRLFDDRGNRMTPSSANKKGVRYRYYVSAMLAQGRKVEAGSVPRVSGREIEVAIIQVLRVRFTEKAVFDERELIERRLVRATIRADRIDLEVRDDSGASTVAIPWTRKAANPRREIVGPSWPDDPRPMRAERRMVLIRAIAQGRHWLNEIIAGTADPDAIAARERCSRRHVEQMLFVAFLAPDLIKAIVEGRLPRGANLHRLTNPPVAWSAQWRLLGLDAPR

SEQ ID NO: 4133 - protein, 525 aa, unidentified
  source 1..525: note = uncultivated organism
MNRAHQSETDPISRLTAAPLRCAIYTRKSTDEGLDHEFNSLDAQREAAEAFILSQRGEGLVASPERYDDGGFSGSNLNRPALERLLSDIRAGAVECVVVYKVDRLSRSLIDFARIIEVFEKHHVSFVSVTQQFNTTNSLGRLTLNILLSFAQFEREIIAERTRDKMSAARRKGKWIGGRPVLGYDIDPRSSRLTVNADEAIRVRMIFQLYLENNVLLPTVREIDRRGWRTKQWVTRKGVIEGGQPFTKGRLYRLLTNPIYIGKIDFKNQIYDGEHDAIVGVPTWEDVQHILQQNGRNGGADVRSTDSALLKGLLRCASCHAAMIRTYTTKNAHRSPHYTCTEAQQRGRGKCEEKPVSEYSIKAMVTGQIRRIGSHPRMVAAVLAKANENRRGTMADLSLEHQAAHRELASLGTKLRELLPDAGCGEQTRAEQMADLHERIHRTEYRSREILRELRSLEGESVDEADLRVALAQFERLWEFLNSRERAQIVRTLIEHIDYSGKTHRVTVGFRSRGVRRMCRGQEDP

SEQ ID NO: 4134 - protein, 585 aa, unidentified
  source 1..585: note = uncultivated organism
MPISTESRLVRCAIYTRKSTSAGLDAPVNSLDTQREVCRAYIKCQAHRNWVEVPQIYDDGGHSGGTLKRPALQRLIHDIETNRVDVVVIYKIDRLSRSLTDFVQLMDLLDKYGASFVSVTQTFDTSDSMGRLVLNILLTFAQFERELAAERIKDRYEERRRRGLYCGGCPPAGYVIKSGGRLAPDPERAETIRRLFLDFPEWTANALAKRLEAEGFNTKMYLSRKGKQRGGQKFSTGHILYLLRNPIYAGYCYCRGELVKAQVEPLVSLEQWELVQSIIKARSKPTRDPSQNFLLGLIHDELGRKMSVLRSGTGRSQRQRHYRSERATWALGTIHRKVMVNADRVEQLAVSTIQGFLTDRIALKKAVLSLGTYSAETGRMLRKGNLAARRISDMDKPQLRELFLAIAPRLEVNRSGLHVLVCTFELCRFLAWDGSGLFRKCEIRPKGSDRFRMLYAPAYLQCGHSYFAIPVSPCAMPEAKPRPDLVDLLGQATEFKQLLLDQRSKTVAELAHTKSMGATMFSRILRLNYLAPDIQASIIDGTQPADLTRHKILFGPLPLDWEQQRHLLGFPTVESPTWVDSRPRV

SEQ ID NO: 4135 - protein, 507 aa, unidentified
  source 1..507: note = uncultivated organism
MNAIYVRQSVDKKDSISIESQIETCMRKLSSEEVKNNTEIFSDKGFSGKSINRPEFQRMMEELRENRIKKIIVYKVDRISRSMLDFLNMQNEFNKYDVEFISCKEDFDTSTATGKMMLNLLMMFAEMERETIQKRITDNYYSRGQKGYYLGGYAPFGYKKIETYLNGKKTYKFEIVPEEAEIINEIYILFNNGHSLGEIVRLLNARKIKTRRNGVWNNSTLSRLLSNPVFVMADADVYTYFQSKGAKINNSIEDYQGTNGCFVYGKAENRTSLKFKKYDTDYVTLGMHKGFIPSDLWLSVQMKFEQKNGHSNLGTGSLSWLQGLVKCSKCGYSEYVKKCVNRSGSEYKYFYCRGKRQGTCLADSKMIKVEMLEAMCEDVIFSQLMQYKIEKCEFETSDSQELYNLKIEKYRLEKNIKNLIKQLAEGTSVINQYITEEIEQLDNKVKAVSAKILELQIIEKKKSDNFIEANDILQSWGSYDMQQKKIVAKSIIREIQVDGNDINILVF

SEQ ID NO: 4136 - protein, 523 aa, unidentified
  source 1..523: note = uncultivated organism
MPKVAIYCRLSIEDKDKGKNDASASIRNQKDMLREYCRERDWEIFDIYVDDGYSGIDRSRPEFNRLLRDCGKGDIDIVLCKDQSRFSRDTVVIEQFINDKFLEWGIRFIGVADNADTDSESYSTMRLFTSAYNEMYVKDISSKIRRTLAYKREQGQFIASFAPYGYQIDPDDRHHLIIDEETAPVVRQIFEMYVGGAGYRAIVMKLNADGIASPSEYKRRKGSKYVNQNAELSSAKGLWTQSTIARILSNEIYTGTLVQGKSHSLSYKNKKRRKTNEADWVRVPDTHEAVIDVETWGRTQARLKSHARVGKRSQELSPLSGKVRCAVCGRPMKRSVYYNKSRTIKYYNMQCAAYKNGAMNCSNKTCISGLVLEGNILAELNSIVEKYCQTDKIRFEDIYSEQLKQLEAELSKLSERHSSAEKRLLSMYKDKLDGAVSDEDYAIFRKGLRDEEQELSARIAETRQNIGKCRQLVRDTGEQRSVIEKYTHFDKLDRNIADEFIDYVEVGEPDESGEREIHIHWKL

SEQ ID NO: 4137 - protein, 540 aa, unidentified
  source 1..540: note = uncultivated organism
MQEAEIYHAAVYARLSKEDERAGDSVSIESQVAMLTKYICDNGWEHTATYKDDGYSGTSFDRPAFLEMMSRVRKGEINLVVVKDLSRFGRDYLEVGQYIDVIFPALGCRFIAVNDNVDTIRNSNDMMAIFKNVMNDFYARDTSAKIRAVRKSSCRSGNYMGAFAPYGYVKDPADKHKFLIDESAAEVVRWIFTLRAGGIGCPKIARQLNAKGILPPRTYYFDARGQANPFERTNRKWNDCTVRRMLDNEAYLGHTIQHKEERLSYKDHRTKAVSPDEWIRVENTHEPIITKELWEECRLVNRLNSRPRQSKMKEVSLFSGLLFCADCGFAMRCQVTVRHKKDGTKACYEAYMCGSYSRSGHTACTTHYIPKSVLEELVSADIRARAEEVCIREREVIRRITEQKQTRGKQENAAMEKSAKTLKKRLAELEKLIQSAYEDKVLGKIPEDICVRLMAGYQSEQAEKSAQLKSLQDKLAEYKKAEEDVREWTALIRLYKDADILDRDMLLRLVDRIEVGERYTADGQKEREIRIYYKFVGDIG

SEQ ID NO: 4138 - protein, 558 aa, unidentified
  source 1..558: note = uncultivated organism
MAKRGPRSATGAIGSAASAGRQIRCAIYTRKSTEEGLEQEFNSLDAQHEACAAYIVSQRHEGWTLVPARYDDGGFSGGTMERPGLKRLLADVEAGQVNVIVVYKVDRLTRALSDFAKIVEVLDARGASFVSITQAFNTTTSMGRLTLNVLLSFAQFEREVTGERIRDKIAASKKKGMWMGGPVPLGYDVHERHLIVNETEAATVRLIFERHRALGSISDLAADLAAGGIVSKLRRMRDGRITGGVSYSAGALRHLLRNVLYTGRIPHGDQVYEGEHQAILDRDLWDASQALLDRSAPRPHTGHTSLLAGIIMDAHGRAMAPAHAIKGDRRYRYYVSRTREGDAEQPWRMPAGDLEAIVQQATVSLLHDPARVSAELGLRHADSNMSTRCSELAERASRPMALRALLEQLAAKATIAQDRIEVALDRRSLATLLGDASTNQEQEPLRLFVSATLKRRGHELRLVYTASDLRPAHRDDRLIQLIASGRAAYRELASGTGAHDAVRRSHLTRLARLQFLAPDIVTTILAGRQPIELTTRALLRIPELPLGWSEQRQVLGFG

SEQ ID NO: 4139 - protein, 539 aa, unidentified
  source 1..539: note = uncultivated organism
MKVAVYARYSSSSQREASIEEQIKICTEYAERNHYSIVKIYKDSALTGKTDNRPALQRLLNDCSKKLFDVVIVYSIDRFGRNLKQSLTNADKIEQDNGIMLVSATENFTNDPSGRFFRNIMMAYAQYYSDEMAVKIKRGMDYNAENCLYNGGGVPLGYKIVNKRFEIDTDIAPIVRSIFEMYAQGTTATEIINMLNAQGIKTSKGNRFNKNSLHHILLNKRYLGYYIHSGVEIAGGIPQIIPNDLFEKVKEIAQKNKKAPARAKAKVEYLLTTKLFCGHCKEMMTGFSGTGKQGKVYNYYICNGRKKKSCSKKMVDKNYIENLVISECRRLLSTENIRRIAKEIVAICESEKDTSNLKRLQKLLSENERKQQNTINAIMESDIESVRKRLEIQIPILEAEHTEIEKQITKEQAVYGSITEPQIRFFLTSLRKGKVDDIKYRKTIINVFVNRIYLYDDRVTITYNSGDNPVTISDRLLSELEEKDENEKVLFFNRSEPPRRCGRHIVRSDFFAKVTSHSFCRSSSPNRTRCAGLRFGFLS

SEQ ID NO: 4140 - protein, 528 aa, unidentified
  source 1..528: note = uncultivated organism
MNTLQTQGSSALAAEKREVFHIDATVSQTPKKLRVAGYARVSSDSDDQLNSFSAQVRYYTKLIEKNDGWELLEVYADEGVTGVSTEKRGDFNRMIADCRKGKIDRIITKATSRFARNTLDSIRTIRELKDIGVTVFFEKENIDTAKLTGENLITLYSLFAQEESLGISQNMKRGCRMKMQSGEYVSSNPAYGYRLVDNQLTIYEPEAEVIRRIYAEYLGGMGANQIAKGLVADGVPFKNGGDRWRHQAVLNLIRNERYVGDMLLQKSYNEDTLPYRKCKNKGELPQYYVKNSHEPIVERIQYELANILLRERGKQVNTIGANYPLSRKIKCAECGTTYRRKFTEGTTYWVCRKHDEDKTLCNSQRITEDSVYRAFIRLYNKLRANYKTILLPLIAGLQKLRDAKKKDNIELNTINKQIAELSEQNHVMTGLVSKGILDSALFISQADELNRRIKALKLAKARLLEEAEGDGTLERLQELADTLEAGPDCLTEMDAAIFGDMVDKIVAADTSTLDFILVGGLTLTERMD

SEQ ID NO: 4141 - protein, 564 aa, unidentified
  source 1..564: note = uncultivated organism
MNNTKRQRASIYTRVSTDEQAGEGSTSLGEQVRLCQEYIDSRGWDFTGTVYEDAGVSGTIPARQRPGLRTALRDAADSEFDVLIVLNLSRLARKLRISAGVADDLNEVGVGIASAQEAMIDTSTYAGRFVFQQFCAIAELDRESILAKTAGAQRAIARSGRLPGGAPPYGYRREGRGRDSRVVPDAAERATVTLMYDLLVKKRRNAEQVAAHLNDAGIAPRHAERWDASSVRSIGRNPTLGTGLVIWGGVNRSQTGGRRAHKARLNHDGTPKYGEPVTIDLGDPVLTVAQHRSLVRALERRSTGGTAHAPVSRVLTGRVFSAEGHAMYGVNLPREAWEGAYRCSKRRVSQGADRCTCDQLRARPLEDTVWEAVAGLLGDPDRLMAMARSYLALPDEPDAEADTAALSGVQVEIEKLERALSRAERGVLMADSDEDERRQAAVVAGLRSELGAARDRFAGYQALLASAESRGQALRDVAALAERARVNLGRFSLDQRAEVLRILRVSVVVSGPVRKGEPDSLLVSGIVDPRLGFGSEASSAGATAADSQPQSAPGVAGCGPWRSD

SEQ ID NO: 4142 - protein, 540 aa, unidentified
  source 1..540: note = uncultivated organism
MPKQTDYKVGMYLRLSRDDERAGESLSIENQRRILLNHIKENGWTLYDTYIDDGYSGTDFSRPGVQRLLEDAKNGTINLILVKDMSRFGRNYIMVGQYVDYIFPSYGIRFVALTDNVDTLNSDSSSMDMLPIMNVFNEWHAANTSKKLRTVFQSNAKAGKYMTSFSSYGYVKGDDENFTPTIDPEAAAVVRRIFEMRSKGTGLKTIADTLNQEHIRTPLDYRYDMIGKEAPVYSRHLWQAQTIKRILENPIYIGTLAQMKETTVSYKNHKVIRKDKSEWVIIENNHEPIISRELWDKVREVSQSVSRGRITTEHITHPLSGLCYCDGCGAKMKMQKTPENKSPYSYRCGMHVRYGKSYCSSHNIKGTVLESIILQDIQRQIDIAVNDEQAREKFLARKQGSTAVKTAEDIRRRKEVEKRLEELNRIIHKVYEDKVLGNMPEKTCDDLIRDYQGEKDSLQTELEGLLKRSEKQPKDEADVDEYIRRLKSYAGAEELTRQMCMELLEYVTVDEYVSKDTPRKISIYYKLIDEPLKNKNNAFA

SEQ ID NO: 4143 - protein, 657 aa, unidentified
  source 1..657: note = uncultivated organism
MRVALYTRISTDEDHQKYSLDAQRDRLEAYCKSQYDDYTVFKIYRDTSTGTNMNRPALEEMLAAAEARKFDALVVFRVDRLSRNVRQLAQMVEMLTEYNIVLRSATEPFDTANAAGKMMMQMLGVFAEFEHATIIERTRVALERKARNGEWCGGFVPYGYKRDEEGLIEIEESEATIVRRIFRNYVFGQKGATKIFKELNDAGLRKRSGIPWDNRAIIVILKNPFYTGVIHWKDKIFPGKHEPLISQELFDKAQALFEKRNVQPKGERFKAASDFFLTGLIFCGKCGKGLVGRAAHRNGHRHKYYSCSNRTYHRGCKLPFIRADIVEVLTIKEIQSIFRQPELLEKVWQLVNTKLQEERPQKQNEICKVAEDIVKTKSALERYFVEFEAGSIEQDVLRDRVMGLNLRIQQLQEEKAKLEEELEMLNLEGIDQDGIKAYIDALEVVLENGENEQKKHLLRVLVEKVLVHDKDRYEFWFRLPDGKIFDQSFQTAENGDSNSLSVSHLAEQVCNHIQLAPQMCLIASRKRSEAIFTINLIKNRKTRKYEFRRDKVAVFLLIPQKKSSQEMGVILNDVSHFLYPDLPLWLPAQRYPITLEEKRIKRMELVIEWQQGLASGFYINYADIARKNGCSRAWVSRMLNQNGAFLKIPFDNNFSLA

SEQ ID NO: 4144 - protein, 517 aa, unidentified
  source 1..517: note = uncultivated organism
MVSKSGKARRCAIYTRKSTEHGLELEFNSLDAQRESCEAYIKSQALEGWQALARRYDDPAYSGGNMDRPALQRLLKDIDAGLIDVVVVYKIDRLTRSLADFAKLVEAFDAKTISFVAVTQQFNTTTSMGRLTLNVLLSFAQFERELSSERVRDKVAASRKKGKWMGGSVPLGYVTKDKKLVINQPDAKTVRIIFSRYLVLRSFQKLVDELNQKGVVSNTREIKGKIAGGIPFTYGPLAYLLKNRTYVGETGHKGSWFPGEHEAIIDREVFEQVQQLLKANSLGRTGRRQQNGALLAGLIFDDRGNRMSPSFTVKHGVRYPFYVTSAILKGRKSDAGSVTRVSALDLDAAILRALRNRIDVAGDDSPLTPRKIIDHNVNRIVIGSKNVTIALKLTADRTPTEIEIPWSIPNKHERPRIEGASEDTIRAPNPQLVQAIVRAHIWLKSLSDGTYNSVEDLARVAGLHPKVIRNRIRMAFLAPNVTKAILEGDQSPRLRVKDFSGAAPLSWSGQRLALRSE

SEQ ID NO: 4145 - protein, 517 aa, unidentified
  source 1..517: note = uncultivated organism
MQDKLRCAIYTRVSTDSQAEVEFNSCQAQEEKIKSFINSQENFLVYKVYTDAGFSRANLERQALQVMLRDIQENKINVVIVYKIDRLTRSPKDFYSLMDIFENYKVDFISITERFDTSTPSGRLLRNIMLTFAQFERELTSERTRDKLLERAQKGMWNGGGLPFGYKVVDKRLVPDEQNALKLSQIFALFASTASLAEVYKTLKRKQVLNDKNLPFSKAHLQSILRNPIYLGKMRFSGKIYQGTHQPLISEDLFNYVQQFHKEKFRRLRLYKDYLLAGLVHCAECNSFMTPAHSTKKSLKRYYYYRCTKTFKYDWNACSIRHVNADRLEKFVIDNLKRISLDTNYIDSLIFKFNFKVLGHHQGLGLSPTCSEIDPKTVQQNLKNLLGYLEKANKIEQALALKKYIKDIIYSKESIQINMLCHPEVIDRQSIKNPAPLEENGVCGRARAAANLTVQVNFQTKRTTVNSSPSLKMAPPRGLEPRTWWLHLTRNYFRKWTISLPSASCLTAGRYVTVAGA

SEQ ID NO: 4146 - protein, 516 aa, unidentified
  source 1..516: note = uncultivated organism
MTNGDTMRCAIYTRKSTEKGLEQDFNSLDAQREACEAYIASQRHEGWSALPARYDDPGFSGGNIDRPGLKKLMRDIERGKVDCVVFYKLDRLSRSLMDFAKLVEFFERQNVTFVSITQQFSSTTAMGRLTLNILLSFAEFERAIITERVRDKIAAAKKRGKYLGGTPTFGYDVDYQNKKLVINPKEAKIVRRIFQQFIQTGSCLGIAKELNAEDITTKSWTTRNGSFHQGGLWSTQHIYRALNNRTYLGETVHEGESYPGEHEAIVPKPLWDRVQRIFSDGASRKRNQETHEVKALLRGIIRCGHCGRAMICSYTKKKSKVYRYYVCNGAMRFGYSSCPVKSVPAGEVEKAVIEQLRVLLRSPEMIAQTFRATKNLEAQELEALHEERSTLQMRMVELKALAGEMVASDTTDETPPERFAELNGEIRETRQQLSDMESRILAIQGQSIAEQDVADALRKLDPVWDELFPSEQHRVFRALVASVIVTADGLDIRLKADGIHSVVAELRDSEERVCTV

SEQ ID NO: 4147 - protein, 523 aa, unidentified
  source 1..523: note = uncultivated organism
MPKVGIYCRLSIEDKNKLKSDDSQSIQNQKSMLRDYCRERDWEIYDIYCDDGYSGIDRTRPEFNRLLHDCEKGNIHIVLCKDQSRFSRDTVVIEQYINDKFLEWGIRFIGVADNSDSDSEMYGTMRLFTSAYNEMYVKDISSKIRRTLTYKREQGQFIGSFAPYGYMIDPNDKHHLVIDEETAPVVRRIFDLYVQGFGYRKIVQELNTQGLLSPSAYKTKSGSKYTNCNADSSNSKGLWTQSTIAAILRNEMYTGTLVQGKSHHISYKNKKRKKVDKSDWVRIPDTHEAIIDKETWERVQERLNSRTRSSRVSQELSPLSGKVRCAVCGRPMKRNVYYNKTRTIQYYGLQCATYKTGTMNCTNTKSISGKVLEQKILDELNRIIQSYCQTNDITINDIHNEQIQTMERQLSSLQNQLSTAKNHLTQMYKDKLDGIISESDYLMFREALSSEEQEISANIAETKKQIEKCRIRCENAENQKSLIEKYTHITILDRCIAEEFIDFIDVSEIWNNGEREINIHWNI

SEQ ID NO: 4148 - protein, 560 aa, unidentified
  source 1..560: note = uncultivated organism
MNAKTNNTNNKKRYVIYTRCSTDDQAQGDFTTLDSQAYHCKNMLDAFGYDLARIGNKGRIDDDGYSGKDLNRPGIQMIIDHVRRETASFDGIIFFRLDRLTRNTRDLYWLIDLFREKEIDFVSVRENLDSSTAIGRVVIGILGILSAFERELTGERVKASAIARVRQGKWVGGMLPYGYRLIPDGEPFPNGRQPHKIIPDEKITTHLKVIWEMAADNRSLTQVGLELHRRGLKTLNGKEWRRQVISRILKNPFYKGYIQYSGEYHKGNHAAIVDEKLWERANKILSAKLPGHNFVQKERFYEYLLAGILRCGDCGSHMVCNFSGGRDRRKFFYYECSRSKQALGCKAARISATTFDKAIIDYFKRASKDKSIIIKALGDAMLESQAKLEKIDADLKEKELKLNGFRHQANKLLELAMGNTVTQGSTYKDKMAELETEIAKLEDEIDKLEAQKRVASINACSGELVYGAMGFAIQHLENAPPEAQKSLIHALIKDIYVYSDRLVINMYIDEPLESILPTEIASTNEKRPTEACKALASTASLSSVSDSCQQWLGRMDSNHD

SEQ ID NO: 4149 - protein, 540 aa, unidentified
  source 1..540: note = uncultivated organism
MARKSRKETSMVPTIQKQPVVYHAAAYIRLSSDAKRKPGDSLETQQDIIENFIATSPDIQLTEVYIDNQATGTNFDRPAFQRMFADVESGRINCIIVKDLSRFGRNAIDCGYYIEKQLPALGVRFIAVTDAFDSLEGDGGILLPLKNIIAESYALDISRKCRSVQRQNIQDGRFVGRMAPYGFAKSTEDCHRLVVDEEAAAIVRQIFGWAASGMGVGEIIRTLNEQSVLPPSHYKWEKGLITNKRLLGKPFWQKRTVMDILRDRVYVGDMAQGKTHTSGGKQNSIPREEWICVPNTHDAVVSQELFDRVQERLRHCSERDKAVRSTAVAYSPHLFRGRIFCAHCGHPMHRHRQNKDGTYWYRCESQWKYHKGACYQVSVKEEEIKTEVFALLRKHAEAILGGYVHRERMTPVKNAAAETELAEINRELASSGHFLKSLYESLMGEIITADEFAAMKADYEGKIKALSKRADQLRAKRRERRNERESYQDFADAVSEALAESELTADTAQRLVERIHVRRDKSFEIVFRFRDEFREVKCVG

SEQ ID NO: 4150 - protein, 501 aa, unidentified
  source 1..501: note = uncultivated organism
MVILKGAENMTAIYARQSVDRADSISIEQQIGLCRYEARGEEVVTYIDRGYSGRNTNRPEFRRMMDDIREGRINTVIVYKLDRISRSILDFSKMMEVFGERGVQFISATEKFDTSSPMGNAMLNICIVFAQLERETIQKRVADAYFSRSQRSFYMGGPIPYGFRKIPTVIDGIHTSMYEAVSEEADVVRMIFEMYSERDTSLGDIIVRLNEFGMKKRGKPWVRQRLREMIINPIYVMADGDVYDFFQDNGADMVDAKTAYIGENGCYSYRRCTDGNKKTTDGIQIVLAPHKGIVSSELWLKCRRKCSGRNAAIPSQKARNSWLSGKIKCGECGYALTAKEYDGGRRRYLRCSNRQNSGSCKGAGTLYTAQTEELVFNEICVKITELFCTEKAAQDAERLRLENELLETEREIEGLVDRVNGADDAVFRYISDRINTLDLHGKYLIQRIKRLANEGGAGFDEKAPDMTLWNELSFEDKRQVVDTLISAVYACEGHIIIQWRI

SEQ ID NO: 4151 - protein, 500 aa, unidentified
  source 1..500: note = uncultivated organism
MSKKRKRGCAYIRVSHEREDGVSPDTQREKIDLQAQLLNVDVIKIYEKDIDCSGRTDRRPDFQQLMADVQKGLYDFVFVYKLDRFARSVLDFHKNMEILDKHGVAMVSVSQNFDTSSPTGRLLRNILIDFAQFESEMISERVKDNMTENARRGRWNGGQEAYGYTWNPEKRVLEMNENSRWVLFMFEEYARNCGANSIRNRLRLEKVNPKSGDIWSPGSIRYILRNPVYIGKIRWGSELVDGNHEPIVPLELFNRVQKILNENNDKSPREISSPHLLSGLIRCVKCGRKYTVAFNGKNRVLRYMCWTRKNVSSFECDGKIIDAISLEKAVIREVLSLSNDNIFFEMAKKSLLDALANSNPETSGDFNAQKENMEKRLKKLRVAMKELFDDFYLNKSIVRNQFELINSQYLEEEEVIAKRLKEITEMEDTREVQEENINILQQMVLQFQKNWEYLNNEEKRLALQQIITEIRPMDDYVEIDFFYDTRRLFPTATTSTTLTF

SEQ ID NO: 4152 - protein, 605 aa, unidentified
  source 1..605: note = uncultivated organism
MKAKALIPAVAYVRKSTKGERKGRERQEKSLPQQAMEIDKLAEGRYRIVGRYSDPGISGWKMGAQRPDFQRLLDRAQQAHDFEAILVDNLDRFSRASVDEVQEVALQLKRAGVKQIVSAAQGVFDLGRTGSDIGEILRFVVAVWSSHEYSRQLSRRIALAKRNGAVEGRRTGGNAPYGLKNDGKGGLVAGDAKEVKTVRRIFTEFVNEARSLSAITARLNAGNIPSPQGGRWSCRTIAQLVRRTAYRGDFRFNVVAAGQFFRIDAKGEVVESSEIESPGRVFEKTAVYEPIIDPKLFDKAQAKLQRLSQNRSQRKSQYALSGILRCDNCGEVMFGRMDRSAVTYQCSSSATHGKGSCKAFTIRESRILPFVMRRLGQKIKNVYEMLTRPPEAIANPRKAERERKAHLQRERDSLAKRIARAEDNLMASEDVRTRKSLDQRLTALRDELEALDKQLAENKPAAIEGYSKEEAEAINAWWDEFLAKAVGVPVKGEVGLVAATFFQDPLAEERMILLDPRVVNQALRELGAEVHLLWETEQYKTSGGIARNRHTLVRRQFQLGRQKGSISGTCLVNSSLLAVIKQIPSLGRVDVAFDGVELPMKENPK

SEQ ID NO: 4153 - protein, 500 aa, unidentified
  source 1..500: note = uncultivated organism
MPLRGRRYATSLTPRQMLGKVPAMRDNDLVSMHVKAAIYARISSDKSGLGLGVQRQQEDCQRLAADKGWLVTATYVENDVSAFSGKHRPEYEALLHAIEAGEVDVVIAWSHDRLHRRPTELEHYLDICERGKVDTYTVKAGHLDLTTPSGRAVARTLAAWASYETETSTARVKAAKAQQAQSGGWSGGQRPWGYEPACVAIRQPEADLYIEAVDRVISGWSFNRVAIDWNERGITTQHGKTWNSLKLRNLLLHKRYAGIREHNGTDYPATWPAVITVEKYEALQAAIARHRSEHKQHGPVRRNLLTGYVFCGRCDGRMSSGQRGDGEPRYVCTHCYRILRMVAPVDLLVKESILYRLDTPDLGKLLGKGEKDDTRLKELLLERNKRRQRLNELTDDYMAGLFTKTELTRAKTAADAALLALDRQISAVTRQQAGMNLLPVGQTIREAWDSNDLAWRRQLIGLLIERVVLKPSPGAAHLPKSQLWNGFRFRPTDVDIRWAA

SEQ ID NO: 4154 - protein, 530 aa, unidentified
  source 1..530: note = uncultivated organism
MPRNSSVNRGLASTTVPVELAKPSTVRCAIYTRKSTEEGLQQEFNSLDAQREAAEAFIRSQKHEGWEPLPDLYDDGGYTGGNMDRPALQRLIDDINRRAIDCVVVYKVDRLSRSLLDFAKLMELFDKRGVSFVSVTQQFNTTNSLGRLTLNILLSFAQFEREIISERTRDKLSAARKKGKWIGGHPVLGYDIDPKGGRIVVNADEAQHVRAMYDLYLKLGTLNAVWEEVGRRDWRSKQWTTEAGVTRGGKPISKSGLYGILTNALYNGMVDHKGVLYPGEHERIVEQKVWDRVQEGLRENGRTNGAVVKNRYGALLRGVLFCKHCGTAMMHTYTHKGPRRYRYYVCYKAQQKGWKNCQTKSVGAEAIEGAVLTSIRRMATDRDLAEAVLAEAMTQLEGRTHELVAERTSAKRNLRQLNQDLAKLAGEAGSDTGLRFERMRSQEEAIRATERRLDEISRELAHLEQEPLDVDHLRRTIREFEDVWATLTVREQEQMVKLLVSKVVYDGVTGKVTISFRSAGAKELCQGKNE

SEQ ID NO: 4155 - protein, 524 aa, unidentified
  source 1..524: note = uncultivated organism
MARVLGRVRISRLTEESTSIQRQRDLIEDWASKNGHEIVAWAEDADVSGSVSPFDAPALGRFLTEEGARGWDIMVAWKLDRLARNAVNMHKLFGWIQENDKQLVCISDNIDLSTWVGRLVAGVIAGVAEGELENLTDRVSAGMRELRQTGRFQGGAAPFGYKSAPKEGGGRTLVKDPEQQEVLQWIFEQALKNRTFVQIAEDLNSNRNFARNEYNGKTTQGWHATTIAAILKNKAYLGWTTYERKPVLDNNGEPVKRCEPSISVEDFNRIQELCSRRGFRGRAAPKMSPLHGVIECWECGHNLHYHRMKTETAHNYWCRYHENRKGKSINAKVAEDRLDELVRDLIGELPILEKRISTIRSSEEELEEARATYREIASFLSTVPDEASRKTIFEQLENVNRRIQELEKAVHSTDGTEWVDTGVTFGQRWEELDAEGRRLLLTSAGIRYRARTIVKGTRWTLPILETELIVPEELQLAARTKGFNLPEIERRQRQQWWESLTEEERRAWLDAGIPAPGTEEGENA

SEQ ID NO: 4156 - protein, 542 aa, unidentified
  source 1..542: note = uncultivated organism
MEKQLRSNSRDRFVGIWIRVSTEDQAQGDSPAHHEARGRLYAQAKGWDVREIYSLAGVSGKSVAEHPETKRMLADIKSERISGLIFSKLARLARNTRELLDFSDTFQAHGADLVSLEEAIDTSSPAGRMFYTMIAALSQWEREEIAARVKASVPIRAKLGKSLSGQLPFGYTRKDGKVVPNSDEAPIRKLMYELFAETRRKKAVARVLNERGYKSPGGKAWTYTTVNRLLRDPTAKGQYRQNYTTSGKKPGSIEYKPESEWVVHEIEPIVPVELWESCNAILEGQRTARNAPGRSAIHLFSGLTYCADCDHKMYVPSRQPYAYRCWKCNVRVPADDLEAIYHAQLKGFLFSDKDIAAQMDALDSVISAKEEQIKHLERERGAVKKEMDKAYQLYLADEISAPGFGERNRPLELRLVKIDEELPAQQAAIDVLRINRLSHDKILAEARSLHNRWPDLPRDQKRQIVETITDRITIGKEDIDILLHYVPTTAVGTNGPDGQTVQPGKPRKSGTAANALKKATQEFGLVRGKLGGTRTTSNGCSA

SEQ ID NO: 4157 - protein, 543 aa, unidentified
  source 1..543: note = uncultivated organism
MADKIWNVGAYTRLSRDDGDKAESESIGSQKEIIRDFIQNRKDMVIVKEYVDDGFSGVSFERPGFKQMMEDVKAKKIDCIICKDLSRFARNYIDSGRYLEKIFPFMGVRFIAINDNYDSAGEKSQSDSLIVPFKNLINDAYCKDISMKIRSQLDIKRKMGDFIGAFAVYGYKKDPENKNKLLVDEQAAQVVELIYRLRLQGMSNSGIAEKLNDMGVLSPMEYKRSNGMRYESGFRANERALWTSVAVLRILTNEVYLGTLIQHKRGTPNYKVKKEIQYNKEDWIVIEENHEPIITRIDFDTVQSLLQRDVRVAPQEDSVHLFSGYVHCGDCEHTMVRKAVPSRGKKYYYYVCSTHKAKLGCSSHSFSESKLNKIVLSLVQDHIQQICRLDEVLDYIAALPESQREIFNYDAQMTKLNEEIQRFQDLKLNLYSDMADGVISKEEYMEFRAGYDRKIQARQQSLLQLKEEREQAVESNQRSVTWIELFKQYENITELQRSVIVNLIERIIVYDAKHIEVVFRYEDQLHSAMQYIERFSEVIEEVV

SEQ ID NO: 4158 - protein, 511 aa, unidentified
  source 1..511: note = uncultivated organism
MDAMYLRKSRIDLDAERSGEGNTLLRHKTTLLELAKRQNRTIGEIYEEVKSGETIAARPEMQRLLADVEAGRWDAVLVMEVERLARGDSIDQGIVSQAFKSSGTLIITPAKTYDPNNEFDEEYFEFGLFMSRREYKSIRRRMEAGKRAAVREGKYMGKTAPFGYRRVRVENGKGWTLEIVPEEAEIVRRLYDMHVRQGVGFQHMARMLNEEGALTRRGNPWCPYSVRAILDNVTYAGYVYYGRVKTVKTSTGRRGIKRRPLADEVLICKGIHPPIISKELFDASQARRMKYRSAPVRNDEDLVNPFQGILFCRDCGARMQLNVRPAKTHSLLCRNISCSNISARLPVVEELLLHMLEDWLDSYRVECNSETSDLLRQRLSEAQTSSQRIDSQISQENRKLQKAYDLLESDVYTTDEFTARRASIQERIAELTQKKSQIEKKISEYEQAVEQQEDIVPAVERLVMMYKYADTAREKNDMLKACLERIEYKKTKQYNDSSIKLWIYPRLGRKS

SEQ ID NO: 4159 - protein, 542 aa, unidentified
  source 1..542: note = uncultivated organism
MVPYQLDPPSHLRTYNAALYIRLSREDGDKPESDSVVNQKRILENFVTSQPDIELADTYVDDGYSGATFDRPAFLQMMSDVYAGKVNCVIVKDSSRFGRNASESGRYIGEIFPKLQVRYIAVNDLIDSGKSQGAAVDFLNNTMRGMINEYYVAANSESIRSTLNMERRRGEFIGSFAKYGYKKDPADHHKLVIDEEAAEVVRQIYKMYLSGTGIRGIVRCLNESGIPNPSTYKRNQGMNFKARTVGDSSLWSDKTVRRTLQDQMYIGNMVQGKCRKINYKTKSIRSCAPDEWNIVENTHEPIIDRDDFDRVQSMLQRSVKGSSVSGSIDLFSGLLKCADCGHALIKKTNHNPDKTYVYYRCSTHCKCKSACPAHTIRYERLYHCVLYCIQQMVDIAVDADDVIKEMRQNQSAAKTTVDIEKQIRSQEQELDKVSDLLADLYPDYKSGLINADQYRINKGKFEQAQKELTQSIRRLRSTLSKSDTQAAATNDFIEHFKRHGNISSLTRPILTELIDRIVVHADGTLDIAFNFCDAFGDTSYSD

SEQ ID NO: 4160 - protein, 526 aa, unidentified
  source 1..526: note = uncultivated organism
MDKKKIRCAIYTRKSCEEGLEQDFNSLDAQREACESFIKSQKHEGWSLIEKQYNDGGFSGGTMERPAFKELLNDIENDKIDIVVVYKVDRLTRSLMDFSKIIDVFDKHNASFVSITQQFNTTTSMGRLTLNILLSFAQFEREVTGERIRDKFEASRKKGLWLSGTSPYGYTKDAHHMLIPEEPYAKNVQFIFESYLKIKNVLKLKQYLAEQNILTRKGKNISKSSLYHILSNKVYLGKIIHKDKEYDGIHKPLIAKELFDSVQNILEINAVERKHQTNAKSGSLLAGLLYDDKGNKMSPSYSKGKNKHYRYYVSQSIKNPVDYERGEITKLSAGEIENFVQADLKSLLNNTQIIHQHLENYSVKQQKLILKNMQIYDIDKVFLRTAIKRIDLRIDCISINYDIAYIIKYFATRAFNTEYKHTDAEVEIFTKDINVKISLTPQRQNKIIIPGKANYDMKLIQAIVKSFWYNKLGAERKLPLEARNGNNKRLRKLRFLPPDIIESIMNGTQDPELNIKQLITMAEKYC

SEQ ID NO: 4161 - protein, 503 aa, unidentified
  source 1..503: note = uncultivated organism
MPVYDALYARQSVEKTDSISIESQLEYCRFETHGNAYKEYTDRGYSGKNTKRPAFEEMMDDIKNGIISRVIVYKLDRISRSILDFENMIDLFQKYHVEFVSSTEHFDTSTPIGRAMLNICIVFAQLERETIQKRITDAYYSRCRRGFYMGGRIPYGFSKTDTVIDGIRTSMYVPVPEEAAQIRLMYSLYADSGHSLSDIVTHFHEHGILHLRGGSWNTARISDMLRNPVYVKADADVYNFFRSQGTKIINPVSDFTGRNACYLYKGTESSPRKQSDLTDRELVLAPHEGIVSSRDWIRCRLRCLSSRKSARTCKAKHSWLAGKLKCGCCGHSLTIVKADTRRGRYFVCSTSLPGKRKCRRTGGTIYADVLEAYIENAIQKALGEFRFLTGENMYRNPCINKNKIRIAEIEEEIRNLISQIGRGSQAVTEHLSSRIELLDTEKHRLMQKNLTLLNSPDPGSGHYITAHTEIWKKMDFEDRKTVADILIREITAADGKISIFWKI

SEQ ID NO: 4162 - protein, 533 aa, unidentified
  source 1..533: note = uncultivated organism
MQSFSVFNAAAYARASKDDTDSSTIENQLELINDYAKSIPDIKIVSERSDNGFSGVDFLRPSFSKMMEDIKKGGINCVIVKDLSRLGRNYIEVGELMEDILPKLKVRLISINDRYDSNNPKSDADDIIIPFRNLINEQYLRDISIKIRSNLNVKRKNGDCVLAHAPYGYVRDKSKKNRLVKDGRAAEIIRDIFNMKIRGMSQQKIADRLNEIGEPAPSEYKKKHGINFNTPFQKNVTSLWSPVAVKRILSNPVYIGALIQGKETTPNYKVKKRIIKPENEWNITEEAHEAIIKKTDFETVKGLLKQDTRTPPKQDIVFPLSGIMFCGDCGNSIIRKKTGKYYYYVCATNKTGKGCTSHSFAANELETAIMEAIKKQINAVLDFEKSLEYLKNLSCRQINIQKINEQINDRENEIKDCERYRRSLYEDYKDGELSKEDYIAFGRDYADKTEELTKAAKILKQDAESLSDENNSSNKWIEHFKTYKNIAGLSRQLVTNLITRINLREKKRITVFFRYQDKFETIKKSLRGVKREG

SEQ ID NO: 4163 - protein, 514 aa, unidentified
  source 1..514: note = uncultivated organism
MEQKSKAAIYLRLSREDGDGESSSIENQRQMLNVFAADRDDLEIIGEYADDGYSGYTFERPAFRSMMEDAKSGKIDCIVVKDFSRLGRHFQKTEEYMQRIFPKYHIRFIAVNNCYDSSREQSSAQRLTNPLINLMNEFHVAETSQKVRAVLEHHRKSGKFIGNHAPYGYCIVDKALVVDEDAAAIVRRIFRMKIGGMNNQAIADELNRNGISSPLEHKAERGTGVTGAHLKRSSKAVWQSMSIRRILENPVYIGTLVQGKTYSNSYRDRRRFKRDPAQQDRFENAHEAIISDTEFLIVQDLLSRDSYSKAGKSYLLSTFAYCGGCGEMLYHRQDGNRESWQCRNKKCSSKGNIRDDKLQDVVFTTLKAHLAVALNGQDAAEKPALVQELSAFAAKYKSIQKRINRYQKLNQALDDKKAQGIVDDTDHKEMRQFYLDKIAQATAEMQEVEQKQQLLEACLTEIRSQFRKYCCMDHLTREMLVTLVEKIEVLPKNVIRLHLRYSNLFGNGGDTNGS

SEQ ID NO: 4164 - protein, 616 aa, unidentified
  source 1..616: note = uncultivated organism
MNDKDRVCGLYMRVSTEDQAKEGFSLPEQKERLEALCKFKGYKIYDYYQDAGISAKTGNHRPEFDRLIEDAKSGKINTVIALKLDRLSRSIYDWENLLKTSEKYGFDLVCANDDINTTTANGKMVTRIMMSVSQNEIERTSERTKVGMAGAIKEGHIPGLCPIGYRRTSSKKIEPDPFTKDIVIRIYNLYFEGKSYTAIANTFNEEKVLGKNDWRDTRILKIISNVIYKGDYLAGKTVGNPIYYENVVEPLVSKELWENCQAQKKKNQKNYMRTQHYIFLQKLRCPKCGRILAGGATHKIKADKWYFYYRCEDCKNNIKEEIIEKSIRDTLADIMEYDNVVNEFFLPVLKSKIDNPREQLEKELKNLNTKKNRIRKAYIDSIFTEEEYKEELDLIENQIELINSKLLENAQNEQLSFTPEDILLKRDKNYINHLKLPITYYAFNDCWDLLEREQKANIIMRYIDDIELEFKNRKLAVKQVNFRSTFYNDFETLYKQGLIDKKRPIFFDYAESLSTTPIRYSEYLPIKKVLEHLYRLNMDYEVNLYKGTFYKKTRELKIGPFLKDEVAIRMFPLQENDNGDNDWVSVGMLTTKPSPNDIKVNIRDVFEKLPPKVSKE

SEQ ID NO: 4165 - protein, 808 aa, unidentified
  source 1..808: note = uncultivated organism
MSLQSSSALLLLPAPPLPSPNSDKRPFRPTEQTVSTIPAARPSVVLVAAYCRVSTDLDEQEGSLENQSEHWSQYVAAHSEWSLVGLYTEQGFSATQAETRPALMRLLNDCREGRVHLILTKSISRFSRNTIDCLSLVRALKALNVAVIFEKENIDTSSMTSELFLTLLASFAAEESRNISKNVHMGYTHRFLSGTYRYVRPPYGYRIDDGALVVDKTEADVVADIFDLAITGHGPTAIATQLNERKIDTKYNATWMSNTIIAIIGNITYTGDVLWQKTYKDEQYKQRPNDGELNRYYLPNHHEALISREVFVLANQTMGYGDPYESLGIVPPNLLDEATEPPAVAVIKAKPRVHLVGGTLRVAAYCRVSTDLDDQEGSYEAQCSHYRSLITGKPGWVLAGIYAEEGISGTCRTKRDQFNRMVEDAEHGKIDLILTKSISRFARNTLDCLTVVRRLKSLGIGITFEKEGLDTLDGTGEVILTILASIAQQESASISQNVRMGIQYRFQRGIPMVNCSRFLGYDKKDGKLVINEVQAGIVRRIFRDYLDGYSMDMIGNDLRREGVPSGAGRTDWPVSSVKYILQNEKYAGDLLLQKFLVEDFLTHKVVRNKGQLPQYFVSQAHAPIIPKAVFDRVAEEKYLRGINAGKGGTHFGSRKALKGRTFCSCGAVMVLRRRQVNVYRCLTCGVEVTESALRSQVMDAIRNLPAHRNEIEEKIAALASDLASKDRRTRAVALRTEWRLRNLLPDHGMMEYCPACYDEEDFRARTNTKRTEWSDAAVVRVLVKVVAGVEVEFNGGIRSPCQAHSNRV

SEQ ID NO: 4166 - protein, 536 aa, unidentified
  source 1..536: note = uncultivated organism
MQLKIGAYIRVSTEEQASAIEGSLENQKYRLKAYVDLKKSQVRNWGEIVEFYVDDGYSAKDTRRPAYQRMMRDIKKGKIELILVSDLSRLSRNIFDFCNLMDELEKNDAQFLSIKEQFDSTTPAGKMMIYNMINLAQFEREQVSERVALGAHARAMRGLHNGARPLLGLDKHPDKPGSYVINEKEADDVRKIFRIFLNTGSRAKTIQELEKEGIKPKLSGKYGKLKIHDKWSSNTLGNLLGSAVYIGCHEVNKSNRSKDQNRLKSHQQYKLVKASWPAIVEEEEFYAAQDLLDEAKKLERVRLEGAEDRFYILSGILRCSECGTPLVGQAAHGNTQVHRYYGHTRAHSHTSCQYHRVPATDVEEAMLQYLWSATQDAGYLEKIERNIREMQNVKSLSAARDKRAMKDQLKNVQLRIDNLLLMQGQASSADVIKHAVKTFEALSKEKSELEDKIARLDSGVDQEELVKESVQVIQDNLREFERGFRKAKGSMKKRLLRRLLKQVILSPNGLHIFMQLADGIEIPNLQIKLIRFENKN

SEQ ID NO: 4167 - protein, 560 aa, unidentified
  source 1..560: note = uncultivated organism
MTGTATAVAYCRVSTEEQAERQTIATQREAIARWAQSAGVTIAQWYQDEGYSGSLDPDQRPGLRALLEDAHKGQFQLLVVYRVDRLARDAAVYFSLERQLRKAGVTVVSVTEGDLADDTAAGHLRRGVLAVFSDFERRLIRERSMAGQRRLVAQGQYMGGPRPFGYKVQGRSRQAHLVPDEEPLPGIGLSEAAIVRELYQRCAQGWSTVRLAAWLNQLGVPPVYAREGRTVTYTKRPGRPPKDPTQPPKVTSQPSGYWHPGRVHRILTSPLYKGIRIWGKRSKDPNQQAITTTAPALVSEELWHQVQQALRRNLKFSPRNAKYQYLLRGLIRCGKCGGGFVGWGRPLRWRVTRRYRCNHAQGSYRGQWGQPGLRCDARSIDADWVESLVWSELTQMLQNPDQVLGELRQQFDAQLADRDQLAQQIRQIDEELSRSGDKRQRLLDVYADGKITRQQLDEALDRLAAREAALRQYLEQLVAQLDDATQRQRRLQDAADFLSQLAQRYQGPLSFDDQRRLVELLVDGITVQVADSQGISLEVRYRFAGKCMPMNGTSGPATSR

SEQ ID NO: 4168 - protein, 533 aa, unidentified
  source 1..533: note = uncultivated organism
MAPAPRNGRARLTAVTPAPVRCAIYTRKSTDEGLDRDFTTLDNQRQTAEEFIQKRQDQGWTALPDRYDDGGYSGARADRPALQRLLREAADGKIDCVVAYKSDRLSRSLLDSARILEHLKRHGVKFVSVTEGTDVSTPGGRMHQNMLLLVAEYERELISERTRDKMHAARRRGKWTGGMVPLGYDVAPEGGKLLINKAEADQVRAIFNLFLERQSLVGTSQELNRRGLNRKSWTTRKGVTREGGTWDRVTLRRVLTDPVYTGKMKLGGEVFQGEHEVIVPKGSLEKVQALLKGNGRDGNSGARNRSGAILRGLLRCAACDSAMTPSYTKKDNRLYRYYTCSKAMKRGHDTCPTKSVPAAKVEKFVVDQIRAIGKDPNLCRETFQQALAQVVAQRRGLKGEAKRIAGETGKAREEVDRLVGAVSEASNGAREALLAALEKAQQRLTTLENRAEEIRGQENSLKGCQVDEDEVARTLAAFDPIWDVLHTPEKERILRLLIEQVTYDGRTEELAITFRPTGIASLGAEMGAAETAP

SEQ ID NO: 4169 - protein, 542 aa, unidentified
  source 1..542: note = uncultivated organism
MFFSSDEKKPFTCVIYTRISDQERKEVSDSDTIESQREICESFVKTRENWKLLPVRYDDRNYSGGTLDRPAFKRLLADAKQGKFNMIIVKAVDRFSRDLHQFFQVQPELERLGVHLSCASQSFSTNDATGRLILQILLSFAEFERRLACERTRDRMRFRAKNGLFHGGYPPLGYSFDPDPVRKGHLVIDRKEAKLAKEIFDRYLKIQSAHLVAKYLNERGYRTKVWTTKDGHSRGGGRFTEGMILGILKSPTYIGKTFTKSAGPEPKYEYYPAKWKPIIQVKTFDKAQKILKLNSQTRSSISENKYKLLLSGLIQCGCCKSRMTPNYSLKKGRPYLYYQCTRVAHTDKNACRIKSTPARELENLVIERLKFLSTQKPLIEGIVKTAMKQSKNKLPGLLKQKKELLGKLGKIKTQSGPLLAHRNLSIVMEKLQALEDQKTGLEKHLQDVNSQIDRENIKVLNPELIAQNLVRFRDVFDALGFENQRDLLHVLIKQIVYNEDPAKIRVILYDLPEIKMPPEKPRKGSSGGSAPCRFDMRPNWLP

SEQ ID NO: 4170 - protein, 560 aa, unidentified
  source 1..560: note = uncultivated organism
MTKTSTISYSPVVGGQLQTIKTKRAAIYIRCSSDEAKKEGYSPETQEEKTKALTRTDGNQLDEKHIYSDIGISGATDKRPGLQKLLAEARNGEFDIIYVYRMDRFFRNLRLLLNTVAELRDLRIEFKSVTEPFDTSTPTGRAMFANAGVFAEWMREVGLESRNEGMIKAMKEGKYLSGTPGYGYDRDEKTQGLKRNKKEIAVIKKIFSWLVDEKLSEYKIQQKINVLKIPTKFDNLGRKKKTGSKCWWNRRTVGRILRNEIYATGIYYYRKHKNSGRVKGENNLRPKEEWIRVEDRNLKVIPRKLFEKAQQQLKKNKELSIRNTKQTYTLQHKIICGLDGYHYQCAARHYRSKKTGSHRETKYYFCTGNRSYFTPKRCPVPTISESRILPPVWEKLKEILTNPEIIMQELNDYLNEKGNATKIQGQLNNIRNAINSSDVKRERYAELYAEGSVKKDFYDKKIQECDKEMEGLQKEEEKLSQLLLTEEEKQKRIGSVKELYCQLKEGIENATYEIKWEILQRLVGKVIKTNDKLDIEFNLPFAESVLNSARADCSDNRRVD

SEQ ID NO: 4171 - protein, 520 aa, unidentified
  source 1..520: note = uncultivated organism
MSNDKTPPTIRCAIYTRKSTEEGLDQDFNSLDAQRDSAENYIASQKSQGWQCLSDHYDDGGFTGGNMERPALCRLLADIDTGKIDCVVVYKVDRLSRSLMDFAKILERFEAKGVSFVSVTQQFNTTTSMGRLTLNILLSFAQFEREVISERTRDKIAMARKRGKYTGGRPVLGYSISETGSKLVVNETEAEQVKAIFGLYLKRGSLLPVVDELNRLGWHTKEWVTRKGTVHKGHPYDKNRVHALLKNPIYTGKMQYDGVLYEGEHKAIISEEIFEQTQRKLAANRNVPTCAKPNKHGGILKGIIRCKACDSGMSHSYSKKKKAKKSYRYYVCQNAISRGWANCPHPSLPAHEMEQFVINEIRTIGLDENMIDEIVSHSRESVEDEIREHKKRLALLQKELAGYNAQLKGMLTMPHPDETQIASIREKIAITERDITTVTTRLDGLRSGTLTGADIRTACRKFDPLWDTLSNHEQWRMLSLLLERVEFDAKTETINITFAPGGIKTLNYQTAESGLQEVSI

SEQ ID NO: 4172 - protein, 580 aa, unidentified
  source 1..580: note = uncultivated organism
MEDEKSLFNISIDFKNRSGSLEKSFSTFTKKIIFEWQQIIQGRKNMKTKGPQTLTTTNNKKVAIYCRVSTHNQGMGEYSSLDSQESDIRAYVQNKGWSVYNVYIDTKTGTTLEREALTRLINDASENKFEVVAVTKLDRISRSVKDFLQLDETFSKIGVDIVVTKQNIDTTSSAGNLQRTIMLAFAEFERDMIAERTRDKLYSQAQKGYWGGGHAPLGYFSKEKKLVVVPEEAMIVREIFEHYIEYQSISKVVEYLNDRAYKTKLRKSSDGTKTTGGSEFTLSTVGGILNNQIYVGFVSFKNELFDGLHEPIIPNDLFNEVQKQLVRSKKILAGTHKNTDLELLGVTQCGHCGTALTSHFTVKPNGVQYDYYKCSKKKMPEGKSCNSWAIPADELHKITRRLATLLARKPEFFKAMERQIVLNSTNERNKYSEELESLKRKIDDYKRKLKNYSLLMANEPDSKNIRVVIEDTKDLEIKLDLATNRKTEIENTLSSMKDKDYNSEDMRTIITQYDEIYDLLTIQKKQEVNRLLYGGIISYIDKGTKKGDLELLFRGDGRLRKTWSELVNSGSQNYQAWLRG

SEQ ID NO: 4173 - protein, 564 aa, unidentified
  source 1..564: note = uncultivated organism
MRCAVYTRVSTDEQAISEYSSLRRQEEVCRNYVDIHREKGWKVAGIYEDAGYSGKDFRRPGIQELLEDVRARKVDVIVTYKIDRISRSLKDFYELWEVLKAHNVTFVSATQHFDTSDSMGMLILNVLLSFAQFERELTRERTMSKMAGRAEKGLWNGGNVPLGFVYTKETQTLQPDQREAPIIKFVFERVIETRSPCTVANEANARGFRTKIRLITRRGGTQHEVGGKRFGEDLVKAIVHNPVYKGFIGYNGRQYRAKHEAIVDEETWGQANKAIGKGRDDGNGLRYKDDHVHLLKGILKCGVCGLAMTPYPSGKKTKDGTPYLYYACVNFTRDGRHTTCPIKRLAAREFEALVKQVLADLGDNPTILQACVDAANREAVKSVSEMQGDLLRRREEIGRLSAAIRRIIEIMKQDDLLAEDIKEEYKRLVREKEQIQALGENLELDIARRQKRVLDAELIQRSLQDFARLVNLLTLDDQKELFQLLLREVEVRPFDPAEEVPAENGVFATKIRARWYRVRLTLNQIPGVALVNQTSGGSSDKSVIGSPTRIRTSNTAVNSRALYH

SEQ ID NO: 4174 - protein, 513 aa, unidentified
  source 1..513: note = uncultivated organism
METKSKKAIIYYRVSTEDQAQFGVSLEQQKNNCLAYAEREGWEVVKSFHDDGVSAKTVERPSLQAMLQYCNKNQKQIGYVIIYKVDRLSRNVNDYSNILFLLNKLQIKLVSTTEAIDDTPIGKFVGNIMAANAQMDNEIKGQRVSACMLEKLKQGVWCWKAPLGYKNARDEFNRKIISIDEERREPIKYIFDQFSLGLRPLESIRIQLNDEGFKTWKGKPISVQMMSKIIKNKFYIGIMTVAGVEYEGTHERLIDEEVFYKCQAILNKGNRADNISRSRVSEDFPLKHFVVCAYCGRPMTAYYATGRWGGKYPYYRCYNNDCGSRKSISKKQMDEDFVKYLKKVIPKDKFLKTFKAVILDVWANKYKEINRSGKNIQEQINSLKEEKIRLIDMKKKDLLPDEDFKEAFDRLNNDITAKQAKLSEAKLEEFDIDEAIDYVFDFIKILPEYWNDKNTTYEQKIKIQGLVFTEKPTYDHFKFQTPKFCPILQTKEDLANAKSSIVVPRGVEPLLPG

SEQ ID NO: 4175 - protein, 532 aa, unidentified
  source 1..532: note = uncultivated organism
MIREKYKVAKYMRLSREDGDDRESESIENQRDIIDTFISEHEDLEVAKEYVDDGYTGTNFNRPGFEKMLEDIEKERIDCIITKDLSRFGRDHIDTGYYLERYFPTKSIRYIAIGDNVDTLKMDGLQFLTFKLSFNDYYAQDISNKIKSVKQRKIEKGEFQGGIAPYGYKKDKIIKNHLIIDEYASEIVKDIFDMYVNKGMSPNKIADQLNKREIIAPSIYLEIPTFMKRKSKNKDGKYIWLRTQIGKILKNEVYIGNVVGRKTQKISHKIDKVKTNKPEDYIIVENMHEPIIDLETWNKAQEKIKNKHVSRIRKYDHPLKGLIFCRECGGVATLRCRSEKRKSGKEWKIEYFICSNKNSNKNDCNCRQLRTIYIEEKVKEKIKEELIKINISEEELKKIYKQSKSKDESKKEKLNKKIERNNRYLNSIELMLEEIYKDKVSKTIQIEDFEMIYKKKIKERKKILEENKEINLEIDRMNKKAQEVNNNKLIYCMKNTLELKNINKQIYERFIEKIEFDNNRNLYIKFKFSKPV

SEQ ID NO: 4176 - protein, 556 aa, unidentified
  source 1..556: note = uncultivated organism
MDKKKAALYIRVSTNHQIDKDSLPLQRKDLITYAEVILGISDYEIFEDAGYSGKNIERPAYQDMMRRCRAGEFSHILVWKIDRISRNLLDFTSMYAELKNLGIVFISKNEQFDTSAAIGKAMLQIILVFAELERNMTSERVSATMLDRAKKGLWNGANIPYGYNWSEDDKYPIINEEEAVIVKAIFENYAAMKSLTKVSGWLVDNKVPTKRGGKWTTRTLHQMINNPFYIGTLRYNYMSSARGKVKPQEQWILKENNHPALIDKALFDKCHLIMSKNSSFITKEGKTRVVSHINIFAGLVQCDCCRSNLIAQIGKARSSGMRFSSYHCRTKSVYNGNCNNGMSYHDELIGEFVFNYVSNIINAKKIISSVRSPKELEHHLLFGSCFADVVGIAEIDGLFTSLKTNSSRSFGNKPTVDADVDAIDKLQADIAKKERALERLNKLFLYDDEAMTEAEYIVTKNKLRQEIAQLNDKLAESSAPINTVSDDKFIVNASDLILLKFFELGEYIDFVNLVEIVDKPTIRDFALSVISKITTNNHKITSIEFTNGSIHHFAYK

SEQ ID NO: 4177 - protein, 544 aa, unidentified
  source 1..544: note = uncultivated organism
MKKNAAIYCRVSTEDQAREGYSLPEQQEKLKDLCKYRDYNIYKVYEDAGISGKDMDHRPAFMEMLEDVRDKKVNVIVAYKLDRVTRSVRDLEILITELEKYECALECAMDDINTSTANGRFLVRMLTVLSQLEIERVSERVKFGMVGAIKDGHIPVRKTLGFMRDGKKLVINPEEKEVVVRMFELYSKGYSYSKIANIFNEEKVLNKTNWRENSLQHLLSNPLFKGDFISGGRVGNPIYYENVVEPIVSKELWEECQVQTKKNTRTYQRRNDYIFFQKILCPNCHRIMACKAPGGKKKHYIYYKCNDCGCYVREDMLEEKLIEEISLIIEFDMVVRKYYAPLLKHKLENPNDLLKKEINILKDKVNRLKEAYLNQIIDIDEYKSDKEHLEKSIKEKQELIMNYIDSIEVIKTNDDVKTKNINFRNTFIKEYAKLFSDGGLTRHINVSSNKATSEMEVCYPMTREEAEQYVEKLSKHCPIEYVEVKKQKYGNNQFRLDYINAEENTIPFKMIPILNKKGIKKVESFGVIGVPRPPILLHIEEKQT

SEQ ID NO: 4178 - protein, 501 aa, unidentified
  source 1..501: note = uncultivated organism
MRFFTYSRKSVFRDNSDSVQNQSRMCREYCDLHFAGQIDSWAEYCDEDYSGANTDRPDYQRMMSDIGSGLCDILVVYQLDRFSRSVRDFSAAYEFLEAHHVRFICLDMNIDTSTPIGEAMMYVSAAFGQMERKNIASRVTDNLRGLAKKGYWTGGTPPFGYSIAKTVIDGRKHSILVPSDPEAVNDIYDTYLRLDRTMKATQENFDATVSRVLRDPTYCQATPEVREYLISQGCQIDEGNWDGAHGIIIHSRLNRTGKRQATRSRSEWIVAVGCHEPIVSADKWLRTQQMIDSHSRIYKPKYPPPLLMHVLKCKCGYTMVRQPVKYNGRMIEYYSCANRRTHGKEACDMPYVQTHLIDDAALRVFKEISLDDNAIKKYVDAPAQPRSTSKLDKAIKNTQKKLDRLSASLSLAADTSVAKYIIRELEKEDEVLSKLKAEKLQIESENKKCNTKNIDIKQKTKEIKEMISDFDNFDAYEKNEIARKLLKSATWDGSTLFLSFL

SEQ ID NO: 4179 - protein, 513 aa, unidentified
  source 1..513: note = uncultivated organism
MSYAMYLRKSRADMDAEAHGEGETLSRHENALTALAEKSGLKITKIYREIISGETIAARPEIQKLLSEVEQGVYEGVLVMDADRLARGDSVDQGLVARAFRLTGTKIITPRKIYYPNSEFDEEYFEFELFMARREYKLINRRIQRGRVASVNEGRYIGSAAPYGYDRVKISGGKGYTLKPNKEAAIVKYIFEQYLNCGGAGAVAAALDGMGIPTRNGKAWSRATVAGILKNPVYIGKIRWSYRKNVKQSRSGQIVTQRKANKNYILAEGLHEPIIDSELFYKVMKKMSENRKKPLSSSKALRNPFTGLLYCKICGGRMTRLGKNAHTEYDALKCADAKCRCVSSPMSTVEKAVLEVLEQWLEDCCVTVEPTVEATENHCENFLGELSGELQKIKEHREKICEFLEQGIYTADIFTERQESLKRRENEILSKIKRLKNIAENEQRDADAKENITPQVKRLAEAYHCCENAEEKNCFLKAVLGRVEYSKTIPNRRGHTDNSNITIEIYPTVEARG

SEQ ID NO: 4180 - protein, 513 aa, unidentified
  source 1..513: note = uncultivated organism
MAKIAMIPKISRKQGKKVRVAAYCRVSTDHKDQVNSYEAQVRYFSGLYNNSETEQLVDIYADEGISGTSVEKRIQFGRLMEDCRAGKIDRVITKSISRFARNTKDCLQYIRELKSLGITIYFEKENIDTARLSDEMMITVMGGLAQEESQSISNNIRWSYQRAMANGTLHHSHIPYGYIRGKDGNLEVDEEKAEIVRRIFDMYINGMGIKKIAVQLNEEGIPSPTGIQWNNITINKMLRQEKYIGDTLWQKTYSEFMGKKYQINNGQQTKYYLRDTHPAIISREIFAKAAEMKLKSAAPKGSSIDSIFKKKLFCGKCGHIYSSSNYRNNLSWSCAKRYGIADQCDNITVRDETLNVAFRAMCDKLHIHGTEIFGKCLDNLQRLRKAQEGGTSEDKKILSEIAELKEKKHRLSKLLTKHFIEPEQYSEQVFEIDGQIRALTRGMDKAPAKKDELRMRIEELAEIFKRYDGSTRSQTEILDTVVEKIIICDDGTIRFKMLAGLEFTERLSGYNGE

SEQ ID NO: 4181 - protein, 576 aa, unidentified
  source 1..576: note = uncultivated organism
MERNDSVIAIYSRKSKFTGKGESIENQIELCKNYIRSRFGSEAEEHCVVYEDEGFSGGDLKRPDFQSMMEAVRQKKIDAIVVYRLDRISRNIGDFAGLIDELGRLDVSFVSIREQFDTGSPTGRAMMFVASVFSQLERETIAERIRDNMHELAKTGRWLGGNTPTGFRSGEVSKVTVDGKTRKSFMLIPIEEEAELVRTIFELYRQTDSLTAVEAELLRRRLTTKQGNQFTRFAIKAILQNPVYMTADGAAYDYFIEKQADVCFSKEAFDGSCGIMAYNRTDQEKGKATKLLPEEEWIVALGKHPGLISSELWIQTQRSLERNKMKSYRKPRRNEALLTGLLFCTCGERMYPKLTNRKTAEGDAVYDYVCKMKQRSKRELCKQRNVNGNNLDWTVLEQLKTMAEDSSCLVTLLEKYRKEYIGDQDRFSGRIEKLRSQHAKNEKIMEGMMDTLALMAQSKAKLQFLERMEKLVEENQEIELQIAELEGLASADALSAVEFDALHEKLTRFSACVDSMTVEEKRAAVRSVVRKVVWDGETVHMVLFGAEEGELDLSNVPGLEMPGSETKITPLGGGSK

SEQ ID NO: 4182 - protein, 519 aa, unidentified
  source 1..519: note = uncultivated organism
MAANVKVIPPKAMAADTLRVAAYCRVSSDSSDQLHSYAAQIRYYTDMIQNHDGWELVDVYADEGITGTRMDKREDLNRLLSDCRKGKIDKVLVKSISRFARNTRDCLASLRELSRLGVSVQFEKENIDTGTLTTELMVSVSGSLAQQESVSISQNQRMSYQRRMERGEFITCTAPFGYRMPDGKNLAIEETEAKVVQWIFQSYLDGHSTARIAEEMNRKNIPTAWKRGIWHEQVIRKMLSNEKYIGDSLCQKTFTTNTFPFIRKMNHGEADQYYIENTHPAIISRETFEQVQSLLKKRAARQPASHQEFPLARKVICGICGTVYMRRISKNGFVVWVCRKHDRKASECPNGRIPESALYAAFAGMYNKLKQNAGIVLQPALKQLEELRDALQRDDPAMLAVNRAIAQASEQSHRISQLQAAGLLDADTCAVKFNEINARLAQLRAERRRLLQNEDIDDAIDALQRTADLIQCGPERLEGFDEGLFHDLVERIVVESQTCVRFCLRGGLELTEQLREVRR

SEQ ID NO: 4183 - protein, 591 aa, unidentified
  source 1..591: note = uncultivated organism
MSTTRLLISQSRHPGSILGAFFVDCFRGSCENRWIPVGTQQKDSTIFAIYARQSDPNKKAVVGMDNTLSIETQIDECAKHGIKLDLGTQFEIYKEQITSEVFDDRPELSRLIAKIDKYEAVIVYKYDRIVRDPNQLTLFVQMIRAKGVRVISTNEAEPAANPLGDMILFIHGTFVKMTKIAIKENTQKTKKKLQSEGKIVGGGQCLYGYKYNMELRTREIVPHQEEVVRRIFNFVCDGKSLRQIADKLNLEGVKGPRTIWKVPTLSMIVRDPSYHGAPFMADKKRPTETRLPSGKRLEVRQSSEHHRPIGEGTPQIVTREVWDDAQVFLSDRKKRPKSKLQVWLRGHVFCGHCGAAMTPSGDKGGHTFRCNRTAHAKHLRVPKCGNTSFNLAMVEEKVWEKVVRVCEDRPYLESQINEALGNIAKPDHEKELTDRRAKVAKMNAKMQRLMSAWGDEEDSIKAESLNALVDKIAEEVKVEEGLIGEIESVLAVTRQKESLIRNVQAITESIDAVKDADYEKRCKIMDVLSIRVELDYRSANERLEPGLQEALKQVAGPDYQAFPGAPRHKQITTKIFAVAPGSPSVKRKFSR

SEQ ID NO: 4184 - protein, 541 aa, unidentified
  source 1..541: note = uncultivated organism
MRLQDRYDVGIYCRLSRDDNNGSAESMSIANQRQMLLSYIQERGWNLQDIYVDDGYSGTTFERPNWKRLVLDIEAGKINLVITKDLSRLGRNYVMTGQYTDFFFPQHGVRYIAVNDGYDTMNTDNDIAPFKNVLNEMYAGDISKKVRSARRSSALQGKFMGSLPPFGYMKSPTNKHQLIPDEESAPIMRRIFKLFSQGDSARHIAGILNSENIPSPAVYYYSKQGKKHPNPKVSNTWGSATIMQLLKNEVYIGNMVQGKRKVSSFKTGLREFTSPDDWIVVENTHEPLIDREVWNAVQMRLKIERRRNKVSHTGEVSLFSGIAKCADCGSAMNFNRKQQRGKEYMLYKCGRYANHGKSACSIHSISFEVLEETVLRDIQNNAILAAGNQKKLIRRLEKYGNREQEEKRLSLEKKLCGAHNRLSELDNLIRKLFEERYAGNVPDSIFKRLMSDYEKEQQNLQINVADFQSSLTLLESSACDVERWVDSISQYTQIETLTRSIVTELIDHINVYESYEINGEKHQDIEVNYKFVGSIDTRKNV

SEQ ID NO: 4185 - protein, 542 aa, unidentified
  source 1..542: note = uncultivated organism
MTQARDLRPETADRGGAVRVGVYVRRSTDDEHQPYSIEAQDTRLAAYISSQSGWRQAARFADDASGASTHRAGLQRALAAARAGAIDVLLVYRVDRLTRSLRDLVTLLDDLDRAGVAFRSATEPFDTATAIGRMLVQMLGMFAQFERDTIIDRVIAGMERKAAAGKWKGGRRPYGYRVDKATSTLIPEAGEAAVVRLVFGLYAQDRLGARTIARTLNDRGHRTTTGGQWSAHQVLRVLANRVYLGELTFRGITATGCHSPIIEQAVFAGAQRLLIARGQDHSKRAANGSDYLLTGLMRCPSCGKAMIGTRAHGRSRVYRYYTCFTRVRYDTSRCAASRMDADAVEDAVIAALASFYRHQHDLIADAIAQAQASHAASADGKRAERAAVERELARTSAATDRYLAAFENGILDPEDLAPRLAHLKGRTAQLNARHEELAGQIARAPTAPPESTLLRIAEHLDDIIRSGTENQRKALIETLVARIKITGPDRIVPVFRIPDPAHPNQDSKPQPPDERNAQATDAVRAMTNLVGPVGLEPTLPGT

SEQ ID NO: 4186 - protein, 558 aa, unidentified
  source 1..558: note = uncultivated organism
MKNFQAALYARVSTEDRQAPEDSIAWQRSVAAALIEAHGGHIVVEYLDVGISRSLPWSRRPEAARLLSDCARRDRSFDAVVIGEPQRAFAGAQFALTFPLLVHHGVELWVPEVGGRVDPDSEAHDLVMSLFGGLSKAERARIQRRVRNAMQTMARAGGRYLGGRPPYGYQLVSVREHPNAEKARLGATLNCLEPDPTTAPVVKRIFTERLAGKSYSAIARMLNESAILCPSAADRARNAHRDPNGWAASAVRAILTNPRYTGHEVWNRQRRDYDLLDPTAPADGHVRRMRWNARDSWIWSPERTHEALVDRDEWQRVQATQTRESRAPRRQETRYLLRGRVHCAVCGRRMTGTTRGNDRRYYRCELRRSRPGAPIDHPVDVYVRERPVIEALDDWLDELFAPERAADTAQAIVDAAAHDPAHQARVDQARRFLTDARHRLAQYRAALDGGADAATVTAWISEAATEERSAMAELEHLATQAPAPLSTVDALAVVDGLGGMPGLLQHADQDDRAALYDALGVTATYDPATRSAELAVAIPRGAKNVSEGGLEPPRPKGH

SEQ ID NO: 4187 - protein, 628 aa, unidentified
  source 1..628: note = uncultivated organism
MIDWKAVTKDTVIRVAIYGRVSTEHEMQQQAFENQLQWYEDLLRKNPNWKVVGSVNTYTDRGITGTQAQKRPNFLRMIEDAKAGKIDMIVTREVSRFARNTMETLKYARELKEKGVEVYFVNDNIRFIQDHDGGEVKLTIMAGLAQEESRKISERVKAGQHIARKNGVLYGTGNILGYTRVRGVHDKDKIGKIGDKSVPTFIINEEEAETVRRIFELYKEGYGLTQIRIKLTQEGRKNSSGQVKWHDSTLSKMLANPMYIGKQLQHKTEVVDYLTGKIKTIPKEEHELINGDFEPIIDEETFNIVQRIKADRSKLSPKNHGGKAPTDKWTQKLMCSCGSRFKKEGRASADNKSQNIFYACRHRSIDGSTERRKQLNLDTKGACDVRSIPAWQFELMGMLVFKGIWKTHFDAVINAFDEMDEREQEKKSSTISIADRCEAQIRKITRQRDRLIDLYTDEKIDHDVFTSKYAAYTAAIEKQKEIISECAEEQKIDKDEAGAFLKKMQRMINVSGTQLDNETVEKFIDRVIVQSDHCFEWLVNVTGDAQTATPELFPMRGYGSDKTSTRIVNYADAAKNAIEVRDKYYAHAFAFTIPFEEAQKLRDKCGTHVRPGRWTDLLVDVYVRTTKV

SEQ ID NO: 4188 - protein, 548 aa, unidentified
  source 1..548: note = uncultivated organism
MNNNGRTGTKVVTKIAANPELSKRHDPNRVLKVAAYCRVSTDAEDQLNSYRTQKTYYTELIKKNPKWRFAGIYADEGITGTMVKKRDDFLRMIEDCEKGKIDLILIKSVSRYARNIVDCISYIRKLKALGIGIYFEEQNINSLTEDSEVYIGIYGVMAQSESENISANVKWGINKRMQSGTYACRFNLLGYRRDKVTKEIRIIPEEAEIVKKIFQMYLHGMSLNQIKDYLESNNILTISGNSVWSKNGIKAMLTNEKYVGDVMYQKTYREDCISKKTRINRGELDRYLVTDNHPAIIDRETFRLVKKELVKRSSKRRSSANAITELGKYSGKYALSEILVCDICGSPYRRKTWTRNGVKKIYWRCLNHLENGNNACPQSKGIDETVLHSAICRGLSKSIPDAGDVKSFIRMQIAYTTSEDAVLVECQTLENAIKEIQEKANEAEDMCIRTEGNKQPYMEEIKKYYASITELRERIKLIKQQLENNDTFQTELKQIETWLESEDISFEEYDDSIVRFLIDRIRVTDDQKLLIELKGGTILTEELYPKAA

SEQ ID NO: 4189 - protein, 572 aa, unidentified
  source 1..572: note = uncultivated organism
MNMKATPKPSSLTCAIYTRKSSDEGLEQNFNSLDAQREACEAYVLSQRHEGWRVLATPYDDGGFSGGTMERPALKRLLDDIDKKRIQAVIVYKVDRLTRSLADFSKIVERFDAQGVSFVSVTQQFNTTSSMGRLTLNVLLSFAQFEREVTGERIRDKIAASKQKGMWMGGTPPLGYRVHERTLEIEATGAEMVRNIYSRYLVLGSVWELKRELDASETATPVRTYVGSGRQFCGVLFSRGHLYRILTNPIYIGKIVHRDKVFPGQHPGIIDPAQWDAVREKMEGNRQGNQQRRSEPSMSLLTGLVVDAKGNRLISSHSQKKATRFRYYISEPLISSIREHAPEGLRIPAQELETLVIDALCDWLKDSVAVLDALNHPEPGSIQAILAQAHHLADVLGKEGKDRYHLIHRLIGQVVVAPEWVTIALCIDELLANERDSTIESKSAYPAVMLTIPMQMKRCGFAMRLLIQGPNQAKQQLRDARLINLIAKAYDWLERLTSGKAKSVGEIAAAESVTSSYVTRVIYHAYFAPDIVRAIMDGTQPPSLSLESLKRHLPLPVDWEDRRKLFGFIQPK

SEQ ID NO: 4190 - protein, 567 aa, unidentified
  source 1..567: note = uncultivated organism
MNKKRGIAIYSRKSRFTGKGESIENQVEMCRQYVRLHSGDEAAEQALIYEDEGFSGGNMERPRFKRMMADAKAGRLTAIVVYRLDRISRNIGDFAGLIESLNDMKISFISIKESFETNSPMGRAMMYIASVFSQLERETIAERIRDNMQELAKTGRWLGGVTPTGYASEQVQRVTVDGKTRKSCKLKMIPEEAELVQLIFAAFLETRSLTSVDAFLLQRGHKTKNGKNFTRFSIKGILTNPTYAKADQTVWHYFESQGAELFAEQAGFDGSRGVMTYNRTEQKPGKANQIRPIENWIIALGAHQGLIEGADWAKVQYLLEQNRSKSYRKPRSHVALLSGLLVCGNCGEYMRPKLSKRENAHGELIYSYVCEMKERSRGQCCKIRNVRGNLLDQMVIEEIKKLPQDDSLFLRYLKHGEQFIRENREDYDRQLEQLEKALSDKKQEINTLLDTLAMAGDSAAKVYLLERIETLHTQAEEICGQQAELKKLTAEPALLDMRFDLLRQMVASFAAAVDTMTVEEKRSVIRTCVEKIIWDGETIHLYLLGYEGETDIPKLNGTDGTLCADSK

SEQ ID NO: 4191 - protein, 547 aa, unidentified
  source 1..547: note = uncultivated organism
MSKKEQNADKKVRIIEADPELSKKNDTNRILKVAAYCRVSTDDEDQLNSYHTQMAYYTEYIKRNPRWRFAGIYADEGITGTQVKKRDEFLRMIDDCEKGKIDLILTKSVSRYARNIVDCISYIRKLKALGIGIYFEEQNINSLTEDSEVYIGIYGVLAQSESENISANVKWGINKRMQNGTYNCRFNLLGYRRDKETKEIYIVPEEAEVVKMIFQMYLQGKSLGQIKAYLESNEIKTINGKSVWDKSTVKGILINEKYVGDVIFQKTYREDCISKKSKINRGEVDRYLIMDNHPAIIDRETFNLVRKEMVRRSSKRRSSDRAITELGKYSGKYALSELLTCDVCGGPFRRKTWSRKGIKKIYWRCLRHTEKGDNGCPQARGIEETVLHKATCRGLTNCIPETGEVKNMVALMLACATSKDKMLMEWQEVQKEIKELMRKADAAEAMCFKTQGNKEPYMEQIKKYYASIAQLRERDAELKKKLERNEEFQTELKQIGEWIEADKISFAEYNDDIVRYLVERIYITEDFKLVINMKGGDTVVEEIYPIE

SEQ ID NO: 4192 - protein, 521 aa, unidentified
  source 1..521: note = uncultivated organism
MAAGKDAFRGLTRRGMRCAIYTRKSTEEGLEQEFNTLDAQRDSAEAFIRSQREEGWVALPDHYDDGGFTGANMERPALQKLLQDVRDGLVDCVMVYKVDRLTRSLLDFARIMEVLDKHGVCFVSVTQQFNTTSSLGRLTLNILLSFAQFEREMIAERTRDKMSAARRKGRWVGGIPMLGYDLSDHGARLVVNDDEAARVREIFALYLKHGSLMPVVQDLDRRGWRMKEWTTRKGTLAGGKPFLKNRLYNLLTNIIYLGKVEHAGQVYEGEHEGIVDPDVWQRVQDRLRFNGRTGGRQIRNKYGAVLKGIIRCGSCDTGMAHTYTQKAPNKLYRYYVCVNAHQRGYSQCETRSVSAPQIEQAVVDQIRGIAANQAVIDEVVRQLSDQQVGSREALEREKRVMERELQRLVEEIPGLMRTSGKTATDRLAEMQERISAVENQLRGVRDQLAESVGHIVDPTDVRRALRDFDAMWEEMTPREQEKFVKTLVEQVIYDGRTGKVTVGFRAAGIRQLCLDVRSNKT

SEQ ID NO: 4193 - protein, 516 aa, unidentified
  source 1..516: note = uncultivated organism
MVVMKIIQKTCAIYTRKSTDERLDMEFNTLDAQREACEAYICSQKSEGWIASKDYYDDGGFSGGSLNRPALMRLMDDIKAGKIKTVVVYKIDRLTRSLTDFSKLVEIFDEHNVTFVSVTQSFNTTTSMGRLTLNVLLSFAQFEREVSGERIRDKIAASKAKGMWQGGRAPFGFDIGDRRLITNNIDAPIARHIFETYLELGCLSKLTDELKVSDIKSRFRISQRGLKYGGEYFSRGALHALLTNPVYIGKIAHKELIHEGLHDAIIPQELWDDVQLTLQGKSPVERGVKKQKHKNLLTGLIFDEFYNPYTPVFTNKRNKKYRYYCNQVLATDKSHPNYSRARFPSHEIESFIETSLQDQIKNMAGENDDLLMDHLLKNHSKIPTYDFVRSCLKRAIIYYDYIVLKIDPTQLKALAAKHLNININVSKEEFEITVPFQTSRGRDTSIVIQNGEKDIFDMSPEETKRLVQGIVWRDEHFDGAYISDIAKRENCSSRYIRNRIMGSFEFFTHAQFPENS

SEQ ID NO: 4194 - protein, 578 aa, unidentified
  source 1..578: note = uncultivated organism
MKAPDRSTRPRLLHCAIYTRKSSEEGLEQEFNSLDAQREACEAFITSQKHAGWSILPDMYDDGGLSGGTMERPALQRLLADVQAGKVNVVVVYKIDRLTRSLFDFAKIVETLDGRGASFVSVTQQFNTTTSMGRLTLNVLLSFAQFEREITGERIRDKIAASKRKGMWMGGNVPLGYDVRDRKLVVNEEEAETVRFIFRRYSELGTVSLLRNELDSLGILSKKTRSETGLTHGGRRLSRGALYHLLANRLYCGEIVHKREVFAGLHDPIIDEALWQTVQTQLAANRVGRSISAGVQHPSLLVGLIFDGAGRRMTPTHAVKKGMRYRYYVSADNGNEEREQAKPLRVPAGDVEALVADLIRALLSSPSDLGDIIAPSGLDAHVQHSIIGRGKEIVAGWPQLASVNMRVLMRAAIDRVIVEADNIQLHVRRTGILQILWSDADNDPSLVEAAPSADDIIVLAINAQLTRRGKGMRLVLGDAQPEETNPELENLLRESFSIRDQLLSGRDDSIEAMSKRLGLPKGYLTSRVRLTWLAPDIVAGLLKGKHPVDLTKAQLLSKSRELPCDWLQQREFLGFATA

SEQ ID NO: 4195 - protein, 506 aa, unidentified
  source 1..506: note = uncultivated organism
MRSRSYDMGRIYAIYARKSVERQDSISIESQIEFCKYETRGGAHKIYSDSGFSGKNTDRPAFNEMIKDIREGRISSVIVYKLDRISRSILDFSSMMELFRKYGVSFISATEKFDTSSPMGRAMLNICIVFAQLERETIQQRVADAYSARSKKGFFMGGRIPYGFSKAPVILQGVHTSKYVRLDNEAEDIMTIYEMYSEPVTTLGDILGKLPPYNKRGKLWTAAKLSAIIRNPVYCRADLRVYEFYKSHGANIYNRPEDFQGINGLYMFKGDNPNRKTWDISGREIVVAPHEGLIGPDIWLGCRNKLMENHKVRTSKPKNSWLCGVIKCRNCGYAAVIKKSETRAGRYFVCSCAMSTKACDGIGRTVYAFDTEEEIKNEIEKKISSLSITAPSCCQAENSIEEDKIRIEIDRLDDKISALVEKTENADTVLIKHIGNKVTELDAHKQELIRRLSELEKNKQVFYSEELTDCMRVWDIMSFDDKRAVVKLLIGRILLDSNGYSIEWKV

SEQ ID NO: 4196 - protein, 507 aa, unidentified
  source 1..507: note = uncultivated organism
MEDMPMPITPYCGCGRCLVGVRRLSRKTDKTSSPQAQGNAILAAAADASGHIIAWADDWEVSGATNPLTRPAFGPWLRGEMGPYDGIVARGVERVGRNVRDTLNTQELLTGQGRIIITADHTGVWDFSDPNQENEWLIKAWGGQMELRAIQKRNRDETIRARENGEPKQRPSYGYRYVRLSPTQKIDHVEIDEVAADVIREVGRRILADQTGKITCATEAARLNREGVPSPDDRRAQLYARPVKGAEWKPSTVQHILTSEAALGYLMHGGRPVIGADGRPTRIAEPLWDRPTREALVEATKPKRNGSRAPKGPQLLSGIAFCGNCGARLHITGQRADLGHAYGCNARLRGIRASAGCKPAPTMTITFLDGLVSEWFVKRYGAGELIRQEWDPGTGHAAEIAELEATRTRLRTDRNAGLYDEPDEAEWYRTEYKRLGEEIKALKALPERKPGMVSIPTGRTVAQEWADAGRARRREMLAEFEVRVVLRPRAYSPRVAITGMEISPGSI

SEQ ID NO: 4197 - protein, 576 aa, unidentified
  source 1..576: note = uncultivated organism
MNKRDTSQQRVAAYVRVSSHEQAVEGVSIDAQLAALRAYAKIQGWEIVDEYIDGGYSGGTDDRPALKRLLADAKQRRFNIIAVCKLDRFFRNLRLLLNHLHGLEQLGIKFISTQEGLDTSTPYGKFAVQMMGVIAEFERGRIGERVKDSRHYLITQGKWPGGRTLYGYRWLAEERKWEVVTEEAETVRRIYHLYLDRKKGMEAIVRILNGDDSHTRSGTSWTTSTARNVLIHPAYKGEHPMGVPVPAIINGRTWQAAQQKREKARNVITEPKGWLLQGIAYCGLCGHVLKCTRKKPKEPRYYACRGRIHHWKLKDGITRCELPYVRADWLEWGVWNKIKEVLNNSDKLEECINSALENLEEKKAHIGAEILDADGKLETLGKKMERLGMAFADGAIEESAYKLKLKQLKKQEASFLKCRRNIDPVELEELEELEGRIVMVKEILGRGKFEVSEFGFFGELSNEKLYVPAGFNAWRESDGELAIGEVTEMDYFRIEGTDMYMRGIDVPPGFWECGDHEKQAEKIKKNMRAILQLFGIRVIVYQDRVEIKGTIPSQVLYQGEKLEPEPGLVICSPSLS

SEQ ID NO: 4198 - protein, 793 aa, unidentified
  source 1..793: note = uncultivated organism
MASATRKSHLGPGSRDSKQGAERVAAYARVSTEMQAEEGLSIAAQFSEIREFATARGWTVVSEFVDAGISGQTLDRPGLQSLLTAAEQDAFDIVIVHELSRLSRSSVYDTFSIFDQLGRCKVGFASVKEPQFDLSNPTGRFLLTIIAAINQYYIDILRMHTKKSKRERAREGLYNSSITPYGYAHGGSPRLPPVIVAEEAAVVRFMFERYVTGRYSFADIAEMVNDHGWRTRAGRRFSKDTVTDMVRNAFYAGKVMYKESRRGDVGEMFEGQHEPIISEELWDASVRVRQRHQYRSRTLQSVSRPYLLSQLARCHVCGRNLRAQGLKSGGYYREMSYERGYDDCPNSKLGTRTDALHAQVGALVRLLELPTDWQAELAQMLGEDDGVTTLANRRARLTAERRRLKEAYLRGDFEEDEDLYRRALERIRRDMEQLPSEGDMVQIQQAAELLDSLSEVWDDADVGDQRDLTHLMLREVQVDVAQGRVQLLYPTAPFVPLFRKIPLLAEREMGSFVPVWTPELAREFALPILPAVSDPVDHPVAAPFLPTWPWPAVPNTRISPALSVILKARRAAGVEGGRFVTVPHPGVPAVEVDRRKWPEVTLQGLTLEDVLALPAGALACLDTPLAVQDQARLEELVGKVYAVLEPNGYWHFVGLMPSSMPAHWVFTYFPEAWTYVRGATWTPHKIYNSLRGVGFGLVLQEHTFYQPISLGAADAIAQRREGILATLPEEAYRKGLAELAAAVRTQGAQTFIGSEVTLVEVAAVKDEQPRPKRRRRPFDVPAGAAESEQIEVQ

SEQ ID NO: 4199 - protein, 524 aa, unidentified
  source 1..524: note = uncultivated organism
MRIATYCRKSVYSDKSDSVDNQRRMCREFVDFKFPNQVDSFECYQDEGFTGANTDRPGLIQLLADVKDGFIDVLVVYQLDRLSRDVRDFSNIYGLLEENGIVFVSIKENIDTTTPIGRAMMYVTMVFAQMERETIAARVTDNMIGLAKKGLWVGGNPPYGYRREPVVVNGKKHVIIVPVPEAAAFVESIYDEFLDGKYSLKTMSATLRKRGQNTPKGALFTTSQLYKLLTMPFCVAASPEIWDYYTNLGCNIVEDREAWDGSRGVMIYGRTKQVNKRNQAQPPSEWTVCIGMHEAFISPEKWLAVQERFKVNTYLKKPKYPMPLLKGVLRCAKCGRLMIRATQKGSHGQVLSSYVCSKRNQLGRDACDMSAIRCNKIDEQVMNVFHRIEADPAVISEYMAAADQTVDTDYSIMIRDLEKKASAVRSRISRLTESLADGSAASKYIIPQIEAEDLSLSELNREIEIAKAEQRRSENVNHSTAERIEGVIRMIKSLDGLSADEKNEIAKSILSECTWDGANLFLRI

SEQ ID NO: 4200 - protein, 541 aa, unidentified
  source 1..541: note = uncultivated organism
MRRVRCAIYTRKSSEEGLEQEFNSLDAQREACEAYVASQRHEGWVLLKAQYDDGGISGGHLERPALQRLMADVDEGRVDQIVVYKIDRLTRSLADFAKLVDRLDAAKASFVSVTQSFNTATSMGRLTLNVLLSFAQFEREVTAERIREKIADSKKKGLWMGGYVPLGYEAAGRTLTINAGEGETIRTLFGLYEEHRALNLVAREAERLGLRSKRYVTQSGRDQGGQILSRGHIHKILTNPLYIGRIVHKGVSFEGQHPAIIEIEQWERVQATLTEQSGIPRGQRNFGRPTSPLAGKLFNISGERLTPVHTQKAGRRYAYYISQGLKTTTVPGEKSSEWRLQARALEDRIDATPKKHLRTAILRGLVSDAAPQFISDMICKIDHSDFDTLAAIERVCIGRDSLEITVDPDRLSKAFGVPIKDPDQDQLTIKTPFTLRRRGVETKLLLEGDAIPCDETLLRNIAKGHAFLNMITSGQTVQQIAEASNLSARRVQQTLEFAFLSPEATRQIVEGCQPAFLTADWCLKHEISADWAEQAQQFNTL

SEQ ID NO: 4201 - protein, 628 aa, unidentified
  source 1..628: note = uncultivated organism
MENLEKLVESNKNRAGIYIRVSTEDQAREGFSLGEQEEKLRQLCKYKEFEVYKVYKDAGISAKDMEHRPQFQKMLEDMRDGKINYIVAYKLDRVTRSVRDLETLISTLEKYHCYLVCDRDDINTETANGRFFVRMLTVLSQLEIEIVSERTKFGMTGAIKAGHIPGSCPLGYFRDKDKVCRIDHATKDIVLRIFNMYLEGKSYQTIANILDKEKVLYPDKKKWTDSTIKRIIHNRVYVGDFERYKYDSDKETELYMDVVEPLISRAMWEEVQKQTSINQRTFSRDRVYIFFQKLICPDCGNIMTCKGSGGEKKKYVYYHCTSCKTYFREDLIEDCLIEYLLDLIEYDYNVKKFFYPILAEKKNSQTKEIEDQIKKLKDQKDRLKKAYMSGVIELEDVKEDFKLIDDKLAKLENQKIDALDVESEAYNPAHLLAERDIEREKLEQAGIYRDLLLQLWRQKSKDEKQEFISKFIETAVLRKKDDGSFDIDKVNFRSSFTEQIDKLYDMGVVDFPTMLERNGKLEDTKISLNMNNQQLEDYLSILKGELNVKYLDLGEYYYHDEHFDENYDTKTEVAKIRNKAIEFKLKSNEKPVRMIAIKNRKNYLAKEEYKMKLGIVTRINSKSKGKKK

SEQ ID NO: 4202 - protein, 500 aa, unidentified
  source 1..500: note = uncultivated organism
MNNNEDKFLITGIYARVSTEEQAKEGFSINAQREKLKQYASARDWDIYDYYIDDGISGKNIKDRPEINRMLQDIEDGKINNVLVYKIDRLTRSTKNLIELIDLFNEKNCAFNSLMESIDTSSATGRMFIKIVGIFAEFERENLAERVSFGFEQKTREGNYTNTHGVYGYDYIVGEGKLVINEDERKLIEYIYSEYLSGTSMTEISRNLIAKNTPTKRGGKWQQSTIVSILQNPLYIGKVRYGTSGKKNNSFEVDSNHEPIISEDDFYAVQNILAKRRKYEARKYPTENSVFMGALICDKCGMQIGTSQHCNTNNGGSIYINYICYNRRNGDCTAPIFSQTKMDAAFLSYMSNIENFQVDENDFAKEEKEKKKIKLEQIKQELLKTEKRLDEIRALFTQEKITFEEYRAFSDDMRKKTTLLEEEMNALIPQDEELDFEQIKDIIGNVQLNWGNLTNTEKSEFIYRFIDSIKVYSDNGNIIITDMQFAKAHQKQKQKKISKK

SEQ ID NO: 4203 - protein, 533 aa, unidentified
  source 1..533: note = uncultivated organism
MGRQPQTSGSLALEQKNVIVIEAAPHKEPEKLRVAAYCRVSSDSTDQLNSFMAQLNYYTTLIGSKENWTMADLYADEGITGTSAEKRPDFQRLLADCHRGRVDKVLVKSVSRFARNARDCLSTIRELKSIGVGACFEEQHIDTAHMRGELLTAVFAAMAQRESQNISENMRWSYQVRMKGGTFLPAAVPFGYVLRDRKIEIDEERADIVRQIFRDYLAGQSMEEIASRLNREGVLVRIGKADRQWAHTAVSYILSNERYIGDSLWQKTYATDTLPTQQVKNHGEREQYYAEATHPPIIDRAAFQAVQELKLKRHEQQGDRPRRNAPMQGMIFCGECGALYRQRICRGKVFWVCYGHDRGKEACPSGRIPEEEIHAAFLRVYHKLRLHGEPILKQMLSDLQSVRERRMLWSQDIVALNQTIADVSDQGRMLADMNKCGLVDPDIFISQSNELARQLRAAKQEKERLLADGDDDAIPRTRELLETLETLPEFLPAFDREIFTDLVERITAEGDGRLRFRLKNGLELIETTERSVR

SEQ ID NO: 4204 - protein, 573 aa, unidentified
  source 1..573: note = uncultivated organism
MARARTPRRTVTRCAIYTRKSSEEGLEQDFNSLDAQREACAAFIKSQKHEGWTLVAASYDDGGFSGGTLERPALKRLLNDIGAGKVDVIVVYKVDRLTRSLADFAKIVEVLDAEEASFVSVTQQFNTTTSMGRLTLNVLLSFAQFERDVTGERIRDKIAASKKKGLWMGGLPPLGYDARDRQLVVNEREAEVVRHIFRRYAAVGSVRVLKQELDTGGVVSKLRASPTGRQWGGQPLARGALYRMLQNRIYVGDTVHKDQSYPGEHSAIIDSSLWDDVQRRLRNNRTENADGTRAADPSLLAGLLHDERGERMTPSHAVKRGTRYRYYVSRSLVTGSRSMSPQGCRIPAGEIESVVARRLCAFLSERSAVFEAIRSLVHDASRQGQLMDAATDLARRWADLAPSEQRAGLRALISRIDIRADHIDIELALERLPEVLHPAPLEPPTGASDGPGNRLTLSVPARLARAGLGTKLIVDGEQSAEPDPTLIKLVLKAETLRTMLMTGGVASIEEIAKRQGVTSSYVTRLLRLAFLAPDITAAILHGRHSPELTGATLLRHSRLAFDWGRQRVMLGFA

SEQ ID NO: 4205 - protein, 578 aa, unidentified
  source 1..578: note = uncultivated organism
MNNERMIAAVYIRVSTEDQAREGFSLGEQKEKLLQLCAFKGYEVFKVYEDAGISAKDMEHRPAFQEMLQDMRDGKINYIVAYKLDRVTRSVRDLEELISQLEIEIISERTKFGLNGAIKSSHLPGPAPLGYKKDGNKKTIVDETTKPIIEIIFKMYLEGKSFQQISNVFNEEKLLNPKKWKDTTIQKIIDNKIYMGDYEQYKRIAKKENKEPVIYMNVVEPIISRAMWEECQRQKEVNQRTYTRDRVYLFFQKIKCPTCGRIMKCKGSGGKKKKYMYYNCEKCHLNYQEDKIEEYLMKFIYDLVEYDMAVKKYFLPILADHKPTKTDDIDKEIKGLTKQKERIKKAYMSGIVEMEDFSEDYKLIEDKLEILEQKKSELLNLDNITFTPQQLMADKDIERETMIRLDTLNDVVKTNWASKTKDEKQEFISKFIESVILIKDKNNELHIEKINFRKSYINNLMKFLDKGILDVLVPVEINGKEDFIIGSPNISNEQVQEYLDRLNEFYETKMYHLYEKVDKDTGNIIGEFTPKKDEKIIRIVPISPTEIKTKSIINKEDIETKYEIVTYNPNKPNKKGND

SEQ ID NO: 4206 - protein, 531 aa, unidentified
  source 1..531: note = uncultivated organism
MKVGLAKAVRCAIYTRVSTDQGLEQDFNSLDAQYDASQAYIRSQAHAGWTLLRTKYDDGGFSGGNTDRPALRRLLEDVRASKVDVIVVYKVDRLTRSLADFAKLVELFDKHKVSFVSVTQQFNTTTSMGRLTLNVLLSFAQFEREVTSERIRDKIAASKRKGIWVGGMAPIGYDTKDRKISVNEAEADRVRTIFRSYLKLGSLNLLMTDLRKRNIVTKVRKLKTGIAVGGIPFTRGPLAHLLRNRFYVGEVAFKGEILAGEQLAIVGRKLFDAVQAKLDEQLNNHNAARMKSEALLVGRIFDDRGNRMSPSHARKQGIKYRYYLSVALTQGHAERAGSIRRVPAVEIEALVIKSVREHLKPTGSLDDRSLVNTHVMRVEIQAEQLIIQLNQAQKQNHKRAGSKGTLLVAWQKPPSKRRREILLPSTASSNGQTARPIRSETRATLVASIARGRRWLDELITDPSANAETIAAREKCSVRKVNMTISLAFLAPHLVKAAIEGRLPHGMGVVRLCDLPAEWSRQNQMLGLLPQ

SEQ ID NO: 4207 - protein, 568 aa, unidentified
  source 1..568: note = uncultivated organism
MTAPLRAALYLRVSTGRQADNDLSIPDQRRQAQAFCKSRGWEVVADFVEPGQSATDDRRAEFQRMIDAATTRPPAFDTIVVHSYSRFFRDQFQLEFYIRRLAKNGVRLVSITQELGDDPMSNMIRQIMALFDEYQSKENAKHTLRAMNENARQGFWNGSRAPIGYRIVDAGQRGQKTKKTLEIDPIQAETVRLIFKLAREGDGSSGAMGVKSVATHLNMNGIRTRDGGRWGIGAVHKVLTRTTYVGRHRFNTRFWKTRERKPEAEVVEMAVPSIIDAAEFEAIQTLLKTRSPALSAPRVVSGPTLLTGICFCASCGMAMTLRTGKGGRYRYYTCSTKARQGETGCKGRSIPMEKLDGLVAGHLEKRLLKPERLEKLLSSILTRREERAERRAEHIAELRKRAAEAEVKLKRLYDAIEDGIADLADPMLKDRVAELSAIRDQSRLDADRAAEAVENAGPTLTPQALTTIAREARKRMRNGAGGYRRDHLRAFAQRVEVDDREVRIMGHKSALLRALVASEGGKTAAICVPSFVPKWRARHDSNVRPLPSEGISILTPYYDFIRYHSIIY

SEQ ID NO: 4208 - protein, 506 aa, unidentified
  source 1..506: note = uncultivated organism
MRENAAKKIAIYCRVSTDEQAKEGVSLDEQKARLHAYCRAMGWATEAVEYIDDGYSAKNMERPALERLLRHVKAGRVERLMVTKLDRLSRRLLDLLTLIELFQNHDVSFVSTSESFDTATPSGRLTLQVLGAVAEFERERIRERVFDNMLHAAKMGKWLTQAPYGYRLDAKKLVICEMEALLVQRVFRMFVEDGLGYFQIAKKLNQEHIPSRNGKAWSIRSVKIMLSNPAYAGTLVWNRVDSSQKRRVLKEEDAWVEMRDAHPAIVEQALWHQAQQRIASHPRMPPRAQASPHLLGGYLRCGECGAAMSIGWSGNPRRTRVYRCSAYRNQGLCQSKPYRADDVERWFVEALECVVEPVNHARHTALVQRVRAEQIAKLDQRMHAAKMRYDRQVEAYTAGLIEMDTLAREKVALKRCVAEYAKEMSTTDSSSHDKELEERLRGRAVTLGDALTVLPADWIKAKLRTWIHSVILHGREDLEIVLCPDLTMVSDAMDQSIGGFLEYGVE

SEQ ID NO: 4209 - protein, 541 aa, unidentified
  source 1..541: note = uncultivated organism
MSDKKIRCAIYTRKSTEEGLEQEFNSLQAQREACEAYIKSQKHENWQLLPTEYDDGGYSGGNMERPALKRLLSDIRSGFVDIIVVCKIDRLTRSLMDFSKIVEILDKHNASFVSITQHFNTTTSMGRLTLNMLLSFAQFEREVTGERIRDKISASKKKGMWMGGKPPLGYYRKDKKIYPDEEKVGLVNNIFKKYVELKSTTLLKEWLYEQGHNISVGNLNCILRNKAYIGLVGHKGTWYPGEHQGIVPIELFEQAQAVMADNRINRQHYDPKKSLLSGKLYDDKGNAMSPSWSTGCSGKIYRYYVSQAIIRKEPSKLGKIGKVSLPQLENFIDSWFEQFLREKPKTHPYIQYFEVSKQKKLLKLLSSYTITRDIERELMKRVQLDSNKVEIALHTEQVLELFNAIYENREMRQLKPEELKQESTYTEPYHIGTIANGEKIIVGQFVEPKKRPNIELIKILNQAYAWHQEILDGKTTQEITNREKVCVQYVRRILNLSFLSPKIVRSILNGTQPADCTLKKLLSIKTSDWQGQEDLLFLREI

SEQ ID NO: 4210 - protein, 558 aa, unidentified
  source 1..558: note = uncultivated organism
MRKVRCAIYTRKSSEEGLEQDFNSLDAQREACAAYVLSQASEGWTQITSRYDDGGVSGGTLERPALQRLLTDVSAGLIDIIVVYKVDRLTRSLLDFSRLVESFDAAGVSFVSVTQSFNTTTSMGRLTLNMLLSFAQFEREVTAERIRDKIAASKAKGMWMGGTPPLGYGPKGRTLEIVEEHAALIRDIYSRYLAVGNVRLVADQLQLEGIRSPGRTTGTGRSLGGGWFTRGQLYAMLKNPIYVGDIAHRGQNYQGQHPAIIDRDRWQAVQAGLADHIKGERRARRASASLLAGLIVDEAGEPLVAAHACKGKVRYRYYVSRALQHGRDQKDMAGLRLPAREIESVIVEQVATLFDDPLTLAARLGVSITPALLRDVRERCASMAAELRDRGTSNLHGLVAQVRVLPHQIDIDVLQDAIASLLDLTSTSAGGLIHTLRSEMRLTRTGRAVRLVQDNGAAAVTSGADVSVARLLAKARRWWSILAEGQISVAELAAQEGLSRSYVSRVVRLAFLSPEVVEALLNGHQRAGVDAAALKETDAVAAAWTEQKRAFLPARMSA

SEQ ID NO: 4211 - protein, 555 aa, unidentified
  source 1..555: note = uncultivated organism
MARKSRKKSALAAAPAKKTRTWKTAAYARLSLEDGGRKDSDSIEIQAELIEQYIEQREYLELAGTYIDNGTTGTNFDRPDFNRMMADMRSGKIDCIVVKDLSRFGRNYIETCDLLEKIIPFMHVRFISVNDGYDSETETSYSESLLVMLKNLVNDAYVKDISRKVISARKTQRERGEYTGAFAPYGYKKSDKEKGRLVPDAETAPVVRDIFRWRSEGMGKAAIANRLDESGIPCPSMRLRSKGVVQGDNYYKASIWQPKAVDRIVQSRVYLGHLVQGKTRQAYCEGRPLQSVPESDWCIVENTHEPLVSEELWEAANRVRDQRREKYFAGKTDNTYPENVLKGLVVCAECGSKLLRARNAARGYEYYYYHCPLMKQHTEETQYPMIPVQNIYEPALAAISSHINLAADASRILQKRGAADSKSRSAIDRDIAAIQRDLQTNTKKLGGLYENYVFGLLDEHQYIYTKKEYERKETALKQELAELSRKKTVLADALAPDNRWTQAAQAFINPVELTRDMAVALIEHIEVRSLDEIEIVLKYRDEYAMLEAFAKEGVS

SEQ ID NO: 4212 - protein, 539 aa, unidentified
  source 1..539: note = uncultivated organism
MKAPSVKPVRCAIYTRVSTEHGLDQEFNSLDAQYDAASAYIKSQAHAGWTLIRSRYDDGGYSGGSTDRPDLQRLLDDIRARKLDVIVVYKVDRLTRSLADFAKLVELFDAHGVSFVSVTQQFNTTTSMGRLTLNVLLSFAQFEREVTSERIRDKIAASKRKGLWVGGPLPLGYHMMDDKIVVVEDEAERVRLIYRRYLELSGVNALVRDLRERDIRTKARLLATGATRGGVLFGRGSLFYLLRNRFYVGEVKYKNEILPGAQPAIMDRALFDAVQQKLTDQWTNRTTMRNASDHLLTGLLFDDAGHRMVPTHATKAGIRYRYYASLPHLHGESKTATVGSLSRVRASDVEDIIARSLDAHLIAQKERPASDTANSGYGQLPLEQVARIEVHKDRLVIRLKAAEAEQATDVGDGHLLSIPWQKAPSRKYRQILLPHGIPKHEVRPTRIERRARLVSAIARGRRWLDELVSGSVTHIAQIAARQKCSIRQVNMTISLAFLAPDLVRAAVEGRLPRGIGVERLRDAPAEWSRQFEALGLNPQ

SEQ ID NO: 4213 - protein, 522 aa, unidentified
  source 1..522: note = uncultivated organism
MIRKANSKPTVPTVRCAIYTRKSTDEGLDQEFNSLDAQRESGEAFIASQRGAGWVCLSERYDDGGFTGGNMDRPALKRLLADIDAGKVDCVVVYKVDRLSRSLLDFAKIMEVFDQKKVSFVSVTQQFNTATSMGRLVLNVLLSFAQFEREIIGERIRDKIAANRRKGKWTGGTPILGYDVDRSGGRPKLVVNAAEAARVREVFRLYLEHGSLLPVVEELVRRGWSNKTWRTKAGEPKGGQPFDRGTLHALLTNPLYAGKLRHKANVYDGEHEAIVDPLVFEQVQKRLQENCRCGGVGVRNRYGALLKRLLYCKPCGHTMVHNFTGRNGKHYRYYTCTHAIKSGRKSCPTGSLPAAEIERWVVDKIRGIARDRKLQAEVARQAKKLAGAGLKDLETEAAGLRRDLARYHAELRKRTAGGPVRGVKATRIADLHGLIAQADSRLAEVRVQLEQQEHTRIEEHDVLAAFVDFDSVWNALSPREQAQLLALLVERVEFDGATSEIAITFHPTTIKTLAKEQRGETV

SEQ ID NO: 4214 - protein, 543 aa, unidentified
  source 1..543: note = uncultivated organism
MSEKVYRTAIYARLSKDDGDKVESNSIVSQKAMCEEYIAKHGDLELVETFVDDGYSGVDFDRPDFRRLEEAVREKRIDAIVCKDLSRFSRNYIEGGRYLEKIFPVLGVRFIAINDSYDTLTGDPSSDSFIIPFKNLINDTYCKDISVKIRTNLDVKRRKGEYVGAHAPYGYMKDPKDKNRLVVDEYAGDIVRQIFSLYKDGVSICRIADRLNELGVLSPMEYKISSGLHYDSAFRTGNTAKWSYKAVKRILSNEVYIGVLAQGKRGTPNYKVHKIQTKEESDWIKVEDAHEALITYDDFMAVRIMLGRDMRSAGAEAEDNLFSGFMYCADCGQPMIRKVVPGGKKNYYYYVCSSNKRHEGCTAHSISTKEVETAVTNAVKDHVTDVLDMSDALEYIERLPSANRAIFNYEAQIAKLEEEIDRCRRMKLRIYEDLSDGVITKKEYADFRSQYTAMLEDKGAALERVKRERKDAEVTGDTERAWVTLFRQYENIEELTRRALMAMVDKVLVYEKHGVEVSFKYGDEYLRARDYISKNADLLPQAD

SEQ ID NO: 4215 - protein, 561 aa, unidentified
  source 1..561: note = uncultivated organism
MNNNIACMYLRLSREDGDVSESNSISNQRQIIKSYAKENGITISNEYVDDGFSGSNFDRPNFKNMIEDLNAGKFKIIIVKDLSRFGRDYIESGKYLQKIFPEKGVRFISVNDNYDSDNADVSDTHLILPIRNFINDSYCRDISMKVKSSKEVKRKNGEFIGSFAPFGYKKDSKNKHKLVVDTEVSHIVSRIFDMKIEGHSSKAIADFLNSIGMVTPSRHKENKGDNFNTGFIVKDAKWDAKMVNRVITNKVYIGVLEQGKTAKLNYKSKREVDVAKDDWITIENAHESIVSKSVFALANKMLLRDVKASKENPSILSGMLYCKDCGSPMIRRKVKSKDGYNIFYICSEYNIKGECTRHSIKEDYVIGATIHALNDYLSKYNELLKKVSKIDISKLTIKAEFDSLNAEKKKYERLRGSLYMDLEEELITTEEFERFRKNYLLKIREIEKQIITKQKTIEELTEKIKDKGSFVSDIIPDVEEGMLNRLSLVSFIDRIEIGEDNAINFVFNNMETVNLMQAILDSEKCEFKASDENKVRVFTIGRAYGETLEMNMPKLAVGGVC

SEQ ID NO: 4216 - protein, 539 aa, unidentified
  source 1..539: note = uncultivated organism
MPLRVAAYCRVSTDRDDQANSLHSQQTYFKRYIEGHEDWTLAEVYADEGISGTNTRRREAFNRMIRDAEGGKLDLILTKEVSRFARNTVDTLEYTRKLKALGIGVIFINDSIDTRDNAGEFRLTLMASMAQEESRKTSERVKWGQKRRMEAGVVFGNNSTYGFETRGGKLYVKEDEAAIVRQIYHKFLNEGKGTHIIARELYEEGIAPPKTATGKWSCVMVRRILRNEKYVGDLLQKKFVTTDYLTHQKVENRGQEEQVYLRDHHEAIVDRATWEAVQAELAKRASQQADGTKYSNRYWCSGKIRCGTCGSRFVPRITKRKNGDTYKSWGCHSRVHYGNWKQNGQGDYVGCNMRMVNDKVLTACAQYVLQQLDLDYDAMVAELAADIQRVRGRDNAAPDLERIRGRQAEIERKKERVMDAYFSETISREEMLSMKARYDGELEQLELQLSRETDARRLQEEQAQGLEGLVQTIRKNVTCSEEVFAETVERIVVYDEYITLKIRFLPLLFKIRYQTSGKRTDYTVTIKDCELCPLEAAAP

SEQ ID NO: 4217 - protein, 518 aa, unidentified
  source 1..518: note = uncultivated organism
MANPPKQKKTTLAEEPRDPTSRGTSAVGLYMRVSTDRQAQEGDSLEEQESELRKYCEYHTLTIRKVYIERGKSGGNTNRPEYQKMIQDIEAHTIDTVVVKKLDRLSRSLLDFEQLMTKMQAHNVEFVSIKEQFETISPMGKAMLRIALVFAQLEREQTSERTSDVLRYRAKLGLYNGGVTPFGYISANKELVISKKEKEVVELIYTHFLKTHSTSAVSAYLHDAKLPAPGKAGWVEARVQDILQNPVYKGCIRWKNEVYPGLHTPIIAPSIWEQVQLIFESKQRILAQTRSNALLQKLAVCRDCHHPLLPSFAYNRTKTKYGYYRCGSTTHGKHRRLGINCTFKYVASIKLHNDLSQAIGQLATPHHISALDHQVMAHNQTLELQIKTLTDTISLAESELKQIKAKKSEYVDFLVIKTPSAQDRGHINERIQELNAETKQLQAQLASAKLEVSQLQDKILTVDSLKQAVLVLRDMDQTNPEYRQLLHDILTRVQVSSSSLIFHFKAIPWAVEIPLNSL

SEQ ID NO: 4218 - protein, 521 aa, unidentified
  source 1..521: note = uncultivated organism
MSKATAKSNGEKKVVRCAIYTRKSTEEGLQQEFNSLDAQRESGEAYIAAQKHEGWVCLPDRYDDGGFTGGNLDRPAVQRMMSDIEAGNIDCVVVYKVDRLSRSLMDFARMMETFEEHHVSFVSVTQQFNTSHSMGRLMLNVLLSFAQFEREIISERTRDKIAAARRKGKFAGGRPVLGYDLLSNPAGPKLLVNDAEANQVRTIFELYLKHQALIPTVRELDQRGWTTKAWQTKDGRRVGGCPFDKNLLYHLLTNVVYLGKVRYRDEVHPGEHAAIVDEQIWQRVQAVLGRNGRTGGGVVKNKYGALLKGLLRCAPCDCSMGHSYTAHGTKRYRYYVCLRAQKRGWDKCPTKSVPAGEIERFVVEQIKGIGKDPAVLKETLRQARGQSQRSLAGLQTEERRLERELARHNADVRKLAGHVRDTTTVDEIAELQERIRVAEQRATEVREQTVALNRELVDEREVEAALSVFDPVWETLSPREQARIIQLLVERVDYDGKRGTVSVTFRPSGIKTLAKQFEEAA

SEQ ID NO: 4219 - protein, 542 aa, unidentified
  source 1..542: note = uncultivated organism
MQQINCAIYVRKSTEHGLEQQFNSLDNQEQSCKAYIQSQQFQGWQFYKTYCDAALSGGTMARPALKEMLEEIHAGRIQCVLVYKIDRLSRSIYDFKSMMKEFDKHNCNLVSITQSFDTSSAMGKLTLNMLLSFAEFEREVASERVRDKMRATKAKGMWIGGIPPIGYDIAFGKLVPNESEVPIVRKVFETYLESRGFNDCFYKLIEMGIKQKKWTTKHGEVKGGAQITPNVVERILKSEIYLGKIPNKSSNEVFDGLHEPIIDMDLFNRVQRKIKENNNHPDSKYNLSKTLLHNKMFTTSGVPFKNKKGCRQFKHYRYYRASGISLPAGDLDKIISDEIKLFLDSDMTYKLPEEKRLAFKQVQFNEKILHEMIDKVIYGDNKITIFINTDDLKYLDRFQPSNYLNQKVVQMNNYFMNDKHQIVIEKEIFITRGVCVKNRNGGFETCILTRSENADIFIRALAIGWKYKQMYENGTCVKHIAKSEQRDIRTIYKYLNLAYLSPIIINDIMDGKIPSEMTLQKLFAIASKHDAFSEQEKEFYKR

SEQ ID NO: 4220 - protein, 537 aa, unidentified
  source 1..537: note = uncultivated organism
MPKINCAIYTRKSTEHGLDMEFNSLQNQEESCKAYILSQAFNGWEYYKTYSDGGISGGTMERPALQSLMADIRARKIQVVVVYKVDRLSRSIVDFHKMMQEFEKNSCNFVSITQSFDTSNSMGKLTLNMLLSFAQFEREVSAERVRDKIAASKAKGLWVGGTPPLGYDIKDKQLVPNEEEKILVNLIFTKYLELGNMFATAHWLNEQGYHSKAWVPSCGKPRGGRPFQKSGIQRILTNPVYIGKVAHHAKNKIYQGKHEAIVPKEIWEQAQEFIRRRIKDKNAFSTYQVHDSVLSRKLYDDTGRSFRLTTAKKQGKKFLYYYNGVGGHYLPVEQLDNFVLKTLKMTDFDNLEPLSNRDSVTDKQMRKWINKVVCQSEGKTHYLSIFLNEKQIKADLSALPKVSGQAEERLLGPEKLDGKLYVRNTFIVDNVSSMKLQNGSARNILTVRQLNESLVRGLARGWQLKKMIEKGMVTREWEKASSMNKRTFARYLNLCYLSPKIVTDILEYNNPRNMTLRELMNLAEGESDFERQEKGWK

SEQ ID NO: 4221 - protein, 541 aa, unidentified
  source 1..541: note = uncultivated organism
MRCAIYIRISKECAEQKTSLQNQKDLFINYVAEKNWDIYDFYIDIKSASKPLERKNLERMINDGKQKRYDIILSKELSRLARNGKRSYEIRDTALQNNIYIITLDGAINTLTGDISKFGLYVWLYENEAQTIADRIKYSLNSKAHRGEFKSGTPPYGYHLENGKLIKNSDETPQVVQRIFSEYLSGKGYDEIAKGLFTDKIITPSQYFGKSNASNIWHGATVRGIIKNANYTGDLVQSKTQTQSVTSLKRIINDPKDYIIIENCHEAIIDKKTFELANALLNSRKKIKPKPQKHLFSNLLFCADCGKGMHFKKNRKGYVCGSFDKRGKVACESHIVREKNLIEIISNEFKIISASIDNIDYLNKIQLSLQKESKKKVKLINKYTNKIENFKMQKNKTLKLLLNDTISQDDYSCFTEEINKEIEKYTLEKNKLQLELETNKNSTDISNLKEIQSHIKDFSELTPELLNRFIEKIEIKKDGSPKIYYRFSEASIYFSDLINFTQVSTCGVCGNISISKVFSTSYPFTSRASKSVTRLFGLHET

SEQ ID NO: 4222 - protein, 547 aa, unidentified
  source 1..547: note = uncultivated organism
MKNKKEKTVIGIYARKSKFTGKGESVDNQIKACEEYVRTNFVKNGEENINIEIYQDEGISGKDLVSRPGMMKLISDAEQGKIQAVICYRLDRVSRSVKDFSELVTRLSACGAGFISVNEAFDTRTPVGRAMMYIASVFAQLEMETIAERITDNMYALAKTGRWLGGKTPLGFTSLKIEEMDGTGRKRSRYQLEAVEEELDMVRFIYCKYLELGSLARTETYLLNNNYHTRNGKYYGRYTIKSILSNPVYCVADGIIYKYLLENGYGVYSEKDMFDGSHGLTAYNKINCQPGSKRVNNVKDWIVAVGEHKGVINSQDWIKAQEILKRNSGKSYRYPKTTCALLSGIVRCGRCGSFMRPKSGRKTANGEKRYYYQCECKEKSKGNLCQMPNIPGNVLDKMTAAGIFSLKEKVVKDYSYLYKTIETFRKSLNSQPEDALILRQFKDCKRQAGTLIDVLARSSSKETSEIILERIDEITNTMAKLKEQYNKLQENTVDFSCGLNVMDLIYFKQEMWEKIPPAKQKDILKIIIKEIIWDGKNARIYLCPDDK

SEQ ID NO: 4223 - protein, 507 aa, unidentified
  source 1..507: note = uncultivated organism
MAKKKKDVKKQKDIKTAVIMARYSSDNQHETSIEGQLDVCYKFAKDNNIQIVGEYIDRAVSGTSTKGRKRFMDMIEDSAKGMFDAVIVYKTDRFARNRYDAMFYKKKLQDNGVRVISATQPFTDAPESIIMEGLMEAYDEYYSLELAQKVLRTFAIKRRDGQYCGGKPPYGYSVDKDKKYIINENQAETVRNIFEWYIGGMSISQIQLKLNNPGLDYDKIRRILNNEKYTGTLHHEEEELKNVIPAIIEESTFLLAQKRHQESLRNKTYIKSTEILALPNKVYCHYCQTPLSVTSGTSKNTKTYYYYKCNNAKECHFKPINAHELEDTVFENIVYYLSKHSLEIANKTAEIISKDLDEGRRKELKSQLKKKEQEADKIFDTMVALGVTDRGKEKYKKVEEEIAELKREISFVNQKEITPKDILDYMQKLLAIQDTSPDFKHELLLNIVDKVSVSNRVITVYCNNSNEGTFVHENEEFSNSAFGRGYEENYELQVYRDCFVFSIPRAA

SEQ ID NO: 4224 - protein, 555 aa, unidentified
  source 1..555: note = uncultivated organism
MGESNQRLMIYSRKSRFTGRGESVENQVELCRQYIAAHYGPEEAARAQVYEDEGFSGGSLERPQFRQMMADAKAQKPAAIVVYRLDRISRNIGDFAGLIEQLGGMGIDFVSIKEQFDTGSPMGRAMMYISSVFSQLERETIAERIRDNMHELAKTGRWLGGTTPTGYRSESVTQVTIDGKTKRACHLNPLPGELRLVELIFQKFLETGSLTQVDTFLLEKQYRTKRGNPFTRVAIRNILTNPVYLIADGEAYQYLTGHGAEVFGKPEDFDGVRGILAYNRTLQQPGKTHRLRPMEEWIVAVGRHPGIIPGAKWVQVQDRLARNRDRGYRSPRSHEALLSGLLRCGCCGDYLRPKLTGRTGADGARQYAYLCTTKERSKGSLCTMKNPNGNQLDAQVLAAIAGLDRDPAQFREQLARGRKALHGAPTGCGEELERLREEIGANSRQIQGLVAALPQASGTAAQAYILEQIEACHSREAGLNARLKELEAEAAGQDLPEEEFARLCRRLSSFRGTVEGMTIEEKRAALRHLVSRIVWDEAQAQVFLTGSKPQGEDSK

SEQ ID NO: 4225 - protein, 578 aa, unidentified
  source 1..578: note = uncultivated organism
MMRDIAQNHQRKRCAIYTRKSSEEGLDKEFNSLDAQREAGKNKILSQRHEGWELINEHYDDGGISGGTMERPALQRMIDDIKAGKIDIVLVYKIDRLSRSMLDFLGMIKFFDEYNVSFVSVTQDLNTDSAMGRLVLNVLQSFAQFEREIASERIKDKIALSKQRGMWMGGAIPLGYDAVGGKLEVIDEEAKIVRFLFDSFIETSSPTETIKIAKTQGYKTKARRTATGKYYPARNFTTPSLYQILRNQIYIGKIEHKEKGEIYDGQHDAIISDEIFIQAQSILNTNPKYRQRKSKNDRPYLLKGLLKDPKGYSLTPTYTKKKDKIYRYYVSTHAVKTTYDNCPLKTINAQFLEEIILDQVKRALTNVEWVQRMQVQGNDEVKLSDMRKALKNFDMMWAELFPAEQARIIQLVIDMIIVHPDKIIITFYPSGMLSVLHQFMPHLKTHGDIDDPMVMEIPVQFQRKAKRKRITTPDGRNVVDMSNENIDDALVKAIARAHRWQEMLDTREARSIKDVANQEGIPASYAQKVMRLTELAPDITSAILEGNQPSELQLKDLIKGEPLPLDWNEQRQALGFAS

SEQ ID NO: 4226 - protein, 529 aa, unidentified
  source 1..529: note = uncultivated organism
MEVKRIDIADVEIKQQKMKNVCAYCRVSTNIPHQKGSYESQLEYYENMIRSKAGWNFAGIYADYGKSGTKEKGRTDFMRMLEDCEAEEIDIICTKSISRFARNTVECIKVVRELKKKQIDVYFEKERMHTLSEKSELLLSIYSSVAQAESESISSNQKWSIQKRFLNGTYILPNPAYGYYTNENGLLELDQKRAVVVRYIFDEYLDGKGVWLIAKSLNEQKIPTRTGKKNWIPVTVYTILKNSIYTGDLLLQKTYSEDTVPFVRRKNHGEYRQVLIENDHEPIVTHEEYEAVQRMLKQKSNRTKENQEEQPEEVSEFKGKVICGICGSSYNRQVKKDRTGKSNITWSCARRIQTKDLCENDIIKESQLEQAFVIMGNKLSSHCDEILVPLVNELEQLQETPMIQEQLERLDKQIQEQKKQREILNHLASGEMIDSAFYMEQQNIISKNLKEYQRAKEQCLRKSRQRKELKQTKELVKQLKKGPQYLEVYDKALFQAIIKQIIVNPNELVFQLKNGLELTEKREKVWTEK

SEQ ID NO: 4227 - protein, 520 aa, unidentified
  source 1..520: note = uncultivated organism
MISEQEVIDPAKVAIYIRWSTEDQGEGTTLEVQSETCRSYLLSQGWAVNGELIFIDDGYSGGALERPALTRLRRAVAAGEVDCVVVYKLDRLSRSVVDTVNLVCREWEGRCSIKSAREPIDTTSHAGRMFFYTLVNYAEWERSVIRERTYSGKLRRAQEGRNPGIRPPYGYSLAEGGRFTIEPGEAALVQRIYQLYGSGLGVRMIVQVLNRDGYRPRLGQAWTQSTVARILANPAYAGRLEYGRRRRASASASGEARVRFDPVVVAEQSCFPPLISRDHWEAVQAMKKTRPGFGRNVPGSGRAGVSESLLTGLLRCRCGHGFTGKAMVGRYRYYRCLGVHAKGSGFCDCGAIRQEAVDELVVAEVRRLYGGEQVKERLVRRVVARWEQQLVEAKGQLAAMAKDLAALDAGEQRLKRLLRSGELTVPEYRELMADLQRESAALRQSQERARQLEAEAMTGIRGQARLGEVLSSVDAWAELGQIQRKQLLRQFIQEIQLYRKGRGGDVSCDIVWRRDLSGEG

SEQ ID NO: 4228 - protein, 551 aa, unidentified
  source 1..551: note = uncultivated organism
MRPKVRCAIYTRKSTEEGLEQDFNSLDAQYEACAAYIASQKAEGWTLVKRRYDDGGLSGGTLARPALQRLLADIASGQIDRIIVYKIDRLTRSLSDFARIVDQLDVMEASFVSVTQSFNTATSMGRLTLNMLLSFAQFEREVTAERIRDKVAASKRKGLWMGGTVPLGYTKDGRTLAIHADEALIITRIYKAYLDLGSISKVKAVLDRDGCRTRITTGPDGQPRGGKLFTKTHLHALLSSPLYAGKIAHKDKIYDGQHPALIPQAMWNQVQDRLSQTAARQRGQGNIAPPSPLVGKLFDATGDRLTPSHTVRNGKRIRYYVSRRLLVGTRAQQPDAWRLPAAQLEPALSGLLQSYLLDEHASHQILPEASAGETRDLCRKMKELSEQIGSDAEMAVWPHLLERCDIAADAVKLKLDHKAFATALDIKCADVAQNALLLIAPFNLRKRGFETKIIIGAMRGAIDATLLQNIALGQSRYEDIISGATLQDIAARTRVDTKRIRQMIEIALLAPDVIEDIISGQQPIGLTTEWLKTHDLPIRWEAQRALIASAQ

SEQ ID NO: 4229 - protein, 531 aa, unidentified
  source 1..531: note = uncultivated organism
MKQYLMYLRKSRKDRDLELQTGSFDTLQRHRDALLALAKQRGYSIANIYEEVVSGDSIADRPEMQKLLAAVETGAFEGVLVMEVPRLARGNTKDQGVVAETFQYSGTKIVTPEKIYDPADEADEEYFEFGLFMSRREYKAINRRLQRGRLASLSEGKYIAGTPPYGYRKVKLPRQKGYTLEPVPETAGVVREIFQLYTLGDPQPDGGRKPLGSYAIANLLNARGILSPGGVQWSAAAVRDVLKNPTYAGYIRWSYRPDIKRMVDGKVVISHPVNRDTELRKGVHPPLITEEIWTAARAMMTSRGHAPVSSSKAISNPLAGLLYCSVCGRSLVQLPQGSHGAPMVMCPTAKCPTVGSRRDVVEEALLAALAEWLEAYKVRARSGEGENENAEAIQDAERSIARARNQLDALNKQKDSLYDLLEQGLYSKDVFLERSRVLTARVTETERQIETLRKHLGALRQTELTRKSVAPSIQNVLDVYATLRTPAEKNALLKTVLDHVVYFKSQGGAWRESDMQLYVYPKIMAGELLIT

SEQ ID NO: 4230 - protein, 531 aa, unidentified
  source 1..531: note = uncultivated organism
MGIQLNYSVAIYCRLSVDDGTNLESMSIASQKTMLTEYVKKQGWKLSDIYVDDGYSGVNFERPDFQRMIHDIELGRINLVIVKDLSRLGRNYIMCGQYTEIYFPEKNVRFIALNDGIDTLYSNNDIAPFKNILNDMYAKDISVKVRSSLHAKARKGEFLAPYAPYGYMKSPEDKHILIINEEVAPNIKRMFELSASGISTKKIAKIMEEDGVLTPLDYRNSKKNSVNGTFQKKYTWDGAVVRWILRNPVYAGHNIQCKKRVQSYRTKKIVPNKREDWIIVENTHKGIISQELFNEVQKALDGRLRFVKRTGEPHIFSKLFYCAECGRSMLHHDRTNHPKYYSCGKYRADGIKACTSHHITYDNLCKIVLADIQKYVKLIEEDEGHAIQEILSIKCTSEEKQFVKAKKDLKQAKNRLEEMDVRIKKVYEDNLSGKIPDELFAVFISDYTNEKQTLTESVHSLEDEINTLQENRTDVSRFIKLIKKYADIKTLDRETLTALIDKITISEDKSQQGKKNKEQTITIYYKFVGVV

SEQ ID NO: 4231 - protein, 517 aa, unidentified
  source 1..517: note = uncultivated organism
MEFAIYSRKSKQTEKGASIQYQIDCCKKYVINYFGEGHNINIFAEEGFSAKNKQRPQFQNMMLLAQQKKLDYIVCYRLDRISRNVGDFAMLIQQLSLWNTAFISVQEQFDTATPTGRAMMYMASVFAQLERETIAERVKDNLYYLAKKGYWLGGTFPLGFVSERVVQNKHSYCYLVQNPDEINIVKNIYSLFIEYGTLSQVKRQLKKQNICTRKGNEFSLTALKEILKNPVYCQADNKVRDYFLKEGAEVTFTEEQCCNDYGLMVYNKRNYTEKSAPRQNIKYWIVALGKQKGIISGEKWVNIQQILYRNSNQNTEYKTENQYALLSAVLYCENCGQKMQPKKRRNHQKKLTFDYICRGKLQEKGCNMQNLLGKQTDDSIEKTLLEYIEKNEHFYEIWKKWKSEYCYKKYYEKEILYFQKQKQNYIDLLGNKYISDTVIQEINIKIEELSKQQKILQRQKMLYEKQQHNMQQYYYSTFRMLWQKMNITQKQEAIRYLIKKVIWNGKEIKIVLTENFL

SEQ ID NO: 4232 - protein, 605 aa, unidentified
  source 1..605: note = uncultivated organism
MSLRATKSRGKAMPSSSDRNRAGSGAGTRPGAVRCAIYTRKSSEEGLEQDFNSLHAQREACEAYVASQRHEGWTVLPEVYDDGGFSGGSMERPALRQLLQAIDAGKVDVVVVYKVDRLTRSLADFAKIVEVFDARGVSFVSVTQQFNTTSSMGRLTLNVLLSFAQFEREVTGERIRDKIAASKRKGMWMGGNVPLGYVARDRSLAIDPEEAATVRQVYDLYTRLGNVRLVQREADRLGLVSKRRPRPDGRVLGGVGFTRGALYKLLSNPVYAGDIVHRDKRHRGLHAPIIVPEAWEAVQRQLTSQAARTRGQGSAQSPSLLAGLIVDEAGAPLTPTHANKKGRRYRYYVSRTLVAGPNAEPAPLGTDREPRRQEADTWRLPAIEIETLVVDAVHALLVDQSGLMDQLGLGRLRPDALDAALAAAAQLADALKGASGLEQRDLLQAIVERVEIGAERVIIDLDATAIRSKLGAAKEMRVDPEARDTQLQLTIPIRLARRGSELKLVMADRQETRRDRGLIGRLARGYLWFEELRTGAVSSLAEIAEREGIEVPMVRRACDLAFLSTDMIEAILAGEQPIELNSEAFKLAYPLPMGWEEQRRVLGFA

SEQ ID NO: 4233 - protein, 549 aa, unidentified
  source 1..549: note = uncultivated organism
MMKPERRTIRCAIYTRKSSDEGLDQAFNSLDAQREACESYISSQRHEGWKLIPAHYDDGGLSGGNLDRPALQRLLEDIADGKVDLVVVYKIDRLTRSLADFARLVDRFDAADCSFVSVTQSFNTSTSMGRLTLNVLLSFAQFEREVTAERIRDKITASKKKGYWMGGLLPLGYDRHPDPKMQTLAINDTEAESVREIFRLYDQHGCLRQVEQDVIARGYRSKRRTFNDGKVTGSKPLSRGQINFILRNPVYIGRIRHKQESHEGLHDAIVEQELWDRVQEQLDRKSPGKFRSRSRSGALLTGRIFDETGDFLTPTHSQKGSRRYRYYVSGRLLAGSPADASGWRLPAKQLEDAVSESVFRHINSDVSRLLRSPTPSILESVERNLAKFYRTMALDLVERVQVSAGQLDITLSANAIAKRLGVPEDEIDRDRLRLESPFGIRRRGKESRLVFGAIHSAPDPKLIRMIALAHSWLEEIKSGILMKDIAARYGWKTLMVRQRIQLAFLSPAIVSAIMEGRQPEELTLTQLVTSDIPLDWDEQWAALGFATAP

SEQ ID NO: 4234 - protein, 500 aa, unidentified
  source 1..500: note = uncultivated organism
MTMSVLGRPRTGETAAVADQVLVYLRISEDRTGEEAGVERQRDDCLALCGRLGLDVAAEDVFMDNDTSAYLNKKRPEFEKLLARVRQGPSRVVVWHVDRLYRRPRELEDLIDLVESHPIRIEAVMGGAFDLNTHEGRLMARQLVAMAAYESGHKADRIRRANRQKAERGDWHGAAKFGYGTGGVLIPEQAAVIREMADRFLAGQSLRSITAWLNEESGFPAPQAHTGKTLGVWHATTVKSILVSARISGQRAYEPARKAGDAPAGREILGPGNWEAIITPEETTRIRAMLSHPDRRVGASSINLLSAIATCGKCGSGLVSGKNRRGPSDAKRRYYRCMPVPGHPERGGLSVSASGLEAVVTEAVIARLAATTLPSDEGKTGGAVAEAMERIMASRHRMEDLARDYGAGLLARSEYHAGRVAAQNAVRDAETSLGTLNRGDALKGLPIGDEAALRQAWEEEWTIGQKRAILSALIDTLVVRPDPKSGSRFRPQRVQMTFKA

SEQ ID NO: 4235 - protein, 517 aa, unidentified
  source 1..517: note = uncultivated organism
MSYCIYLRKSRKDNDAELHADGETLARHEKTLTEFAKNNNLQVSAVYREIVSGESIASRPQMQKLLSEVGEGRFDGVIVMDIDRLARGNSIDQGIIAQTFLFSNTKIITPTKTYDPSNEFDEEYFEFGLYMSRREYKIINRRLQRGRTASCREGKYVGSHAPYGYEKVKLNSDKGFSLSPVPEQAEIIKKIFEWYTRGIPCYDCTRKRIGVSIIARELNKLSVRSPKGTVWTSSTIRDILINPVYIGKIRWNWRPEKKKMSDGQMIRERPRSTDFSLYNGLHDAIISKDIFETAQAIMQKNKRRPVRADKAVQNPLAGLVICGKCGRKMQRRPSATNPDILICAEPSCCNHASYIFFIEERILEFVSKWEKEHRIFPVQNDELIKSTVPYEELSSVLKAEARINTQLNKAFEAFETGIYDTETFKIRNSALKIQLADIQSKKAEYQKYISSATQKEISYNKFTPNVKTVSSLYNTLTNAKDKNDILKEIIDHIDYIKDTRGHSHERDFDIVIYPKFK

SEQ ID NO: 4236 - protein, 518 aa, unidentified
  source 1..518: note = uncultivated organism
MSKANGKASGEKRVVRCAIYTRKSTEEGLQQEFNSLDAQRESGEAYITAQKHEGWVCLPDRYDDGGFTGGNMDRPAVQRLMKDIEAGKVDCVVVYKVDRLSRSLMDFARIMEAFEKHQTSFVSVTQQFNTSTSMGRLMLNVLLSFAQFEREIISERTRDKIAAARRKGKFAGGKPVLGYNLLSSPAGPKLVVNNEEAEQVRAIFELYLKHEALIPTVMELDRRGWTTKVWQTKDGRRVGGRPFDKNLLYHLLTNVVYLGKVRYRDEIHPGEHEAIVDAEVWQRVQAILQRNRRTGGALVRNKHGALLKGLLRCVPCNCSMGHTYSSQGTKRYRYYVCLNAQKRGWHTCPTKSVPAGEIEKFVVEQIKAIGKDPAVLAETLKHARDHGKKTLAELQAEERGLQRQLIRLNGQLRKLAANAKADDLADVQDRIRAAEQRTTQIREDVATLSRDVVDEREVEAALSVFDPLWQTLSPREQARIIRLLVERVDYDGKRGMVSVTFRPTGIKTLAQQLEEVAA

SEQ ID NO: 4237 - protein, 511 aa, unidentified
  source 1..511: note = uncultivated organism
MDKTEKKTLRCAIYTRKSVVEGLEKDFNTLDAQREAGESYIASQKNEGWICLEKRYDDGGFIGGNMERPALKELLADIKVGKVDIVVVYKVDRLSRSLTDFAKIVDLFEKHNVSFVSVTQHFNTKDSMGRLTLNILLSFAQFERELISERTRDKMAAARRRGKWVGGMPILGYDIIPNGDGLKVNQAEAEDVRTIFKTYLEKRSVLQTLDFLNKSGIFMKSWRTQKGNIRGGKPFNKSSLYYFLKNCAYAGRVNYKGEIAKAEFEAIVSPEIFDAVQEQLKFNFRERATPKVRMKTGGLLSGKLYCGHCNKLMGHRYTRKTANKIYRYYICQTAINSGWKNCPYPSLPALTIENFVKEEISKISKDEKLSKEVVDSFANSARRELSELVFRENSIKRALAELRSEIKGTSDMDSVKMKDLQKSESAHQKALDCCAENIRKLQFKAEKSLEEIERIFGNFDVVWENLNFKEKYELVDLLIEKVTYYGERGEIVISYRENGIKMSENENGDSN

SEQ ID NO: 4238 - protein, 563 aa, unidentified
  source 1..563: note = uncultivated organism
MRKITLDRDYKAAIYLRLSKEDDDFSCFGKKSESNSISNQRLLIEDFLKKHPEITAVKEYCDDGYTGANFERPEFQKMMDDVKAGVIDCIVVKDLSRFGREYIESGSYIQKVFPALGVRFIAINDHYDNAQLDAVDDSLVLPFKNLMNDSYCRDISIKVRTNLDVKRRSGQFVGSRVVYGYLRSPDDKNKLVIDTVAAAVVQDIFKWKLEGLSPAQIAETLNENGVLSPIEYKRANGSKQRTVFQRNQQALWSPVAIYRILKNEIYTGTLVQGKTTTPNHKVKKTMVKDPSEWSRTENAHEAIISAAQFDLVQKIMMDDTRSPAGVKGVHPFSGKIFCADCGNAMIRKVSRCGEAEYAYFICGGNKNNRQTCSSHSIRESVVYNTVLAVVQAHICVALNMAEAMQHIDSLAWENRELEKIKGKISVQEEIIDKNRRLKVDAYEDFRSQMLTREEYENFKAEFDKHICEANDAILRLNSERNSIMSGLTQQQGWLSQFKQYKNIRKLTRNVVVALIDRIMIRENKDIDVQLMHQDQFAAIAEFLSEQKGRRATNEMTHLTKEVV

SEQ ID NO: 4239 - protein, 509 aa, unidentified
  source 1..509: note = uncultivated organism
MANGNNSKAPKAVRCAIYTRKSTDEGLNQDFNSLDAQRDAGEAYIRSQAGEGWTLLPDQYDDGGCTGANMERPALKRLLADVKARKVDCVVVYKVDRLTRSLFDFSRIVEVLDNHGVSFVAVTQQFNTTTSLGRLTLNILLSFAQFEREIISERTRDKQVLARKRGKWTGGHVPLGYDLEEGCLVVNTEEADRVRQIFEWYIEGQTVYSIVAKCADLGWHSKQWTTQAGKVYGGHPMRKCHVYKMLANPLYAARIRADDEVVAANHPRTVDDRTFDLVQAKLKENTRHPGTPNGPKTESLLRGLLYCAGCGSPMSPSYSSGKHRRYRYYLCLRASQRNGNACATRAVSAPVVEEAVIQSVRRFVLAPEVVEEAARVTRQRMAEELNRLREDLKAVNVRVRNAKSLLARMRTPDPARETELRERIASGEASAEALRTAVERGERLRLDDSAVRQRLGTFDEVWKAMTIEQQITLLRQLVERVGYEARSDKVKITYNSAGIKEFCTKGVTR

SEQ ID NO: 4240 - protein, 548 aa, unidentified
  source 1..548: note = uncultivated organism
MARKSRKNTLSNAAASENKMKLWRAALYIRLSVEFNGCRGDSLETQRQIMEAYVALCPDIEIVDVYTDNGISGQLFDRADFQRMLSDVEAGRIDCIIVKDLSRLGRSAIDTGYYIEKYFPMHQVRFIAVNDQYDSLNPDNTSHIAVPLKNLINEAYAADIAKKIRSQAQTAMHAGQYIGSRPPYGYKKDERDCHKLLVNEETAPVVQEIFEWAACGDSLITLARHLNEKGIMTPGYYLASIGFSANERLMGSGKWQTRTILSILENEIYTGDTVQGKSMSVRKQQIKVEPDKWICVRNTHEPIISHELFEKVQRLLAERAAEYTARNKDKTPYTENILRGKIFCGCCGKILHRQRSHNRYRFRCISNERIENGACKESPTLREEELYQMILTYIRQEAEVVIGNDCRLRQIDPRIAERKKNAEQQIALLKKEAEQVKKHLASLYENYISGVLTKNEYLEMKMGYEKRSMEMVEQVRVLQDRQETLENMRSNYASIAKKLATVEKDSILTATLVNDTIAKVVVNSSADISVEFSFKDDFSEVMEALKDA

SEQ ID NO: 4241 - protein, 518 aa, unidentified
  source 1..518: note = uncultivated organism
MLTIGIYPRKSVYRDNSDSVQVQVQLCKDYAGIIYKDQEIEFKIYDRDEGFSGKNTNRPSFQEMMADVKAGILNVVMVYKLDRISRNVQEFSAMYEIFQQHDVSFISVKESFDTTTPMGRTVMYILAAFAQLERENTSERVTDNMRALGASGKWTGGKLPSGMASVRRQIGDKEHSYLEVDNSSIWRPKLLYQLILDGYSITKIERYCRDHGIKSQTGKFLNVSQIYGILSNPVYCQNSIEAYYYFKDRGCTLPDQALFDGTKGLIGYGKTKTGKDSQKKQDKGNWDIAIGIHEPVIPASDWIAVQKRLGVNKMIRSPKHEVGILKGVLKCSCGAGMNIRTYVKNNIRFSYYYCANMARMGKEYCDTEYVRVEKIDESFIDQLRKIQMNPDSLHSKKDSNITLQSSDSIRDEIRKLQSSIDNLTSALGQAMETAAAGYIINQISELDTQKKKLEENLRNVLLQESQEKSAAETEQLLFNNICYLLDNFDHISYTGKNELIRKIVKNCIFDGNSLHIIF

SEQ ID NO: 4242 - protein, 662 aa, unidentified
  source 1..662: note = uncultivated organism
MYNTKEGKSCVIYIRVSSERQVKGYSLDGQKHYLAECAERRGMTVLDTYVEEGKSGKSVEGRTEFQRMLDDIQSGKVHTDYVLVFKLSRFGRNARDVLNSLEFIMKYGVHLMCVEDGLDSSTSMGKMMITILGAVAELERENIIAQSLLGREEKAKSGGWNGGFAPYGYRLVKGDDKSKGKLETVPEEKAVVQLVFDMFLNRNMGYTAISGYLNRNGYTRPPAKNAIRPSYGEWSSDHIKRMLSNPVYTGRVAWGKRRTEKVPGSDNEYRLVKQDEYILSEVISHEEFVSKEDFDKVQEIKAIRGKKGNHNIGQYNAHLLSGIVKCPQCGAPMYIGMTKWTNQDGTERRTESYVCSYATKHRGTSVCRRNGVVASQVEDEVMEYTRKIVRNPQFIKDLQEKVMTAVDMTEVENDITAYKNQLSALQRSRDSLERDIDRIAPDDKYAERRRADMTRRLNDLYDQIYEAEDLLQESLMKKATLESEQMSVQSMIGILSSFDAIYDRMNAAERRDLVKYLISEVELFPREEQKTQKRFVKAIAYKFPIEQKVLTQFDECGASVETVVLLSKGEVDSKKIRVEFSLEDMDMSEFQDGATYTQIKDYVLEHSGLKVSNLYISQIKRKCGIEVGKNYNLPKSEDSRQPMCPPEKEKAIREAFKYFGMI

SEQ ID NO: 4243 - protein, 543 aa, unidentified
  source 1..543: note = uncultivated organism
MQEEKIYNAAVYARLSKEDEQRGESASIETQVEMLTRYVTGHGWNLAEVYKDDGYTGTNFDRRPAFNEMMEKVRSGEINLVVVKDLSRFGRNYLEVGQYTELEFPALGCRFIAVNDNVDSLNRGNNDEIFIAFRNIFNEHYSRDISRKIRSAMDTSCRSGKFIGAFAPFGYMKSPDDRHKFVIDGPAAAIVRRIFQMRCEGLGYRSITLALNEEGILPPREYLYQSVGKQNPYTKSNGKWSISEVRQLLHNEAYIGNMVQHKSEKFSYKDSRSIAVPKDEWIKVENTHEPIISRDVWEQCRSMDREANRPRQNSLKETSLFSGLLFCADCGYKMRSQIKMQRRKNGVTACYENYFCGNFSRSGHTACSTHNVSLRVLSQLVLGDIWAKSEDVFYHEKEIAQRLMERRQKQGQAELSAIQKSMRSLEKRAAELDRLIRSTYEDKVNGSIPGELCAELLGGYQKERTENAAKRCELEARLAEMQTVKNEVQEWISLIRQYQDIDTLDREMLLRLIDRIEVGEVHIEDGQKVRDIRIHYKFVGYIG

SEQ ID NO: 4244 - protein, 532 aa, unidentified
  source 1..532: note = uncultivated organism
MTKPIRWCAIYTRKSTDENLNSDFTSLDAQRESCESLIKSRKEEGWQLYPERFDDPAYSGGNINRPGLQKLLALVRQGKIQVVVAYKYDRLSRNIKDFVRILDLFDKYGAAFVSVTQQFDTSTSIGRIFQTMLMGFAQFERELVSERTRDKRAAMIQKGKWPGGMPIIGYDVDSNTKKLAVNRSETKQAKDQFLFYLKEKSLGRAAKLLNEKAYRLKKWNNKEGVEKGGGRYNKSNLVNILRNPLYVGKLRYKDKLFKGEHTALIEEDLFNRVQKLLNQNNGTHHSANQDKHEFLLKGLVRCQVCGSTMTSNFAYSKGEKYFYYKCVKVNKFGKEACPVKSAPAKELESLIVKRLSFLGQNKKLVERIVKEAQESSVKAFGSLRGDRKRIQEDIRRVDDKAQKLMSALGTSKNRFVMEKLDELETSKQKAEERLAEINLTIQKLEGQVIDAEIIRKNLKQFEVVIEKLTANEKKDLLRLLIKEVIYDQTQSKIKLTLRPLPDLGFVIEDGKVSFDERQQWLPGQDSNLRQAR

SEQ ID NO: 4245 - protein, 537 aa, unidentified
  source 1..537: note = uncultivated organism
MKQPYNTALYMRLSRDDENFGDSVSIETQRTILQQYAKEQELHVVGEFVDDGWSGTTFERPNFKRMMEEVEAGRVNCIVTKDLSRFGRDHIMVGYYLEYVFPEKQVRYIAVSENEDTKKGLSDFVPFKNLFNEWLAKDTSRKVKTALHAKYAAGERTFTYAPLGYIRHPEIKNALVIDIETRWIIEKIFDLAVNGAGAAKITRTLVEEQVPTAGWLNFQRYGKFAHIYEGAPAEKSYAWTVSQVKSILKDETYIGNSVHNKQTNISYKNKKKVRKPQEEWFRVENTHEAIISREVFEQVQTQIASRRRQQKDATTQIFAGLVRCADCGWSMSFGTNKQNSKPYSYFNCTSYRQLGKVSGVCSAHYIRYDYLYTYVLSRIQNLSRQAQVDEKELLHRILKASEHELAANAKRQSAELTRAEKRRTEVDRKFAKLYEDWSDGRITEYNFNMMSQKYQTEQQELVEKIERLSAELESEKQTTVDAETWISLIKQYANPTELTAELLNTLIEKIVIHEATTLDGMREQNIDIYYRFIGKIE

SEQ ID NO: 4246 - protein, 536 aa, unidentified
  source 1..536: note = uncultivated organism
MKRKVAIYARVSTEHEAQLSALENQVQYYNGILKQHHDWILYDRYIDEGITGTSTNKRKNFMRMIEDAREGRFDLIVTREVSRFARNTVDALQETRKLKKIGVEVYFTEDNIWTFNDEDGELKLTIMATLAQNESKKTSQRVKAGQMISFQNGVIYGTGNILGYDKVGKDLIVNEEQAEIVRFIYSEYLNGKGTVSIADELTRREAKTSTGLTNWSAAYISRVLRNPFYSGTIVYRKSYIPDYLEQKPKMNYGDVDQVIVEGRHEPIVSKEDFKKVQEIMDSHSKPIKLGRRQANGVAKNIWSKKLICECGSNFNRKVYHRNKNSTTFCYVCYNRKTHPKNRYQNSDYKLCEVKEVQEWKLQYMAEAIFRNLTQDIGNRKELYDRLMKGVKIDEHPEKKIKQRIDKLNQLVENETIKLDKLIDNYLDQTIDLTMYDIFQKKLSSRIEKYKIEIGELEKKYESIEPLDVRVEKAKASIRKLLDINYNGVDEKIIEEFIEKVVVHKDYFEWKLNFMNDTIKLEINGKSRKDGFLLEHK

SEQ ID NO: 4247 - protein, 516 aa, unidentified
  source 1..516: note = uncultivated organism
MPKVGIYCRLSIEDKDKADSNDSRSIQNQREMLCDYCMERGWEIFDIYVDDGYSGIDRSRPDFNRLLSDCENGDIDIVLCKDQSRFSRDTIIIEQYINDKFLEWGVRFIGVADNSDTESESYSTMRLFASAYNEMYVKDISAKIRRTLEFKRQQGQFVGSFAPYGYSISQEDKHRLVIDEKTAPVVRRIFDMYVSGEGYRRIVQYLNSEGIVSPTEYKRRNGSKYVNCNADSRGLWTQSTVARILANEVYTGTLVQGKSHHISYKNKKRRKVDKKDWVRIPDAHEAIIDAETWAKTQERISSRTRVGNCSYELSPLAGKVRCAVCGRPMKRNVYYNKARTIRYYGLQCASYKSGAMDCPNTRSISGVQLEQKILDELNRIIDEYCQVEDVHIDDIRSDQIVRLEKKQSALSESITSVKEHIMKMYMDKLDGVISSEDYFIFRQQLGKEEASISAQLSDIENRLDKLLDQRSEEPDINDFLHFDKLDRITADEFIDFIEIGMADENGERDVVVHWNV

SEQ ID NO: 4248 - protein, 544 aa, unidentified
  source 1..544: note = uncultivated organism
MNISIYARKSKSTEKGESISNQIETAKSYINLNYPGEEHTFFVYQDDGFSGKNTNRPGFVRMMRELKDKSIDCVAVYRFDRISRNVVDFVSVTKRLEVAGVKFVSVNEKFDTNTAMGKAMMMISAVFAELERETIAERVRDNMVMLSQTGRWLGGRCPYGYSSERIEGNKALGTKSKSRLVINEDEMQIVKLIYKLYEEKGSLHAVGVYLFEHDIVIRGKTKQTDTFIKKMLQNPTYCIADKDALEYFSDLGSSLPLDAEERFDGEHGIMPFCRHETKNNTMVNRDESDWIIAVGEHEGVISGSRWVKIQMRMAENAARYDSYSSATNDYALLSGLLFCGKCGKRMYTKKQSKKGRTGSANSFFYVCDTKRNYTSKACPMRDILGSKLDGAFIKMLAQYDAPESEIREALVKKWKSKKASKAAVSEISIYKKQIEEIDKKRMGMFGYMGELMSDGKGIPPEVKAAVDKMTEDIAELRKKIEEAEEEKKEAKESEKVIAMFEEFIRDGEKAMRAMPVPMLRDEIKRFVDHAEWDGEQLRVFLRGT

SEQ ID NO: 4249 - protein, 527 aa, unidentified
  source 1..527: note = uncultivated organism
MMFNIYARKSVCTDEGDSIESQINICKEYIDKHFIDVADKQIYVYKDEGFSGKDTKRPQYIEMLKSIEKEKDGYIICYKLDRISRSISDFSSLIDKLSKKNISFISVKEHFDTSNPVGRGMMYICAVFAQMERESIAERVRDNMMFLAKTGRWLGGTVPFGFNSVRTSERIIVDGRSKKVSYLELNEDIETVKLIYKKYIEFGSTVAVARYLKDQNIKDIQNNDISRSRIKFILENPIYCTADKDAYEYFSKRTKNIFFETSDLYKKLGIVPYNRKNQSRNNNPYSSWTLALGKHKGVIPGKEWIQVQNIFHRPYPRLHSCKTTSLFSSMIPCPKCGSPMYARKTSENHFSYGCSRKDALGTAYCNFKNIKCLELDNQILQELFKLDIKDLKNKIHMKKNTHLYNKLDDKIFDNKYTISKLQNSKAQYINYLQKLSPQSPLIKDIEDKVSAINSQIKKMTSETYDLETKLRTTKNEKTDLEDIVNAFEKLKNNFDTMDFKTKKSLARLIVKKLIWNDDKLVIIYNCI

SEQ ID NO: 4250 - protein, 512 aa, unidentified
  source 1..512: note = uncultivated organism
MGVTRVCIYTRISTDEENQPTSLHSQKERLQAFCSVQDDWKVVAHHEDRATGTSLERPGLQAALDLARSQRADVLLVYRVDRLSRKVRQLAQIAEELDKLGVVLKSATEPFDTGQPAGRMMLQMLAVFAEFEHATIIDRITAGIERRAKQGHWPNGRVPFGYMRNDEKLLVPDERTALTVRRIFQLYTGGRLGAATIARQLTSEQAPSPPRGWQPAVVLLILQNEAYLGRVHWREETFQGLHEPLIDEITFARAQHLLAERGGDLAARRSNPSDFLLSGLLRCGRCHRAYVGMSAKGNGGLYRYYACSGRQKLGRRGCDGERINRDKLEAAVLGQLADIYRDGTLIQQAITEAATRQDQDREGLAKQRAALAKEIQQAERALDRYHRAFETGKLGIDRFAERVSGLDDRLQALYEQDAQLDQVLAIDAPTAPDTAELATVAKHLDQTVGAGDPKQAKALLRLLISNLQINSRNEILPTYKVVDPSVCAPTSSMEPDGIEPTTSCVQSRRSPS

SEQ ID NO: 4251 - protein, 557 aa, unidentified
  source 1..557: note = uncultivated organism
MKEQTKFFAAMYLRLSRDDSIKAEQGDHSASKAESNSISSQRELIRSYLNEQEDMELYDSYVDDGFSGSNFDRPEFNRMMKDIEAGRVNCVVVKDLSRFGRDYIEAGRYLEKTFPALGVRFIALTDHYDSLSADTGERQIVLPVKNFINDSYCRDISTKVKSQLAAKRKSGECLSPFAVYGYRKSAEDRNKLVVDEYAAEIVRRIFRWKIEGLAVSAIAKKLNELHILSPSEYKRSLGLNYRGGFVGGSGSKWGSSSIKRILTDEVYLGHLLQGKTEKINYKVKKSIGKPREEWVRVENTHEAVISESDFDTVQNLLRTDGRISPESRSVSLFMGLLFCGDCGEQMIRRTVKYKGSSRVYYICSTKNRGEGCSRHSIEETVLKELVETAVRRYANDFLAQQKLFEQAREKETNMEAVAGCQSELARLKQEQDKYYSLCAGLYEDLAQNVVTKEEFERLHREFQRKAEDVSKAQEQQQGLIKKMLQNGVASAGRLAKFQDSLKLDEIDRHTLTSLVKRIEVYEGKRIEIEFYFQDEYQIMQEYAASLSGQGSGRERSA

SEQ ID NO: 4252 - protein, 529 aa, unidentified
  source 1..529: note = uncultivated organism
MKKWAIYARCSTEEQAKEGYSIEMQISNCMQLINSMDDAMLYKTYIDEGISGSDSYLKRSGLLNLLADARKKRFDGIVLYRADRLTRLSQENEELVHLFLKYGIQIKCYSGENLMDTSPMGEFFRRTIANINELEVKILSFRIKSAMKLKAENGEWKGNRLPYGYYYDHETQTIKNVDDELEQVKFIYKLYTENLMGAYKIRDYLNDNNIFYHNKEKWTRDRVLGILSNPLYCGYQWHNKRYSKFEIKLDNKKFKDKNNWILYPANFITPIISKDKWDEVQKIKELRAKKLLNTHTNSTWLLSGILYCGCCGEHLQGHPIINSRRLKRTGEIKYYDCSNYICTGRRMMGNDYCKARQVAKRRIENIVISKTIKYIEKMSKTFALSKQEIEKILDEKFNLKGSSNIDLQIKQIEKKIDKYYQDYESGKIDAEILNPAVKRLNYEMENLLKKKEEQSNIESQKIEMLNKILEYNTNLSIWKNELLTKDNNIIKPILLKLINYVEVLNTGTDLYCNINFKSPYNFDLTNNHE

SEQ ID NO: 4253 - protein, 544 aa, unidentified
  source 1..544: note = uncultivated organism
METKKAIVYTRVSTVEQAKGYSLPTQLESCRAYAQEQAYSVVAEFSDKHTGTEIDRPGLNQLLQFVANEEVDIVIVHDLDRLSREPAYQAILEMELASSGIHVDYVLGQYEDSPEGDLSKMIKGAISKYENRQRVERSRRGKIGRARSGYVIATGKRAPYGYEYISEAHKGWFVIDEKEAQVVRQIYTWILEGHTCYAIARMLYERHILTRGDLHDAVVKKAQPGAWSPSTVRRIVVNETYKGTWYYGKTRRQKVNGKFVQRTTPKEEWIAVDVPAIIDTETWERAQEMLTKNKQEAPRNTRRHYLLRGLVFCRCGRRWTGRYKNHLKRAYYRCPVTEKERWMCSCDMPGGIRQDKFEDAIWNTVSGALLNPENLRVELAQRRSEVTAKMEDKQAEVDVVQNELVEVERKLGILLDEMLTLDFPESVVQTRKDGLLARRKQLLTEIERNRRESQSPLPSLAEEEGLVQFAEWIQASLEDVDFETKRKVLELLQVRVDVVSPKEVKLSALLPFSQETLADYPSEASEEQSDSLAVSGSIANTLYS

SEQ ID NO: 4254 - protein, 513 aa, unidentified
  source 1..513: note = uncultivated organism
MKAAAYARYSTDLQTENSIAYQLDAISAYCLDHDITVVDVFTDEGRSGTNMDRDGFRRLLAGARRHDFDAVVIYDISRGSRDVGDWFTFRKEMMLANVQVISATQRLGDLTNGNDFLVELLTVGMGQREVLETRSKSRAGVAVKAKEGVFLGGIPPLGYDIVDGRYVINEEEARAVRTIFRMYGAGESYSAILARLGDVRGKRGHPLGKNSLHSILENERYIGVYSWNKKQYKILRKWAGGRQNPDAVRLEGVIPPIIDAETWERVQKRLHDSRRNAAFANTRREYLLSGMIRCEQCGGMYVGHTTRNDRGYECAQYVCGTKYRSHTCGGHNISAKDLEGFVVDQLRRYLLTADYDTLAAEVARRVNGAGRDLRQERAELADVEVKIRRGMQYILAGNDFPELADELKKLRSRKTELEGIICRADGPQRAVDPARIAQMLRDAADRLDQAGPKAVRAVAEKFVTKIDAHADGTVSVHIGVHTDGCGGPLLSVCTIFVPRKLLKKQSPPTLIKK

SEQ ID NO: 4255 - protein, 563 aa, unidentified
  source 1..563: note = uncultivated organism
MSSAPKLRCAVYTRKSSEEGLDQEFNSLDAQREACVAYISSQGGLGWKLIPDLYDDGGISGGTMERPALQRLLQDIRDRRVDVVVVYKIDRLTRSLMDFSRIVEIFDANGVSFVSVTQAFNTTSSMGRLTLNVLLSFAQFEREVTAERIRDKIAASRKKGMWMGGRVPFGYQVKERRLVINEEDARNVRHIFERYLHLRSVLALTEEVNRAKIGRAGEADAPAWTRGKLYYLLANQIYVGNVRHHDRYFAGDHEAIIDTEQFGEVQKLLAIQAPRRARSSSNAADLHRLTGILFDETGDRLSPAHASNHGKRYRYYVSARLKTGRSTEGWRVPATELEAIVDQQIRQLLGDQARLASWVNDKADAGKIEKTLEAARDRLAGLSKDDTRILISQIVRHVALHPDRIEVQIDTGGLLAWLDSGEADIGRPGWAADIRVDAQPSSIVVISTPISIKRRGVETRLVIGSDPSSKRKPDAKLVDVIMRAHLYLGKLTNGAGRSVAEVADLFGVHSADVSRILPLAFLAPKIVEKILNGTQPADLTIRKLARVSDLPLRWSDQEAHLLR

SEQ ID NO: 4256 - protein, 508 aa, unidentified
  source 1..508: note = uncultivated organism
MLALYARKSVERENSISCETQIEYCKMMIKPEERGEKTVTFIDNGFSGGNVNRDGFQKMMKLIRKGKISKVIVYKLDRISRSLSDFMNILQEFKENKVEFVSSQESFDTSSPYGDLIVKILMVFAEFERTSIINRVSQAYAHRSEMGFYMGGRQPYGFELVPTVLHNIKTKKLNPLPSQAQQVQYIFEVYGQEFISLRKLLDRLVTEGKQPLDGSHWTTSKLSTLLKNPIYVKADSAVYDYFDLHGTQIISDPSLFTGKCGAQLYGRTKHNIANPDWSDMKLVVLSHPGIVDSHIWLKCQRKLETNRKITNSYNNPTSWLAGKVVCEKCGHTMTTIKGKANHSGEIRRYFNCTGKSHKKICTGPRVSIYAKDLENMVNDCIAMKLADLKFTNPLFSKENCAEINDLNLKIKAIEQSEKQLLDTMLTGGFNEALLAIANQKSTQLKQDRLALQERIETLKSQDQESKSNVNLVKLWKNADYAKKKAVAMIMIHKIVIFEDGSTQIVWNI

SEQ ID NO: 4257 - protein, 568 aa, unidentified
  source 1..568: note = uncultivated organism
MTPRKKRTGTILEADPRRIRAVYYVRNSTDDQDDLLSPEVQTRRSHDIADKNNADMVGGYEDIAISGGSAENRPGFQRMIADAISPEHPFDMIIVYDISRFSRNTRELLDYKHLLKKHGVRIQSVTEPHYGDAASDEAWVHTSAGNEAMLPRTARKTRDSQFEAVKRGYHPGGVPPFGYMTEQVVVQTERHTPTGRPRVKETVHSILVPDPETAPYVVKIFEMNAQGYSCPDISEYLVGQGVKTRNGNDFTPGAVLTILHNRRYTGCQERGKGSKSEYLPEDETEINETAHEAIIPPSVWEKAQEILAARAPVDKSPESESPESESPRGKSPRSHSSPYRFTELSECGYCGSSVVLAHSRTLVCSRKKIRTEYCPNSHREKLDKVQDPAVKILVADLDDEDFLNEHFDRVVELNEELVREQKKRLDSVERNIKGIDKKITGLVDGIEDGKKKGRELDEIYDRLDKRRGELREAEKEKKDLTVESEGLMSYVNDRERIIKNAKDARTIIEAEEPQIANKFVKLFVEKLVIKDHVGTIHFTVPPLGEGPYRPPVSFGIGEYLFAQPMGEG

SEQ ID NO: 4258 - protein, 539 aa, unidentified
  source 1..539: note = uncultivated organism
MKTSSVKSVRCAIYTRVSTEQGLDQEFNSLDAQYEAASAYIKSQAHAGWALIRSRYDDGGYSGGSTDRPDLQKLLDDIRARKIDVIVVYKVDRLTRSLADFAKLVELFDGHGVSFVSVTQQFNTTTSMGRLTLNVLLSFAQFEREVTSERIRDKIAASKRKGLWVGGPLPLGYHMKDDKIAVIEDEAERVRLIFHRYLELGGVNALVRDLRKRDIRTKSRLLSTGVTRGGVPFGRGSLFYLLRNRFYIGEVKYKGEILPGEQPAIMDRALFDAVQRKLTDQWTTRSTTRNASNHLLAGLLFDDVGHRMVPTHATKAGVRYRYYVSFPHLHGESRTASVGSVSRVPANDVENVVVKSLNEHLIALKEKPAFSRIHTGDGKAALEQVARIDVHEDRLVVRLKSADDEETSDATDDYLLSIPWQKPPIRKSRQILIPHGIPKNEIRPTRIERRARLVSAIARGKRWLDEIVSGSVTEVQQIATRQKCSVRQVNMTISLAFLAPNLVRAAVEGRLPRGIGVERLRDAPAEWSRQFEALGLNPR

SEQ ID NO: 4259 - protein, 551 aa, unidentified
  source 1..551: note = uncultivated organism
MTAKPAIRCAIYTRKSSDEGLDQAFNSLDAQHEACAAYIASQRHEGWKLVPERFDDGGLSGGTLERPALQRLLAEIDAGRIGMVVVYKIDRLTRSLADFGRLVERLDAKGCSFVSVTQAFNTATSMGRLTLNVLLSFAQFEREVTAERIRDKIAASKKKGLWMGGTLPLGYDRHADPQRRELVVNPVEAEMVRKLFDLYAELGNLRLVEIEAMRLELRSKATVSASGRQSGGSYFTRGQLHYLLRNPLYIGRIRHKDKDYAGQHPAIIEQPLWDRVQSQLLQAKARPRGRSASPTEARLLTGKLRDETGDILTPTHTQRHGRRFAYYVSHRLIAGGTDPTGWRLPAEALETAVRKLVAAHLRQRAEQHGVLATPDAINAATLSQRGLELATRTATNPSLFASLIEAVVLGQAQIDIRLDANAIARALGVAPDALSLRLLATEKPFALRRRGVETRIVAGETEPRPDPVLVRTLAEARAWAKALRQGTALSEIAASTKRSGPYIRTRIPLAFLAPQLQIAILEGRQSPDLSVARLIREDMPMDWDAQLRLFG

SEQ ID NO: 4260 - protein, 539 aa, unidentified
  source 1..539: note = uncultivated organism
MKIAIYSRKSKFTGKGDSIGNQIDRCRDYINFIYSEQKDIEIIIFEDEGFSGKNTERPGFKRMMHMVKGKELDSVVVYQLNRLGRKVKDILETIDIFKEFNCALHSVTEKIDTSSPMGTMFLTILASISQFERDDMIQRITDNMYILAKDGRWLGGQEPYGFKHIRETFTDSHGKTRYFSSLIIKEDEMDIVLQIYNLYLEMQSLSQVHKYLLQRGVRGKKGGYINKSSIKSILINPNYVMCNDDIIEYLEEDGYIVTKQEEGKGILTYCKRSNDKTRNNPKIASTSKHPGVIQPDHWLKVQEIMNMNKDKKPNRGNSTTGLLSGILRCSCGAIMNVTKSRQLKDGTRPYYYACSMKISSGGALCNKKNINGLLVDKRVIEEVVGYDASKVIEELDKILEKEIYKEDNEKLEEIYDKIKLLKNKKNNMFIQLSNLDLEDDKEIIVEYQEVIRSINSEINELNEKLADIEQSSNMIIDSQIDIQEIKNKVQNFKDTFEMLKHEDKKKVLSKIFEKIVWDQDCNTISITYSSKNLKMLEEL

SEQ ID NO: 4261 - protein, 606 aa, unidentified
  source 1..606: note = uncultivated organism
MNNERKIAAVYIRVSTEDQAREGFSLGEQKEKLLQLCAFKGYEVFKVYEDAGISAKDMEHRPAFQEMLQDMRNGKINYIVAYKLDRVTRSVRDLEELILELEKYNCYLVCDRDDVNTSTANGRFFVRMLTVLSQLEIEIVSERTKFGLNGAIKSSHLPGPAPLGYKKDGNKKTIVDETTKPIIERIFKMYLKGKSFQQISNIFNEEKLLNPKKWKDTTIQKIIDNKIYMGDYEQYKRIAKKENKEPVIYMNVVEPIISRAIWEECQRQKEVNQRTYTRDRVYLFFQKIKCPICGRIMKCKGSGGTKRKYMYYTCEHCHINFNESHVEKLLKNFIYDLLEYDMAVKKFFLPILEDKNSKIDTNSIDKEIRSLEKQRDRIKQAYIKGIVEMDDFKEDYKLIEDKLANLEGKKLDLINLETFNYSPHELLAERDLEREKMIRLDTLNSLLKSKWNDMDKTEKQEFISKFIDTIEIKKDDKGNLILEKINFRNGFIKELIRFYDAGIFDVAVPVMINSNEEIIKGSRMSKDELNKYLNKMNEYFETSFYEMYEKIDDETNEIILEYQPKIDEKIIRFVALNNSNNFPISREDIKDKYGIVSYKTNKLLEN

SEQ ID NO: 4262 - protein, 551 aa, unidentified
  source 1..551: note = uncultivated organism
MQRKDKYSGGVYLRLSKEDGDVVTGTKSESNSISNQKSLITEFLKSKPEIHAVSFYEDDGYSGVNFERPAFQKMMEDVKKGKIDCIIVKDLSRFGRNYIEVGRYLEKLFPMLDVRFIAVNDNYDSLNTDTAHDVVMPFKNLINDSYCRDLSVKIRSHLNVKRKNGEFVGAFACYGYLKDPQNKKHLIVDTYAGQIVQDIFRMKINGFSQNRIADVLNKEGILSPMEYKRSLGIRFSTAFKINPKAVWSAKAVSRILSNEIYTGVLVQGKQTTPNHKVKTRQAVEEKDWIRIEDAHPALIDRYLFDIVQTLLERDTRTSPDEKTVFALAGLVFCGDCGQPMVRKTAVYKGKDGKRQMYSYFVCNGKCRGSKCSWHRINEKELMDAVFQSVNLHIENVLDTERALQEIADAPSSQLLIRKLRDRIFKKKEELARTERLKIGAYEDFKDELLDRQEYMKLKQEFDHRLAEARSTIEELNRQIAELEQDSSDCFKWMEYYKSFGKLEELTRFAAAIAINRILIYEDRRIKIIFNFEDSFRQAKEMIESTRQQEVI

SEQ ID NO: 4263 - protein, 555 aa, unidentified
  source 1..555: note = uncultivated organism
MKEKQFYAAMYLRLSRDDEDRDGLTKSESNSIGSQRELIKSFLREQPDIELYDIYVDDGFSGSNFDRPEFKRMIADIEAGRVNCVIVKDLSRFGRDYIESGRYIQKTFPALSVRFIALTDHYDSLSADTGESSIVLPVKNFINDSYCRDISTKVKSQLEVKRKNGECIAAFAVYGYKKSQEDKNRLVIDEYAAENVRRIFAWKIEGLAVSAIAEKLNGLGILSPKEYKKSMGLSYNGGFSGTGSCVWGNATVKRILTNEVYLGHMVQGKTEKVNYKVKKYTEKPRQEWVKVENTHEPIISADDFAVVQHLLKTDGRKSPQSGAPSPFMGILFCGDCGEQMVRRVIRYKDTAKVYYICSTKNRGEGCSRHSIEENQLKEIVCQSVRIFANSFLKEKQLFDRAVQYETNFDSVAQYDKEIERLKKEQDKYYSLCSGLYEDLREGIITKEEFERLHEGFSRKGKELEAAMMKQEQLIKDMFKKGVLSAGRLKTFQDCVELKEIDRHTLSSLVKRIRVYENKQVEIEFHFMDTFAVMAGLGRKVLTDRARSARNTERSA

SEQ ID NO: 4264 - protein, 547 aa, unidentified
  source 1..547: note = uncultivated organism
MEDTKQTKKRIYCAAYCRKSVEERADGTFGSIENQHESILSFITSHKHEGWIPLSERYDDNGFTGSNTNRPSLQKLITDIKEGKINMVVVYKLDRLSRSLVDFVQILKFFEEHDVAFASITQPIDTSTSTGKLMLHILSSFAEFERELISERTRDKMAAARKRGQWLGGRPPLGYNVAKDSKKLVVNQEDAKLIREIFNLYLKGNSLLKVAQVINEKGFRTKRATSKAGKTFGGIKFGITHIRLVITNVLYLGKVCYEGQIYDGQQEAIIDEETFKKAQEKMKENRIERKAIKNTDCTGLLSHILHCKTCGKFMFHTYTLKKGTHKYRYYVCTSAQKRGYNSCPTKSVNAQAIEDAAVDCLKRIFTDNRKKGDHTNKQEVEALLSPIWNTLYPEEKKRILKILIKDIDYDSTNKKLGIMLNGSDTRLEFEVDLKQVRPLNKWHKEEEIGKEPQARKMLILAHQIQQFINEGKFKHPREACKWLNLNVTRMDQIMNMLFLCPSIQNEILSSNTPAITALTEFKIRPLLKEASWDKQLAQWQALTENKK

SEQ ID NO: 4265 - protein, 557 aa, unidentified
  source 1..557: note = uncultivated organism
MKQKIKKSFDIYDAGLYLRLSRDDADEDGTKTESNSIANQRELLRNFVKSQPDIQIFDIYVDDGYSGTNFDRPEFKRMTADIESGKVNCVIVKDLSRFGREYIEAGRWIEKIYPAFNVRFISVTDMFDSKTADFSEKSFILPIKNFVNESYCRDISSKVRSHQRIKREKGEFIGAYAPYGYCKDPENKNCLVIDEYAADIVKEIFAWKIEGFSLNAIAKKLNRRHEQSPKEYKLSNGINFNSGFQGSSTPKWSSVQIKRILTNEVYIGNMVQGKQERISYKLKARQNKPEEEWIKVTDTHPAIINQNEFELVQRLLKYDGRALQNTGVSNLFSGFLFCGDCKNPMIRKVNKYKGKKKAFYICQTKNKGGACTRHSIQEDVLKQIVLKEISSYMLLFIDYEMSMEKLQELEINYDQVISHDFQISRLQEEYNKYYGLKMSLYDDLKTGLIDKTEFNEFREIYDAKCEELDQTIKYQKQLIREIFDGSVTIKVQIEDWKKAIDIKELDRSLLALTVDAIYVFEDKKIEIHFRYQDMVEKMKIIRDFCLNQVTDNMKEVV

SEQ ID NO: 4266 - protein, 528 aa, unidentified
  source 1..528: note = uncultivated organism
MKNGSGRRAPAAVAEPAADKVIRCAIYTRKSTEEGLQQDFSSLDAQREAGEAFIASQRTEGWQLVPERFDDGGFTGGNMDRPALTRLLAAIEAGRVNCVVVYKVDRLSRSLMDFARMMELFDRCGASFVSVTQQFNTINSLGRLTLNILLSFAQFERELISERTRDKMCAARRKGKWIGGHPVLGYDIDTKARRLLVNPDEAHQVRTIFDQYLELGGMLPVLQDLDRRGWQTKRWTTEAGQTRGGKPFTKSLLYGLLTNAIYTGQVNHKGTLFPGEHEAIIERATWERAQDMLDSNGRTNGCGVKNKYGALLRGLLFCVPCGTAMVHTYSVKGSKRYRYYVCYNAQQRGWKNCKTKSVAAQAVENAVLEAIRRLGSNEQLAAEVVRQAREHLAHGREEHGRDVAVAEAALRRLNTEVTAIAGDAVISSTARVDRLLDLQGQIQDAEHRLADLITEGRELEADQFDDADTVRALAEFDPVWASMTTREQTRLVQLLVAKVGLDGRTGKVTVDFRSAGIRDLCNGTTTQR

SEQ ID NO: 4267 - protein, 574 aa, unidentified
  source 1..574: note = uncultivated organism
MTRRRPPPLPQHGRKLRCAIYTRKSSDEGLEQSFNSLHAQRDACEAFINSQKHEGWILLPAAYDDGGLSGGSMERPSLYRLLADVQSRLVDIVVVYKVDRLTRSLADFAKLTELFDAHGASFVSVTQQFNTSTSMGRLTLNVLLSFAQFEREVAGERIRDKIALSKRRGMWMGGLPPLGLDGIDRQLVVNEAEAETVRFIFQEYLRSGSIADLKRSLDAAGIVSKRRRFSDGREAGGVCFSRGALYQILRNRLYRGEIAHRGEVHPGNHQPIVDQALWSAVQERLAGQSRRRRGVGSGGAQPALLADLAFDRGGNRLTPTYAVKGGRRYRYYVSAPLVRGEPSANSVRIPAPDLERLVTDGVASHLRNDLWVARQLGAGLDAAETKRLLQAAANLTEAVSDGHNPDSADLLRQLIARVVLGDKQVDITLDRTALLSRLAELNGTLDLPCTSEAPLEISIAARALRCGKEVRMVLGEVHSTTRSPDPALIGPLADAYRWFEDLRSGRVETIAALAERDRQQVSHVSRTISLAFLAPNIVETIISGRQPITLTPERLKACRPPPLDWDEQHQLLLG

SEQ ID NO: 4268 - protein, 507 aa, unidentified
  source 1..507: note = uncultivated organism
MPQVQVIQPIQQQTKRLRVAAYARVSSDSTDQLNSLSVQVDYYTHLIQENPNWDFAGIYADEGITGTSTKHREQFNRLMDDCRAGLIDRVLVKSASRFARNTADALASVREMKSLGVTVVFEKEGFDTETSNGEMILSMICSVAQEESLSISKNMKWGIRKRMQSGTYVTASTPFGYRQENRKLIPYEPEALVVRFIYAQYLAGESVARITKLLNSQYPKEAGAWNPPAVQSILTNEKYRGDTCCQKRYTPDTLPLQKKRNKSQLPKYYIQESHPAIIMPTDFEKVQALLSQKRTHHSQMHSYPLTKMAVCQFCGKMLSPKTRANGVRVWNCKTHIVDSTQCPIKPVYETELYGAFLSMYNKLFENRATLFLPIFNDLQRIQDIKSMQNEASNAVHTEILQISKQLHNLTRIHAQGYIEETAYQERRIRIEQQLAEKKKCLTCQKQNGTAEKELYQTKQIDRYMQNHTALTEFDEEAMRTIVKKIVVSNEAFVFELSNGLHLKEKRQ

SEQ ID NO: 4269 - protein, 505 aa, unidentified
  source 1..505: note = uncultivated organism
MIAAIYCRVSTAGQAENGTSLDSQRDACLKLATEQGYTVPAEYVLLEDWTGADLERPKLERARELVRSRTVQALVCYAVDRLARDPIHVGIVAEECAKHEVELVFVLEPLDTSPEGALIRYVKGYAAQIERERIKERTLRGKRSRARMGFIVQATGKGIYGYRYVPETKKRVIYEPEAQVVRRMFEACLRGDSCYAIAIRLNEEGVAAFGGGLWHPRTVKRMLTNSSYKGTTIFGKTRRVSLGGKRRRVEERSPQEWIEIPDATPPIVTEDVFEAAQRMLSRPRRNPNLASRKYLLTGHLECTCGAPAVGTCLNHTYRYYRCRSTWPTATRPKTCNAPYINAARLEEAVWNTVREVLQEPDIVIAEIKRQQDESSFIEEEMARVRASIRRLADQERRFIRLFGLGQVTEEYVVREASQVKKARLALEDELRELQQQRERVANLDGLSEQVRAFCAQVAERLDDFDFEEKRLALQALQVKVAIGRDGAKLTGAIPQDLATIGRTWA

SEQ ID NO: 4270 - protein, 524 aa, unidentified
  source 1..524: note = uncultivated organism
MARAHKQSKPDESPTIRCAIYTRKSSEEGLDQEFNSLDAQRESAEAFIASQKAQGWVCLPEQYNDGGFSGGSMERPALDRMLRDIDDGKIDCVVVYKVDRLSRSLMDFSRILETFEKSDVSFVSVTQQFNTTHSMGRLTLNILLSFAQFEREIIGERIRDKIAAQKRKGKWTGGVPALGYDVDRSEASPRLVINAQEAARIRSIFDLYLAKGSLLPVVHELALRGWRNKKRITKKGKLIGNKPFDKCTLYNHLTNPVYIGKITHKDEVYEGEHDAIIDLEVFEQVQELLKANGRGGGAEARNTYGALLRGILRCKACDRSMTHTFTTSRGAHKTQYRYYRCIGAIKSGSCTCPSGSLPAAEIERVVVDEIRAISKDKSLLKQVLAESQSKIEHERQAKQTERDDLDKELKRHQRELVRLATDPGDSTDRIAELHDRIAEGEQRLPGINARIADLEQETISPSEAHEAFEAFDTLWGNLIPREQARLLQLLISSVEYDAEHETISVTFRPTSIRALVGKSTMEAA

SEQ ID NO: 4271 - protein, 508 aa, unidentified
  source 1..508: note = uncultivated organism
MEENKYNQGMKKASVYVRVSTEEQAKEGFSVDNQKRACEEHARNFGYQVLKVFIDDGKSGRTTERPAFQEMLKMAKEGGLDAVIIYKIDRFARNVSDFSRIRSELEKLGVKIISVNEGDLSENGGLIANILASVAQWESDVNGQRTRDALMQKFREGWQPTPPPIGYKSVGGDREKKYCEPDPYSAPIIKQLFELYSTGNYSIFQLQKWLSSQNILSRNGKPLGCSTIDNILLNPFYYGLIRWHGEEKIGNHLPIINVGLYNTCQYVLAKHRSFLTRKRKNQFLLRGFIYCSDCGQRYTAEWHIKESLKKRGGKIAYYHCQKLGRNKCPSPFVEKENLELKVENLIKNLEFSQEFIDLVVEKTKEKLNLSRTNNNSQRQALANSRQALITKRNKLEDALLDGVFERETYKRKHDEIKTQIENFDTKLQNIEEESNLDMDLIEEVLFFTRNIHQTYLDAPDFLKRYYLRFFYEKIFIKDKRIAKITYTPMFNELIQAKKVILKDVGLPR

SEQ ID NO: 4272 - protein, 533 aa, unidentified
  source 1..533: note = uncultivated organism
MKRLTTNNTRPEPRASVKLVRCAIYTRKSTEEGLEQEFNSLDAQREAGEAYVRSQAGEGWALVPDRYDDGGFTGGNVDRPALRRLMADIDAGRIDCVVVYKVDRLSRSLLDFAHMMRTFEERGVSFVSVTQQFNTGTSMGRLILNVLLSFAQFEREIISERTRDKIAATRRKGKWAGGHPVLGYDVDPAGYRLVVNTTEAERVRAIFSLYLEHGSLLPVVKELEKRGWTSKRWKIRKGTERGGKPFTRTNLYLLLTNVVYAGKVRYKTEVHNGEQPGIVDPGVFQKTQELLRQNGTTGGGPIRNQFGAILKGLLRCGPCGSAMTPTHTTKQNRRYRYYACVSAQKKGASTCPSKSVPAGPIEDFVVDQIRCIGRDPDLLRDVLAQARDRQKIRTAELETEERGLGKDLGAWQREMTRLSAQFRPGEDNGEVVARLADLHERIRLVEGRVKQVRDQIRAIAGEVIPEDEAARALSAFDPVWGALVPREQARVVGLLVDRVVFDGVSGKVTVSFHPTGIKALADELAEREEEQVA

SEQ ID NO: 4273 - protein, 501 aa, unidentified
  source 1..501: note = uncultivated organism
MIAIYARKSVFREDSISIESQIEHCCYEAKGEPYIVYSDNGYSGKNVERPEYQRMVEDIKVGKIQKVIVYKLDRISRSILDFSNMMHLFQTKNVDFVSATEHFDTSSPMGRAMLNICIVFAQLERETIQQRVADAYVSRSQKGFYMGGRIPYGYTKVPITINGIKTSMYEIQPEEAEDVRLMYELYSNPTTSLGDVQRILLSKLPVDRRNRTWCTARLSELMRNPVYTFADKSIYDFYKSQGANIINPIEDFTGETSLYFYKGDNANRKTWDLSGHNLVVAPHVGIVDSATWLICRRKLLNNHQIKYCKPKNSFLAGKVKCGYCGYSMSVRKSPRIKSEPVKYFVDLGRVDYHICEEKVSALRVNEFEQEIVERIKSKLDSLNIQHNSEDDAIIGRIRCLNIQKEKLDEEINNLINSLSSSSNSITMSYIEKRITELDKQKHEIDAIIQIERSKKQPNHGQIQDAVSKWDILSFEDKRAVVELLIQKILVYKDHVEIIWHV

SEQ ID NO: 4274 - protein, 514 aa, unidentified
  source 1..514: note = uncultivated organism
MTKVRCAIYTRKSTEEGLDQAFNSLDAQREACEAYIKSQKHEGWKLLPQHYDDGGISGGTIERPALKRLFDEIDAGRIDMVVVYKVDRLTRSLADFAKLVERLDAAGASFVSVTQQFNTSTSMGRLTLNVLLSFAQFEREVTAERIRDKIAASKKKGMWMGGLVPLGFETSDSGLVINKQEAETICALYEGYLKLGCVRRLKTLADERGLHSKLRTLRSGKVIGGKPFTRGHIYQLLSNPIYIGKVRHKGEVFDGLHDAIIDQGTWDRVQSKLAKNRQTRVSRTNTKSRSPLAGKLFDTEGDLLTPSHTNKKGRRYRYYISRKLIEQSGSRQDGWRIPATEIERAVVQAVKQDRDVRMAWSARKLEHPGKDELLEKINRVQIHQGYLEVVLNPTCEAQTITITALYTMRRRGVETKLLLDGGANSELDATLAKRILQATDWFEKVKSGIPVYEIAKAAGLSADYVAQNIELGFLAPKILAAIIDGTLPPHLNVTTLSRMQLPVEWPAQEALLLV

SEQ ID NO: 4275 - protein, 506 aa, unidentified
  source 1..506: note = uncultivated organism
MDHKSESNLQGLDAAAYLRKSRLEAGLDTDEVLAKHQKTLYDYAASHGIHILEEYPEVVSGESLYARPQMLRLLQDVEDGKYDAVLCMDLDRLSRGRMKDQGIILDAFRDSNTLIITPEKIYNLSDEIDEEYAELKTFISRREYKIITKRLRRGLQMSIQDGCYVANAPYGYRKTVVDRRPTLEIYEPEAKFVRMMFELYAKGYGCVAVARHVNALGARPHRSAEFSRNSVAKILRNPTYIGKIVWNQKKHIRKGAQGNPKHVTIYQPRDQWTITDGLHPPIIDRELWETVQAIADGRYRPARNDGTVRSPLAGLVKCANCGQNMQRMVMKGSAYLLCTRRGCCASTKIDLVEGQILNYLTDTLAKLTMDQPQHIPGRDTDVLETALSQVRDSLAGTDRQKNRLYELLELGEYDLELFRERMAAVKEKRAALEKKEAELERSLREIQCSNPALLAEKIRAVLDAYSTADAAGKNALLKSVLESVWYKKEKKTKPADFQLQFVLRAL

SEQ ID NO: 4276 - protein, 534 aa, unidentified
  source 1..534: note = uncultivated organism
MNTTVNAGLYSRLSVEDETNNESTSIQTQKAMLTDYCQERGFHIVDYYVDDGETGTNFERPEFQRMLRDIEAGKINTVICKDLSRFGRNYYEAGMYLDKYFVERNIRFIAIQDNVDSAKGGYDLTVPFLNMMNDYYARGISQKTKAAKQTRAKQGMFLGSKAPYGYRKDPEDKHHLLIDDVAADNVRRIFTMAENGWGFFKIAKTLQSEGIPNPQSYADGTHDTRWHITSVQKILQNPAYCGDLVQGRRGNRTMHGKQIQKPEEEWITVQNTHEPLVSREQWEAVQQQIKSRKRSMKNGEVQMFAGLLFCADCGSALSFSVRHRKTMPDGGEFKCWRYMRYGKEECTSHYITLDQISQVVLEDIRRQARFAKYCRTGYMQLLMEEQQLRDEEEMEQQKEKAEQAQQRLSQIDMIIRKLLEQNAIGVISDERFAAMMKDYEAEQTSLKEAISEYTSLQESRSEAVENIEKHIQLVEQYTDLKELNARILNRLMSKILVHQRGVDEDGCPMQVIEIFYRFIGKTEIDLYDLLCPAA

SEQ ID NO: 4277 - protein, 557 aa, unidentified
  source 1..557: note = uncultivated organism
MARTKNRGVEEIISIPYIVRWKLGEYIRLSKEDLNRGKDDSNSVVNQKQLLDDYYKQHMDEFESVEEPYVDDGYTGTDTNREGFQKLLADIYAKKINCVIVKDLSRLSRNYTDAGSLIENLFVQMNVRFISLAEGIDSFQNPDSISNLIVPITNVMNDNFCYQTSKKIRQVFDYKRRNGEFIGGFAAYGYVKDPKDKHALLIDEDAAEVVRDIYTLFIDGMSKNAIVHNLNGRGILCPSEYKKSKGLNYQNPNAENKPLWSSKTVSDILKNRLYVGDMVQGRQRVKSYKIHTQEQVPENEWYVVENTHAPIIEREIFEKVQELLKRDTRTAPQQKKLYLFSGFLRCADCGKAMTRSKVKDTVYYFCRTYKDQSKTACTKHSIKHNRLEAAVLYAVQQQVYIAVHYSNTIANINTAPQQKSQSIRLDALIEAKEKEHTKIMRYKQAIYQDWKDGEITHSDYRHMSEDYERQISTVNTVLDNLNTERAELENGVDTENPFLVAFKKFENIDKLTREVLIELVGHIKVHENGNISVKFKFADELRRIMEYIEINTHSEAV

SEQ ID NO: 4278 - protein, 540 aa, unidentified
  source 1..540: note = uncultivated organism
MEPKRNKNYIAGIYLRLSRDDERAGESLSIENQKILVTKYVKEKGWEIKDVYVDDGYSGTNFDRPGVKRLLDDAKAGEINTIVVKDLSRFGRNYILVGQYIDYVFPSFGIRFIAIEDRIDTASKDTSAMDMMPIMNVFNEWHSANTSKKIRAVKYSCAQAGKYLASKAPYGYVRKDDKNHTPIIDEEAAQVVRRIFERRAKGESAYRIALDLQADGISSPAVYAERKFGKKVTGDGHNYWSPAAVRGILSQQLFVGDLVQQRVKHISYKNKKVVKVPKEEQVVIPNNHEPIISRELWNKVKELEATASTGKITKERVTPALSGIMRCSTCGATMEYHRTTGGRHKKPIVTYECGLRNRYGADKCTKHYINGDVIHKIILDDIRAKAKIVTEDEEGIRKRFIRRNAMLAEQSGKETAKAIKMKRARIAALDDLMSKAYEDKLLGKMPEELCMKFIDRYLAEQENLRKEVSGLEAELRNAKDMRENIDEFMSRIKKYLDVTVITREMMLELFDKIIIGEKEPPNGAPRLIQLVYKVDIDSVL

SEQ ID NO: 4279 - protein, 586 aa, unidentified
  source 1..586: note = uncultivated organism
MKTNDIKQFVIYSRKSKFTGKGESIENQIEMCRQYIATHYSQEEADAALVYEDEGFSGGTLERPKFKKMMSDSQKIKFSAIVVYRLDRISRNIGDFAKLIEDLGNREIDFISIREQFDTSSPMGRAMMYIASVFSQLERETIAERIRDNMHELSKTGRWLGGTTPTGYESESISNVTVDGKIRKACKLKIIPEEISIVKLIYDKFIETGSLTKTDQFLMQGHYKTKRGKTFTRFAIKGILSNPVYMIADEDAYNYLIENDVELFADKESFDNKHGIMAYNRTLQRPGKATQIKPMNEWIVSVGKHNGVIPGSTWVRVQQMLEINKSKSYRKPRSNTALLSGILYCGKCGDYMRPKMSDRLTATGEPIYTYLCTTKERSRGHVCNMKNANGNMLDAKIIATIKGFGKKSSDMAKRITQTKKRINGNREGYDAEVAKVKAQIEENEKSIKALVLSIGKAEGTHAEKYIMQQIDELHENGEVLKKRLSELEAIMQQHDLAEIEFDIIRQLLATMGDNIVEYSVEQKRAAIRTFIRKVVWDGENAHVYLFHNDGDYEFPEPPDGGSDPDNDNNTTSDSPEYDEPSGEDSE

SEQ ID NO: 4280 - protein, 604 aa, unidentified
  source 1..604: note = uncultivated organism
MGNAQASTSSMRRVAIYGRVSTEHEAQLSAFENQQAWYEGIAHQHQDWTIVERYYDEGITGTAAKKRPAFMQMLADAKQRKFDLIVTREVCRFARNTVDTLTITRELSTLGIEVYFIQDNIWTMDGDGELRLTIMATLAQEESRKISERVRAGQKISREKGVLYGTGNILGYERVGDTYTINPEQAYTVQKIFQLYANGWGYKRICGELVRLGCKNAHGDVKWDVDRVGRILRNATYKGYICYNKSHSDGFLTQKRINHRDEEFICIKGNFEPIVSETLWNQCEQLRLKKSAKQRGPDGRLRKFGRKEPQSVWCTKLRCSCGSSFRRFLWHKNADGSKTYGYECYRQKRQVSKNFLKAHGLDPAQVCHTKSIPFWHIDFMALRVFQTVWKDQKEAILMACKMLEECSVQEQQQSSALLESLQNQLDRLHTKLEGLRGMCAMGDITREEFLHDKQSIQSEIEHLHARIEDVSTLSLSPVSTLDMSQIKRTLDSWLDFSGPRISEELIEEFILQVVLINDNTFNWTLDLSSHEAGVRHLHPSEIALLQYRERQSSSMDTILDRRITDPQPLLTMTITKEDARAYCRSIGMKFFEKKWQDKTVIISI

SEQ ID NO: 4281 - protein, 547 aa, unidentified
  source 1..547: note = uncultivated organism
MPENTAKVWNTCGYVRLSREDGDKEESNSVRGQKELIRDYLRRAPDLRECGMKVDDGYTGSNFERPAFQEMIADIKAGKVNCIVVKDLSRFGRDHLEAGEYIEKIFPFLGVRFIAINDHYDSLHRNPESDELIVPFKNLMNEAYCRDISIKTRSHLEIKRRHGDFIGAFAAYGYKKDPEDHNRLLIDDEAAGVVRDIFRWKLDGISAQDIADRLNSAGIPTPMDYKTSQGMRYKTKFRKKTDSGWCAKTVLRILKNPVYIGTLEQGRVTTPTYRVKRQVNRPRSEWAVVENNHEAIIDPMDFQVMQQVLALDTRTSVGGASVEFFSGLLFCGECGASMVRKTVSSGNKKYIYYVCSAHKQDKTCCSSHRFRDVALNEIVLDSLKQHIRGVIDLSELLEMTDTALLRQANMQRLQKRLDRKRQEIERAQTLLQSLYENLADGIIDREDYKDLKAKYTRRRKDAEEQAESIREEISQELAGSSENRAWMDQFRKHKNITELDRSVIVTLIERIMLYREHRVEIVFRWQNEFQWLFDLLARQAHSEREVG

SEQ ID NO: 4282 - protein, 562 aa, unidentified
  source 1..562: note = uncultivated organism
MQKVRCAIYTRKSTDEGLEKEFNSLEAQYEAGLNYIKSQVYKGWEVIPERYDDGGYSGGNINRPALQKLLDDVRKDKIDMIVVYKIDRLTRSLTDFSKLVDVFDAHQCSFVSVTQNFNTYDSMGRLTLNMLLSFAQFEREVDAERIRDKVAASRKKGMWMGGRVPFGYNAVNKKLLINPEEAEIVKLIYNKYCCCRSVREVGNYLRENNYKTADRLKNDGTTEYGQELKQCKLNHILSNPIYIGKVVHKGTVYDGQHEAIISQSLWDKVQEIKKNNSEDGFNFKKVMHHSLLRGLVECGCCHSGMILTYTSKKTKKYNYYTSSKANKEGHHHCEVGSIGAGELDALVLKQLHNIFRSPRLLDEISKQVAVEDENIGLTEITEKLKETDNIFDYLSVETARAVIERLVSKIVIYKDKMVIRLLPLGTTLLEATKAKQLVPSTEYPELMELHYSMDFRRRNGHITVTLPEEEPIEANDTLVSALVKAFAWKKEIDNAVSVHQLAKRENISRQYLSKILKMVYLAPDIVEAILVGTQPSNLKLTDFFKSPIPVSWAEQRRKYGFS

SEQ ID NO: 4283 - protein, 537 aa, unidentified
  source 1..537: note = uncultivated organism
MQKNVCYHTAIYLRLSREDGDMNCGAKRESDSISSQRALACSFVREQPDMELFDLYIDDGYSGANFDRPDFKRMIEDIKNGKVNCVVVKDLSRFGRDYIEAGRFIQKTFPAFSVRFIAITDHYDSLTADKNTTSFVIPVKNFVNDFYCQDISEKVKSHQKIKREQGKFIGAFAVYGYQKDREDKNKLVIDTYAAEIVKKIFAWKLDGMSNLAIANKLNENGIFSPLEYKKSHGEHYATGFQAGIVSKWSAVAIKRILTNEIYTGTMVQGKREKVNYKVKKILEKPESEWCKVEGTHEAIVSKVDYQKVQRLLEVDTRAEKGKEKAHMFSGILFCGDCKEPMVRRMNRYKGTEKISYICSTRNRSEGCSRHRILEADLKRVILQIIRLQAALLIDENRQMQYLRTREMHLEDVVGFEQEMIRLRGEQENYQKLRAGLYEDWKAGVITQADFQKFSAIYEKQYLETGWAVAKQEELVKKLFYKGVHSNVRLERLKETMQITTLDREALLAFVERIEVYEEKRIVIQFGYQEEIRRMAGS

SEQ ID NO: 4284 - protein, 562 aa, unidentified
  source 1..562: note = uncultivated organism
MTTAKPPLRRCAIYTRKSSEEGLEQAFNSLHAQREACEAFIRSQQGEGWRVVETAYDDGGLSGGTMERPALRRLLADIGERRIDTVVVYKVDRLTRSLMDFSKIVELFDRHDVSFVAVTQQFNTTTSMGRLTLNILLSFAQFEREVTGERIRDKIAASKRKGMWMGGVTPLGYEVKHRKLIIDPAEAETVRLIYRRYRELGSVRELRDELDTKGIRSKVRIYQDGSKAGGCRFGRGALYALLSNPIYIGEISHKGVRYPGQHQAIMDRETWDAVQQRLEDHHNGGPGPVRKVAASPLMGKLFDEAGGRISPSHALKDGRRYRYYVSRSLVTGPAKDTDMGWRLPAPQIEAIVAVEAAKMLGDRGAIAAALEQAGLAPGRIPAALASAADYCRRLRSEIERSESLALLIHRVELRPDRIGITLTLSPLISKVEGPLVSTDELTIGREIPLRIKRRGVEMRLVIEGERAATTKADPTLLKEIKRAHRCFDALLSGRASIAELAEREGVDDRYVSTVLPLAFLAPDIVEAIVAGTQPEDLNATKLVRRVELALDWIDQKRQLGFA

SEQ ID NO: 4285 - protein, 527 aa, unidentified
  source 1..527: note = uncultivated organism
MPVKVIKATKQIFEPEEEKKLRVAAYCRVSTDSTEQESSYEVQCTHYKKYIENHPGWELAGIFADEGITGTDTKKRDQFNKMIELCEAHQIDQIITKSISRFSRNTLDCLNFVRKLKALSIPVIFEKEAINTMESSGEILITILASIAQQESASISANIRMGIEYGFQEGRGRLNTTRFLGLKKGAEPGSYLIVPEEADVIRRIFRQYLDGYSPKMIAEQLEAENVPTATGAGKWYSSTVKNILMNEKMCGDFLMQKYFVEDYLTHKCVKNEGQRPQYFVEDNHDPIVPREIYYQVQGEMRRRGNLANDPSKLRFGNRLALNGRLICGKCGRTLKRYVKPDETKTDWRCRDRARVKLSNDKEQPGAKCICRNVNELEVQDAIVCAFNELPSKRDEIREQLLSGELRQLDKQLTLAETQEEKNALQAKRAEAANQDFKVRTLLQLIEEMNCPHRIHADESQDGACRNYNDFLRMTRYEIGPDLMNGAGRILRFDDDLVVRYLDSVIVHLDSYEIRFKGGVSITVEARQ

SEQ ID NO: 4286 - protein, 541 aa, unidentified
  source 1..541: note = uncultivated organism
MTAPLNRRRCAIYTRKSTEEGLDQQFNTLDAQRESCEAYILSQAGEGWECIPEPYDDGGWSGGNMDRPALKRLLGDIGRGRIDVVVVYKVDRLTRSLMDFARIVERFDGNDVSFVSVTQAFNTTSSMGRLTLNVLLSFAQFEREVTGERIRDKIAASKARGIWMGGNIPLGYDLGDRILLENPDEADIVRYIFQRYLELGSIPKLAKVLAAEGVHSKRWTSRRGITHGGVPLRCGAIAHILNNRIYLGEIVHKGEAHAGEHDAIIDLKLFDAVQAKLAINRQQRVARNKTRAAASPLTGKLFDQDGQPMRPSFGYGRGKKLYRYYVSETLLPNGQIGNTDNMRGDRVSAERIERLIADRLSPLFSSGRVSENIFAAIRRAVIVRDRINVTADASALITDGICTTILLGRVQHHVDRAAEFDGTNLTMSIDARPARRGKTVYSKVHPLDEAEQRDVLANLVRTANRKLIELNASPLHPDHHAKMQVPANDWTRSRVVIGLLAPDIQKALLNGTAPAEFDPDRLFSTDIPVNWDEQRKLFQKA

SEQ ID NO: 4287 - protein, 555 aa, unidentified
  source 1..555: note = uncultivated organism
MKKNEDVIAIYSRKSKFTGKGESIGNQVELCRNYIRQYYGDKAAETALVFEDEGFSGGNLNRPDFKRMMAQAQEKKFRAIIVYRLDRISRNISDFAGLIEQLAKLDIDFISIREQFDTATPMGRAMMYIASVFSQLERETIAERIRDNMLELAKTGRWLGGTTPTGFCSESITTVTVDGKTRKACKLKVIPEEAELIKQIFELFARTNSLTMTEAELMKRHTVSKNGKNFTRYTVKSILQNPVYATADEDSYRYFAEKDSDLFSDRSEFDGEHGIMAYNRTDQEKGRAAIFKPVSEWIVAVGKHPGLISGKEWVKVQDALEENRTKSFRRPKTNGALLTGLIYCRCGSRMYPKLSNRKTPDGVPVFSYVCNVKERSKRSLCSSRNANGTVLDAAVAEQIKKLSEDNAEFISQLENSRKLYTANHARCDEQLVSLKKEKLELQKKIDSLVDSLIELSDSKAKSHIANRIEALNQESDAIDIRIKELDALTSQQLLTGTEFDMFRHQLSSFQDSFDELPILQKRTAIRSLVRKAVWDGNNAHVILFGALWPQCEDSK

SEQ ID NO: 4288 - protein, 552 aa, unidentified
  source 1..552: note = uncultivated organism
MKKIAGEAVYTADIYLRLSDDDGDKMESNSIKNQREFITEFLKSMPEIRIHAERKDDGFSGVDFFRPGIQEVLQDVRSAAVNCVVVKDLSRLGRNYIETGKVLQEFADHGVRFIAINDGYDTANLQGQASTILLPIKNLMNDSYSRDISVKIRSHLEVKKRKGEFVGAFAAYGYLKSSDNKNKLIIDEYAAAVVQDIFRWKLDGMSQQGIADQLNTDGVLCPAEYKRSLGMKYVSGFKRNPQSKWSAVAVGRILKNPLYIGVMVQGKTGRPNYKIKKLLDKPPEEWISVTDTHEPIISEMDFKTVNGLLQADTRIATQQKTVYPFAGLLFCADCKQNMVRKTVPANGKKYFYYTCSTNRADRRMCSTHSISEALLMDTVRDSIHAYLETVLSIEKTLQFIAALPAENVEAQKIDRQLDKLKADYEQTMRFKMSAYENFVDHLLSEAEFKQYQRVYTEKCEAIAAAITRRQQELDAINNAGTAQNEWIAHFKSFRNVDVMERKSLVKIIERIYVHEGNRIEVIFKHQNEYRAAVLYIEQHMKNRDVPGKKEAV

SEQ ID NO: 4289 - protein, 557 aa, unidentified
  source 1..557: note = uncultivated organism
MRSEEGKRLEEGIIVNKGVEAQVRQAALYVRVSSLGQVKDGYSLQFQEQILREFCQREGLTIAGVYREGGQSGSSTKRKELIRLIEDARQSRFDTVLIFRVDRFSRDPVDLLALVRELEAKRIKLRSVTEAVDASDPAGELMLTILGAIGKFVRQNIIQNAMLGKTKRAETGKYTGGKVPFGYAVDEAGMLTPDSRTWWNGRTAAEVARLVFETYLKLGSQGGGCLQVARQLDQMGVPAPKAVWGHATVHQMLSNPCYAGDIAYNKRSHQLNKRSKTNAEDEWVVVRDSHEPIVDRKTWDAVQETLKRNQKGGGRPVDDAFKDLVTGFIRCGECGGALSPRRPSKNQHYLYYTCCSRVSEKRRREGTACTTFPWIRGDELEALIWGALIDLAGDENRIREMQARMATQAGPDLDDAKDELRRLEKRVKSLEEQAMTITTAYAEGKMPEYLWQKQVERLEAERQSTATRLDEARTKVTELQEAMPVAADPKDIQAYLKQQLQNCTTLEERREALAILVGHRGIRVMKDGMIDFDIKIPLHISEAAATAEISVLPRPAL

SEQ ID NO: 4290 - protein, 619 aa, unidentified
  source 1..619: note = uncultivated organism
MVEPLIYTGTLAFRQGFVGLERIIDDNEVCSPASENTKPVMRCAIYTRKSSEEGLEQSFNSLDAQREAGEAFILSQRHEGWRTLPARYDDGGYSGGTLERPGLKQLLEDVQANKVNVVVVYKVDRLTRSLSDFAKIVEALDAKGVSFVSVTQQFNTTTSMGRLTLNILLSFAQFEREVTGERIRDKIAASKKKGMWMGGRVPLGYDLEGRKLVPSSKESEVVCKIFSAYLKVGCVSKLAVHLDREKIRSKVWVTRTGARRGGVAFARGALYDLLRNRLYIGQIRHRDKCYPGEHKGIVPRELWDRVQAQLDINLRTRRKRAREQSSSLLTGLMEDGDGNRFTPSFTIKRGRRYRYYVSQSVIQNPGAERSGPTRLPAHEIESRVTERLQAFLRSDAQVFDELSATAESPSVLHQLVAGAKKLAARLPSLPADDLRDLLACILHRVVIQENNIQVMIRKSDLRELLEHGDQVIAASLVGLRKPTEPAELLCLTIEAKRKRYGGEIHIVVPPNSNAPVRHPRPSLIKAVARGHAWYEKVLEGKVADMTALARETGLTPRYVQNIFACAFLAPDIVEAILEGHQPLTLKLEHLLKNVPFSWAEQREQFGFPQNPRPAKSLLQ

SEQ ID NO: 4291 - protein, 545 aa, unidentified
  source 1..545: note = uncultivated organism
MNNSKTYQAAVYLRLSREDGDVADGAKAVSNSIANQKELVMDYLKSHPEITVVSTYTDDGYSGVNFERPHFQKMLSDIREGKIDCVIVKDLSRFGRNYIESGRYIEKIFPMLGIRFIAITDNYDSLNEDMGSDMIIPFKNLINDAYCRDISIKIRSHMDIKRRNGEYIGAFAAYGYMKDEENKNHLVIDDYAADVVRDIFSMKMCGMSQQTIADKLNADGILSPIQYKKSMGVGLNSSFAKSVKPKWSYNAVLRILKNEVYTGTVVQGKCTTPNYKIKKRIHKDEEDWIRVEHMHDPIISKGQFELVQRLLLRDTRVAPDGSEVFPLSGMVYCADCGEPMVRKTVPAGGKKYVYYVCAGNKRDKNCCSSHSISEKKLMDGVLGLVKIFVNKVVGVSEAISVVEDSPKRKPEVQKQDARIEALNGEIEACNRRRKNLYEDYKDGILSKDEYITIRDQYEGELNELQCTVERITEDRDKGIDALSGKQEWIDEVLKYKGVKEPERNMLTFLIDRIEVEDPETIRVKWTFDKALEKMQGWLDVAKEAG

SEQ ID NO: 4292 - protein, 561 aa, unidentified
  source 1..561: note = uncultivated organism
MLGKDKFGININVKKRCAIYKRVSTQEQALMGYSLEEQERLLREACATLGYEVYDVYSDSGISGKNITGRPEMQRMLNDAKEGKIDVIFCWKINRIARNLLDLLKVVNYLEKYDVGIKSYSEPFQTETKEGKLLFHMMAAVGEFERGTISENVKMGMLARAREGKWNGGIVLGYDIVKTGLEIKGQTSRLEVNPKEAEIIKMIFEMYSKGKGYKAIANALNKKACKTKRGNDFAVATIREILRNPVYIGKIRYNVRQDWNEKRRRNINPDPIIVDGEHEAIIDDITWEKVQFNLSQSEGKPTRIYDGEYPLTGILRCPQCGAGMVIGRTSKLRKDGTRKRTAYYVCGASKNKGSSVCRANGIRADKVNEHVFEKLSEFMSNERIIKTVVGNVNQDIREKVTPAKKKMSKLEKHLTALALKKQKAIEVYEEGIINKEELSIRIEKFREDEEQLQNQLYSYKVDLQDGEGEAIPYEVVKEVMGDFKQLLEVAETQEQRKKLLHMMIDKVTINQNKELDSIQIKINDDVINYIAHSEEVSNKGTSSFHVHQNLWGREIRLKIMI

SEQ ID NO: 4293 - protein, 520 aa, unidentified
  source 1..520: note = uncultivated organism
MSKGKNSTPTTRCAIYTRKSTDEGLEQEFNSLDAQRESAEAYIASQRHEGWVCLPDHYDDGGFSGGNMDRPALKRLLADIEAGKVDCIVVYKVDRLSRSLIDFSKIVEVFERHRVAFVSVTQQFNTSTSMGRLMLNVLLSFAQFEREIISERTRDKIAATRRKGKWTGGMPILGYDVDARGGRLIVNEDEARQVREIFALYLDRESLLKTAMELEERGWTTKRWVTKKGHERGGKPWARNTLRSLLKQCLYLGKITYKDEIYEGEHEAIVDEEIFERVQRMLKRNGRSGGTLVRNRHGALLKGLMHCASCKCGMVHSHTMKNGTKLYRYYVCRNAQNRGWHLCPTPSVPAGEMERFVIDQIKGLGRDTELLVETLNECRRQREEAIAALETEERSLKRELNRSITDLRSLASTARQNGTATDRLADLQDRIHSTEQRATQVQEKIIKLTNELVDADEVDDACTRFEPVWETLTAREQARILHLLIERINYDGKNGTVTITFHPTGIKTLTDGANREEVVV

SEQ ID NO: 4294 - protein, 501 aa, unidentified
  source 1..501: note = uncultivated organism
MVAVYARQSIDKKESISIETQIEFCRQRIEDGRNIKVYSDKGYSGGNTNRPQFQQMMQDIECGLIDKVVVYKLDRISRSLLDFTDIYANFQEHGVEFCSVQEQFDVCTPMGRAMLSITMVFAQLERSTIQQRVSDNYYERGKKKLFLSGKAPYGFEKTKESSSGVTILTPVKDTSEVLIRVFKEYGEEKKSLTAIAKALNEEGIPSPNGGLWNAGKVERILRVPVAVQADGSIYEYYLERGCTFTDDPKAFKAQCGLYIYGKLESPLPNDKNLSGKVITIAPHQGLVSSELFLRCQRRLDGNKPFGTGSDCAQKTWLKGLVKCGYCGFGAVQRPRADGVRLFYCVGKTNYHKCTQYGSLGKLTEVETEVEKRILACAEKYASMSATYGKTARQGDGRAIKELSELDESIKKLEARKKQASECAIKHLEEYIQKLGTKREALVAKRNSIDAKSKAQAAKGIGNLREEWSTLPIKAKNIIAGALIERVILRRGEIEIVWRYSF

SEQ ID NO: 4295 - protein, 543 aa, unidentified
  source 1..543: note = uncultivated organism
MAPALRNGRAVAAVALAPVRCAIYTRKSTDEGLDRDFNSLDNQREAAENYIRSQRHEGWEVLPERYDDGGFSGGTLERPALKRLLADIEAEKVQRIIVYKIDRLSRSLLDFARLAEFFEEHGASIVSVTQQLDTATSMGRLTLNMLLSFAQFEREMVSDRTRDKMHAARRRGKWTGGMVPLGYDVAPEGGKLLVHKAEAEQVRVIFTLFIDKQSLVGTSQELNRRGMHRKSWTTKKGIAREGAEWDRVTLRRVLTDPIYTGKMKLGGEVFPGEHDAIIPKGIFDKVQALLEGNGRDGNSGVRNRSGAILRGLLRCGACDSAMTPSYTKKDGRLYRYYTCSKAMKRGHDTCPTKSVPAAEVEQFVVDRIRAIGKDPDLCHETFRQALSQVAAQRRELKAEARRIAGEIGKAREEVGRLVGAVSATSTGAREALLVALEKAQQRLTTLENRTQEIRGQEESLKDCQVDEEEVVRTLAAFDPIWEVLHTPEKERILRLLIENVTYDGTTEELVITFQPTGIVTLATEIGAEGGIRTDASGDEAGTR

SEQ ID NO: 4296 - protein, 561 aa, unidentified
  source 1..561: note = uncultivated organism
MINRKIYHAAIYVRLSKEDGDVANAAKAESNSISNQKNLIRDFLKDKEDIVVVSERVDDGYSGSNFERPAFQMMLEDIKKGIVDCVIVKDLSRFGREYIDSGRYIERLFPALGVRFIAINDNYDSLEGKDQSDEIIIPFKNLINDAYCRDISIKIRSHLEVKRKNGEYIGSFAPFGYRKSGEDYHKIVIDPYAANIVKDIFKMKLHGMSQDGIARRLNEMGILPPAEYKASTGSNYQTGFRATEKSEWTSVMVRRILTNEVYIGNLVQGRRTTPNHKVKKTVLKEECDWIRIEKNHEPVVGDREFETVQRLLSMDTRTAPEHDGVYPLSGLAVCGDCGMPMVRKTSTVSGKTYAYYVCSTHKAVKECSPHRIPAGKLEETVLFLLKQHISNVLELKKILSFIETVPFQQLDIRKLEERREKKEMEAERCAQLRTTLYEDMKDGMISKEDYRELHAAYESRRKNAQIAVRQIDMEIEKVLERKSGGFAWLDYFTEHRNIEKLDRFVAVSLIREVRVIDKKNIEVRFDFSDCYQEILDGLVSAGHDVSVDENGKLDIRVKEAV

SEQ ID NO: 4297 - protein, 531 aa, unidentified
  source 1..531: note = uncultivated organism
MEKMLKIDGNLAVQQGERRIITIAANEKPEAAILRVAAYARVSTNSEEQRNSYAAQNRYYTDLIATHEGWKLVDLYADEGISGTSAEKREEFQRMMTDCRRGLIDRILVKSVSRFARNTKDCLEAIRELKSIGVSVYFEEQRIDTATMSSEMITAVMASLAQKESESIGGNMRWSYRKRMEHGEFNTCMAPYGFRMVNSELVIEENEASVVREIYRLYLSGYNLKEIVRELIQTGAPTGAYVKAWNQSTVFYILNNERYAGNAVLAKHITTETFPRKRVANKGERPKYLIEKSNPAIVSTETFERVKQLSHRRRSCQDNTLRAHPLNKKIVCAKCGSPFKRQKPRDTEYWICYNKYKGNGCSMPSVSTESIGAAFCRLYYKLKHRGEPILAKTISSYLEIKSRRMLWSLDVIEINKRIADLTNQNQLLAVLKQQGLVDSDLFISRSNSIAEQLRMAKHEKSRIIEAEGDDTVRQTQEMIDVLAEGPDFIDQFDEDLFNDLIKRIIVEDGDHILFEMKNGMKLKETIERMKR

SEQ ID NO: 4298 - protein, 679 aa, unidentified
  source 1..679: note = uncultivated organism
MAVAVYLRVSTEEQRERQSIATQREFGERYCQLHSLAVSRVFADDGVSGTIPLDQRPDGSQILRDARLGKFDQLLVYKLDRLGRETRLILNAVAELEKLGVRIRSMTEEFDTGTSTGRLMLTLLSGFAAHEHSVIRERCVAGTLRVAEAGAWLGGIVPYGYRKVGEKRDAHLVISGEPIPGLAMSEAEVIGEVFRMASAEHASCPIIAELLNTLHIPCAYVRDGRLALRGKRKERTSGVWRPGRIRWLITNKTYMGVHEYGKRTTSGRPVITRAVPAIVTEAIWKKAQKTLQDNFLFGKRSARNQYLLRGLIKCGLCGRTYVGTAANRPNGKREFYYKCNGAHSPSVYGAGERCRAKAVRGDYLETQVWSDVEMFLRNPQPVLEQLHARLESDAQGSDQIRKQVTRLEGLLAQKATERSRVVGLYRRGRLTDADLDAQMEEVGKEEAALEAQLAELRGRIVGADSVGATVTSAEALLAKLRKRLDEPVSWEMKRRLVEVLVAGVRVDTVEECGVRQSKIAVTYRFSEPDLPLPIVLTQSYGGGVIRIPTQPQTVGDHIRLRRLGLKMLQRDVAAQIGVDTTSIVNWEANAVVPEVRFMPAIIRFLGYSPLPEANTLAQQLVRHRTTLGMSQKEAALMFGVDTGTLARWERGEREPAGKLYARVLCALKQEKALRLARAR

SEQ ID NO: 4299 - protein, 547 aa, unidentified
  source 1..547: note = uncultivated organism
MSELNTLQVWNTCGYVRLSREDGDKEESNSVTGQKDLLRDYMSRHPELRECGMKVDDGYTGSNFDRPAFQEMMAEVKAGKINCIVVKDLSRFGRDHLDAGEYIERIFPFLGVRFIAVNDHYDSLHSNAESDELIVPFKNLVNEAYCRDTSVKIRSQLEIKRQRGDFIGSFAVFGYRKDPADHHRLLVDDYAADVVRDIFKWKLEGVSAGDIAVRLTRDGIPTPMDYKRSLGLLYSTSFRVKERSDWSAGMVLRILKNPVYIGVLEQGRVTTPNYRVKRLVNKPREEWAVVENNHEPIIERYDFECIQKVLALDTRTSAVGKAVELFSGMVYCGECGGAMIRKTVPSGRKKYTYYVCAAHKNEKTCYPHSFRVDALDDIVLEALKKHIRDVIDLADLLELTDTARLQQANVRKLRGRLEKKQGEIDRCQSLLRTLYESLADGIIDRKEYQDLKTTYTRRRDEAESQAEAIREEMERELDVGGRDWMEQFRRHQDIEALDRTIVVSLIERVLIFREHRVEIVYRWHNEFQWQMELLLQAQVAFPEKEAV

SEQ ID NO: 4300 - protein, 563 aa, unidentified
  source 1..563: note = uncultivated organism
MTKLTLRCAIYTRKSSEEGLEQGFNSLDAQREACEAFVLSQQHEGWKLIPTFYDDGGYSGGNMDRPALKQLLCDIDQKKINVVVVYKVDRLTRSLADFAKIVEQFDAKGISFVSVTQQFNTTSSMGRLTLNVLLSFAQFEREVTGERIRDKIAASKAKGMWMGGTPPTGYIPKERTLEIEPQGAALIKLIYERYLVIGDVRRLKLNLDRQGIRSPVSTSSTGRHYGGTLLGRGQLYRLLSNPIYLGKIVHKDQIFPGQHLAIISQELWDQVQAKLSSNLQGHKLRQSTPSDSLLTRLVFDDAGHRLVPSHSQKHSKRYRYYLSKPLVTQSRSDAPKGLRIPADDLEKVVIEELGQWLRDTNALIDTLSINAQHMQSFAEHTLGIADQLQVANGQRYALVHQLVNKVIVSTNEIELEINPNRLRQSCETLDDQLNSQTHQPIRITTPIQINRCGFAMRLIIDGNQTVGQALDQRLIASIRKAQDWLGQLTSGKTLSLGEIANAEGVTTTHVTNIINRAFLAPDIVRLILNGTQPATLTSDSLKRMLPLPLDWEEQRNVLGIKPI

SEQ ID NO: 4301 - protein, 674 aa, unidentified
  source 1..674: note = uncultivated organism
MPQVQVIQPIQQQPKRLRVAAYARVSSDSTDQLNSLSVQVDYYTHLIQENPNWDFAGIYADEGITGTSTKHREQFNRLLDDCRAGLIDRVLVKSASRFARNTADALASVREMKSLGVTVVFEKEGFDTETANGEMILSMICATAQEESLSISQNTKWGIRKKMHDGTYITSLTPFGYKKINRQLFPDEKEAATVKEIFNLFLNGFSTAEIANHLNTNHPKPDVIWRSASVRFILRNEKYIGDSLFQKNYTPDTLPLKSCCNTGQLPKYYVEGTHPGIISKDEFERVQSLLTQKNINSTNSRACILSKVVFCALCGHVCSRKVRKSQTFVWCCRTHLQSAALCPLKPVSETEIQQAFLSVYNKLQANQSYILQPIIDTLLQLRFLQEQANSARQTARDDVQRLAKQRHNLTRIHTLGSKKNTGQLPQYYIENNHEGIVTKQTFREAQAEIARRNSKSATNHRKRHRGRYNSKYALSERLVCGDCGSSYKRVTWSIHGRKQIVWRCVNRLEYGTKFCSNSPSIPETELHQAILKAVQNLAAKFTGEVADQLNGILHQIEVGESLTPQLQAQLEQNQQEFDHLLEMSLDFDENTPFLDDKLKRLSDKIKQLKTAITQSSVNSQTPSTPTNPITAKDLLITEYDDMLTARIIEKIIVKSRQDLEIIFIGGYTQQISLQ

SEQ ID NO: 4302 - protein, 539 aa, unidentified
  source 1..539: note = uncultivated organism
MRFAIYSRKSRFTGKGESIDNQIDDCRRFILSNFPDTKEEEIFVYEDEGYSGKNTNRPQFQQMMTVEEKEPFDFIVVYRLDRISRNMSDFAVLMDKLAKKGTSFYSTNERFDTSTVSGQMMMTISAAFAQFERQIIAERVRDNVYKLAKTGRWLGGTPPLGFTSQNETYIDDSGVERKCHKLIENEEELALVRLIYAKYLELRSLSKLETFMINSGYKTRKNADFRVSTLRYIITNPTYCTADSKSYEFFRDSDCDIADVGESCNGEHGFLGYKKSQTKLDDSRTPTELSEWTIALGRHKGIISSADWIEAQEIITDHSRRHKRVRQPHNQTALLSGILRCRCGSYMRPRTFKANKQGEKPYSYMCELKERSKGEKCSCPNVSGRSADRMVCDALLNYQDDDSVFARYVDIVSSMGKKNEDIDSLVSSHKSMIAKKKKAISGLLRMAGEDDSISADYVHEELTTLHSEIEQEENEIKRLERLRVSGRTLEAAAKNTESLLKTFKDNFDTLSTDNKRNFIRKCVSRIEWDGENIGVFLLG

SEQ ID NO: 4303 - protein, 561 aa, unidentified
  source 1..561: note = uncultivated organism
MARKSRAMTQNVVKAKHRVWRIGIYIRLSKEDARCLDESESVTNQRAIIEDHIAGFNDGDEYIIVDEYVDDGISGTTDDERDDFQRMLADIKRGRVNCVIVKDLARSFRNYSDQGYYLDDWFPRYNVRFISLFHQPLDSYKEPQNMRSIAVPIQGVLNENHCAETSDKVREVFDMKRRNGEHIGSFAAYGYLKDPTNKNALVVDEEAAGVVRDIFQMFLDGMSKNAIVHYLNDHGVLCPAAYKRERLGLKYQNPSLAPGKRPLWCAMTVGKILQNRMYCGDMVQGRYRMKSYKIHVQEIVPQDEWYIVENTHEAIIDRETFEKVQRLLMRDTRTAPQQKKLYLFSGFLKCADCGKSMTRSKVGNTVYYYCRTYKDQSKSACTKHTIKHTQLEAAVLCAIQQQVYLAVDFSKTIEQLGKAPLVKSQSKKLHDAIEQKEREFAKIVRYKQAIYQDWKDGEITHQDYRHMKEEYEQQAETLNQVLERLREEQKELEKGIDMENPFLAAFRQYQNIEKLTRDILIELVDHIKVYEGGSISIAFRFADELRRIREFIELNTHNEAV

SEQ ID NO: 4304 - protein, 541 aa, unidentified
  source 1..541: note = uncultivated organism
MQETKIWNTTLYLRLSRDDGDKEESNSITGQRDLLRDFLTKHPELREYAVRVDDGWSGSTFERPNFQKMIEDVKAGRTNCIVVKDLSRFGRNYLDAGEYIEKIFPFLGVRFIAVNDNYDSLGDKKASDDLIIPFKNLINEAYCRDISVKIRSQLEIKRKSGQYLGSFAVYGYQKDPQDKNKLIVDEYAADFVRDIFAWKLEGVSPQDIADKLNQLGVLSPMEYKRSLGMKYTTTFKTNSQALWSAGTVLRVLKNPVYTGVLVQGKETTPSYKVHKRVAKPESDWSVIQNSHGAIIEKKDFDTVQKVLALDTRRGVDDSAVSLFSGMIFCGECGASMVRKVVPAGGRKYYYYICSAHKQNKSCSPHRMRDTALEEIVFDSLRQHIREVVDMDELLSMTDTAPLRTAEAQKVQRQLDHKREEYEKLQKLLMSLYENLADGIIDRDEYSRLKQNFAARASEAEKQMDALQETLVSIREHGTETDWMEQFKTHKGIASLDRAVVVALIDKILIHADNLVEIVYRWQDEFAWQLDVLRRTQIREAV

SEQ ID NO: 4305 - protein, 501 aa, unidentified
  source 1..501: note = uncultivated organism
MLVEPHYDDGGFSGGNMERPGLKALLKDVEGGFIDVIVVYKVDRLTRSLADFAKIVERLDAKEASFVSVTKAFNTTTSMGRLTLNVLLSFAQFEREVTGERIRDKIAASKKKGLWMGGPVPLGYEVIDRKLIPVPEEAERVRTIMQRYIASRSANELIVQLEAEGIRTKVQKRTSGPHKGGMPFRRGSLFHLLKNPIYRGKIVHKGTAYEGEHEAIVEEELWHAVQERLQEKAPPRRRPGNDPQPALLRGLLTDPAGRPMVPTYATKGSRRYTYYETRKDLARPSDPAATRIGQGQLERHLIVQMTELLEDEHAMRRMSGEEEGGALRGMFSKARSLAMRLAFEQSRVSIIPELIAAMRICDERIDVWLNADALGFRSGDHWNWCIPLPARKPFREAKLRIDAKSDRAPIDNRLIMLLVEAKQARDLVLASPDLSLNQIARREGRCRTRLKKLVRISWLSPRIVEAIVSGKQPEHFGRRLLLEADLPDCWAAQERLFGLST

SEQ ID NO: 4306 - protein, 540 aa, unidentified
  source 1..540: note = uncultivated organism
MKIAIYSRKSKYTGKGESIENQIEMCKDYVFAHIKNITEADIYIYEDEGFSAKNLDRPKFQKMIKDSKVYKFDYIVCYRLDRVSRNVSDFSALIEDLNQRNIAFICIKEQFDTSTPMGRAMMYIASVFAQLERETIAERVRDNMLMLSRTGRWLGGTPPTGFTSEKVENLIIDGKLKSSYKLKFNQDEILIVKEIYKKFIQLKSISAVSKYLISEGLKSRSGKYFSNLGIKDILTNPVYCQADKYAYSYFLEKGSDVCFNENDCSNKYGLISYNKRDYTKKHVPRNDESKWIIAIGKHHGIISGEDWVNVQDIIAQNKPSDKKHSNNHNDYSLLSGMIYCKKCGEKMFAKIRHNSTKKFVYDYICSSKLKGNASLCNIDNLNGQQIDDLVCDYLMDYLNEDSEIFNLLENLKLKISNQKEQDNVSIIDNKIAKYILEIENLISSLAKPNVNSALFQFINNKVAELDNLINSLKKEKEQITNQAATFINDNLQFDIIVRTLAYFKENFKTLDIHSKRELIKLLVEKIEWDGKNLNIFIYGE

SEQ ID NO: 4307 - protein, 520 aa, unidentified
  source 1..520: note = uncultivated organism
MTRLCLYTRISTDEENQPTSLASQHERLEAFCKVQEDWRIIAHHEDRATGTKLDRPGLQAALDLARQGRIDQLLVYRIDRLSRKVRQLVSIADELDTLNVVLRSATEPFDTGSAAGRMMLQMLGVFAEFEHATIVDRVTSGIERRAREGRWPNGRIPFGYARNENKELIPDERTAPVIKRVFTWYAAGRMGAAAIARRLDAEHAPAPPRGWRPAVVLWILANEAYVGKVHWREQTFPGLHEPLIDQDTFDRAQALLKERGGDWTHRAARAEFLLSGLLRCGRCRRAYVGMSAKGNGGTYHYYACSGRQKLGRKGCDGERLSKDKLETAILDQLTSLYRHGGLIRDAIQQAAASNETDRDALAEQRASLAKEISRTERAIERYQDAFEAGNLNPARFNERLSSLDARLDSLRGQDQALARELDADTPTTPDTADLNAVADQLGQVIETGDPDQAKALLRILIAEMRVNSRSEILPTYRVGAPVVCAQTSSVEPTGIEPVTSCLQTGLEDLWESADLEDFYW

SEQ ID NO: 4308 - protein, 529 aa, unidentified
  source 1..529: note = uncultivated organism
MTNGSGRSARRRTDPGQATVDLRSAPPSRMQASTPDIHNGSSQTAMGSRDHGNGQIGRDQSDPDHQPTPPRAARRSASPGRTPSFRINDSQQAPVRRKLRCAAYTRKSSEEGLELEFNSLDAQRESCAAYIASQRAERWIPVADDYDDGGVSGGTLDRPALKRLLADIEAGLIDVVVVYKIDRLSRSLMDFAKLVDVFDRHGVTFVSVTQAFNTTTSMGRLTLNVLLSFAQFEREVIGERIRDKVAASRRKGMWMGGWTPLGYDVKDRKLVVNEQEAELVRAIFRRFARTGSGIDVVRHLAKLGARNKTGRPIDKGALYKLLNNRVYLGEAVHKGVSYPGEHQAIIDQALWDAVHAVMQESPRVRGNRNRVQTPALLKGLVFAADGSAMTPTHTRRRGRLYRYYVSTSVIKAGPEACAIGRLPAAEIENAVIAQVRVLLQSPEIVVATWRQVRKADPAITEREVHEALAGFDTLWAELFPAEQARIIRLLVERIDVHASGADVVLQVEGLTTLLGEIKPADSPDSSRAA

SEQ ID NO: 4309 - protein, 591 aa, unidentified
  source 1..591: note = uncultivated organism
MPRGRRETVRREAGGPTSPVRRRCAVYTRKSSDEGLEQSFNSLHAQRDACEAYVASQKQEGWVALPQLYDDGGLSGGSMDRPALRQLLDDVKAGLVDIVVVYKVDRLTRSLADFAKLTDLFDAHGTSFVSVTQQFNTSTSMGRLTLNVLLSFAQFEREVAGERIRDKIALSKRRGMWVGGLPPLGYDGIDRKLVINVAEAETVRLIFQRYLEIGSIAALKEALDCADVRSKRRCFADGREVGGVLLSRGAIYQILRNHLYRGEIAHRGEIHQGNHEAVIDAETWAALQAMLVAGSGRGRGSGANARSAMDSVDASSGSPLAGLVFDERGHRLSPVTAARRGRRYRYYVSAPLVRGARDTEGLRIPAPDLEALVTSTLRGHLTDPAWVIDGVGTGLDGRRAQRLIEVAATYAASIDDASKRLRSAAQPITRIVVGRQRLTIEVDANVLAVLLAEATTSAPGEPLQLAPRASTLTITVPAHTLRCGKQMRIVVGSVESDCRAPDQRLVALVSDAHRWFDDLRNGRRPTIAAVATAEKRPVADVSRIIALAFLAPDIVEMILTGRQPATLTPERLKPRRPLPLDWAEQRALLIG

SEQ ID NO: 4310 - protein, 535 aa, unidentified
  source 1..535: note = uncultivated organism
MKTAAFYCRVSSERQEKEATIESQIEEVKAKIVEDGNSIKDHHCFADNGWSGTNLKRPALDAMRDAAGRKEFQVLYIWDRDRLSRKFSHQELVLDELADLGVEVIDLHQSVSQNPEDKIMFGFKGLFAEYERAKISERMRRGKMYKAKQGIYFSSTANYGYRYIPKTKDEPGHIEIDPVEARNVEIIFKLIGVEKLSIRRVIVRLAEMGIKPRKSKRGVWTTSTLSQILRDTIYIGQAYYNRTVSLEPENPIKQAEYKQNKKTSRKLKPQEEWIPLSTPAIISPELFEAVQKQLSLNSKYSPRNKKFDYKLAGLLYCHCGCRLSGARSFTQHYYRCISRIKKFPEKDYCKSAGINIQRIEKPVWRAISQLLTQPELIDKQIERWKTSKPSNNQTSDNAQNIKDEIRKLDEKEKRFSESYGDQLITLKTYKSLMADIKAQRLRVNSQMVVRTKAEQNQTQLIDGSHLKEAISRLVGELHETDQRQLLLKLVEKVQIDKDQKFVKISGYIPLYYNLNNNQNVTQCTIHRYCWFTKCR

SEQ ID NO: 4311 - protein, 609 aa, unidentified
  source 1..609: note = uncultivated organism
MGSKKIVRQVAIYARKSKELERSESCSHQISICKQKIENLAKNDSKYEYHIVDPYVDEGKSGKSLDRPAMQRLIRDVKAKKIDILIIYRMDRLSRKLKDIFNLMDILEANKTDLISCTDRDIDTTSAFGRMFFTITMAFAELERDLASDRSKDMALQASYTGKFMGSTPPLGYVLTRESVGGKSVPRLIINEEETKIVKEIFKRYLGGESDESIAEWLNATGVKKPMMKPNGSPRWTKAYIANIIPDFRYVPNTPAAYDYLISEKIPYVLNRFEQMGKKILDISKWQEEGKRLQKGDAIGLLIEKADFDGTKILQRFNGRIATLDAEPILDDATWIEAQRLRKKKATNLDHTIKAVRGDGLELLTGGLGVCAVCGKTLTIRRVSRRMQRAYYHCYFKGGYDKNQTLIAKCPRCFKPIYADTLDQNIINKLKEFFYGKEIIEDIINKDKKTRKSVFDEIQNEIKNLEKKRKKLEKEVDHITGIVMAIDDISEDSRVIKNYIKNQEQLLAQIDGIDREIAELKAIPIQRTNEDYIKEELLESIASFAEIFDRATDQEKKTLVRYLVKKVVVKDENDFEIELRFFEDFPASTYLKNVHKNGDTPQGVQIIRE

SEQ ID NO: 4312 - protein, 553 aa, unidentified
  source 1..553: note = uncultivated organism
MQVALYIRVSTEDQAKEGYSLEVQREYLESFAKRECFEVFKIYCDEGISAYSTRREALQQLIKDSKDKKFDLVLVYKIDRFSRKLKDLLNLVDELSSYGVGFKSATEPFDSTTSAGKLMFQQLGSFAEFERNRISERVFPGMVKGVQQGNWQGARFSPFGYTYNKEKKLLEVEPREADIVKLIYTMYLTGKSTHEIAEYLNKKKYQTRTGKQFYTKFIGDILKNRIYTGKIVWNKKHYDKNQKTKKHYKYIKNDASKIIIAQGKHAPIIDEQDFEAVQKLLAEKKRTWRPRVKNKEYLLTGLLTCTKCNHKYNGVSSISNHRTNKKKRWYRCSGPYANHIRCTNGSVKAEDIEPEVTKIVAQLIQNDRLKQSRWMSGTLPKSANFPNFGKNTKIDASKLKNKLEDNQRKQSKLTDAYLENLLGEDVFRGKIEQLRKEEDELKIILAGYELREIESERSEGYINRVKDFLDGHDEAKSAIDFATKKAMCGLLFKNIKIAPAIGGARPHKRISFSLFPPFNFLFSETERKSQCQQNQRLTKIRRKVSTLRHSVAR

SEQ ID NO: 4313 - protein, 558 aa, unidentified
  source 1..558: note = uncultivated organism
MTSPVRCAIYTRKSTEEGLEQDFNTLHAQRESCEAYVLSQAGEGWSVAPKLYDDGGFSGGNIDRPALQELLSDIDRGLVDVVVVYKIDRLTRALADFAKLVERFDARNVSFVSVTQAFSTTTSMGRLTLNVLLSFAQFERELTAERIRDKFAASRAKGIFMGGNVPLGYDVQDRKLIVNEPDAGLVRHIFERYLELDSIAKLRRELSDKGIKTKVRVSGTGRKMGGHEWSVGSLSHLLRNRVYIGLAVHKGEAHKGQHQAIIPQSLFDEVQTRLEGNRVAHKRKVTIGSRTLLNGLIFDEFGFAMSPKTSRRGAGKSYAYYVSQAALQNAETPGKAVRPAAAPLVEGLVVGVLERLIAALGIEPAPEGEEAEANMTLPKLIRRYVSRVEIANLQTRVSFPMSSLREDSDLDNSAVLEVAEAISKPEAVFKLSGSNLVLTIDQPLPRKGGRKAMEGWDQADWKVPKRRIDSNLVKALARAHVWRDMIEVGEVKTILELADKVGTDRSHLHYTLRLAFLAPDIQKAILSGRQPRSLTFSGLLKAGVPASWAQQRAVLGLA

SEQ ID NO: 4314 - protein, 565 aa, unidentified
  source 1..565: note = uncultivated organism
MKKVRILLRVSSNQQLEADGDLGVQRQLVKEYVAKQADWVLDDKEYFEGSNSGYKNTVAERSVLQDALQDAERKEYDILVAYKDDRIGRRMWEIGAYVMALKSYGTDIYTVKDGCISPETDDIMGQMMLALRYGNAQKSSSDTGMRVKDTAQKLVQKGKFMGGAAPYGYRLELSGEISKHGRALKHLVIIPEYAEVVKYIYDLSLKKEYGSTKIAKALNEHDKYKNLAPKDSWKSGTITSILTNPIYAGHTAYKRRERVNGKYHRLNSEDWITSFEANENIMIIDGDTWDRVQEKRKQRGDKYIKTLEHKNVKVIRRNDGMLALIDVLYCGYCGRKMTNGSKYNYWTIKGTNEKRTSKIAIYKCQDAWQGVPHDKPKQIRADKIEPIVFNAIAQYIGKLQENENIFQQIENNQEKEKKSKEKELKKEKESLEKIQKKIMIMEEHIPDAMTGEYPLSLQELVTIINKYKEQLQEQQKLVSKKEIEWKAASVSVNDWEDIKSKLPSWQDIFLNTDTATKRVLVNKLIERIDVKKDEIIVRFKVNLNDFFVQPRTSDGFGVQSARVQL

SEQ ID NO: 4315 - protein, 522 aa, unidentified
  source 1..522: note = uncultivated organism
MRVWHVAAYCRLSREDGDKVESDSITHQRMLLDDYIENHPELALVDRYEDDGYTGTNFDRPDFQRMLRDAEAGKIDCIIVKDLSRFGRDYIDVGRYLERWLPEHGVRFIAIGDNVDSESGPYDMLLPVKNVFNEQYARDISKKVKSAVKTKQRRGEFVGAFPSYGYRKDPDHHGKLIVDPCAAQVVKRIFDLFEGGMGKVKIAKVLNKEGIPCPSEYKRLNGERYNNGRRIQNTTYWTYATIHRMLQNQMYAGNMEQGRNYRPQLHGKAKQLDRSQWMVVPGTHEAIIDAEQWERVQALLSKDTRALDFDQNVGPFAGFLRCGDCGRAMSKTNHSGGVYYCCGSYKRYGPTVCSRHGIAQKDLEQILLSDLNQIIKAVGDLKELAERADERPLTRRNLQTERERCQGVIDRLYRLKKSSYEDFKDGLLNREDYLQYKADYERQEQQLTAQMEQLQEPDNEANVLQRPWVESLLRHGRLTELDRATIAETVEQILIFEDGRIEITYKFSDDLGILGTENEGAG

SEQ ID NO: 4316 - protein, 524 aa, unidentified
  source 1..524: note = uncultivated organism
MYRAGIYCRVSIEEMGKEGEYSNSIHSQIQMVEDYIAEQGNITKTKIYADDGVSGSNFDRPEFRRMLADIELGVIDMVIVKDISRLGREHIDTNYYLGKYFPERQIRIVSILDNYDSKISTYDELLEIKTLLNDMYLRDTSKKIRTVIQSKRNAGEYTAGEAPFGYIKSKEIHNHLEIDPYASEIVKHIYQLYLSGKGCKSISTILNKDNIPSPAKYKKEVLKTDYAWNVGKGLWSPSTVAGILKNPVYTGAIVLRKFDKPSYKLKYRKQIPLEEKELVEGAHEAIISKEDFEEAQVIRKKNYVPYFDKNKEPHKYVGILFCGKCGTAMRKRYLASHEAYDGYMCGFHQKMGEKYCELNHITFEKLDELVVYAINQQLKHLKDDLKQLEKQYLRDKSGNGISFTKVEAKINRNREYQKKAYEQFMDEVLSKEEYLELKQMYDAENQKLQIEINQRQKAERNRQRNIEETTAWLQRFGKKKITTKLLTRDMLVELIYKIYIFPEQEIDIYFKFANPLSEVEEEAK

SEQ ID NO: 4317 - protein, 533 aa, unidentified
  source 1..533: note = uncultivated organism
MKIAAIYSRKSKITTKGESIINQIELCKHEGNHLGIEKFIIYEDEGFSGKNIKRPQFQKMLSDAKEKEFSVLICYRLDRISRNISDFSTLINELDRLHISFISVNEQFDTSTPMGRAMMYIASVFAQLERETIGERVRDNMLELAKSGRWLGGQTPLGYESRKMTYLDSEFKEKTMHTLSPIKEELDVVNFIYHKYLQYKSINQVFICVFQKNIKTKNGADFNKKRIQLILRNPLYVRADEAVMKHLEAIGMNVMGKFDGKHGILTYNKSKGTRAKRDITEWVAAVSTHEGIIDAPDWLKIQQILDENKKKAPRLGTAAAALLTGILKCSKCGKSMIVKHGHISAQTNKIIQYYVCSTKDYSKGERCSNPNIRVDELESIVMNNLKNVSIDETVLLEELNKIKSNIIKNNFMQGEMDNLPGQIKIKQSQIDILISQLSLDNEISKYIRPQILKLGDDLEKLKDKYEHLKETSYEYKNNKWDANKFLYSLSNFSSLIDILDFNNKRLLINSIVQSIYWDGVKGTIKINLMTLNR

SEQ ID NO: 4318 - protein, 533 aa, unidentified
  source 1..533: note = uncultivated organism
MSGKTDKPKPVVRCAIYTRKSTDENLNLDFNSLDAQREAGEAYIKSQQHEGWVCLPTLYDDGGFTGGNMDRPAVRRLMSDIEAGRIDCVAVYKVDRLSRSLLDFAKLMSVFDKHNVSFVSVTQQFNTATSMGRLILNILLSFAQFERELTSERTRDKIAAARRKGKWVGGRPVLGYDIAPSGANGNGGRVTVNEDEAAQVRQIFELYLLQRSLIPTMQELDRRGWRTKQWTTRKGRLKGGRRFTKDSLYRLLTNIAYIGKVRYHQEVYEGEHDAIVSETLWHRVQDALRLNGRNGGTNSGLVRNKYGALLKGLLHCGPCGCGMMHTYTTKGNRRYRYYVCMNAQKRGWENCPTRSIPAAEIERFVVDRIRAVGQDDEVLSRTLEQARKQSRQGLDALQAERRRLERELTRHGEEVRTLMDQAGTPGESPTAARLADLQERIRAGEQRATEVREQIIALSEKVVDERELARALSLFDPVWDSLSPNEQARAIHLLVERVTYDGAEGTLAITFRPTGVKALAEGPPEAQATGVEG

SEQ ID NO: 4319 - protein, 513 aa, unidentified
  source 1..513: note = uncultivated organism
MTCAVYCRLSREDEGRGAAESESIQNQKALLIAYAEKQGWEICRIYSDEDYSGADRARPAFNELLRDAQAGKFQVVLCKNQSRFTRDMELVEKYLHGLFPLWGVRFVAVVDNADTAARGNKKARQINGLVNEWYLEDLSENIRAVLDQKRRDGQYIGSFPLYGYQKDPADRHHLIPDPTAAAIVREIFSHCLSGMGKQRIADLLNSRGVPNPTAYKRQAGLAYQNGADSGSGRWSRTTVGRILHNEVYCGTLVQGVKRKPSYKSDRCSAVPKEEWVRVPGTHEPLIAPETFAAVQRLLCARTRSDGSGSVHLLAGRVFCADCGAPMIKVSHVYKGQKHSYLQCSAYAANRAIPHCTRHSIRLDRLEDAVAARIRGYAHSLCRMPDGRRLSHVRDGEALILERNAKSLRGQITRRDAAVRSLYLDHAQGLVPPETFRELLGQFCAERETLQARLTALESQRREQQNAPGIAGRIEKLWGFDPIPRAVIGLVVGRIEIGERQTDASQEIRIQWNF

SEQ ID NO: 4320 - protein, 538 aa, unidentified
  source 1..538: note = uncultivated organism
MKTPSAKSVRCAIYTRVSTEHGLDQEFNSLDAQYDAASAYIKSQAHAGWTPIRSRYDDGGYSGGSTDRPDLQRLLDDIRGRKIDVIVVYKVDRLTRSLADFAKLVELFDAHGVSFVSVTQQFNTTTSMGRLTLNVLLSFAQFEREVTSERIRDKIAASKRKGLWVGGNLPLGYEIKDGKIAVVEEEAELVRSIYRQYLELGSVNELLRDLRERNIRTKAKLLSTGTTRGGILFGRGTLYHVLSNRFYIGEVKYKNEILPGEQPPIMDRDLFEAVEQKRLAQWSHRTVVRNKSNHLLAGLLFDDAGHRMIPTHATKAGIRYRYYASALVLHGEAGTASAGSVSRVPAADIEDIIVKSLKQHLAANQGESAIAALPFDRDVLAQLIAGIVVHKDRLIVRFKSNDEDEASDTPDDRSLVIPWQKPPSKRFRQILLPHNASRRDVRPEKSEHRARLVNAIARGRRWLDDVVSGRVTTVAELCAREKCSVRQVNMSISLAFLAPNLVKAAVEGRLPRGVGIERLRDPSAEWRKQFEALGLNPA

SEQ ID NO: 4321 - protein, 521 aa, unidentified
  source 1..521: note = uncultivated organism
MKQITKIEPTASRKTAAKIRVAAYCRVSTGMDEQLISLETQKAHYEELIGSNPEWKFAGLYYDEGISGTNKEKRPALQQLIADCEAGKVDRILTKSLSRFARNTTDCLEMVRKLLDLGVTIFFEKENLDTGSMESELMLSIMSSLAESESVSISQNSKWGVRHRFENGTYKISYAPYGYSVSDGVFSINEKEAEWVRWVFSEALSGKSITAIARELNEKQVPSRRSGRWTPTTIRAMLTNEKYIGDCLFQKSFSDFRFHRRKNYGERDQFYAEDHHEAIISREDFEAVGKLIEQRTKEKSIKKGGSHYRKRYPFSKKLICGECGSAFKRHINNTGSISYPVWACARHLADSRGCSIRSIKEADLECAFTTMMNKLIFAKKEVLDALLDGIRSETHRTNMLRIDEIDAKLEKNAERREILVTLMTRGYLEPALFTSESNELSSEADALAEEKEKLLGVIVGGIQKTEALTELIRFVGHAEPSTDFNGELVERFLETATVSSREEVVFHLKCGLSLTERINVE

SEQ ID NO: 4322 - protein, 533 aa, unidentified
  source 1..533: note = uncultivated organism
MSAPSLPRAAIYCRVSSDQQEDNYSLPTQEAACRRYCAEHGYEVTGVFSDVHTGAEYRQRPELSRLRELIRQRAIDVVVCYAVDRLSRNQAHLYILAEEMSDHGVRLEFVTERFEDTAVGRFILAAKTFAAEVEREKITERIMRGRRARAESGKLVHSRVPLYGYQWTDSTKSRYVLNPETAPVVKRMFELALAGHGIKAIARMLTDDGIPSPSGLPRWNENTVYKLLTNPTYTGEARAFVWKSRNGYKRIWEEGIPLPEGTVPPIIDRATFEAVQRQLALNRLRSPRRNRAPETWLVRGGFAVCGVCGHRMYAASTNGKPAYRCEWSGHPRGALRPTIAAAELDRLVWQAVHAAMERDDVLQHGLELVMSEQPAERELAGIERVVSQLKRQQANLAKAIAMASDDTALGTLLAEMERVAQRLRELEAERAALARQAEVWARMRGQYQELTRWRRQVAQRLDEMDYRERRWLLDLLGLVARVYPEDDPEHDRVEITLGLPLGVDIDLTTSCGWAAGWRARSSGPAGRRSSARR

SEQ ID NO: 4323 - protein, 512 aa, unidentified
  source 1..512: note = uncultivated organism
MEENRRSLRCAIYTRKSTEEGLEQQFNTLQAQREAAEAYVRSQHLSGWIALPNVFDDGGFTGANMDRPALKQLLAAIEERRVDCVVVYKVDRLSRSLLDFARLMALFDRYGVSFVSVTQEFNTTTSLGRLTLNILLSFAQFEREIISERTRDKLSAARRKGKWIGGIPVLGYDVDLRGGRLVVNQKEAEKVQEIFAICDKAGTLSASLQEVNAHGLRTKCWTSRGGREHSGKPFCKSSLGAVLSNVLYKGCISHKGTIYPGEQQAIVDTKLWEKVNRKLELRRASQVGREHHKQEAFLQNLIRCGECGTTLVATHTKRRGKRHSYYICPKAKRHHGCKQPPVATEDLDASVRRRVETAVGGNASTVVMQQSIGQIVYAGKTRQVVITLQEGSRIEYGLPVPNRRGVRSGSKAATGRIPRISKLMALAIRMEKLVGEKHTSDYAELASHGSVSRPRLSQIMSLTNLAPDIQETLLFLPKTMAGPDPITERRLRSIAQTIDWGRQKELFRELMS

SEQ ID NO: 4324 - protein, 520 aa, unidentified
  source 1..520: note = uncultivated organism
MAAADIEIPTGLRRKTLRCAIYTRKSTEEGLEQSFNTLDAQRDSAEAFIRSQRQEGWVALPEMYDDGGFTGANMDRPALQKLLQDVRDGFVDCVMVYKVDRLTRSLLDFSRIIDVLDKHRVTFVSVTQQFNTTNSLGRLTLNILLSFAQFEREMISERTRDKMSAARRKGRWVGGIPMLGYDLGDKGAGLVVNGGEAARVRAIFDLYLEHGSLIQVVQELNRRDWRMKAWTTRKGTSAGGHEFTKNRLYSLLTNMVYVGKVDFGGQVYQGEHKGIVHPAIWQSVQDRLRFNSRTGGRQIRNKYGAVLKGILRCGSCDVGMVHTYTQKAPNKLYRYYVCVNAHQKGYNQCQTRSVSAPVIEQAVVEQIRGIAANSDVVGDVVRQLDEQRVAGVDGLEREKRIIAKELQSLGEEAVSLVGMTGKLGTDRMAELQDRVAVLERQHRDVRDQLAESIGQTVDAESVRKTPREFDGIWAEMTPREQEKFVKTLVERVTYDGATCTVTVGFRTAGIRQLCVEVINK

SEQ ID NO: 4325 - protein, 546 aa, unidentified
  source 1..546: note = uncultivated organism
MPAKTQRTRARKAGGMNPDGGGGRVAIVTRISTDEVNQPYSLEAQSKGLESFVDSQPGQSITHRFVDQASGATLERPGLQAALTAARAGEFDVLLVYRIDRLTRSIVGLMSIVEELDAAGVALRSATEPIDTQGPVGRMLLQLLGIFAEFERGLLIDRISKGFERKAARGEWLGGPAPFGYTLDSPTKTLVPAPAEAALVQAIFAKYADERFGATALASWLNETGQRSRNRKLWSNQAVLRIIRNQVYLGKIAHGDDIHDGKHEAIVHEGVFARAQVLLDERAAESTTMRPTTSEYVLTGLLRCVSCGDAYVGASAHGRGGFYRYYVCRTRQVKGARGCTGERIPADILEDAITADLLSTYDNYEFIQQAANEAYAEAINERPRLEAELAGTESQLRETSTAIDRYLRAFEAGTMSESLCAPRVAELSDRKNELTARQRQLSAETRSSVPILPTPKQLRTTGEHIKVAINGGSPDNVKQLLGELIDRVEIGPEKQAQPYFWVPNEHRPGPSLARACGTPVRMGSRRVEVKGLEPSAYGLQSRRSTS

SEQ ID NO: 4326 - protein, 565 aa, unidentified
  source 1..565: note = uncultivated organism
MATQKPPRRRCAIYTRKSSEEGLDQDFNSLDAQREACEAYVQSQIGEGWKLLRARYDDGGFSGGNVNRPGLQQLLVDIEAGKVDTVVVYKVDRLTRSLPDFAKIVDVLDAQKVSFVSVTQQFNTTTSMGRLTLNMLLSFAQFEREVTGERIRDKIAASKKKGLWMGGLVPLGYEADGRTLKIVPEEAETVRTIFELYREHRSSWKVKREADRLGLRTKLRTFKDGRTSGGLPFRLGHIHRIVHNPLYIGQIQHKGVVHEGQHDAIIDLEMWDATRFGRSTESESRRAPKSKKKQPIPYPLRGKLYDEAGVALRGDSSRKGGRRYRYYQSAKTAADEQPADAAKPRPTWRIAAQEIEGLIERGIQQLLDDPAKLAHAAIESGIPESDVPRLIEQSDRAAAKPTDLLERAQLHPSRVAVWLEPSRIVDGVVGCIRHDLPMQIRRRGVETRLILPSSNAQTIERPADAALLKVFARARFWFKELAEGRASTLDELGRREGVNARYLGAVMPLAFVSPKLTLEILQRRYPIDLTADSLVKQADIPLEWQAQGASIGLTEDSSTERSSPN

SEQ ID NO: 4327 - protein, 520 aa, unidentified
  source 1..520: note = uncultivated organism
MTPVSRTKKPGAEPGGTAKKMIRCAIYTRKSTEEGLNMEFNSLDAQREAAEAFINSQRHEGWVVLPEQYDDGGFSGGNMERPALQRLLMDVEAKKVDAIVVYKVDRLSRSLLDFSRIMETLDRHGCSFVSVTQQFNTTHSMGRLTLNILLSFAQFEREIIGERTRDKMSAARKKGKWVGGAVILGYDLDREARKLVVNEGEARMVREIFALYQRHRSVLATVEELNRRGVPRKSWVAKSGKTTGGGPWTKSNLTLLLTNVHYLGKVDYQGKIYDGEHEPIITDATWTKTQALIELNARKRGGARRTKFSGLLKGLLKCGSCGCSMIHTYTSKGTTRYRYYVCQNSTKQGAKVCATRSIPAQEIEDFVVDRIAAIGGDSELVQRIEKNALNQSEERMVALDAERVQIEKALRHQAKLVAGIVGLPNATRRLADLEEQLRAGESRMAEIAKEIAGIEAAAITAPEISGVLGAFRSMFDSMPPAYRARSLGLLLEQVAYDREKGSVAISFHPSGIKTLAEEKA

SEQ ID NO: 4328 - protein, 595 aa, unidentified
  source 1..595: note = uncultivated organism
MKSGEGGQRVAIYSRVSSQEQAIEGVSIDAQLAALRAYAKAQVWEVVDEYVDGGYSGGTDERPALKRLLIDAERQRFNIIAVCKLDRFFRNLRLLLNYLHHLEELGVKFVSTQEGLDTSTPYGKFAMQIMGVIAEFERGRIGERVKDSRRYLISDGRWPGGRTVFGYRWLTGERRWEVVPREAEIVRRVFDLYINDKRGTESIASILNKDGLRTRSGALWHYSHISQMISHPGYKGRHKIGVAMPAIIDGNTWQLAQERRERARSVLSDPKGWLLQGLCFCGRCGHVLKCVHKKPGEPRYYACRSRIQKHMNRHQEKRCDLPYVQAEWLEWAVWKKVIAVINDSEKLAECVNKALARLEEKKSEIGTEALAVDSKLEAIMAKKERLGMVFADGAISESIYKSKLGQLKKQEAAMLKCRQNIDPNELADLATLEARIAKVKDILGRGSLTVTEFGIFGEIGDEYIPAGFNAWRECDGELAIGEITEMDKFRIEGTDKVMRGVDAPPGFWDCQDQEEQAKRIKKNMRAILQLFDIEVIVFPERVEIRGAIPTQFLDRITGKEEPATAPVNSSPSLIWEGEDFFKKRGRSPLLNTLPG

SEQ ID NO: 4329 - protein, 525 aa, unidentified
  source 1..525: note = uncultivated organism
MIQSATESETRPTRCAVYVRKSHEEGLDMPFNSLHAQQEACRAYIKSQGWGALPDEYSDGGYTGANTDRPGVQQLMQDIESGKVDCVVVHRVDRLSRSLVDFAKMMEKFDQRGVAFVSVTQRFDTTSSMGRLTLNILLSFAQFEREIIAERIRDKISAAKKRGQWIGGHPFLGYDIDHPNRKLLVNDEEAKLVRLIFERFVKTGSCLKVARELNAQGHRTKSWKTAKGKDNGGQPWNKVYVYRVLTNPKYIGLIDYKGQNYPGQHQAIVDKAMWDRAQAVMGKNCRNRAAQTRRQTAALLKGILRCGHCGKAMGSSHTKRRGKQYAYYVCNGAEKNGYNTCPVKSVAAGHIEAAVIDHLRGVFRSPDLVAQTYRAVLDQAGQQQETVRREKAAVQRRLADLRKMIRNLAKAGDDGPVGAISAELRKVNQEYAEAENRLGELDARLEAAQGDLPVEQDVAQALRNIEPLWDELFPAEKERIVKLLVQEVVVDVDNMTVRLRPGGVGSLVGEITAVADDAEERMAAV

SEQ ID NO: 4330 - protein, 502 aa, unidentified
  source 1..502: note = uncultivated organism
MSEYNSVRNAFSTENLDNVVDLYIRVSTNEQAKEGYSIGEQESRLRSYCEAMRWTIHKVHIDPGYSGGSTDRPALQELIKDVESGQIKKVVVYKLDRLSRSQLDTLFLIEKVFLANNVDFVSMNENFDTGTPFGRAMIGILAVFAQLEREQIKERMGMGKEARAKEGKWGGGSSEPIGYDYNIATGELEVNEYEKMQILEAIDLFIKGTPLRTICTIFDNKGYMYRGRSSKPRKWDPKRLKYVFANKIYIGYIRYHDEWFPGSHPSIIDLETHEKLAKLLQGRSQMYEKHKRRCSGQTTYLGGLLYCKHCGGKYAKNTWPTRKGERHDFYTCYSRSNKVPKMVKDPNCKNKNWRKEELDNIVLGEIKTLAMNPEYYHTLRNEKLSKTDNADKISLIKNEIEKLNNQISRFMDLYGLGQIPVEQITEKVTSLNEQRTALERELDSICDTEEIMTEEEVAEIVCSFDEVLSVGELNEIRSVIEALIDHIEIDNDDVYIHWKFVV

SEQ ID NO: 4331 - protein, 534 aa, unidentified
  source 1..534: note = uncultivated organism
MNKLRAAVYTRKSSEEGLDQDFNSLDAQREACEAYITSQKSEGWTLVRSRYDDGGWSGGNIQRPALKQLLADIEAGRIDIVVVYKVDRLSRSLSDFAQMVDLFDRHNVSFVSVTQAFNTTTSMGRLTLNVLLSFAQFEREVTGERIRDKIAASKAKGMWMGGFSPLGYDPKDRTLVINEKEAATVRHIFERFLALGSVYALHAELERGGIRTKVGKTRAGTTRGGVAFGRGNLAHLLQNRLYIGEIVHKELSYPGLHAPIIDPEIFVTAQKLLEQNQRGRRKRALVRAPLTGLLFDALGNRMAATHAHGRSGQRYLYYISPVPASDPNAPRVLRRIPAPAIEEILIERLRCWTRRPTAGWAEITPFIRRIELHPAAVVVDLASPAHENWTVEAPEQSSTPTDGVLKITSPMTIHTRAGRTWRIEGSARKSRPDKALIVGLRRAHGTLNERGFDLVNIRTPLKDAHGVEDPYLRKLTALAFLAPDIQRAILEGSQPTELRLKDLISQTIPLDWDEQRKLLGFAAAGPATILQAAC

SEQ ID NO: 4332 - protein, 564 aa, unidentified
  source 1..564: note = uncultivated organism
MKVAIYVRVSTEDQAREGFSLEVQREYLSNYANHNGFEIYDIYQDDGINGCSSGYSLDRPAFKKLMFDARLKKFELVLVYKTDRFSRRLKDMLNVIDELESLGIAFKSATEPFDTTTSAGKLMCQQLGSFAEFERNRIIERVFPGMVKGVLKGNWQGSAHAPYGYHYNKEKKLLETVPNEAKTVKLIYTMYLCNKSSVQIGRYLFQNGYRSRCGNPFTGHHILCMLKNPIYTGRLLWNVRHYYRTPKGWRYTINPPEKQVLGQGRHEVLISVEDFEKVQATLKERRRNFNHRVNPSSYCLTGVLICAKCGLVYTGSSYMTNHRTKKRKPWYCCSSKYRFRDKCGNPAVRAEIIENQVLDIIERITEKGSLARRIDNIIKAQTEPDEAIKEQIDRVKKELERLLIKQSKLTDAYLDNQIGIEIYKNKNAAIKEEEQALKKQLSLLEIKLIEKERSRDYLCVLSQIISNFNKTKQSMEPQDKKDLVRLMFKWIKIDDFKIVDYELYEPFKSYLKEKEKGRDKCQLEEIQVVPRKRSQSCISEPLVGRWQDYSNAMRSLAEAVVGAL

SEQ ID NO: 4333 - protein, 551 aa, unidentified
  source 1..551: note = uncultivated organism
MRDTSIFPNYVFNKQTGWREDLPADMEEGTRVLCLYRVSTDKQLYHDANNEADIPMQRVRCREFCEQRGWTIVCEMQEEGVSGHKVRAENRDKIQLIKEYAVQGRFDIFLVFMFDRIGRIADETPFVVEWLVRNGIRVWSTQEGEQRIDSNVDKLINYIRFWQADGESVKTSIRTSNSLKILTEQGYFTGGSCPYGYEFVKSSRLNKKKQPVNDLAINDEEAQVVKQIFEWAELWGYGAQRIANSLNEKGIKNRSGKNWHPSSIQGMLKNSLYTGILQNGDASATRSDLSIVAKSTFEKVHEMLAARSRKNEAIRSAPLNTRGNSLLSGMVFCGHCGARLCVTTSGKGRKKRDGTDTVRTRYTCQTKSRTHGDCDGQTGYTVHRLDGMVEAVILSLFERVEGMDKSEVLGKSFNYRQNAQKALLQKVKRDFEKAEEDLRKLKGEVVKAITGESSFSPELLNSVIEEKEREYQQLKKAYHKADQELKNSANQLAKMGEQYDELLEWSSAYKNATMAAKKMIVFHLIERVDVFRGYKLKVKLKISGDQFFGKR

SEQ ID NO: 4334 - protein, 559 aa, unidentified
  source 1..559: note = uncultivated organism
MNEQADRQAAIYARVSTEDQVDGTSLDTQLERCRAYVLGRGWNLAGEFVDEGVSGSLSSRPALDKLIAEVRAGHIHVVVVAKLDRFGRSVRHLSSLLGELDDLRVEFVSLSEAIDSSTPVGRLQRTLLASFAEFERDRIRERTSEGILAVAREGYWPSGEPPFGLWTVPDGRRRRVVIQQDEAAAINHAVECIVERGMSTWETAASLNALELRPRKSARWTGANLRSVLLNGSALSGRWIWSKGREGETAIDVPAILSSEQHEALMAALARTRRATPYRKHFYLLGGGRITSPCGGRMQGYTSDGLRPSAPVYKCPMSWASVPKDEQCGCQPLRRDTIDDAVWAEVVGLLSRPEALMAGAREALDLTAAGRELGGEDLAALDRRIGRLERAAGEKIAKLLADGMDPVVAQHASSALTADLTGLRDHRSKVAAWARANADRASQAERLWQLAARAAEVLAEPSDEVRHQVIDALEVRVALGGWRPCEPCGGSGFVPASYEGPRPKGQPRRLICPTCHRTGRTPIWSMTGEVPETLLAPPERPEQPQPGWPFRVVSAATGA

SEQ ID NO: 4335 - protein, 538 aa, unidentified
  source 1..538: note = uncultivated organism
MNFAIYSRKSVYTGKGESIENQIEMCKQYICTKFCGVTDEDITVYEDEGFSAKNTDRPQFQQMLKDIKQKKFDFVVCYRLDRISRNVSDFSTLIEDLNDRSISFICIKEEFDTSKPMGKAMMYIASVFAQLERETIAERVRDNMLMLARTGRWLGGTTPTGFTSEKTQEIIIDGKIKSACKLKTNPAEIAIVKMMFEKFLELRSVSGVSKYLIKQGIKSRSGKIYSLLGIKEILQNPVYCIADRDILDYFTDLNADVCFKEKDCSNTLGLLSYNKRDYKKKHAPRQSIEKWIIAIGKHKGIVSGKKWITVQNILEANKPDGKRPAIMHNNYSLLSGLIFCEKCGSRLFAKMRSNNPDLFDYICQSKMRGGMDLCDCQNLAGQQADDMVCEYLMQYQNESSTIYKLLDRLKKDLQGQVQESPIVTIDTQIKKYNDEMDNLINTLSQNNLGTAFIGRVNARVTELDTALKKLTDQRNRLQKDVSVIADKEIQMDMLVGALSSLKENFNDLSIHEKRTLVKLLVKKIVWDGKDLHIFIDGE

SEQ ID NO: 4336 - protein, 547 aa, unidentified
  source 1..547: note = uncultivated organism
MNKNISYNAAIYLRLSKEDGDVTEGGKLVSNSIANQEELVRDYLRSHAEIRIASVYKDDGYSGVNFDRPGFQKMIEAIKSGAVNCVIVKDLSRFGRNYIESGRYIEKIFPMLGVRFIAVTDNFDSLDDDAGSEMIIPFKNLINDAYCRDISIKVRSHLEMKRKNGEYIGAFTAYGYQKDPQDKNKLIVDDYAADVVRDIFAMKLKGMSQRAIAKKLNAEGIQSPIEYMRSKGINLNTAFQKGSRAKWSHSTVLRMLQNEVYTGVLIQGKTGTPNYKIKQRVTKADEDMIRIEDSHEAIVDMKDFELVQELLQRDTRTAPASTILYPFSGVIFCGDCGSPMVRQTSCSRGKRYIYYVCSEHKRNRKCCSAHRISENVLYETVFMAVTSHINKILTFAEASKEAMDATQTAADIKKYDERIARKKEEVDRLQKRKLRLYEDLKDDILSRSEYDRLRDQYAEQISEGEDAIRDFEDERCKAMEEKTDQNLWIEEFKKCSGIKELSRHDVIHLIERITVSDAKHIEVRFRFMEEFERLMRQITDKGRKEAI

SEQ ID NO: 4337 - protein, 551 aa, unidentified
  source 1..551: note = uncultivated organism
MHMKIAIYSRKSKFTGKGESIENQISLCRDYIARAIPEATDSDIYVYEDEGFSAKNLDRPQFRRMMESAKKQPFDYVVVYRLDRISRNVGDFAKLIEELNTMHTAFICIKEQFDTSTPMGRAMMNIAAVFAQLERETIAERIGDNIVYLARTGRWLGGVTPLGYTAEQIQIKDEEGKTRSAYKLTQNLDEVKVVRTIYQKYLEFQSITKVRTWLIQHDYKTREGCDFGVSAIRSALRNPVYCPADEAAYEHFKNIGSTVCFDREEASDKNGIMPFFRTSQEGTKNKQTSADEWYIAKGKHKPVVTSEEWLRVQSLLAANASKTFYRPGRNEVSLLTGIVRCAQCGSIMRPRVNSNSRNLPDGTRTFSYMCTLKETSHKSRCNMKNINGNLLDKLVCEELRKYRTVDSLVGEQLDKIVGDISHDADDNSVRLSDLKRSLASRKEKIANLIDNLSRSAGSQVLVEYTTQEIERLDAEVKSLEQEIEDLSFMDDVHNERRQQIDEMISRIASFDAAFEDLAFAEKQDYMHSIIEKVEWDGENAHIFLVHADDNG

SEQ ID NO: 4338 - protein, 550 aa, unidentified
  source 1..550: note = uncultivated organism
MENTVRSQYQAAAYVRLSKEDLISASGARTESNSISNQKQLILDFVKDKADIQIVSIREDDGYTGTDYDRPDFQRMMDDIRAGIVNCVIVKDLSRFGREYINAGKYIDRLFPYYGVRLISINDGIDTITRNSSDDFNIMVKNLMNDNYCRDISIKIRSQLQVKRKNGEFIGAFAPYGYEKSVEDKNKLVIDLYAAEVVRDIFRWKLEGINQDAIARRLNEQGILSPMEYKKSKGLSYKTSFKTKSKALWTPVAVRRILTNPVYVGTLIQGIRTRPNYKIKTVVVNEEAKWAICENAHEAIIKPRTFLLVQRLLELDTRTSPYEEGVFSLAGLLYCGDCKGPMVRKTQTASGKKFYYYVCGQHKKNGECTTHRISKTQLEDAVLKLLQEHIRLLMELDTCLKVIRNAPIRRLSMQKAEERLLAVEGDIERYRRLKLSAYEDMKEGILSKEDYLDIKAQYEARIADAHLAEEQVRREINLYLENGNAPQQWIQEFIEYRNIQSLTRLVAVECIERIVIYEDKRIEVTFTHMQDYQALVSQIQEYYSKQKGAS

SEQ ID NO: 4339 - protein, 527 aa, unidentified
  source 1..527: note = uncultivated organism
MNERLQIDGSTALKKPVPRLITIEPTKKTESIKLRVAAYTRVSTSSDDQLNSFAAQNQYYTTRISENQNWEMVDIYADEGISGTSIRKRTEFQRMIADCRKGKIDRILVKSISRFARNTAECLVTLRELKILGVSVSFEKENIDTAGTSGELLTALFASFAQMESESISGNVRWSYQKRMQDGTFNTYKAPFGFQLVNGKLEIQQEEAAVVHRIFEHYLSGMNSREIAKVLNRQGTLRSVWRREMVDYILKNERYAGNALLRKRYTTESFPTKKKWNRGEREMYYVEDSNVPIISQEMFDQAQALRKQRHHMGKTQKAKPLSGKLYCGCCGAVYRYKSVNGIHYWVCTKHDESAELCSIKPIVENAVYTAFLRLYYNLKHHGIAILEEMTTSMQKIRSYRMLWSEDVIELNKRISDLSSQNQMLAQLNQQGLIDSDIFIYQSNELAQQLQEAKVKKKRLLERNEDTTTRHTQELVELLENGPNMLNSFHAEYFHELIERIIVDSNTQIRFRLKNGLELVETIERTVR

SEQ ID NO: 4340 - protein, 531 aa, unidentified
  source 1..531: note = uncultivated organism
MSGKEKTKGSLALAAPRVITIPANDPEIGRKLRVAAYARVSSNSDDQTHSFAAQNAYFSKLIAGNPNWELADIYADKGVTGTSIDKREDFLRMMEDCRRGRIDRILVKSISRFGRNTKESLEAVRELAGLGVSVLFEEQKIDTAESTGEMLTAIFATLAQKESESISEKMRWSYRMRMRSGKFTTCKAPYGFRLVKDHLEIREDEAGIIRMIFDRYLAGVSMEDVAKEVTAIGRLTRDNTPYWQTTTIQKILSNEKYAGDSLVQKTYTTQSLPRQKKINHGEQDQILIQNSHEAIIDRTIYDKAQQLLARKSSMIHKRTDQKTPLSCRIVCGNCGTLWRRKKCCGTIHWVCRKHDKNVHICPTTQIPETLIEESFLRLYFKLKRHGESVLTQLTTNLRTARNGSLLWSEGVVELNKQITDIAGQERLLLLLKQQGAVSPDLFLSRSDQLAEQRRTAKLKKERLLRSEEDHTIQRTQALLDYLRSGPDTLSFFDEALFSELAEKIIVTDNETLRFRLINGLELTESIERTKR

SEQ ID NO: 4341 - protein, 575 aa, unidentified
  source 1..575: note = uncultivated organism
MKYKKDDTRKIAIYSRKSKYTGKGESIGNQVELCKHKISSIFEDVDFEKDVVIYEDEGFSGYYTKRPAFQQMMEAVKNKEIKCIFFYRLDRISRNVKDFCEIKEKLEDYDVNFYSASENFENITPSGKAMIMMTSVFAQLERDTIAERIRDNMLELAKTGRWLGGTTPIGFKSEAMESINVDGKKKKLFKLTPIADEIKIVKLIYDKFLEFKSQTKLETYMIQNNIKTRQGVDFSRWGLKNILTNPVYCIADIDIYKELSSKGIDIYSDVDNFNGTHGIMAYNKTEQKPNKTNRERDISEWIISVGKHKGVVSGRNWIEVQNLLQANENKRYRKPTKNHALLSGLLRCSKCGSYMRPKLKTNKTPDGEIRFDYMCELKEKSRKQKCDCHNINGNEADKLVMQTIKELIAPNSTFRKNLSKLANNKITGVSKESVELKALETTLKKNEQAIENLLDRIKFIDVALIEDITKEIKKLKADNQTIEKRIAEIKDIGSDNVNTQEQAQIVANIIDSYFTTFDTLDLITKRNLIRIIVSSVESDGENLELNLIGVRKDSVRDNVPLCEDSKWNFNVFKIY

SEQ ID NO: 4342 - protein, 527 aa, unidentified
  source 1..527: note = uncultivated organism
MERVGVYCRLSLEDKDKINKSEDSNSIKNQKSMCLKYATDKNWDIIDIYSDDDYSGAGVHRPDFERLIKDCESGRINLVLCKSQSRFSRDIEVIEKYLHHLFIKWNVRFVSIIDNADTNDYSNKKSRQINGLMNEWYLDDLSQNIKKSLKSKREDGLFMGSFAPYGYTKKDKHKLIIDPVAANIVKTIFDKYVNGDGYYKIATYLNNQNILAPSNYKKSNGSKFVCANNKYKNSVWTTDTIARILKNEIYIGNLVQGKSVSLGYKVHKSVLTNKKDWCRVNNTHEAIIDIDTWNAVVKRLDKHDKPIKNGNVHIFSQKVYCECCNKVFMRNVFKSGESKKAYLQCKGSKKYNLCTNNSSIRIEDLEDIIITSINKMIKTYYDKEKIEKTLTTSLKQNSKSNNLITSLETEKNNIDKKILNNKEYLKKLYEDRVREIITEDIFLNLMNDYTNENQILNLRKEKIDKEIESIEIINKNKIDLDKVLKKYKKIKKLNKVIIDELVEKVLIGKKDKNTKKRKIEIVWNFNI

SEQ ID NO: 4343 - protein, 551 aa, unidentified
  source 1..551: note = uncultivated organism
MSDLNKTTGKSRIAGYIRVSTNEQADKYGPTIQKNKIKDFIKSKEKGKGWVFDEKLLYVDDGYSGTLKSRPALDRLMRDMRNKKIDVVVVMKIDRLYRSTLGLLEVVKEMGDHEVGFISIDENLDTAISESAPMMERAQKEMMITLFGMLAQFERSLIISRTTEGKLAAAREGCYVGGNVPMGYDVKDKKLIINRGEEKWIRKIFAWFVSQNYTRGEIARKLTELKVAANIGKKLGGKRKVNPTTFWEVKYITTILRRTHYTGVYHYNKKGKDKDGKIVEKPRSEWIDFTCPPIIDNFTFKKAQVKLDSQKKQSNNKKTQYLLTGKIECAKCGAMFTAYTSSKKTKNYRCGKSSKLKTTQVCKVPHISENIIAEPVWEIVKMILQKPTSVLNKMERELKKESYYQALLDDKGILENRRVQLKNERQRVKEAFRRGVFTIDDLEEQISEIEKEGAEILEQLEGINSQLTVEEDKGEKIASLKEMAKKYRNNLTEPSYEDKYDLLQQIVKRILYDGTNVQIELRVPKTIRTELNSKNKLKPLLGGAPRIRTGE

SEQ ID NO: 4344 - protein, 587 aa, unidentified
  source 1..587: note = uncultivated organism
MRENENRIAIYSRKSKFTGKGESIGNQVELCREYIRTHYNNELADNIVVYEDEGFSGGNLNRPDFKKMMKAARDKQFKAIIVYRLDRISRNISDFSGLIEELARLDIAFVSIKEQFDTGTPMGRAMMYIASVFSQLERETIAERIHDNMHELAKTGRWLGGITPTGYASESIKSVTVDGKTRKACKLKLIPEEAEIVKTIYSLFLETDSLTLTEAELMKRRIVTKNGKYFTRFSIRAILQNPVYVMADSDAYQYFTDKEAELFSEPDAFDGQHGLLAYNRTDQEKGRSTIYLPVSEWIVCVGQHPGLIPGAAWVKVQDMLERNKAKAFHKPRTNEALLTGLLHCRCGGRMYPKLSSRKTADDKAIFAYVCKMKERSQGSVCRGRNVNGNTLDAAVIRQVKLLAGDADGFIARMEQSRRLCTGNQAEYEESLAVLRQERSEAERKLAGLVDSLADLPDGAARNLVAQRIEQLNGECAAIDQRMHELSGLTNQHALSDIEFDLMRQLLSVFRENIDGMTLQQQRAAIRTVVRRILWDGENAHIVLFGSDEPIEFPPMTGLCADEGEKLIEFADVDYESDEMSPLREDSK

SEQ ID NO: 4345 - protein, 595 aa, unidentified
  source 1..595: note = uncultivated organism
MKRCAIYVRVSTEEQAREGFSVRDQISRLRRFASEQGWDVEVFVDEGYSGKDMQRPGLQRLIDAIVEGRVDVLLISDIDRLSRNIRDQEDIKELLRTHGVELWKPYEKFDILSADGDFTVSLLGILAQRERRKIAERVLRGMKRRALEGRWNGGDPPFGYTLRRRIFREALAQGMSEEEALELAVKRAPQDKMLYVDEQESKVVKLIFELYLDEDRQMGFGKIAEYLNTHGYRGRRGALWSAATVRDLISNPVYCGLLRWNRFDYSISAKPRRRRRKEDMVLVKGVHPPIIDEASWRRAQEKRERNRREVRGRSDYLLSGMIFCGKCGSSMIGTSEGRKGSWRGYRCCGRASFGKSFCDARSVNKERVEEAVLEEVKEVLLHPEHVMEVLEGTKTKADEVASKLRAELEEKERELENLRGRLSRWYDAFESGLLDVSQVSERVAKLREDIASVEAERDRLSEELKGSQLPPPSYEQVRRWLEEIGRYMESGQKRALLRSLNTRVTVLAKDRLKVHFEIGSGTEEPKGPEELKDYMLGCSRRRTSADKPCVAYRVVGGPEGPRGHEGGVRREDAGYRVDLGGREGLLQGHSRKDRG

SEQ ID NO: 4346 - protein, 519 aa, unidentified
  source 1..519: note = uncultivated organism
MRAFCYCRVSTEEQSTDDHYSLGNQEKKAKDYAKIKGWQVVRVRKDVASGKDTNRSGFQELVSSIKAKEIDLVVVYRLDRLSRNVRDIYDMLDLMREHDVAFVSIGEGFDTTTAMGRAMLGVAAVFAQLTREMIAENVKDGLMRRAESGKWNGPKWNPPYGYRYVVGGTIEPIPEQAEIVRQIFRWFTEDKWGTMKIARVLNSQGVIRESAMPGSGQWHQAKLWELLQNPAYVGLLVAGDKLVRGSHEPLIDDETWERTKEIVASRRKQAPRSKASPYLLSGFVRCGKCNRAMIAQKAKYENPRGQQVYYAFRHSPNEYSGEMHCPGVYHRGDTLEEAVVAEILELAKNPKVVESALAAAQERLKNEDAPIRDEMAQIASRISELDQLFQEWADRLDRRMIDEAQFGQHNSRLMAEREKLAGRLEELESKTGKGTGPGVSFSQVKETLKNTAAVWDSLQFEEKRELLRLLVDKVAIHPDRADLHLFHLPTRTLNARRSGRLYRCKQAKSQIPSAGPAVD

SEQ ID NO: 4347 - protein, 560 aa, unidentified
  source 1..560: note = uncultivated organism
MREQSNIKYYTAPYYRISNDDGDLAVLGKGESNSISNQRSLIEDYVKDKPDIILCEERIDDGFSGVNFERPAFKQMLEDVKAGKINCIIVKDLSRFGRNYIEVGRFIQKIFPCLGVRFIAINDNYDSVESNSMDDQFMLPFKNLMNDSYSRDLSVKIRSQFAVKRKKGEFVGSFTIYGYKKDIENKNHLVIDEYAAGIVRDIYRWRLEGSNNAKIAEKLNHMGVLSPAEYKRSSGLHYKTGFETTGKAQWSSVAVRRILTDQTYLGHVVQGKKTTPNYKVKKAIEKSPEEWIIVENMHDPIITRDKFDAVQRVLKMDTRTAPKQTEVYPFSGILECADCKGNMVRKLVSAGRDKAGNVRKYPYYMCGNHKNDPHTCSSHMISERELEKAVLLTINTHIENLINLREVLSVLDHKQGSISEAKKNDMQRLEVNKEIVKLQSLKIALYEDLAEGVITKEECFEFNEMYKKQIEEYEKQAAYLKEEQELLSFEKIKKSEWMDTFLRHRNLTSLSRSIVLELIDKITVFEKGRVKIHFNFQYNYEMALKIVQLYEMGEEEQKLG

SEQ ID NO: 4348 - protein, 555 aa, unidentified
  source 1..555: note = uncultivated organism
MKPIRCAIYTRKSSDEGLEQSFNSLDAQREACGAYILSQASEGWVALPDIYDDGGLSGGTLERPALKRLLAEVAAGRVDIIVVYKVDRLTRSLFDFAKLVETFDKAGTSFVSVTQSFNTTTSMGRLTLNMLLSFAQFEREVTAERIRDKIAASKAKGMWMGGTPPLGYKPDGRSLAVVDEHAALVRDLFRRYLRLGNVRLLEVELLRDGVTAPKRTTVGGKPVGGGAFTRGHLYQMLRNVIYAGRIAHKDETYRGKHPAIVDDATFAAVQASLAENRQGHRTRARAAGSSPLAGRIVDEFGEPLVATHANKGKVRHRYYVSHALHHARGDTGMRLPAREIEALVIDRLTQILADPLALASSAAFAITPDRIAELPRGCETLAQAVGQPCSPAFQQILRQVRVGTAEVTLVIDAVALAGALGMWRLPDAPETLELTCPARLTRSGRALRLVQDGGAAPHSTPDKSLVRLVVQARRWWAVLRTGEVNTTELARREGITPSYLTRVVRLAFLSPAVTQAILAGRQRTEVTVASLTLKGEIPADWRVQEAAMLPARAVA

SEQ ID NO: 4349 - protein, 553 aa, unidentified
  source 1..553: note = uncultivated organism
MVVAAIYGRRSVDDEPSLSVDNQINRAISLCKAKNWGYIIYRDDGVSGKDTDREGFKQMMRDAKKGKFQYLVCYKLDRVSRSVADFSSLLNELQELGVEFISLTENFDTSTPMGRAMMYIAAVFAQLERETIAQRVKDNMIDMAKQGYFTGGPVNFGFDLVTEEMIIRGKVKEVSRLVENEQEKQHVIDFYDWYNEPHGSVRKNCIIANKSGIRTKSGKLWNPNQMARLLSNALYCIADEDAYNYFKNETNVKIVSDKKDFNGINGLMYYNRRIPHKKTTRLRDENEWILAVGQHKGFIPGKIWAETQRKLKKNASTPPRAGTATKGLLAYLVKCGHCGSSMSYYPSRKTVDGIEYGYYRCRRRETQGKHLCDQPNINSYVLETTVINHIKKSLSDISFVEKAIKQAKKEMLSQKAPSEKELRRIEKEIEANNTEMKNLIIALGRKTIPEELIENRIKELQEQIAELKQEMMEIKSTIDFIGSVDDINIVYHFINEFNNSFDEMDFEEKRLFLRYLIKEIVVTDYEVHIYMFFLPGIKDDLVFSSRTDMDSWP

SEQ ID NO: 4350 - protein, 552 aa, unidentified
  source 1..552: note = uncultivated organism
MRKCFIYARVSTSEQNKGEFTSIANQEKSCLHFIGIREEESWRHVKTLSDAGFSGKDLNRPSMIELMAEVEAGNVDVIVTYKVDRISRSLVKFYEFYKLLQKHNVEFVSATQSFDTSTSSGRLMLNILLSFAEYEREIISERTKDKMLASFERGEWQGGLVPFGFDYDSQKKLLYKNPEEAKAVEIIFNMFDKDKSSGQIANYLNTSGYRTKTRKMIRKGKEVIVGGKRIREDFVLNIARNPIYYGYLRFNDEIRKGNHEPIIKKSLFDRINQRLSKPKDSIELYNADRHVHLLKGIIKCKDCGSTMTPFPSGKKDSDGNSYLYYTCTDVIHKKNHSQCKLRSFSARTFENTVKKFLSDLGSNKSILAQCVKAANKDSKRSLTPLLAKQKDLQARREDISAKINRILEIMTDEDFLSDDIKKKYKTLVKDKEAIELEIEKVNIDIAFKSRDVLDIDIILRSLKNFSKIIDKLSLEDQKELMHLLIKEIRVSPFDHKNQKPPKELGAVCFKIRNKWICAEIDLYELPIPTTTYDDKNHKFVFLSNWLPQPTTL

SEQ ID NO: 4351 - protein, 512 aa, unidentified
  source 1..512: note = uncultivated organism
MTTFRRCAVYTRKSSEEGLEQAFNSLHAQREACEAYIKSQAHEGWRLVKTSYDDGGFSGGSMERPALQRLLEEVAAGRINVVVVYKVDRLTRSLADFARIVETLDGHGASFVSVTQQFNTTTSMGRLTLNVLLSFAQFEREVTGERIRDKVAASKRKGMWMGGTIPLGYDVRERELVVNEAEAATVRDVFDHYIRLGSVAELRVDLQRRGILSKRWTSSTGRTWGGAKFSRGALYWLLRNPVYVGRVAHKGHIYEGRQAAIVKRDQWEQAQALLSEKSASRQRRPIAPGGRPLAGRLFDDRGNAMSPSYATKRNGQRYHYYVSQARLQNDKARVGTIARVPAGEIERLVQEAVGTSDNGGLDSASELLRQRVERVVVHADRIEIVKAVTGGMPEGDEGEGRTIVVPAKLAHRNRAVVLDDGRAGPDPVLLKAFCRAHEWRTWLQQGEVLSYKELASKAGVTPGYVQKVLPLAFLAPALTRELLDGRRRLHGGLMARLNRGIPADWDQQFASF

SEQ ID NO: 4352 - protein, 643 aa, unidentified
  source 1..643: note = uncultivated organism
MNENRCAIYTRKSVEDGLEQEFNSLDAQREAGENYIASQKHNGWICLPERYDDGGWSGGNMERPALKQLIADIAAGKIDTVVCYKIDRLSRSLIDFAEMQTVFTKYNVNFVSVTQEINTNSSSGRMMLNILMTFAQFEREVIAERVRDKIAASKKRGKFCGGVPVLGYMPDPRTKKLYIVEEEAQTVRILFEKYLIFGSLKTVVHEANLLGLKTKEWISSKGRKHIGKPWDTGTLYRILSNPIYAGYIRHYNEQYEGEHEPIISRETWTKAQAIMRGNGCVTPRRRSAGQPFTGLVKCGHCHCAMTPTYTKQHGKKYCYYICQASTKNPDHICPLKRIPAGDLEQAVLRQLSGLFRAPSILRETLAAVREREVVMRNDLVKNCDSLQAQLNELKKTALDGEADFEEIKKAGERLVEVKQQLRTLKEPVCEEEVIAALSDTAGLWNFLFPGARRELLRLLLRSIEIFEDRISLTLNPDGLGELTSEMSQTGYFAMEHEDAREELPEIAQEALPDGSLKLTMRLAAKKVNGHRCVMIPAPGAERPRQSAVLRAIHNAQRWSEMLIKGEVKSISELAARLGKKPPYVTRILRLNTLAPDIIEAIYRGDEPEGLSLARLEKGFPDDWQDQRREFGFAALQHLSSIRS

SEQ ID NO: 4353 - protein, 541 aa, unidentified
  source 1..541: note = uncultivated organism
MQFFIYSRKSVYTGKGESIENQIEMCRQYIHAKFPGTNDADISIYEDEGFSAKDTDRPQFQQMLRDIKLKKPDFVVCYRLDRISRNVSDFSALIEELNNRSISFVCIKEEFDTSKPMGKAMMYIASVFAQLERETIAERVRDNMLMLARTGRWLGGTTPAGYSSEKQQEIIVDGKVKTSCKLKDEPNELRAVDRIFEKFLELHSISGVSKYLIKQGIRSRSGRYYSLPGIKEILQNPVYCVADKDALDYFTAKNSDVCFEEKDCSEKYGLLAYNKRDYKKKHAPRQSMDKWIIAIGKHRGRVSGKKWVAVQNIVEDNIPTGKKPAKMHNDYSLLSGLIYCEKCGSRLFAKARSGKGATPGLFDYVCSSKLRGGTALCSCQNIGGAQADEMVCEFLMKYTDESPSIYKLLEKLKHDLQGQIRENPLDSIEARMSKCSGEMDNLVRTLSQRDLSPAFIQRVNIQIGELDKELSGLAQERERLQSNTAKLADKAIQVELLAAALSSLKNNFSNLSIYEKRTLIRLLVQKIIWDGRDFHIFMDGE

SEQ ID NO: 4354 - protein, 538 aa, unidentified
  source 1..538: note = uncultivated organism
MPQKRAALYLRVSTGRQAEADLSIPDQRRQAQKFCAARGWDVAAEFVEPGASGTDDRRPELQRLLDMAMAGGAPFDVVVVHSFSRFARDHFALEYHVRRLRKAGVRLVSITQDLGDDPMSVMVRQVFALFDEYQSKENAKHTLRAMQENARQGFWNGSKAPYGYAVVDAEQRGAKTKKRLAVDPIEAEVVRLMFKLFLKGDGTSGPMGVKAVTCWLNEHGYRTRVGARWGIGPLHQILTRKTYRGEHRFNRKVWKTREAKPEADQVAVQVDPIIDAATFDAVQAMLKAKNPKATPPRVVTGPILLTGIATCASCGGGMTLRTGKSGRYRYYTCATCAQQGKSACRGRSIPMDKLDQLVTERLAEQLLTPARVSKLLAALMERQSSRDDDYALRLTALRGKLSDAEERLKRLYAAIESGIADPSDATLKDRIAAVKTERDIAQVALDRAVAEMRPDTKITEDKIAAFTEAMRANVLTGETPFRRAYIRSVIDQVEVDDAEIRIIGRKTVLERLVMGGGAAPAGVPSFVRKWRTRHDSNV

SEQ ID NO: 4355 - protein, 566 aa, unidentified
  source 1..566: note = uncultivated organism
MNIEPKRCAVYTRKSHEDGLEQEYNSLDAQRDAAKNYIASQKANGWVVVPESYDDGGWSGGNVNRPALQRLMTDIRAGLIDIVVVYKIDRLSRSLTDFAELQTEFDKYGVSFVSVTQEINTSTSSGRMMLNVLMAFAQFEREQIAERIRDKLSASKKKGKYVGGLLPLGYRGDSENMRMLVDPEEAKTVRLIYDEYLRTGSPKAVQRLLHDRGVRGREWVSKKGVRHGGAPLTLAVIRKILQNPIYIGKLRYRGKIYDGEQDAIIPTELWDRVQSTFKSSAGSGRKRSGRDLKPFAGLVRCGHCDAPMFLASMTKADGKRYEYYVCHVDEKRAHHECPLRRVPAAALERLLLNKIAALLKTPTMLAKICDGELRNVLDTRQAGEALENVAVLWNEMFPVEKYKLIHSLVRRVVVLEDEVRIVFHAEGIVTLLKEAGVDFSISAESTGVECVLTVSCKLRRYGGLVKLHASDATSDEPRLPIQTALMQAHRGMEQIVSGKATTMRQIAGALKMDRSFVARTLQLANLAPDIVKAIWENRQPVSLTLDKLRRGIPDSWEEQRKLFLAE

SEQ ID NO: 4356 - protein, 548 aa, unidentified
  source 1..548: note = uncultivated organism
MKPDRRTIRCAIYTRKSSDEGLDQAFNSLDAQREACESYISSQRHEGWKLIPAHYNDGGLSGGSLDRPALQRLLEDIADGKVDLVVVYKIDRLTRSLADFARLVDRFDAADCSFVSVTQSFNTSTSMGRLTLNVLLSFAQFEREVTAERIRDKITASKKKGYWMGGLLPLGYDRHPDPKMQTLVINDAEAESVREIFSLYDQHGCLRQVEQEVISRGYRSKRRTFSDGKVTGYKPLSRGQINFILRNPVYIGRIRHKQESHEGIHDAIVDQDLWDRVQERLDQKSPKKSRRPSRSGALLTGRIFDETGDFLTPTHSQKGSRRYRYYVSSRLLAGSPTDASGWRLPAKQLEDAVSETVFRHIDGDVFRLLSAPTPSLLESLKRNLAGFSRTMATDLVERVQVSAGRLDITLSRDAIAEWLGVAEEEIDRSHLQFEAPFGVRRRGKESRLVFGAIHTAPDPKLIRMIALAHSWLEEIKSGVLMKDIAARYGWQTLMVRQRIQLAFLSPAIVETILEGRQPDGLTLTQLVTSDIPLDWNEQWVALGFEAAP

SEQ ID NO: 4357 - protein, 544 aa, unidentified
  source 1..544: note = uncultivated organism
MTRAAIYVRVSTARQAERDLSIPDQIVQCRAWCARQDIEVVRVFSEPGASALDEDRPVFQEMIHTAKRSDKPFDLVVVHSLSRFSRDSLHSELYIRELRKVGVELVSITQEVAQDPTGEMFRKLLHIFDEHQSRETAKHVHRAMLENARQGFWNGSRPPYGYGVEIAERRGNKDKKVLVIDEAEARVVRMIFDMASGTEGRPMGVKAIATWLNERGILRRGRRFTTGGIHDILTSTTYHGLHHFNRTDSRNGRPRPPSEWVPFVVPAIIDEKTFNAVQALLQSRAPKRVAPRIVNSPTLLAGVARCGHCGAALIQNTGKGGRYRYYCCSTRLKEGPFGCTGLRMPMDKLDRIVIDEVSEQILQPEHLKDLLGEYLRTAIEREDRNRDRLRQMRQDHKEAEAGIARLLELVEKGLMDAEDASMRERLVNLRFRRDELADQIADLTRRLAMAEPVITPEKIEKVALLLREKLYSGPPDLRQAYARLLLNEVRVDDREIRISGSKAVLARTAAGGVARTTPAVLSFVREWRPAQDKHNEYISPFVLL

SEQ ID NO: 4358 - protein, 542 aa, unidentified
  source 1..542: note = uncultivated organism
MPKINCAIYTRKSTEHGLDMEFNSLQNQEEACKAYILSQAFNGWEYVKTYSDGGISGGTMERPGLQALLNDIRFGRIQVVVVYKVDRLSRSIIDFHKMMQEFDKYGCNFVSITQSFDTSNSMGKLTLNMLLSFAQFEREVSAERVRDKIAASKAKGLWMGGTPPVGYNLKDKQLIPNPQEAELVNLIFNKYLELENMLEVANWLNQNGYHTKAWIPRGGKLRGGKAFQKSSIQRILTNPVYIGKVAHQAKSKVYTGRHEPIVPKNIWEAVQDTVRRRITNPQAFSHYQTHQTVLAGKLYDDKGQAFRLTSSKKRGKKFLYYYNGVGGRYLPVEQLDGFVLKTLKKTDFDDLEPLADWDSLTDAQMQKWVVKVVCQSADKKHYLSIFLDEKQIKTDLSVCPRISGQAEARPLSCEKLDGALYVRDSFVVDNVSSVKLQNGTARNILTVRQLNESLVRGLSRGWQLKRLLEKGKSLRECETASGMNKRTFARYLNLCYLSPKLVADILEYKNPRNMGLKELMNLTEGETGFGEQEKRWTNYDNM

SEQ ID NO: 4359 - protein, 699 aa, unidentified
  source 1..699: note = uncultivated organism
MSKLLEKIDGGIRALRVVIYLRLSDEDKNKLNKEQLSESIKNQERMLRDYAIEQNWRIVGVYNDEDYSGADANRPEFNNMIAECEKGNVDIVLCKTQSRFTRDMELVEKYLHNKFTEWNVRFVGTVDNADTANVGNKKSRQINGLVNEWYLEDTSINIRDTFKNKRENGLFTGSFAPYGYIKDPKNKNHLLIDKVVEYNIKNIYYDYANGASLDSIVKRLNKNNISSPLEYKKMNGSKIHIPILKDYTNYKEISKTGTYVITNSFFNQQGQILYNLTTIDLITKDKINFANNFEVKLLNNSNSKVDIYYSTKSLEELNVKNDNGKLYYNNLSFNDDNLIKMNRNDILPNNATCIITHTKTLDRLNEIKYEIELVLKENLKQEKYMYLINTNSSNIDVDIIFKSIIRKKFSWSTQTIKKILKDETYIGNMVQFKTTTVSYKNHKIIYNNREKQIIKENTHEPIIDRKIWHDVQERLKGNAKSTKKGNVHILATKLYCDNCHQVFYKCGTSLTSNYLCCKDRASKWSNCDNNKFIREDELHNFILDNINSLINKYYKETDLIETNNKMIEKDLFKEKIYNLKLEENKLEKNLISKFTYSQKLYEDYSNRILDMEEYVALKTKYKQDSYLIEKRIQTIKKELMSIQNKKESMKDIKSIFRKYKKIDSLSREIINEFIDKVYIGKYDSINNSRKIRIIWNFNL

SEQ ID NO: 4360 - protein, 519 aa, unidentified
  source 1..519: note = uncultivated organism
MKQTRKTSPKNRCAIYTRKSCEEGLELEFNSLHAQRESAEAFIASQQHEGWECLPEQYDDGGFSGGSLERPALNRLLEDIKTGRIDCVVVYKVDRLSRSLLDFSRIMETFDKHGVSFVSVTQQFNTTHSMGRLTLNILLSFAQFEREIIGERIRDKIAAQRRKGKWAGGIPILGYDVDRSSASPKLVINAEEAVQVRRIFTLYQELGSLLPVVKEVNRCGWCNKEWKTKNGLQRGGKAFDKCSIYTLLTNPLYAGLIRHKDLIHKGEHEPIIESSIFEAVQRQLKKNGRGKGNHLVNKHGAILKSLLRCTACQCAMAHTFTRKKEKIYRYYSCINAIKNGRDSCPTPNLPAAEIEQAVLEQIRAIGADAEIQNLVIAQINASQNKQLEELQMHRQQLERQLSRDHAEVGKLALVHDPTEATSARIADLHNRISKCETDLMRVVSSLARLESRTIDRLTAAETVRDFDEIWEALTSREKSRLIRLLISRVEFSVADSSLAISFYPDAIRSLQKNTKEQTS

SEQ ID NO: 4361 - protein, 558 aa, unidentified
  source 1..558: note = uncultivated organism
MIHQRCAIYTRKSTEEGLEQSFNSLDAQREARVAYILSQKHEGWAELSERYDDGGFSGGTMKRPGLQQLLKDIGAGRVDVVVVCKVDRLTRSLTDFAKMVDVFDGAGVSFVSVTQAFNTTSSMGRLTLNVLLSFAQFEREVTAERIRDKVAASKRKGMWMGGAIPLGYNVVDKALVANQHEAAAIQTIFAEDLSQSSVRQLSVRLDALGVVSKQRTNRHGHVSGGTSFSRGALYSILRNPIYIGKTRHKEQLHEGLHEAINDNATWKQVQIQLADHGGKTISAVRRPAKRPLDGVLFDSTGRAMRTTYASKSAHTDGTTRTKRYWYYTSVPSGSENRTEIERLPADEIERVVMKGLEERLLDANWLADQITGQAGEQALAGILRTIEKHGFEADATNDDALAQTFPDIIDRIDAQRDRLVVSVNLAVLVEPDVAQIPIPAAFDIRFQRRQNGRAKPIVIVGKDAPQQDPDLITLVADARRWAGELIEGKASSVLEITDREGLRSGSVSCILPLAWLAPDISTAILEGRQPPHLTTKALRALPELPLEWVEQRQILGFA

SEQ ID NO: 4362 - protein, 571 aa, unidentified
  source 1..571: note = uncultivated organism
MKAAIYTRKSKFTEEGESIENQINMCIKYADNILGITDCEVYEDEGFSGGNIDRPQFKKLMKDIKTKKFSHLICYRLDRISRNVADFTSTLEILNKYECSFVSIKEQFDTSSAMGRAMMNISATFAQLERETIAERIKDNLRELAKTGRWLGGPAPMGYRSVEVENNDSKGKSRKKHILELNENEIETIKLVFELFLKYKSFQRVSRELERKGLYSRKGSVFSRELVKQAITNPTYVIADKKLFEYLKSNSVEIYEESKINGIYGAMAYNRRKENGSFAPMSEWIVSVGDHPGVISSETWIKCQQIKKEISEKTSNRQGTSETALLSGLVVCAKCGSGMASRQHKSKKYHYRYYTCNLRNKSAARCDNDALNAYDAEDNVVQFLKSLTPEEIIKDYEKSKNSNISKIDNSKIIDSYKKEIEENKKCISGLIKKMAIEDDEDLLQDYKDERKNLKYRNTELESIIAELEYKNEQLTDITESLDELLERFDQFKRFYDYAKNIEDKKILIRGLVKFITWDSESADLRIVLVGSDEKRPGQRSSFSPLSDRYRRNGSCRNDCYYGLSTYGECWY

SEQ ID NO: 4363 - protein, 560 aa, unidentified
  source 1..560: note = uncultivated organism
MTDAAPASPDVTAGPAIAKAALYLRVSTGRQAESDLSIPDQRRQNTAYCVAKGWDVAAEFVEPGNTATDDRRPAFQTMIDAALVKPPTFTVIVVHSFSRFFRDQFQFEFYVRKLAKNGVRLISITQDLGDDPMSVMMRQIMTLFDEYQSKENAKHTLRAMKENARQGYWNGALPPIGYRIVAAEQRGAKIKKKLEIDPIHADTVRLIYRLALNGGGDRGPMGIKSITTYLNERDVRTRDGGRWGIASVHQILTRTTYIGQHRFNTRDHKTRTAKPEAEHAVMDVPPIITEAEFEAVQAALKARSPQWMPPRAVSGPTLLTGICFCAFCGGAMTLRTGKGSAGGMYRYYTCSTKARQGERGCRGLTVPMDKLDRAVVNHLEWRLLDPARLTTMMDQLLERREEWNERRRGHIAELRKRAAEAEAKLKRLYEAIENGVVDMADPSLKDRIAELTAVRDQAQADAERATSAVERLGPAITPDSLRRFALAARRKLRNEDGTYRRDHLRALAQRVEVVDPSEIRIMGSKTELLRTLVAAASVESAAVGVRSFIPKWRARKDSDL

SEQ ID NO: 4364 - protein, 644 aa, unidentified
  source 1..644: note = uncultivated organism
MRKQKEKVKEKIRCAIYTRKSVEDGLEQEFNSLDAQREAGENYIASQKANGWICLPDRYDDGGFSGGNTHRPALQRLLADVQAGKIDIIVVYKIDRLSRSLLDFTELESVFEKHGVSFVSVTQEINTSTSAGRMMLNILMSFAQYEREIIGERIRDKIAASKKHGKHCGGSPVLGYESDPKTRKLSVIPNEAEIVRKIFSVYRGVGTLGETALRINRLGYRTKIHVSAKGIRHGGLEWDTGKIHKILCNPLYAGYVKHYTTLYEGEHEPIIERKEWEHVQTLMKEHNNGTSVRISRSEMTPLCGIVFCGHCRCVLTPTYTKKNGKRYTYFFCQKHSRNPEHHCPLRRLPSGELEDMILTLLSGVLQSPALIKETLTAVKKGQEIKIAELRKEETALKEGMLKLKNSLADGLADLNEIKTIGEKLSEVRKDIRSYQFNVTEKDIMIAMRDTGALWKELFPAAKFEFLKILISKVTVWQDRIQLSINPEGLKRLVGEMTISEYFQEEHNSDDKEIPEVVQTLNDDGTISLSMPIQTKKIDGHCRIIHPFGGETPKQNAMIRAIRRAQLWEEKLCNGEAQSILDLAEKVGFKEGYVRRLLALNSLAPDIVSAILAGNEPDGLSLERLRKGFSDDWEEQRRELGFAAT

SEQ ID NO: 4365 - protein, 508 aa, unidentified
  source 1..508: note = uncultivated organism
MRVCLYTRISTDEENQPTSLHSQRERLEAFVRSQEGWHVVAHEEDRATGTKLDRPGLQAALELARLGKIDLLLVYRVDRLSRKVKQLAQLAEELDRLGVALRSATEPFDTGAAAGRMMLQMLAVFAEFEHATIVDRVTAGIERRAKQGRWATGKLPFGYRRNDDKDVVLDEREAPVVRRVFQLYARDRLGTTSIARLLADECAPGPARGWQPAVVQWLLENEAYLGRVHWRGESYPGLHEPLVDEPTFQAAQALLRERGEDLTLRRGNRSEFLLSGVIRCGRCKRAYVGMSAKGNGGVYHYYACSGRQKLGRKACDGERLNRDKLEAAVLNQLASLYRDGDLIADALHRAYNQQNADRPALEEQQRSVGEEIRRAERALDRYYQAFESGDLEPGQFKTRLADLDIKLDTLREQEHALVSQLADPAESFDPQALATVAERLRDTLAAGRPEQTKALLRLLIKELRVNGRSEILPTYRVVAPEVCATPSSVERTGIEPVTSGLQSRRSPS

SEQ ID NO: 4366 - protein, 536 aa, unidentified
  source 1..536: note = uncultivated organism
MDKKLTKEKPLIKCAIYTRVSTSEGLEQEFSSLDNQRESAESYIQSQKSEGWIILPDRYDDGGFTGANTDRPALQKLIEDIKAHKINCVVVYKVDRLSRSLLDFSQLLEFFDQNSVAFVSVTQAFNTNTSMGRLTLNILLSFAQFEREIISERTRDKIGAAKRRGKWVGGCVPLGYNLNKENHKLIVNPEEAKIVRELFDLYLKEHSLLEVAKIANTKGYRTKVRKLAEDKQGGGVKFSSTGIEKILKNAYYAGKVRYQNALYPGEQERILDDEIFMKVQDALHTNPAKFGSRKPIGKNLGLLSRLLRCKACNSSMYLTHSVKHGNIRYTHYVCLNAQKRGYQECPTRLVNAGLMEAKAMEYLRKLSDDQRLAPDVWESATLAQKRLALKNIIKEIRYDGGTGILEIALNSTQKSHAFNVSKAELKYHAVTPKDRLIQSEPQLRQNLLLACQIQALMDKDKAKDLKEVSGWLNLSQQRMNQVMSLLFLSPRIQEEIVLQNDPCLFEIPEYKLRNITDELEWDKQYAMWQKLAQKTA

SEQ ID NO: 4367 - protein, 564 aa, unidentified
  source 1..564: note = uncultivated organism
MADKRVRCAIYTRKSSEEGLEQSFNSLDAQREACRAYILSQKHEGWTALISLYDDGGFSGGTMERPALQRLLADITAAKIDTVVVYKVDRLTRSLGDFSKIIEVFDSHGVSFVSVTQHFNTTTSMGRLTLNVLLSFAQFEREVTGERIRDKIAASKKKGMWMGGSVPQGYDCVERRLVINLEEASIVRKIFREYLRLGCVSRLKIQLDQKQIRSKARVSAAGRTYGGATYSRGALYHLLNNRIYIGEIVHRGIVHPGLHEAIVPRDLWNKVESRLKQNNRAHRSEKSRSTPSLLIGKLFDTDGKRFTPTHAVKNAKRYRYYTSQTVVRNDGIKPAIARLPAQELEQFVISQVGLLLQTPSRFTAGMKNSPVKGAATERIEHLAKQWPKLETSKQHGVVRNILKRVTVGQTTVWIEIDRIRLLATLLGQSADSLRSSSSPKLEILRLTGDFRILRRGNELRLISPDVESPVQEKRVPSLVKAMARAHSWYERIVTGEFTTVNQVAQKSGLTLRYVRCILQCGHLSPQIVEALLAGKHRPNLTLKEFLQGIPLDWREQEMKILRRF

SEQ ID NO: 4368 - protein, 542 aa, unidentified
  source 1..542: note = uncultivated organism
MTELKGRAVSYLRLSKDDVSKGKYKKFEASNSIVNQRAIVERTVNKYPDLMLVGEYCDDGFSGMDFNRKDFIRLEKDAAAGKFDMVLVKDISRFGREQTGVTIAINRFISKYRVNVISITEDYNCAEDLDGLEMKIKILLNEFYSQNISEKVRAEVRSKQELGKFIGAFPSYGYKKDPTDRNHLIIDKEAAAVVKRVFDEFLNGKGKLTIARDLNRDGIPCPSLYKELNGFNYKNANKLDSTRQWTYSTVNKVLHNRIYTGAMVQGKSKLSKFDRECKVFDDNDNIRIKTKQIEEDKWFIVENTHEPIISNDEFEITRGLLKRSSRTINFENISLFAGMIKCGDCGKALVKNKSGDRIYYICSKYRQLGKDACTRHTVGEDMLSKYILKELYNDAKLYRDGLNTLRQREEEYKKRISENDLSLEISNYRKSADKLQEQKRVWIRNAVNGVITEEEADAEVRRLSEEQERINKAISALEKKNGKPDSLKISENSLIEGLTNEDLSVLTRKILQTYIKSITVFEKEKKLQIKIEKTYISPEKII

SEQ ID NO: 4369 - protein, 508 aa, unidentified
  source 1..508: note = uncultivated organism
MNVGIYARVSTDEQAREGYSIAAQLHTLNAWAVVKGATSVAEYVDEGFSAKNMRRPNVQRLLTDCMSGKIDMVIVWKLDRLSRNLRDLLVTIEDIFTPNHVELVSATEQIDTATPAGRLMLNILGSMSQNERENTSQRVIATMNDLARQARHLGGKPLYGYSVTPDGFYIVNPKEADAVRKAFELKLAGMGYGHIISMLATSGHLTRSGKPFSKNTLCDMFRNPRYKGTYIYNRAEAKRRSGARNNRASKSESEIIRIEGGMPAIVSREVWEGVQNIMRGNNKSGGRAHAKHVYILSGLIFCGCCNAPMPIKNMGRNRDGSYRRAYYCPNHCQSPIPFASADTAIVDYIAHVAQHGDLMERAINIAQSFDAMQKSDAEELVEFERAEIAKLETKRANLIEYVAKVGATAGAVFASEAQKLTDDINAGHKKIAQLLAQKGDIDLDLIRSRVHEMSDIKNATAEDQKIRINQVVKQVIAYPNRFDIALRTTAVGDPSSIHAVVVMLTLGR

SEQ ID NO: 4370 - protein, 566 aa, unidentified
  source 1..566: note = uncultivated organism
MPKDDVRTIAIYSRKSKFTGKGESIENQIELCRQYISSHYGQEEAATAVIYEDEGFSGGNTDRPQFQQMMSDARAKKISAVVCYRLDRVSRNISDFSGLIQELERLGISFISIREDFDTCSPMGRAMMYIASVFSQLERETIAERIRDNMHELAKTGRWLGGTTPTGYASESVSHVTVDGKSKKACKLSLIEKEADIVRLIFSKFLETNSLTQTDTFLLQNHITTKNGRNFTRFAIKNILTNPVYMIADEAAYRYLSESGAELFSERSDFDGICGIMAYNRTEQKHGEAHKIRPEDEWIVAVGKHPGIISGSDWIKAQTYLEQNRSKSFRKTRSNTALLSGILLCGCCGDYMRPKLTKRTNKDGELVYTYLCSTKERSHSERCAIPNISGNLLDRIVCTEIKKLSEDGSAFVKSVENAKKDILSDKGDFSENIEELKKSFSENEKAIENLTKSLSENSESSAAGYIIKEMERLHKKNDGLKSQIDELENIRKRQIINGKEFDILRDMLSSFAGTVDIMSAEQKRAAIRACVRKIVWDGENVHIYLYGSDDDETNNTLEIPLSEYSK

SEQ ID NO: 4371 - protein, 532 aa, unidentified
  source 1..532: note = uncultivated organism
MSRQNTEGSLALQERKVIVIEAAERPETQKLRVAAYCRVSSDSSDQLGSFIAQIHYYTDLITQNPNWIMADIYADEGISGTTAGRRPEFQRLLADCRRGRVNRILVKSISRFARNTKECLETIRSLKAIGVGVWFEEQNIDTSQMSGELMTAVFAAIAQKESESISENQRWSYQHRMQSGTFLPSSMPYGYVIRDRKIEIDEEQAEVVREIFSSYLSGMNMREIANRLNDAGIPVKSGKEEYRWQYTAISYILSNEKYIGDSLWQKTYSTDTFPVQRFKNNGEREQYYASGTHLPIIDRATFQAVQELKAVREEMVRHRVKRENPLNQMIYCGTCGTLFRKKSCRGITYWECRNHNHGKDNCPITQIPEREIHAAFLRLYHKLKLHGEPILKELLSNLRAIRERRMLWSEDIIELNKRICDLTDQDHTLFRMNQCGLVDPDIFISQSNELARQLTAAKQEKERLLAAADDDSIPKTTELLETLESAPEYLPRFDGEIFEELIEKIVAESNESLRFILKNGLELTEKIERTVR

SEQ ID NO: 4372 - protein, 557 aa, unidentified
  source 1..557: note = uncultivated organism
MTEPGRKVRCAIYTRKSTEEGLDQAFNSLDAQREACAAYIASQRHEGWTLAKGAYDDGGCSGGNMDRLGLKRLLADVEAGKVDVIVVYKVDRLTRSLSDFAKIVEVLDGRNASFVRVTQSFNTTTSMGRLTLNVLLSFAQFEREVTGERIRDKIAASKQKGIWMGGPVPLGYDVRDRKLVVNEADAATVRHIFSRYVTLGSGRKLIEELRADGYRTRIRKQRGGIIGGVTFERGMLFHLLSNRIYIGEIVHKGIAHPGEHQAIIDLELWEAARTLMAANRVERRTRTNAAHASLLAGIIRDRHGRRMSPSHAAKSGKRYRYYITHAAELREDEPPAFRVSAHDLEMITVERIREMLLDKRMIHDVVSDHAADVSSIDAAIARALKSADHLSTQYGKRSIVTALVSQVRLHEDRITITIDRAALLRRLGIAVDHCDAPITLVAPAAKVRTGSETKLVLTGNADAVPGRDDQLIALLVEANALLSTLLAAPGGGIADLARDTRQCRKRLTRLVRIAWLAPDIVKTILDGRQPASLTTGKLLSNAIPITWAEQRSLLGIG

SEQ ID NO: 4373 - protein, 530 aa, unidentified
  source 1..530: note = uncultivated organism
MPVIKCAVYVRKSTEHGLEQEFNSLLNQDESCKAYIASQAFNNWEYVRTYTDAAISGGTMDRPALKQMLDDISKGLINTVVVYKVDRLSRSILDFHNMMKYFDKYNCNFVSITQSFDTSTSMGKLTLNMLLSFAQFEREVSSERVRDKIRASNAKGLWMGGNPPLGYDIKDKKLVVNEAEAQQVQHLFEKYLELQSVKRLIQYAEAQGIYSKKWISKKGNQKGGNKISLMGMHRLLRDMIYIGQIAHKKANTTAKGEQDAIISKELFNEVQQALKNNSNNKTESHRSPNLLSGKLFNSQGERFINQVKTNKNHTKIHYYAQKGLFIPAAPVDEVVSNTISEFLNADLSHLPPDSASALKSVNLAALSGVQKRDFIQAIVDKAIFSNKQLIIYLDISPNSVRPFITDVYINQSSSPMEFITNEYTVTITTPIVFRRYTNTKFSKAKTSLLTITENNNLIVKAFATAWRYREMYEECGDVDTVAKKVGSTPRTIYKYLDIAYMNPKRANQILDGTIICTYKNLLNDSKQYSL

SEQ ID NO: 4374 - protein, 529 aa, unidentified
  source 1..529: note = uncultivated organism
MSAKHAATEPRGVASDISTIRCAIYTRKSTDEGLDQAFNTLDAQREAGEAYVASQRHEGWMALPQHYDDGGYTGANMDRPALQRLLADVAAGVVNCVVVYKVDRLTRSLLDFARIVEVFDKHGVTFVSVTQQFNTTASIGRLTLNILLSFAQFEREMISERTRDKMRAARRKGKFVGGNLILGYNVAPQGGSLVVNDAEAGRVRAIFQLYLDYGALIPVVEELNRRGWTLKAWTTREGKPVGGTCFTKSKLYNLLTNYAYAGKVHYEGKVVEGEHERIVDDATFDRVQELLQRNGRKGGRTLRHKYTALLKGLVHCGTCGAGMIHTYTKKGARLYRYYVCSKAQQQGWNQCATRSVSAPALEAAVVEQIRSIGRSPALLAEVLRKLAGNAQARSDEVQRQIAQLDTELNTVSAEMAALATTASTPGSAAKEALDRLADLHQRAETLEQQRSALLRESAADGPGIDANKVQRALEQFSPLWEQMTGWEQTKLIQSLLEEVRYDGAAGVVTLGFRSSGLKELCQNDAVQHA

SEQ ID NO: 4375 - protein, 587 aa, unidentified
  source 1..587: note = uncultivated organism
MSSDQKPILRCAIYTRKSSEEGLEQSFNSLDAQREAGEAFVLSQRHEGWRTLPARYDDGGYSGGTMERPGLKQLLEDIQANKVNVVVVYKVDRLTRSLSDFAKIVETLDAKGVSFVSVTQQFNTTTSMGRLTLNILLSFAQFEREVTGERIRDKIAASKKKGMWMGGPVPLGYDLEARKLIPHPAEAELVRNIFALYLKLGCVRKLLAQLKRENTKTKTWVTKKGIRLGGVSFAPGHLYYLLRNRLYIGEIRHRDKWYPGAHPGIVPRELWDKVQAQLDSNLRTQRKRAREQSSSLLTGLIEDGEGNRFTPSFTIKRGRRYRYYVSQAVIQNPASQQSRPTRLPAHEIESRVTERLQAFLRSDAEVFDELSATAESPAVLHQLVAGAKKLAAKLSSLPADDLRDLLTGILQRVIIQENSIQLMIRKSSLRELLEHGDQIIAASLVGLRKSTEPAEILCLTIEAKRKRYGGEIHMVVPPNSNAPIRHPRPALIKAVARGHAWYEKVLEGKVADMRSLARETGLTPHYVRNVFACAFLAPDIVEAILEGRQPLTLKFEHLYKNVPLSWAEQRQQFGFPQNPRPAKSVLQ

SEQ ID NO: 4376 - protein, 552 aa, unidentified
  source 1..552: note = uncultivated organism
MKAEKNTAPVTLNLAGCQLQNTFLCEAAHSRRYSAVRSQNYVLIFSESIMGEMQMIGIYCRQSVDKKDSISIEQQRDTCVRVIGDAKYTVFSDKGYTGANTNRPGFEKMMKAVETGIIEKVIVYKVDRISRSLLDFVGIYSEFEKRRVEFVSCCEQFDTSNAMGKATLQIIMVFAELERNMIQKRVRDNFYERAKKGLYLAGAAPYGFQRKEIIIDGIHTHMLEPESEHPEKLSNVRWMYTDYRLNRSLGRIAKILNGKKALTNRGKPFTAVSVSRILRNTVYVRADVEVYKYLASKGAEMNQPVENYVGIFGCTVYGRRKGKTVRKFSDLRGENVQMNLHEGIITSSEWLAVQKELDRNKPLSRSGKSSSTWLTGLTKCRFCGKGVTVVGGQKNGRRYLSCGGKKEHSCQGRTACMTFDEIESAVKNSLIARIKGFEFSERGFTAEENELKIRLEKNKAEAEKLLDKVADAGESLMHYINERIEMLEAGSRNIMEELKKLHEQAGTEQDAEKIRQTLTEWNELSFNEKKLTAQAFIEKIVVGDGTIEIMYR

SEQ ID NO: 4377 - protein, 573 aa, unidentified
  source 1..573: note = uncultivated organism
MGYMKIAIYIRVSTEDQAKEGYSLEVQREYLESFAQREGYEIFKVYCDDGISAYSTRREALQQLLKDTKQKRFNLVLVYKIDRFSRNLKDLLTLVDELSSYGVAFKSATEPFDTTTSAGKLMFQQLGSFAEFERNRIAERVFPGMVKGVQRGNWQGARFSPFGYVYNKAKKLLEIEKREADIVKLIYTMYLSGKSTQDIAVYLNKKKYQTRTGKQFYNKFICDILKNRIYTGKIVWNKKHYDKNQRTKKHYKYIKNNPSKIIIAQGKHTPIIDEQDFEEVQKLLAVKKKRWRPRAKNKEYLLAGLLTCAKCSHKYHGVSSISNHRTNQKKRWYRCSGPYVNRVRCTNRAVKAEDVEPEVTKIVAQLVENDRLKQYRWTTGTRSEIASSPLATRNDVNQAKNKLKINQEKQSKLTDAYLENLLGEDVYRDKMEALRGEEDGLKKLLAGYELREIESERSEGYLNRVKDFLEGYDDSLTKVSFEQKRQIAELLFKNIKIAPAIGGARPQKRINFSLFAPFNFLFSESERKSQCQKNQIFTKIRRKKSTSVPSAGGWLRYSRTMEGVASLICSLEE

SEQ ID NO: 4378 - protein, 524 aa, unidentified
  source 1..524: note = uncultivated organism
MTRTRTPARPGTPLVRCAIYTRKSTDEGLEQEFNSLDAQREAAEAFITSQAGEGWRAMPLRYDDGGFTGGNMERPALQRLLADIRAGKIDCVIVYKVDRLSRSLLDFARLIETFEKHKVSFVSVTQQFNTANSMGRLVLNVLLSFAQFEREIIGERIRDKIAATKRKGKWAGGFPVLGYDVDRSGPSPRLVPNAREAARVREIFRLYLDLGSMLPVVDELKRRGWKNKENRTSKDEVRGGKPFDKCSLHSLLCNPVYIGMVRHKTEVYPGEHEAIVEKALFEQVQNLMQKNARCGGPMVRNKYGALLRGLMFCKGCDRTMVHTFCNKDGRLKYRYYTCTRAIKEGRQSCPSPSLPAGEAERVVVDQIRAIVTDAGLRAEVIRQANAQYDAEIAEMMDERVRLERELTRHHAEIRRVAVSGNSDAATTTLIADLHERIAQATARNAELDGLIDDRHKARLTEDDVRAAFADFDRLWDTLTPREQAKIIALLVARIEFDPTASAISVTFHPTAIRTLMQTKLGGAA

SEQ ID NO: 4379 - protein, 504 aa, unidentified
  source 1..504: note = uncultivated organism
MIREDAIYARQSVDRLDSISIESQIEFCKYETRGAPYRVYQDKGYSGKNTDRPGFQEMLAAIRRGEIKRVICYKLDRCSRSLLDFANMMEEFQHCKVEFISCTEKFDTSTPMGRAMLSICIVFAQLERETIQQRVTDAYHSRSQKGFYMGGRIPYAFKLEPYAILGKRTSRYVACPEEADILYQIYLYYSDPQVSVGDVITYLETNGIKNSRTKDGHWSKSYITSIIKNPIYVKADIEIYHFFKNQGAVILNNPEDFIGTNGCYLFTDSDEKRKTLRLEGHKLVIAPHQGFIPSDIWLKCRRKCMNNKQVAKPVKAKNTWLAGKLKCPLCGYGLIIRKWKYNRYYMCSHRLNNIDSCEGVGGLIAEDIEQIIFDALKKKITDLGALHNQSVVYDNPRIGELKIKIAQAQKEIELYISKMSQANETVLRYINEKIADLDAKKEVWERELGQLEDQKRSTTLNLDEISDCMNYWEMLSNPDKLKIVDAFILSISASKEGVSIQWKL

SEQ ID NO: 4380 - protein, 558 aa, unidentified
  source 1..558: note = uncultivated organism
MNITDKKVIKCAIYTRKSSEEGLEQDFNSLHAQREACEAYIKSQQHEGWILVDKQYNDGGISGGTLDRPAVKQLFNDIEADEVDIVVVYKVDRLTRSLMDFVKIVELFDKHSTSFVSITQHFNTTTSMGRLTLNVLLSFAQFEREVTGERIRDKIAASKKKGLWMSGMAPIGYELKDKKLTIDNANAKKVKTIFAKYLELKSVPELKRYLEESKIKTRAGNTFTKGHLYRLLQNYTYIGQISHKGKVYNGEHEFIIEKEIFDCTQNLLSQNRIREKSSINSKDPSLLAGKIFDDKGNYMSPSHSNKKGRRYRYYTSQALIQFRKHEAGSISKIPAGEIETIVRNEIRSFLFKTINIQKHIENYEIDKQKDLLSTIKNLKTHLRYKLDNIFIRTILSKVILHKEKVDIILCKNRLIKVLEAIAYDTSYPEELKEESENPILMSKFIRISATSKNGSVLIISASQKQEININSQLINAIAKSYYWHELMMNGEITSSTDILKIENEFNKSYINYILGLRFLAPEIIESILNGKQPRDLSLKNLFDIKTSNWEEQRKILCF

SEQ ID NO: 4381 - protein, 559 aa, unidentified
  source 1..559: note = uncultivated organism
MARVSRKQTVSPAAPVLVERVYCVGLYVRLSKEDNGYHTSDSIQMQQCLLEQYVKTQQDMKLVGIFCDNGATGTDFDRPDFERMMEAVRRREIDCIVVKDLSRFGRNYVETGYYLEKIFPFLGVRFVAVNDCYDTLKCADGDEMVVSLKNIVNSLFAKDISKKSGTALRRKQEKGEFIGSWTPYGYLKSPEDKNHLIIDPETAPIVRDIFTWRLEGLGYDEIAKRLNEQKILCPTMVRFLRGEFKKDSPRTVGTRWVAQTVKNITNNMVYAGHMAQGKQIRSLCEGIPRKEMERQDWIIVRNTHTPIVDEDTWNRVQRINSEAKTKNTEKRQLPKTENLLVGMVYCKDCGRTMGRYKNCSRKGHIRYTYCCRIRKASKGMSGCTLKSIGEQELFDIILKSIRIQIAATIEQENLLRRLKAQPEYQKTKRKLESSLAEIQTAISKNMARRAALFESYNDNVVSDEEYLYMKQRYDVQAAELLSRQEQLLAEQVVYAKTLSPENEWIKACRKYDGVKQLSRAMVLELIHHITIEGRNDVHITWNFKDEYQTLISYTEGVQV

SEQ ID NO: 4382 - protein, 569 aa, unidentified
  source 1..569: note = uncultivated organism
MSNEHKAIVRCAIYTRKSSEEGLEQSFNSLDAQREACQAFIASQRQEGWKALSTLYDDGGYSGGSMERPGLRQLLEDVQANKVDIIVVYKVDRLTRSLADFAKIVETLDARGVSFVSVTQQFNTTSSMGRLTLNILLSFAQFEREVTGERIRDKIAASKRKGMWMGGTVPLGYDVKERKLVVNPEDANLVCELYRLYLKLGCIAKLKAHLDGEGITSKVRVSAAGRELGGTSYSRGALYHLLRNRIFLGETSHAGQSYRGEHEAIVPRELWDRVQAQLKSNTQGLSKRPRVTSPSMLTGLLRTADGNLFTPSHTVKKGRRYRYYICGTARPCRLPAHQIESLVLSRLKSFLVSANDVIDLLCLPSDSASSIQKLTTEAQNSCKGWFSGTATSTAAIVSKLVNGVVVHLEKVEVLVSKPKLRDALMHGLSFCPTEPPNTAGDTGDLVHLNVDARLKRCGGEVRLVVPPRSAVEMPAHPVPSLLKAMARSHDWHTQIIAGKLRGRRALADQAGLDERYVSRILQCAFLAPDIVEAILAGRQPADFSMDKLRTGLPLSWAEQRQRFGFPARS

SEQ ID NO: 4383 - protein, 500 aa, unidentified
  source 1..500: note = uncultivated organism
MNTVIYARYSSDNQREESIEGQIRECKAFAERNGMTIVGEYIDRAKSATTANRPEFQRMIADSKRSGFEVVLVWKLDRFARNRYDSANYKAQLRKNGVKVVSATESISEGAEGVLLESVLEGMAEYYSKELGEKTLRGMTENALKCKYNGGSKPLGYIIDEEKHYQIDPNYAPIIKEIFNMYAEGVTLKEMEIILKNKGVVNQKGKMIGHTTLANILRSRKYIGEYKFKDVVIPNGIPAIISEELFNKVQRMLDVNATHGGKYYSTEDYILSTKLFCGKCGAMMTGESGTARSGVVYRYYKCNNSRKHLCDKKTIKKDYIENIVLNEISAMLSSDENIERMVDAVMKAQSKESSYLSHLQNELAEIDKGIDNLLNAIQMGIVTSSTKKRLEELEAKRSELEADIGIETIAHKPLDRTDVKTYFESYRKYDLTKQDHKRKLINSFVERIILYDDRLIITFFNGDKNVEISLDTIEKIGKGTISEALSLTEDIGEPRKASLN

SEQ ID NO: 4384 - protein, 541 aa, unidentified
  source 1..541: note = uncultivated organism
MDKPSKKLLRCAIYTRKSTEHNLDLEFNSLDAQREACEAYIKSQAHEGWRLVHDHYDDGAFSGASLDRPALQQLLTEVRAGKIDIIVVYKVDRLTRSLADFAKLVELFDQHSVSFVSVTQSFNTTSSMGRLTLNVLLSFAQFEREVIGERVRDKIAASKAKGIWVGGSVPLGYASVNKKLVVLPEEAETVRLIFRHYLELGSIRDLVEDLDRKGIRTRCQVLATGKTRGGIRFGVGPLAHLLRNRFYIGEVVYKGAVHLGEQEPILDRALFDAVQAKLAASASERQLKLRGSPSILAGRIFDDRGNRMTPTHTNKQGARYRYYVSHAVLQKRDSEAGSIVRIGAPDIETMVVKAARNHLDKLTADERQGPIADRELIEQHVERIVVKPQAIEIHFVNETNHQPDEHHQKIATKPPLKRDSAVVITVPCTTTATVATKGVLHSPSPSSAMRADERDALLAAIAKARSWIDDVVEGRVSSFAEIAKREGKVERHIRLLTPLAFVSPKLIATIIDGSAQSIAITELARRLSYQWTQQEITHPET

SEQ ID NO: 4385 - protein, 575 aa, unidentified
  source 1..575: note = uncultivated organism
MINYNDPAVRRKRCAIYTRKSSEEGLDKEFNSLDAQREAGKNKILSQRHEGWELINEHYDDGGISGGTMERPALQRMMEDIKAGKIDIVLVYKIDRLSRSMLDFLGMIKFFDEYNVSFVSVTQDLNTDSAMGRLVLNVLQSFAQFEREIASERIKDKIALSKQRGMWMGGAIPLGYDAVGGKLEVIDEEAKIVRFLFDSFIETSSPTETIKLATTLGYKTKARRTATGKHYPARNFTTSSLYQILRNQIYVGKIEHKEKGEVYDGQHDAIISDEIFNQAQSILNTNPKYRQRKSKNDRPYLLKGLLKDPKGYSLTPTYSKKKDKIYRYYVSTHAIKTTYDNCPLKTISAPFLEEIILDQVKRALTNVEWVQRMQSQSDEVALPDIRKGLKNFDMMWAELFPAEQARIIQLVIDQIVVHPDKIIITFHPSGMLSVLHQFMPDLKSHGDIDDPMVMEIPVQFRRKAKRKRIMTPDGRNVVDMSNENIDEALIKAITRAHRWQEMLDTREARSIQEIADQENLSGTYTQKIIRLTDLAPDITSAILDGKQPRSLQINTLIKGKPLPLDWNEQRMILGF

SEQ ID NO: 4386 - protein, 537 aa, unidentified
  source 1..537: note = uncultivated organism
MKIAIYSRKSVFTGKGESIENQIELCREYCNRNYPGEEIEYLVYEDEGFSGGNTNRPEFKQMMKDAEQKKFDALICYRLDRISRNVADFSSTLEILQANDIDFISIKEQFDTSTPMGRAMVYISSVFAQLERETIAERVRDNMIQLAKSGRWLGGQIPTGFDSQRISYIDEEMKERNLVKLVPNEKELEIVKLVYKTYLNEHSIREVSRQLSAYGYKGKNGGNFDLTTVRRILRNPIYVISDSATHEYINSTGSSVFGKPNGNGYLTYNKKKQTTIGRNVEEWIVAVSNHKGVIPSDEWLRVQNLLDENKEKNQQSIRSGTGDNNACLSGILKCSKCGANMTIKYNTKNKDGISYIYYVCANKQKGLCDNRNIRVDKLDPIVISEIKNYNIDILIDNLKKSVDSVDNSSNDSQSNKLKAMIAEKRTASSNLVKRLALADDNIANIIMEEIKSLNKEILDLEKNLENINNNTAETNNLKYDIKQLVDSLENYNKNIDVVEDVNQKRFLIRSVVDKVLWDGDNYKYKVKLLGMDDSKKK

SEQ ID NO: 4387 - protein, 524 aa, unidentified
  source 1..524: note = uncultivated organism
MNKSINNRHLNCAIYTRKSTDEGLDKEFNSLDAQRECAEAYIKSQTQEGWHCVPDRYDDGGFTGGNMDRPALKQLLADIEAGKVNCVVVYKVDRLSRSLMDFARMLEVFERNQVAFVSVTQQFNTTNSMGRLMLNVLLSFAQFERELISERTRDKIAAARRKGKWSGGMPLLGYDIDGQGGKLRVNEVEANRVRAIYDLYLGRESIMATIAELDNRGWNNKLWKTKNGTLRGGSPFTKATLFRLLTNVTYIGKLAYKDEINEGEHEAIITPEVWQKVQSLLRRNGRTGGVDARNKFGAMLKGILRCACCDCSMTPTHTTKNGAKRYRYYVCMKAQKRGWNNCKSKSVPAAEIEKFVVDKIRHIGQDSAFVEEVVEQAMIQSDRELRGLLAERDELVKELKYWNEAIFVAAPKIKPGSSDAISLEQLADWQESLQRAEHRHTIVKAKITALQAQKLTREEVVSALTSFEPIWESLTVREQARIVQLIVKQIDYDGATGRVTITFHPDGIKTIAKENRPELAEAAL

SEQ ID NO: 4388 - protein, 654 aa, unidentified
  source 1..654: note = uncultivated organism
MGLDNLLNNTRRSDIKASGQKFARAYVRVSHERSAEKNISPETQRSRIEDYAKQQGYIIKEWYTDLAKSAFKNESARAEFRRMIDDSKADPETEVILVYRYDRFSRSLAAPAQQEELLRYGVRIESTEEGYYDPESEVGAIMMPLTWSLNRLFSIKLRNVIVPNMLTNFQQRDTDTGWAYKNGGRAMWGYKTHRITVGRSAKYMDIKKAIWFLDDTEVVGRPLHEWVRTVLIDWRLKQGLGYRMIADKLTKAGIPTPNGKKGWSASTVYSLVGEWDKLYQYAGYGFWNRRNWQDPTRVSKRDTGEWVVIPEAHPAIISEEECEALWEMTQQASRKIRAAKPKSRFGLSGGLLKCVVCGANLAGTKRHGSDYYVCGSHLYRRGADCDKAWYIPKDEVENLVFETLLARLTNDDEKLEAWVAGINASIDEEWKKFSGSLAQRKQTLGKLEEQLSNLIDVAAQGADAPELARKIEETSAAISRLRKLNDVSKPSPVTVDEILDRRQKIVEAFHSADPELRKQILTSHVIELAADPRNRTIEGLALDPRHLTKKKKPPGEGDFCIQTCGRARIRNANRSTFFAALRCYRKSVVPLYWHRNPGHMIFVYINLQLSSKQGLERQCAHENRLFRGADSLEVRTRVGNTNRSTLFFGRARNR

SEQ ID NO: 4389 - protein, 558 aa, unidentified
  source 1..558: note = uncultivated organism
MSRATIRCAIYTRKSSDEGLDQDFNSLDAQHEACAAYIASQRHEGWKLLPARYDDGGISGGTLERPGLQKLLADIDAGRIDMVVVYKIDRLTRSLADFAKLVERLEAASCSFVSVTQAFNTSSSMGRLTLNVLLSFAQFEREVTAERIRDKIAASKKKGLWMGGLAPLGYDPHPDPNRRELVVNEVEAGTVRRLFHLYLAHGCLNATARVAEDEGLRSKRRVFGSGRAQGGTVFSRGQIHRILTNPVYRGLIRHRDKTWPATHPAVIDEDLWEQVQARLQSASARRRGSRNGTAGAANPSAPLVGKFRDEIGDLLTPTHTQRHGRRLRYYVSNRLITGKQSAGGWRSPAPAFEDAVTTAIADHLAMCATGHRILRHAEASNACDVSKGVQVIADTIRQGGASAAAALIAHGAVNAGTLSISLDPRALEEMLDLAEADLDPGLLEIVAPFTCRRRGAETRIIAGERQPTPDLAMIRALRNAHRWAYMLKSGIALREIAHREGVSESYVARIIPLATLSPKIQDAILAGNQPLGLSLETLVRSRIPLCWDSQEKRFGLAA

SEQ ID NO: 4390 - protein, 512 aa, unidentified
  source 1..512: note = uncultivated organism
MPEVKVINPTLIQTSDKTRVAAYCRVSSDSADQLNSFIAQVNYYTDLARKREDIEIVDIYADEGLTGTRADKREEFQRMLRDCRKGKIDKIMTKSISRFSRNTVDCLIAIRELKNLGISISFEKENLDTATMSNEILLSMMGCFAQEESMSISRNMKLGCRMRMKKGNFIPSSVPYGYRLVNKKFSIDQKEAEIVKQMFDNYLNGHSTSEIARELNKQKIYKTAVGQKWNPSAVNYILTNEKYIGDCLLQKSFQTDALPFTKQKNKGELDRYYVQNTHEAIISKNEYETVKALMQKKGKQFYPQPTNQQYPLYRVIVCGECGHIYQRKACNGKTYWVCYNHAVSKDNCSSKRIPEQDIYLAFVKMVNKLKANSRHILQPLLSQLQAVKSISVMSNSKICDIDKKLAELNEQNLIISRLKTKGFMDDSVYIEKSNELNKNINELRTQHRRLLKSDDDDISIENLKCLIALIEADVNPITEFDKQLFESIIERIIINSREQITFCLIGGLELSE

SEQ ID NO: 4391 - protein, 552 aa, unidentified
  source 1..552: note = uncultivated organism
MKLCLPTPIEESIVRIATYTRISTDEVNQPYSLGAQSEKLSNYVASQEDWELVSTFTDQMSGAKLERPGLNGALRAAKAGKFDLLLVYRVDRLSRSVRGLAEILETLDSVNVGFRSATEPFDTTSPAGRMMVQMLGVFAEFERATIIDRVIAGMDRKASLGGWCGGVAPYGYHAVKGEGRLSVDESEAPLVPVLFDLYVNQHLGSHAVANWLNAAGLVTRSGKPWSFKSVLTVLRSRVYIGQVRYRDGWCEGSHSALIDEELFDAAQVILGERGDDTSKRASNASDYLLTGLVVCSHCGQHFSGTRATGRNETYRYYTCGSRQRYGTKTCNADRLPADVLDSAMIDSLLAAYEDSDLFRAAVGQAQLQARDGHSRHDDELRAVTNELTKVDASVDRYLRAFESGSMPEALCGERVKELATRATVLRARREELNEEMEQADIVCASPEELATLRDRVNEAIAEGSPAVVKSLLQALIHEIRVDSRNAIQPVFRVPLAGDAMAGDAVRAPSRSVEVRGLEPLTPRTPSTMSSCSHVRDRPDSLEIIDSLSGEVC

SEQ ID NO: 4392 - protein, 598 aa, unidentified
  source 1..598: note = uncultivated organism
MAKIRNDKGKGLRCYIYTRVSTEMQIDGYSLDAQEESLRKAAAYHEMQVVHVFSDEGKSGKNTTGRPEFQEMMRRISNGNEDRVDYVLVFKLSRFGRNTADVLNNVQLMEDFGVNLLAVEDNIDSAGSAGKLMISVIAAVAEIERENIAAQTMAGRRQKAKEGKWNGGQAPYGYRIKDGVLEIDEAEAEVVRLIFDRYNHHEQGANGVARWLNNNGYTKKTVKNREGTAFSAHFIKIILDNPVYIGKIAYGRRKTEKIEGTRNEYHKVKQAEGDYDLWDGRHPAIIDEKTWAETRAKREETSYKREKTHSLEHEHVLSGILKCPVCGDSMYGVPGRKKRPDGSYYENSLNTFYYVCKHRRVVDGKKCTFKAYINQDDLDTEVRYLLRDLWENGEADNLMQYAMNMHSDKDQLENRLKELEQNRHKAILEKDRRIAEIDRLDILDPLFEMKYADSNERLTKAYEKIEGIDYDIREVETDLTTQMEAEATKKGAHEALVQITENWDEWTSSQKKRLVQAWIKELHLFTKKQKSGAWIKGIVFQFPVVVFGQVSDAFDFPADADDPDESFQQQETTDETVCCLYHQKDKFFSVPYEPKDVK

SEQ ID NO: 4393 - protein, 503 aa, unidentified
  source 1..503: note = uncultivated organism
MKRICAIYTRKSTDERLDMEFNTLDAQRESCEAYISSQKSEGWMASKEKYDDGGFSGGSLERPALKRLLDDIRAGKIDIVVVYKIDRLTRSLMDFSKLVQVFDEYGVTFVSVTQSFNTTTSMGRLTLNVLLSFAQFEREVSGERIRDKIAASKARGMWMGGVPPVGYNIEHRQLVVNPSEVKLARHIFDRYLALGNVRSLKAELDRESIKSPKRKSLTGRPYGGSSFSRGALSWILKNPAYIGKISHKGKIHEGLHEGIIPFDVWKRVQMRLKEQTVNRTKQTKRRFLLQGLVYDMEGTLYGPSFTTRHDRQYCYYVSQNIKQDRNHPNNIMARLPGDDLETTVEKALRQDIRKLTIEEEGPVFKHILEHHQNIPAYDLVRTCVERISIGPNQMTIRIKTAGFQKLAEKYLAVKAIAHNDIFEVIVPFKVGRAKKGAIIIRPEGSKDMFDLPPPDLKKLIQGVVWRDEHFAGKTLTEIAQREGCSDAHVGKCIMHSFDILQAA

SEQ ID NO: 4394 - protein, 569 aa, unidentified
  source 1..569: note = uncultivated organism
MAKRPHRFDHAQPRTVRCAIYTRKSTDEGLEQAFNSLDAQREACAAYIVSQRHEGWLPVRDVYDDGGYSGGTLERPGLKRLLAEVEAGRVDVIVVYKVDRLTRSLSDFARIVDVLDARGASFVSITQSFNTTTSMGRLTLNVLLSFAQFEREVTGERIRDKIAQSKAKGMWMGGPVPLGYAVQDRKLLIDENEAATVRHIFARYVALGSGQLLIDELRVQGYRTKVRPQTGGAARGGVPFGRGALFHLLGNRVYLGEIVHKGVSHPGEHPALIDQLLWDQVQATIERNRAEPQRGHRTTERSLLTGILRDGEGRRMSPTHAVNGTKRYRYYVTHASELIANAPLAWRVPAHDLETIVVARLKDMLTDRREIRRLVDAGDGSASALHLAITSGTMLAAQLDAPDKRRELVAAVVTGVQMTEADVTISVSRAALLPLLRIEAATFTDDDAPDAMLLTAPATRTRVGKEVRLLVPADDEVNDRDTRLLALLAEAMDVREMLLANPEQSIDQIARETGRCRSRTARLLRLAFVAPDVVERVIAGEDAAMLTSKGMSTTLPACWRAQTQLLLTH

SEQ ID NO: 4395 - protein, 526 aa, unidentified
  source 1..526: note = uncultivated organism
MENQVRMCMEYISANIPGSAEAKIFVYEDEGFSGKNTKRPRFQQMMEDMRKNHFQYLVCYRLDRLGRNIADLALLIDKLNRENTEFISIRERFDTTTPMGKAMLYFSGVLAQMEREQIAERVRDNMAMLARDGRWLGGNTPLGFTVREEKKVLEDGKIKKSCCLQIEEREAEVVKQIFAAYLESHSLTAVAGELLEKGLYTRRGKAYTAQGLRDILTNPVYCTADETAWEYFDGLGCRLCMEKEEAGPDRGLIGYGKTTSADYKNESCQPKQWIIAPGKHEGIISGKDFVKVQKILEGNKKTDPGSVKVRNRISLLAGLLYCSCGHKMRPKYYRPLRDALEKERKFSYRCPYRDATRQMLCQNPPVPGNVLDEQVCRLLLEQTKKRFQTETLLDCALKRIERRKKVPVSETAFFRLQISRNREKIRNLLSALEHSRGEKAFIRQVEEEIGKLEAECEKAEKEIRKREKDRTGNREIRRKEIWNLGETLLSFERLFASMTVEEKREYLAVRAERLEWNGSFLEIWLR

SEQ ID NO: 4396 - protein, 536 aa, unidentified
  source 1..536: note = uncultivated organism
MITSQNIVAGTSTRTLKPATPQVIVIDPIVQVRSSKLRTAAYARVSSDSDDQLNSFAAQVSYYTALISENEEGEFVDIYADEGITGLRMDKRDDFMRMIRDCRKGKIDRILTKSISRFSRNTRECLQIIRELKAIGVTIHFEKEHLDTAEITDEMLLTFFSGNAQQESMTISTNMHWSYQHRMKSGKFITCKAPFGYRLIDGVLRIDEREAEIVRYIFDSYLGGRSKDEIAGELTERGLSTRDGKSRWRYNTVDYILKNERYMGDALLQKRYTTDVLPFQKKRNNGEKDKYYIKYSHPAIITRDIFERARELNQSRFLPSMAKRSAYPLSKRIFCGECGSAFKRKVCGGKTYWVCHNRNNNKANCSIPQIPEPEIYEAFFRMYHKLKLNYGIILSPMLDQLQALKRHRNLSNLQVVELNRQIAELTERNHVLNGLKSKGIIDSALFISQTDELGRKIRNLKAEKNRLMEKDEDDSAITDTKKLIELLEDGPERLSHFDETLFDSLVEQVTAESGERLKFRLINGLELAETIERTVR

SEQ ID NO: 4397 - protein, 546 aa, unidentified
  source 1..546: note = uncultivated organism
MVRCAIYCRVSSDEQAEKGTIGSQVDYTKRYLELHGPEMDITDHEFYLDEGVSGTIALLDRPAGSKLVADAKMKKFDILFIYRLDRLARNVKHVLDTYDLLEKYGIALKSMTEAFDTGTPTGKFFMTLLASIAALERETILERTQGGKDRNAKAGKWVSGAPPFGYRIEDKRLVIYEPEADTVRLIFQLYEDGMSTVEVAKYLNAKDVLTPTMSKGTKNKSTGKWHAGHISIILRTTAYMGSYTYLKRAAKRKDRIELEVPAIIEQQKYKDTQERITKNSDVARGSKKHNYLLRGLIYCAKCGRALVGSSGDSKSGRVYYRCTGTVENGQGKKCDTKQLRAADAEKAVWEDVYELLSHPEELITEMENELGKNKESSEPLQTELDEVENYIVEKQAARGKVIGLMTRGKLTEQEAEEALEELANELGSLNARKEFLFDKITNAQSFEGNVINVRLVIDAVRDHLDELTEEEKSALVRAMVRRVEVKTILNADGKWDSLVTSTYHFYRSMELRNSGNVENHTTVYNVESTWIFHAFSRHFGERIRWR

SEQ ID NO: 4398 - protein, 566 aa, unidentified
  source 1..566: note = uncultivated organism
MKRVRILLRVSSNNQLDADGDLSTQRQLVLDYVKKHEDWILDGKEYFEGSNSGYKNAVADRDVLQEALRDAEKSEYDILVAYKDDRIGRRMWEIGANVMALKSNGVDIYTRKDGCISPESNDIMGQMMLALRYGNAQKSSSDTGMRVKDTAQKLVQQGKFMGGAAPYGYKLVISDKTSKHGRVLHALKIIPEQAEVVKHIYNLSLNKEYGSAKIAKLLNEDENYKSLAPRDQWKSGTITSILTNPIYAGHVAYKRRERINGKYHRLDSKDWIKATSPNEEIQIIDGDTWNRTQDKRKLRADKYIKTLEHQNIKVIRRNDGMLSLIDVIYCGYCGRKLTNGTKYAYWKIKDTGEKKASKTPMYRCQSAQEGIPHNKVYQFRADKIEKIIFDCLGEYINKLQENDEVMTAIEANEAKERKNVETEIKKLKEELNEITKEIKTMQSKIPKAMTGEYPLSVEEIADAIHKHQEKENLQKQLIIEKEEALKQDSVNSADWEELKSKFPTWKEIFEESDSHTQRVLVNKLIERIDVTNEQIVIRFRVNLNDFLPQPRIDGDSDTTPYIPCSA

SEQ ID NO: 4399 - protein, 524 aa, unidentified
  source 1..524: note = uncultivated organism
MAFAKIKPVPEACAQNAVLYCRFSSEKQKENSIDFQLHVTREYCERKGFNVVGEYIDRAISGTSDQRPEFQRMIRDAKKQLFAYIIVYRFDRFARNRYDSAIYKKDLQSVGVRVLSAEESVVAGDEGIILESIYEAMAESYSRKLSRIVKESLKETARKGLTTNIAPYGYKSVDHRLVIDERAAEAVRLCYKLYAEGKTKKQVTDALNAAGFRTAKNGLFKIENVTRILKKRCYIGENNYGDVERECPRIVDDKTFYKVQDLLEKNKKQYGKKADKAFFALSGKMFCGECGAAMVGDEGTSKGGKKFYYYTCAKRKKNRSCVKKSEKKDFIEWYVCEQTVKYLLTDERIQDISERVVALEEKDSGAQTLKKLEKQVSDIDKEFSALTDKLIATDSPSIIKTINKRAAVLEQRKATLEKDITDLKIRAELKLNVNEIESYLNTFRSGDLLDEEFRRRMIHTLINAVYIWDNKVCIYYNVRGAESVSFIDALSDVDQLSECSDSVTNGSPAKGTRKRAFCIYIRKK

SEQ ID NO: 4400 - protein, 576 aa, unidentified
  source 1..576: note = uncultivated organism
MILEKIEKSWQCSASRKDNGEIMGNTDKKEIYKTAMYLRLSKGDGDVDGIDKAESNSITNQRMIILSFLEKHQDLKLVDIYIDDGYTGTNFNRPELKRMMADIDAGKIDAIVCKDLSRFGRERIETGNYIAKIFKQKGIRFIAINDNYDTLTAEGSETNIVMPVKALTNDNFSRDISTKVRSSQSIKREIGDYIGAFAPYGYMKSEKNKNRLVPDPGAAGVVQEMFAKKLAGVSANCIAKELNARGVLSPAEYKKQQGQNFKTNFQGAKQSQWSAKTVIRILQDEVYIGTVVQGKRSKVSYKVKKEINRPQSEWIRVENMHEAIVRKCDFDAVQILMSRDSIKSSENSESYMYSALLYCGDCGKSMVRRKSFYSGREHICYICSDYNRYGNCSRHTIREEDLNEIVLGELKRMIDNMCDYQKLAENLDKLNVNFDKAVAHDREIAHLKSELEKCSTLKSALYQDLKEGIISQIQFNQYRENYTNREMSIQSAIKEQENIIRGIYENGIAAGTRLDELREKLTINSLDRIVLVTFIDRILIFDDNRIEIVFKYRNEMEKMEGIICTANQKEVVKEAV

SEQ ID NO: 4401 - protein, 667 aa, unidentified
  source 1..667: note = uncultivated organism
MAEITVIQPNQTAAPVRCGAYCRVSTGSEEQMHSIAAQRLAFLSGGSLVDIYSDVASGTNTQRPGLLRLLADCRSGWVNRVVTKSISRFSRNTRDCLAILRELREMGVTVYFEKENIDTARSVDEMMIAVMGGLAQEESNSISRNVRWSLQRKMAAGTLGVARVPYGYDKVDGALIINETQAAVVRRIFALYGGGMGARSIANILNAEELPSPTGGLWSNGTIFKMLTQEKYLGDIHWQKTTSVFMGTSRRNTGQADSYYVTACHEPIIDRQIFEAVQTIRRQSVRPGNRTNDIPFRRKLVCGLCGKSYYYVGASHAYWQCSGRFDPIKPCSNGLIHDDDLHRMWQQQQTKLIRHADVIIEPLLRQLRQISRTDDSGQLAQLNEIRKRKTALRKMCAEGCFGYGELMSAENGLNRELVEITQRLERQTGMCETLLSELERLRKDILNIKPLNLKRVRLRYNKAEFEVTGGLVLSCEIPENVHHRNAVQAPEPLPAIGQLALCGACGERMVRRKGKSEHYWCCRNSNCCQRKLCISDDELVRRVISVVERVQHNPRLIKIYEAVTAYRPNNAVLRMEDSINCLISEGSCNKDMLIDLSVELANEKLKCISYSETNERTEQIVNAISEEPVIEDFLRKTVRHIYVTPDRVRVKFINGKTVKSERSNENE

SEQ ID NO: 4402 - protein, 542 aa, unidentified
  source 1..542: note = uncultivated organism
MTKATIKKVAIYIRCSSDEAKTEGYSPETQEEKLKEFVRNDSLALTLDKKNIYKDIGFSGGTDKRPDLQRLLIGAKNKEFDIIIVYRMDRFFRNLRSLLNIVAELRESGIEFKSVTEPFDTSTPTGRAMFANAGVFAEWMREIGLESRDIGMVKAMKAGKYLGGTPPLGYNIDKKTQKLVINKKEALLVKKIYSWLVDNKLSEYNIQKKMNSLKIPTKYDRLGRSKLKKTKSKNWWNRGTIGRILRNELYIGNLYYQKYKNSNGGRNNNNLRPKKDWILAKFPAIISKEVFDKAQAQLKTNKEHSPRKTKTTYALQHKMVCGFDNRHYQSAKRPAGEHNREVKYYFCSGIRKCHTPNLCPAPSISESRILPPIWNKLKDLLSNPKEAMEGLKSYKEQKNKRARVQKRIESIKKSIASQIKAKEKYAELYAEESIGKDFYNKKIIKCNKEIENLSSEKEKSNQLLLNEDKINTRIKSLQDLYQEWKEGLENATYEVKVALIQKMTNKVIIKGNQLDIEYLFPFKIPSVSKKFCGHSPRIFQDI

SEQ ID NO: 4403 - protein, 573 aa, unidentified
  source 1..573: note = uncultivated organism
MARKSILEQVTAEKVAIYVRVSTVWQIDKDSLQVQKRELSAYCEMVLGIKDYVIFEDPGYSAKNTDRPAYQQMMDRLRTGEFSHILVWKIDRISRNLLDFATMYAELKQLGVTFVSKNEQFDTSSAIGEAMLKIILIFAELERNMTSERVTAVMLSRATNGQWNGGRVPYGYDWSKEQKTFTINSVEGKIVKMIYNMYEEHQSLIYVSRYLNEKKYTTKNGKEWSPTTVHKILSNPFYIGTYIYNVHEDGRGTKKREDKEWITFEEHHEPVVTHEQFDRVQFLLQRNRRGGVQRGGNYERNNVHIFGGLVKCGVCGSLMSATLDKRRADGWRPSIYGCSRRRKNSKACSNKYISDAVLGPFVFNYIANIIRAKNSGKKFDLGTLQKRLLQGTPFFFVESISEGGLSQLNSLFEQGESGLEYKPSFITEIDDVRVDERDMLLNRKHIIERAINRLRQLYMFGDEETPEAEYILERKKLTDELASVDARLNELSTEDKSGPITDESFIKKASYFIMVEKLLDKKTIDYEKYIRGIEATIPRNFVQSVVERIEVTDGNVSAIVFKNGMRHEFTYKK

SEQ ID NO: 4404 - protein, 547 aa, unidentified
  source 1..547: note = uncultivated organism
MNNNQGDSIRVATYARVSTQEQVEGTSMEFQDAQLTGYCALQNWTIINAYTDPGFSGKDGDRPGLERLLSDAKIGLFDKVLVFKLDRLARNLRLLLEIEQKLRGYGVSLISVKEAIDTSSSTGKMMFQMFGMVAEWERETIIERTSNGKLQRFKSGCWAGGKVAFGYAYDKSTKKLVVDENNARIIRRIFSEYADGKTLYGISDRLNKDKIPARGKNSPGWRQTAIRQILINPAYKGMAVVHRYSHISDINKIDLSKTIQVPVPPLVDEQTWNIAQGRLKNNKQVRPLSQGEFLLQGMISCGACGYAYRAERFKDVRYYMCRGKMAYHHLDGSPRCQSPSIKAEWLENEVWKRILEIINDPDLLEVVINDSINTLRLKEADLNARIKPITDRLGEIAEQKEKLADDWIIRHMNSDKFRELKASLDQEETRIRALKAKIDPAQILELESTRGKLRYWENIIKDMMVWNTVDADGNTFKQEFNSQRIALKMVGFEDKEISDGWKFPATKRDMLNKLQVRLVVFNDRIEVNGLFPIEPINIQSCTSTGLR

SEQ ID NO: 4405 - protein, 627 aa, unidentified
  source 1..627: note = uncultivated organism
MTPGDYSGGSMERPGLAALLADIDAGRIDVVVVYKVDRLTRSLADFARMVERFDARAVSFVSVTQAFNTTTSMGRLTLNVLLSFAQFEREVGAERVRDKVAASRKKGIWMGGAVPLGYRAENRKLVIEPEEAERVREIFRLYLDLKSMTALLAELNRRNIRTARRVSRTGRTSGDVAFGTGSIFYLLHNPVYVGEVYHKGEVYPGEHEPILDRPVFEAVQARLASQAPPKRGRRPSSPALLMGLIFDSAGNRMTPAHANKGGVRYRYYVSRAIAEGRKAEAGDPARVPAPEIEAAVIDALRREVERGEVDGPGSSRRGEAAEPEALRQGEIDCPRITPGRSPTPPPSSDASGPAAQQIAGTATSLAAPRPVADVDDDAATLIARHVETIAVHPHRIILTLRDGHKRSNANGAGERTRAKGVRPVADIASKADDADNMDSANDADNVNGADDASIGESARNADSADNVGDEGSADDAGALETADDANSAARPYSAQIPTGPSGNRASRPAVLTIPWSTDRSRPRRRFIAAASTDAAKSDDRRRLAHAIHAARTWFADIASGAAESLDSIARREGKHERTIRANLALAFLAPDLVEHLLDHGLPDHWTMTDLTRRLPRLWSEQRTMLKA

SEQ ID NO: 4406 - protein, 530 aa, unidentified
  source 1..530: note = uncultivated organism
MKNGNGKRVAAETAEGSAQPRIVRCAIYTRKSTEEGLNQQFNSLDAQREAAEAFILSQRQEGWQVVPERFDDGGYTGANIDRPALKRLLAAVEARQVDCVVVYKVDRLSRSLLDFARIMELFDRHGVSFVSVTQQFNTTNSLGRLTLNILLSFAQFEREIISERTRDKLSAARKKGKWIGGHPVLGYDIDPRGGRLVVNPEEARRVRKIFELYLEHHALLAVLQELDRRGWRTKRWATQEGNTRGGRPFTKGSLHGLLTNVIYTGRVNHKGVIYPGEHEAIIEQATWERVQELLHRNGQSNGAGLKNKYGALLRGLLYCVPCGTAMGHTYTARNSRRYRYYVCYHAQQRGWKNCQTKSVSAPAIEAAVLESIRKLGANPTLAREAACQAREQIAAQIQDLQHEQAEAGRRLRELNAELVRAAGEDSPARFDRMLALQTEIQTTEQRLITLAQELKALDSDPIDEEDLLRALVQFDPVWQLLTTREQVRIVNLLIEKVGYDGRTGKVTVSFRSAGLKELCNGTIDAKTRPS

SEQ ID NO: 4407 - protein, 619 aa, unidentified
  source 1..619: note = uncultivated organism
MAEVKVIKSTKMTESRRQLSQKAKKRVAAYCRVSTDEAEQLASYASQIRYYTDMINNRADWRMVEVYADESITGTLAYKRDQFLRMIQDCRDGKIDMVITKSISRFARNVVDVIKYVRILKKLEISVYFEEERIDTLSMDGEMMLAVLGAVCQQEAGNISANVVKGLRMKMSRGELVGYSACLGYDYDEEKNNLVINEEEANLVKYIFKRYLDGAGANAICKELVNLGARTKKDNFNWTPAAVMGILSNEKYVGDLVQGKSYVVNPLTKRRMINHGEKDMYLVTDNHPSIISREDFAKAKEIRQSRAKYKKKPAVPGKVSPSGRKYAFSHMLTCGYCGSVLIRHQCNVGTKWHKITWICSHKIYDGSKSCPSSKGLADAAIKDAFMASFNKLKGEPTQEMIEKFLDIAREVLTQNTDDNDDDCVMMKKKLADINDKLKQILDMKIDGLIDEDTYKRKYDSLQVTKSRCVKFLAEREGAADNKANIEKRIKKFREIIESNPDMTIFNREIFDNMIDKVIVGTTDENGVHPYNIKFIYANGVEDYVDVSDKHGAVQGKHAEKAAINKDKDESPFDGKQEMADRQKGLLKNLLNQGVLNNATYNASIEKINQAIESAKCVMG

SEQ ID NO: 4408 - protein, 505 aa, unidentified
  source 1..505: note = uncultivated organism
MIRKADFAKETAPVRCAIYTRVSTVDQAQGEFTSIDNQREMAEAYVKSQAGKNWVAIDEHFDDPGYSAGTVERPALRRLLALIEAGGVEVVVAYRLDRLSRSLSDFMKLIDRFKAAGVAFVSVTESFSTDNAVGRLTMGLLATFAEFERATISARTADKVGAARRKGRWTGGFPVLGYDVHPEGGKLLVNEEEAETVRQIFTLYLDLRSLQATAAELNRRGWRTKSWATKEGTFHEGVAFNKAHLSRLLGNPLYVGRVSHKGAIYEGEHPGIVDEEVYGRVQAALAGNSVSGGARAKNRYGHLLRGLLHCTACGCAMSPSVTRRNGKAHRYYVCGNATRRGWASCPHPSLPAGEIEAAVVERIRCVGRDPGLVAETLAQVRSIQKTRTPALTAERRRLDREVSRLRDRGDAGDHLGKIEARLAEIAEELAVLQGASIERRDLAKALALFDDVWSCLFPREQERVIQLLVERIDFDAGRETVAITFKPTGIRTLAEEIEQAAEVPA

SEQ ID NO: 4409 - protein, 507 aa, unidentified
  source 1..507: note = uncultivated organism
MNSGKSICALYTRVSSRNQAEADYSSLETQRERLEAFSRSQENHTIYRVYEDGGYSADSLDRPALKEMLRDIRDGKLNAVLVYKIDRLTRSVRDFHQLIDLFDRYGVKFVSVTQSIDTQSPMGRLLRNVLLDFAQFEREMTADRTRDKMHQRAQKGLWNGGHAPYGYRAENKRLIVNTEEAVRVEFMFYRFAETPSLARLRDELHQRGWYSRASGRWSKTAIDQILRNPIYCGLVRFNEQRFKGEHKGLIEESIFNRVQSVRRDRSHSSTRLSRPFLLKGLVRCSDCGSWMTPHYTQKKHEDGSMYRIPYYRCTKTMHFNNSVCSVKHINADHLESLVVQKLSELSQNEAYLKMTVEELNGDLKRKVEPLEREAARVKKRLEEIEQEIGRYVKALGQGKISIERLETEIGTLELDMRTLQGQRDELERRINESSSRDFNAELLQRTLSDFRAAFAALAPREQAEALQCLLKSVIVHRSKVQMEVFEMEEFHPSSQKREDWLPGLDSN

SEQ ID NO: 4410 - protein, 548 aa, unidentified
  source 1..548: note = uncultivated organism
METLNSKTYHAAVYLRLSREDGDVAEGSRALSNSISNQKELVMDYLRSHAEIQVYSVYTDDGWSGVDFQRPEFQRMLSDIREGSVDCVVVKDLSRFGRNYIESGRYIEKIFPMLGVRFIAVNDGYDSLDGQYGNDMVIQFKNLINDAYCRDISVKIRSHMEVKRKNGEYIGAFAAYGYLKDPEDKNHLVVDGYAADVVRDIFAMKLAGCSLKAIADRLNRDGILSPLQYKKSIGIRLESSFQKDMEPKWSYNAVLRILKNEVYVGTVVQGKCTTPNYKVKKRVYKDESEWVRVGDAHEAIVGRSEFELVQSLLARDTRVSPKKGKVFPLAGMVFCGGCGEPMVRKTVPSGDKRYVYYVCSGHKNDRASCSSHSFSAKKLEESVLALVQTFIGKVLMLSEAADIVSRASGMAPDVGKIESRIAKLREEAEDCGRRRKNLYEDFKDGILTKEEYAMLREQYQKQADGIQAAIASLEKERDSIQTGQTAGQEWVDALKGYKGVKTLDRRLAAFLIDRIEVMDSDTLQVSYRFEKEAAEMERFVMMYRKEAV

SEQ ID NO: 4411 - protein, 576 aa, unidentified
  source 1..576: note = uncultivated organism
MDKTVQIRPALSAQDRERKAARKKQASVKRTPSLDITAPKQAPSVTPEATKTTVIEAAPAPAAKLRAAGYCRVSTGSDLQRTSITAQRQHYEDYIRSNPEWIFSGIYWEAGVTGTKTESRPELQRLIADCRAHRIDLVLTKSISRFSRDTSDCLEMVRTLTSLGVGIIFQKENIDTRSMDSEFLLTLFSSIAEEESQSISSNSKWAVQKRFQNGTFKYSKAPYGYDLVNGNFVVNPEQAPIVKEIFRRALSGEGAIAIARDLNERGIPTGTKRRDGSDGIWNSSMILSMIKNVTYTGDVLMQKTYSGRDYRRRKNTGERAQYYADAHHEGIIDHETFERAGASLKLRRKGAPPADSADVGRKNPTQNRYAFSGKLVCGCCGVRMKRITGRAGGGKRHFWGCSAHTADLQACSMKREQEESLRNAFITMLNRLAFLPLADLYIEMLTKEEADKSGPEATALRARQKSITEEKERFTLLLSKGCGEPVLFQERIAALNAEETALQKEMEKISGESTRMREAKNLKRLIGAWKTGRETDAERIFTEIAEHATVNTGEAVTFHLKCGLELTEMLAVTGDE

SEQ ID NO: 4412 - protein, 519 aa, unidentified
  source 1..519: note = uncultivated organism
MIRANDSSPKIRCAIYCRKSTEDGLEQEFNSLDAQREAGEAFVASQRNEGWVCLPDQYDDGGFSGGNMDRPGIRQLMADIEAGHIDCVVVYKVDRLSRSLMDFARIMETFEKHNVSFVSVTQQFNTTHSMGRLTLNILLSFAQFEREIIGERIRDKIAAQRRRGRWAGGIPVLGYDVDRTGPSPKLVINPAEAVRIREIFDLYLKLGSLLPVVEELQRRDWRNKAWTTKKGQPKGDGPFDKGSLHAMLTNPIYIGKIRHKSELFDGIHEPIVAGDVFRRVQKQMQHNSRTGGVEVRNRHGALLKGLLFCKACDRSMTHTFSGKGSKRYRYYTCTHAIKNGRKSCPTGSLPAAGIEEAVVDQFRELAASPVLREEVLNQAVESATSTSAALKKEREQLTRQVSAHHAAIRRLAVSGTNTPAMTAAIADLHDRIAAEERRIAELRDQIQQTDAERLTQEDVDAAFEDFDGVWNTLSPREQARSLALVVERIEFDAADSSISIEFHPAAIKALSDKRLEDAA

SEQ ID NO: 4413 - protein, 508 aa, unidentified
  source 1..508: note = uncultivated organism
MIVVYARKSVERENSISCETQIEYCKSMIKPNERDEKIITIVDNGFSGGNVNRDGFQKMMKLIRQGKVRKVIVYKLDRMSRSLADFVDILQEFKLHDVKFVSSQESFDTSSPYGEMIVKLLAVFAEFERTSIIERVTQAYAHRSEMGFYMGGRQPYGFELIPAVIHNIKTKKLNPIPSQVEQIRYIYEVYAQESVSLRRLLDILVSEGKKPLNGSDWSTAKLSALLKNPIYVKADLDIYDYYERHGTQMITDLSMFTGEYGAQLYGRSKHKAGDSDWSDMKLVLLTHQGIVDSDIWLKCQSKLLKNKQITNSFSNSTSWLAGKIVCEKCGHHMTTVKGVINKSGEVRRYFNCTGKSHQKICTGTKVTIYAEDLENMVYDCISEKLSDLKEIKRTGKTADHSEINDLKLKFKTVEQNEKQLIDTMLAGGFNADLLALANQKAAQLKQDKIALQNRIDELKSISEDSAVIVNLSRSWKSADYRRKKEVADIMIDKILIGENGNTKIIWNI

SEQ ID NO: 4414 - protein, 526 aa, unidentified
  source 1..526: note = uncultivated organism
MVKRVVGAIRESKSRDTSTSPDVQREKIEQWTALNDAEILHVAVDRDVSGKTVPPWDRPDLGPWMATPERFDVLVASRLDRVCRNAADFMNLVKWSKSTDTALVFIREGFDLTTKAGAMAATMLAVVAEYDWDNIRENTLDGQRKAIQQGRWKGGTPPYGYRPVKDTRQIPTGKVVTGWWLEIDPDTHRILQEIRDRVISHAESVTDICKDLNSRGALSPADYHRLRQGKDPKGTKWAAPAMIRMLRSRALLGEYETKDGDTIRDDNTGLPIARAEPLFSRPEFTEIQSSLDRISKRRVNNHQGLHMLRDVAYCAICGRKMHHTMSGAGGYYRCSSFQAPTGKCPNLMVRDKVLEAELTSGFMAAFADDPLTRREIIPGEDHSGEIAALEEQIQNLSGNLARVKPGSVSAETTLALMGEKESALEALRSLPTRQETVTYIPTGETLKDAWERLTDVGKGQLLRDHDVVMFYARVEGMEGPLLAIVWGTFKYISEYLETGKVNPKTMDASAHVRAVAEGLGLTNFER

SEQ ID NO: 4415 - protein, 571 aa, unidentified
  source 1..571: note = uncultivated organism
MEPQKKIRCAIYTRKSTDEGLEKEFNTLEAQREAGENYIKSFKLQGWEALPEHYDDGGFSGGNLKRPALQQLLKDVENGKVDMIVVYKIDRLTRSLLDFAQLVKTLESHNCSFVSVTQNFNTCDSMGKLTLNILLSFAQFERELGAERVRDKIAASRKKGMWTGGSVPLGYILKEKKLIIEPDEAEIVRFIFEDYIRTRSEVRTTQHVIARGYKPKERKNKDGTLKNNGEFNHSMVNNILNNPIYLGKMPYKGELYEGQHKAIIDQETWDRIQNLKTENLGNAFKPSRVIKNSLLKGLLECECCGTMTPTRCKKGNRYYEYYTSLKSVKEGVERCACKIGSVPAGELDTFVLEKIQQIFKAPEVMRELAKQLSEANSKYTTTEAYKLVDNIGEAFQYFEPATIHDFIAEIVDKVVLHHDYIEIKLKPYGANIFENQMTIKDKCYNKEKLILKYPIKFGRKRGSVKIVEPILPSKTITPARDEKLYNAVTQAFYIKDLMETKRWSLTELSRREHCDHTYLGQVLRLTTLAPDIIMAILEGRQPKLLTLRRLLRERFPYSWEEQRRELGFDPA

SEQ ID NO: 4416 - protein, 611 aa, unidentified
  source 1..611: note = uncultivated organism
MNSTLPTTITIKRCAVYTRKSSEEGLDQEFNSLDAQRESGEAYVKSQRHEGWELLGNRYDDGGISGGTMKRPGLSQLLADVEAGLVDIIVVYKVDRLSRSLGDFGRMVELFDLHKVSFVSVTQQFNTTTSMGRLTLNILLSFSQFEREVTSERIRDKIAMSKKRGMWMGGNVPLGYDAVDRKLITNEPEADTIKLIFHDFNRLKSVTDVAHKLTSEGYRTKPRQRRNTPPSNGVPFSKTAIYKILNNPLYIGKVRHKDKTYEGLHDALIEQPTWDSAQAIMATNRHVRAATTRRKTAAPLKGLLFGPDGYAMTPTQSMRRGKHYRYYITHTAAKHRHEDCDMALVRAGDIEGIVFDQLKRLFSEPAILVRTISATNDYLGKESRCTSQEMLRTLQSIAPIWDYLYHKEQARMLDIFIDKIQITDKGVHIDLRSNGLVGFVMDLQEHTPEIDPDRETGNLEELDNQPNLIESNQKPVVFKLSNNSEVIHLFIESSLGRKSARKTIISPEGKPINKDRNYEADAKLLNALIKAHRWQRGLAKGKYKDIKDIAMQEDINSSVYVSRVIRLSLLAPDIQEAILNQLHSNDLMLSQFMTPFPIDWDEQRRLFGGTA

SEQ ID NO: 4417 - protein, 524 aa, unidentified
  source 1..524: note = uncultivated organism
MQEKKAVIYARYSCDRQTEQSIEGQIRVIREFALREGYTIIGEYIDRAKSAKTANRPEFLKMISDSSKELFQYVLVYKLDRFSRNRYDSSFYKMKLRQNGVQVISATEALSDTPESIITEAMLEAMAEFYSAELGQKTKRGMRESALKCQSVGAPPPMGYKWGEDKKLHIDESTAEIPRIVFRMYADGKGKKQIADYLNERGYRTRAGRKFQVSTFDNMLVNRKYIGVYSYEDIVIEGGCPALIDRDTFDKVQNLVEHTKRAPARARAKVEYYLAGKLFCGVCGEPMIAAGGTSTNGEQHHYYKCRSHKLESGKCGKKSERKSFIEWFVSDQVLDLLNMEANKEKLADKVIAAYTASMEVDRVSELEKKIEAIKRKQSGIVDMLLEHKTQALLDKLDNLELQKSELEEELFSAKLTAAHIPTREEIVRWFERLRAAESASDGLIRQVLNTFVQKVFVWDDKALIVLSLYNTSETVEFEDIREWESMASEDPEITYEPLPDSNGNGSFKNGYVIDIHFRYFQVIL

SEQ ID NO: 4418 - protein, 522 aa, unidentified
  source 1..522: note = uncultivated organism
MSGKNNKAVKPTIRCAIYTRKSSEEGLDQEFNSLDAQREAAEAYIASQKAEGWVCLADRYDDGGYTGGNVERPALQRLLVDIQAGKVDCVAVYKVDRLSRSLLDFARIMETFERHNVSFVSVTQHFNTSTPMGRLILNILLSFAQFEREIIGERIRDKKAAQVRKGKWIGGVPVLGYDVDRSGPSPRLVINAREAARVRETFRMYLQEASLLPVVRELARRGWVNKQRITRKGKQVGGRPFDKATLHELLTNPIYAGKIRYKDELHAGEHEAIIDQDLFDRVQQQLKHNGRTGGAEVRNKYGALLRGLLRCKSCGAAMTHTFVTRNKRIYHRYYRCVNAMKNGRDACPAGTLPAGEIERVVVDEVRDLARDEALLAQVLADIHTAIDAELAEARRERDDLRRERNRHHEELQQLATSGRSTADVTARIADLHQQLSATDQRLPELESRVAELEGETVTQAEARAAFADFDGLWESLIPREQARLLKLLISTVEYDGKAGTVSVTFRPTSIRSLINRKMEEAA

SEQ ID NO: 4419 - protein, 545 aa, unidentified
  source 1..545: note = uncultivated organism
MNGPVSTLARCAIYTRKSTEYNLELAFNSLDAQREACEAYIKSQAHEGWRLIPTRYDDGAFSGASLERPALQQLLADVRSGEIDIVLVYKVDRLTRSLADFAKLIELFDAHGVSLVSVTQSFNTSSSMGRLTLNVLLSFAQFERELIGERVRDKISASKRKGIWVGGPVPLGYAAVDKKIVVVAVEAAAVRAIFGRYLELGSIRALAEDLDRRGIRSKPRRRSNGHTIGGGRFGVGALAYLLKNRFYIGEVVYRGEVHRGEHEPIVDSALFAAVQVKLAAQARARRRRLRGSPAILSGRLFDHRGNRMTPTHTNKRGARYRYYLSQAVLQKKPQAPGSISRVPAADVETLVLAALRNHLSASGAGKQLSDNDRDLVAHHVERVTLAANRIELRLRQIVEEAPPELGSNVSASVSSGPAIPIAKTIAIPWTSPAAAAAKGIIRVPAHNTPMALSRRDVLLTAIAKARQWMDDLAHGRAASFAVIARREAKVERHIRLLVPLAFLSPRIVSGLLEGTAPARLTITALARALPWSWAEQEQRLGLHCD

SEQ ID NO: 4420 - protein, 524 aa, unidentified
  source 1..524: note = uncultivated organism
MNKANINRQLNCAIYTRKSTDEGLDKEFNSLDAQRECAEAYIKSQTQEGWHCVPDRYDDGGFTGGNMDRPALKQLLADIEAGKVNCVVVYKVDRLSRSLMDFARMLEVFERNQVAFVSVTQQFNTTNSMGRLMLNVLLSFAQFERELISERTRDKIAAARRKGKWSGGMPLLGYDIEPQGGKLRINEVEANRVRAIYDLYLERESIMATIAELDSRGWNNKSWKTKKGTLRGGSPFTKATLFRLLTNVTYIGKLGYKDEVNEGEHDAIISLDVWQKVQSLLRRNGRTGGVEARNKFGAMLKGILRCACCDCSMTPTHTTKNGSKRYRYYVCMKAQKRGWKNCKSKSVPAAEIEKFLVDKIRNGGHDAALVDEVVEQAKIQSERELGALVAERGELVKELEYWNEAIRVAAPKIKPGSPDVASLEQLADWHESLRRAEHRHAIVSAKLTAMQAQTLTRGDVVNALTSFEPIWESLTIREQSRIVQLIVKQIDYDGATGRVTITFHPDGIKTIAIENRPELVEAAS

SEQ ID NO: 4421 - protein, 555 aa, unidentified
  source 1..555: note = uncultivated organism
MKNLTAQAVYNADIYLRLSDDDGDKPESNSIKNQREFITEFLKSMPEIRIHAERKDDGFSGVDFFRPGIQEVLQDVRSGAVNCVVVKDLSRLGRNYIETGKVLQEFAGHGVRFIAINDGYDTANAQGQASTILLPIKNLMNDSYSRDISVKIRSHLEVKKRKGQFVGAFAAYGYLKSPDDKNQLVVDDYAAEVVRDIFRWKLEGMSQQGIADRLNADGVLSPSEYKRSLGMKYISGFKSNPQAKWSAVAVGRVLKNPLYIGVMVQGKTGRPNYKIKKLIEKPEDEWIRVPGTHEPIISEVDFRTVSGLLRRDTRIAVQKKTVYPFSGLLFCADCKQNMIRKTVPAGGKKYYYYSCSTNRADKSACTTHNISEALLMDAVRDCIHAHMETVLNIEKTLQFIAALPAEDTEARKIDRQLEKLKADYEQAMRFKMSAYEKFVDHLLNEDEFKQYQRIYTEKCEAIAAAISKRQEELDAIVQAGSPQGEWIAHFKSFRHVDVMERKILVKIIDRIYVYEGNRIEIIFKYQNEYRAAATYIEQYMERQATQAAPTVKEAV

SEQ ID NO: 4422 - protein, 542 aa, unidentified
  source 1..542: note = uncultivated organism
MLPKQTEYKVGMYLRLSKDDERAGESLSIENQRKVLTNYITEQGWTLYDEYVDDGVSGVTFERPGVQRLLDDAKAGRINLIICKDLSRFGRNYIQVGQYTDYIFPMYNIRFIALTDNVDTASSDTASMDMMPIMNVFNEWYAANTSKKIRAVLETNAKAGKYHTTFSSYGYVKGDDEKRTPIIDSEAAMVVRRIFEMRAAGYNVKRIATVLNDEHILSPDDYRYKMLHKESPRYTHHLWSVIAVKRILRNQIYIGNLAQMRTTTVSYKNHKVIRKDESDWVIIEHNHEPIISQELWDKVREVDASVSTGKKTKEGVTLPLSGLCYCADCGTKAKQQSSAGGNTRAGYACGRYSYYGKKYCTSHYITVSALNQLVLDDIQRQIEFVKTDSNAREKYLARKRGLYAEQQGNDKKRLKEMGKRITELDRLIGSVYEDKVSGKMPEDMAFSLLEKYQAEKKSLQAEYDELQKRSDMARQDEADVDEYIRRLKSYAGADELTRRMALDLIEYITLDENPRKKSIPRDIHIYYKLIDRPLTDKKNALA

SEQ ID NO: 4423 - protein, 502 aa, unidentified
  source 1..502: note = uncultivated organism
MEEKENLIVAPYIRVSTDRQAKDGDSLDEQESELKKFCDYRGFKIHKLYIERGKSGGNTNRPEYQALIKAVRDGKIQAVVVKKIDRLSRSLLDFEDFMKLLQEKNIEFISIKENFDTTTALGKAMLRVALVFAQLEREQTSERLIDVFNYRASQGLYNGGVRPFGYTNVNKELVPYPKEKIIIEQIFHKFCDLKSTTQVAKFLNETGYRNRQNKLWDKREVFKILHRPIYKGFVSWNDKLYQGIHQPIISEKIFDQVQLVFQDKIKYQADTKTNALLQRLIFCGCCNSIMTPSHSLNRHKQKYFYYRCTSTQNAEKATSKCEFKYVPMAQLDQFLLEFLLSLSNESYWTPIELKILKHNQQIEIKAQAIKEEIRIIESKLQAIKDKKDQYLDTLILKSFNQSERQLINKRIEDMELEDKQLKGGLYKQEFELTKLEEEKVNIIEFKKIFVMFKADYEILSAYQKKEFILNHIKSIIYFPDRVSINLKLLPWPLDHYFKEARI

SEQ ID NO: 4424 - protein, 577 aa, unidentified
  source 1..577: note = uncultivated organism
MARKQTQFNESKPIYIVYARKSKFTGKGESIQNQIDRCVEKIHRITKDSPISDDQIRIFKDEGFSGGNMERPEFQKMMDLCHSKSENIKAVVCYKLDRFSRSISDFSAAFDELNKMRIEFISVSDDFDTTTAAGKAVIMLVTVFAEFERNILAERIRDNKEGLAKTGRWLGGMTPIGYKSTRITYQHDSFDRERTMCYLETIPREKEIVQRIFHDYLKYHSLTKIETSLRVSEIKTKKNRYFSVTAIRSILSNPVYMSADEDAWNYFEQHDCPLYPDKAMYTGQHGIMAYNKTEQDSHKCTKLKNLSDWIVAIGKHEPFVSGKDWVSVQTLLQQNASKTYRSSKSSRGLLSGLIVCGNCGAYMRPKMYRQLTTDGLKKFSYLCETKDKSRQHQCQMNNPPGEIDTFVCNAVKNLAENKEYLEQKLLSQLNKHNEINTSSMKSNLALLNEQLKSVDSQINNLIQNLASMTGPAVDLVNKQINELSEKSRHLKQEIDYQQTVLSQSLSPQTELNVIAEKLTRFSETFDTLSFEEKRSTLKMLIQKIVWTGSKVHIYFVGDDSDEVLFSGKKEPQQQDCQ

SEQ ID NO: 4425 - protein, 531 aa, unidentified
  source 1..531: note = uncultivated organism
MTQKNKAVRCAIYTRKSSEEGLEQEFNSLDAQRVAAEAYIQSQIHEGWQIMPERYDDGGYSGGNMKRPALEALITDIEAGRVDTVVVYKVDRLSRSLHDFAKLVELFDKHDVTFVSVTQAFNTTNSMGRLTLNILLSFAQFEREVTGERIRDKFAASKKKGLWMGGPVPLGYDVVDRKLVVNQVEVEQVEYIYKKYLELKSVEKVLHHITLKGYTNKRGNNYTKHSLRTILTSVLYIGQMAHKGKVYDGAQDAVLELALWQKVQKQLEENTLNEAGKKNEVHEHLLKGKVFDEEGNVYVTTYSSKKGRRHYYYLNKTTRNRINAKALHETILFALESEQAFINSLDLKGLTKEEIQHRYKKNLELIAKQAVDKIVVHESKFSIFVDRVKVEAIIQVNEVDKSAEPDLYEMSIDMLFKSYEGRKCILLNGNKVSHNDVDIKRHENMVRLIVQAFQLNEKFQKSKFSTIKEFAESQSMDRTYLGDLLKLRFLAPEIITMIFKGQSPMYLNASNLMRTKLPKCWQEQKKAFGLV

SEQ ID NO: 4426 - protein, 524 aa, unidentified
  source 1..524: note = uncultivated organism
MNKLNNNRRLNCAIYTRKSTDEGLDKEFNSLDAQRECAEAYIKSQTQEGWNCLPDHYDDGGFTGGNMDRPALKQLLADIEAGKVNCVVVYKVDRLSRSLMDFARMLEVFERHQVAFVSVTQQFNTTNSMGRLMLNVLLSFAQFEREIISERTRDKIAAARRKGKWSGGMPLLGYDIEPQGGKLRINEVEANRVRAIYDLYLDRESIMATIAELDNRGWNNKSWNTKKGMLRGGSPFTKATLFRLLTNVTYIGKLAYKDEINEGEHDPIVTLDVWQRVQSLLRRNGRTGGVDARNKFGALLKGILRCSCCDCSMTPTHTTKSGAKRYRYYVCMKAQKRGRRICESRSVPAAEIEKFVVEKIRQVVENERLVDEVVQQAEVQTQHELDALVAEQDEIVKEIEYWNEAIRIAAPKIKPNSPDANLLKQLADWHEDLRIAENRLTIVNAKLTLLKSQALTSNDVATALDSFEPVWESLTVREQSRIVKLIVKQVDYDGANGRVTITFHPDGIKSIARSNKPELAEAAS

SEQ ID NO: 4427 - protein, 594 aa, unidentified
  source 1..594: note = uncultivated organism
MADLVAFVRNSDFRDNSASPQQQRQVIADYAAAQQHRIIAWVDDDDISGDYGPFHPARKTAAWLSDTPPQPNDGFVTRAIDRVARNAEQVLRLLRWADHRGKIIISVKDGVDTATEAGKIQAKFMAIVAEMELDRIKQRARGSYRYLTQVAMRYPGGQVPFGYMPVCALCGSIRQECRCPETARTGWKLAADPVYAPVLREMIARVTDDREPWSLGQVARWLNQGGIPAPRDIVRIRNGRKPAGSAWTAPSVRKILMSKAMLGAVEVTEPAGRDDETGKVTRRSERKAVYDADGNLLLRAEPLVSYETWARVQAILAKNPGRGHPHARTSGLLKVAYCGICRSPLYASGTRYKDTVYRYYCCASSSAVSRNAGIPGRCPARRFPAGDLEREITAAILAEAGSRPYRVPRIIPAEEYSAPLAQVRDAVNNLVELAESGAFSGRAELFRQRMAALDARRAALEARPSRPARTTWEDSGMTIAEKWASMPRGTDPFRFLRDAGVKVYVTRDGSMPALAASGPMTAADIPHVIVRRYADVTLSVDLGPLGPLADALCRALTRQPDHKTGQSTSGLARHPAVTPSPHGGLHDHRTVIRA

SEQ ID NO: 4428 - protein, 662 aa, unidentified
  source 1..662: note = uncultivated organism
MYNTKEGKSCVIYIRVSSERQVKGYSLDGQKHYLAECAERRGMTVLDTYVEEGKSGKSIEGRTEFQRMLDDIQSGKVHTDYVLVFKLSRFGRNARDVLNSLEFIMKYGVHLMCVEDGLDSSTSMGKMMITILGAVAELERENIIAQSLLGREEKAKSGGWNGGFAPYGYRLVKGDDKSKGKLETVPEEKAVVQLVFDMFLNRNMGYTAISGYLNRNGYTRPPAKNAIRPSYGEWSSDHIKRMLSNPVYMGRVAWGKRRTEKVPGKDNEYRLVKQDEYILSEVISHEAFVSKEDFDKVQEIKAIRGKKGNHNIGQYNAHLLSGIVECPQCGAPMYIGMTKWTNQDGTKRRTESYVCSYATKHRGTSVCRRNGVVASQVEDEVMEYTRKIVRNPQFIKDLQEKVMAAVDMTEVENDITAYKNQLSALQRSRDSLERDIDRIAPDDKYAERRRADMTRRLNDLYDQIYKAEDLLQEGLMKKATLESEQMSVQSMIGILSSFDAIYDRMNAAERRDLVKYLISEVELFPREEQKTQKRFVKAIAYKFPIEQKVLTQFDECGASVETVCLLSKLKTKEHIEIEVDMDELDLTSAESKATYEEIREYALEHTGLKVSHLYIAQVKQKYGIIERENYNKLKSENAKQPQCPPEKEKAITEALHHFGMIL

SEQ ID NO: 4429 - protein, 542 aa, unidentified
  source 1..542: note = uncultivated organism
MKPIERKVLRCAIYTRKSTEHNLDLEFNSLDAQREACEAYIKSQAHEGWRLVADRYDDGGVSGASLERPALQILLADVRAGKINTVAVYKVDRLTRSLADFAKLVELFDQYGVSFVSITQSFNTTSSMGRLTLNVLLSFAQFEREVIGERVRDKIAASKRKGIRVGGPTPLGYRVIDKKLVVVPEEAEAVRAIFTSYQQLGSVGSLIEELDRRGIRTKANGLTNGSVRGGIRFGVGSLTYLLKNRFYIGEVVYRGATHRGVHEPILDLELFEAVQAKLVANTVTRQVRLKGSPAILTGRIFDDRGNRMSPSHSNKLGVRYRYYVSHAILQRRKAEAGSVTRVPAAEVETLVLDGVRKHLASMDEAKHSTTIADRDLIERHVERVIIKPQALEVRLFPTSEAPALTEEPGTKDLGASRLPTPAITLAWAAPSFAAVKGIVHAPSARPELKPVSRDALLTAIAKARGWVDDIRLGRIASFAEIAKREAQGERHIRLLAPLAFVSPRIILAIVDSSAPADLTVTGLAKALPYSWPEQERSVRLLQ

SEQ ID NO: 4430 - protein, 572 aa, unidentified
  source 1..572: note = uncultivated organism
MTGIDTGKDTRKYAIYSRKSKFTGKGESIDNQITRCKEYLKFHYDVENEDSIIVFEDEGYSGKNTNRPQFQIMLDACKRKEIKVIICYQLDRISRSVKDFSILSDQLTEWGISFVSVKESFDTSTPMGKAMMMITSVFAQMERENLAERLKDNFQTLARSGHWLGGTTPTGYKSTVTTGSIASNGKTRKAYMLEPIPEESRTIQKIFSTYLETNTLTMVEKLLQEEHIYTRNNIPFKCFAIKNILKNPVYASADETVWDYFHELNANLCFEKSECSSEYGIMAFNKSNQTSGIPHDMKEYEAWIIAIGKHTPLVSGKDWVKIQNMLALNASKTFRKPRSNQALLSGLIFCGHCGNKMRPKMGHSTKPDGSRSFNYLCETKEKSRQKNCAMKNAPGNLLDEMVCNEIKKLAEDDSVFLKQWRETKKALLAKGDTHFAELKSLKASLSEKEKQINNLLISLAESADSPAHAYIQERINSIHEEKIQLEKRIKELSEISENQSVMLEAELEFVPKMLASFSQSFDSMSVEEKRSALRLFIDKVVWNGETVDLYLMGSSDTSLSKVSEPLQWGSQN

SEQ ID NO: 4431 - protein, 582 aa, unidentified
  source 1..582: note = uncultivated organism
MADARQNGSVARVRLRCAIYTRKSSEEGLEQEFNSLDAQREACEAYITSQKHEGWSAVSTLYDDGAYSGGTMDRPALQRILQDIRARKIDVVVVYKVDRLTRSLADFAKIVEVFDAHGVSFVSVTQAFNTTSSMGRLTLNVLLSFAQFEREVTGERIRDKIAASKKKGMWMGGLPSLGYDVKDRKLVINEAEAATVRHIFQRYLEFGAVRTLQTELDAAGIVSKRRIASDGSQYGAQRFSRGALYLMLKNRIYRGEIVHKGKSFPGEHSAIVDEELWAQVQRHLEDNRIERRKGVADNQQSLMAGILLDANSNLMTPTHTVKKGTRYRYYISNHLITGDDVGGSHGQRVPASDLEALVTNRVRSLFADPVEILNVISKAQHDAPAQRRLRDAAASLSARWDDLPAESPQNMLRSFIVGAQVYADRIDLHIDPARLVRRLLDDRHGDVSGESHAVYDGDEERLVTLSIPARLKRTGMEMKFIIQGVTNPAPADTSLIRLLVRAQKIGKRLFEIGGPTLEDIAGEEKIVPSYATRLLRLTFLAPDIVAAILAGNQPADLTANKLMVDTRLPLDWRVQRTALGFA

SEQ ID NO: 4432 - protein, 542 aa, unidentified
  source 1..542: note = uncultivated organism
MAINERKILRCAVYTRKSSEHGLDQDFNSLHAQREAAEAYIKSQAHEGWTLVKAGYDDGGLSGGTLERPTLQRLLADMRNRKIDIVVVYKVDRLTRSLADFAKLVELFEAHGASFVAVTQQFNTTTSMGRLTLNVLLSFAQFERELAGERIRDKVLASRRKGMWMGGTIPLGYDVKDRKLVVNLEEAERVRLIFRRYLELGCVSGLQEDLRQHGVRSKRRILTSGQALGGGIFGRGQLYHLLQNRLYLGEAVHKGLSYPGEHERIIEDQLWNAVQAMLAENRGTRRRGRIESGALLGGLLFDDQGNRMSPTYAIRRSMRHRYYVSRGLIGGSEAKPGSRARVAAEGLERIVVDVLARQLGRVDLLRDAPHESWSVEIRGLVRETVERIVVQSSEVQIICKAGIASTLSQVPGDDDGRKLYSVPLAPPSPRARREIILPSAGDAKPRRISHDLMLAIARANRWMHDLSIGACADTAEIALRHGVNEAHVRRLLRLNYLAPDIIEAIVEGRQPRALTVRRLMRSIPCVWDEQRAIFGFALRMAI

SEQ ID NO: 4433 - protein, 514 aa, unidentified
  source 1..514: note = uncultivated organism
MPEVRIIQPIAEQAKKQRVAAYARVSSDSADQLNSFATQVEYYTSTIQAADEWEFAGLYADEGVTGTRADKREDFQRLLRDCRAGKIDRILVKSISRFARNTLECIQTVRELKQLGVAVVFEKEGIDTGSLGSEMLLSILGAAAQEESLSISQNIKWSYQKRMRSGDFITCSAPLGYFLEGNTLVPDPQEVPIVKHIFASYLAGKSTKEIAAELNAKETSNNIKKRSHWRDRTVYYILTNEKYIGDSLVQKKYTPDELPLGRKKNHGEVTRYYISGTHQGIIDRQVFKAVQELLGLRNALHAPKAEVQHSPLSRKIVCGLCGSAFYHRHNKETNRWTCAAHLKDPTLCSIGIIAEQDIRQAFLIVFNKLLDNPGILKTVLDQLLELQSKAFYTRPDIQDLNRKIAEIVGQNHTLARLQAKGCMDSASYIERCNQNNRKIEDLRSQLRKLQTPVAADSTIENTKCLIDTLNGAEPMLEFEPVIFKSMIHKITVYPDRFCFHLINGLILDEGRRRS

SEQ ID NO: 4434 - protein, 527 aa, unidentified
  source 1..527: note = uncultivated organism
MLNNNNTQNGQCKTLRCAIYTRKSHEEGLEQEFNSLDAQREAAEAYIESQKLRGWRAIPYRYDDGGFSGGSMERPALQRLLVDIDDGKIDVIVVYKVDRLSRSLLDFMKMIELFNEKEVSFVSVTQHFGTTDSTGRMFLGILITFAQYEREVIGERIRDKVAAAKRRGKYCGGPAVLGYDVDRENKKLLINQSEAPLVKLIFRRYTQVGSAKKVAQELNEQGYKTKSWTTKKKKERVGTEWNTAQVYRLLNNRLYIGEIAYKENNYPAEHEALVDQNTWDKVQALLSENNRTKMSKARVKMVSPLSGVIRCGHCDSAMGITYTNKGDRRYSYYICEKDTKRAVSRCPLKRVPAGDIESVVLEQLGAVFRTPTLVAKTYFAAREIEAEERQRLQAQKKELEQSLQNVRQEALKLMSPDNDDPGRNSRLPLVNQQAVDLTKQLTNVSARLKVIDTELISEGDVSEAFQSVETFWEDLFPLERNRLIQLLVETIEIRETGIDMELKTNGLTNLVTELAGLACEVRERGNS

SEQ ID NO: 4435 - protein, 543 aa, unidentified
  source 1..543: note = uncultivated organism
MSRRPNGAARVVPETKRCAVYTRKSTDEGLDQEFNSLDAQRESGEAFIASQRHQGWECLPDRYDDGGFTGANIERPALRRLLADIEEGKVDAVVVYKVDRLSRSLLDFARLMEVFERRQVSFVSVTQQFNTATSMGRLVLNVLLSFAQFEREMIAERTRDKIAAARRKGKWTGGPVPLGYDVVDKKLVVNELEAVVVREVFSLYEQHRSALATARLLNEAGRTTKHHRANNGNVRAGKPWGKDAVLRVLKNPVYAGLMPGSGELHEAEHPPLIERARFLRVQAMLNARKGEKRDRGRNPAYLLRGILRCAGCGGAMTPASTRKARKEHRYYRCVTRDKKGGKACTSRPLSADAIEAFVVTRIRDVAADGTLAADVERRLQARIESRRKELLTERRDLPPTIAKLSAEGRRLVEKIGEANGAAASLLDERIAEVADQLGRAEQRLAQVERAAAALDHAEIETRWIARALADFDAIWDVLTTDNRARLVRALVRSVTVDEPSGNVTALLTDLDLGDICPEGEAGDHADTHQAGGGRAAPSMEARA

SEQ ID NO: 4436 - protein, 516 aa, unidentified
  source 1..516: note = uncultivated organism
MAEIRVINPIKSVEDKKLRVCAYARVSSNSADQSNSFITQVKYYTDLIKKNHDWEFVDIYADEGLTGLRTDKREEFLRMLNDCRKGKIDKIFTKSISRFSRNTKDCLETIRELKALNIEIEFEKEQINTGKITSEMIVTIHSSMAQEESISISNNMRWSYQKRMQSGKFITCKAPFGYRLIDNELVIDEYESGIVRRIYDGYLNGKGKQELADEMTREGVPKREGCQKWNYSTVAYILTNERYIGNALLQKKHTTDTLPFKKMRNFGEKDRYYISESNEPIISKEIFEQVKQISDNKHFRFSGDEPKNYALSKKIKCSKCGSTFKRTTSKEKVFWVCRNHFKNKDLCDTKQISEQQLYVAFIKIYNILKANSRTLLSTLLQQLTELKTKSYTNGDKILEIDKQVADLSEQNLVLNRLRSKGYMDSALFTSQSNELIKKISILRSQRRKLLNLNDDDKTIDNTKLIIDILENGAPFIAKFDVTLFNDLVERITVNSQDEASFYLINGLELKEKIERG

SEQ ID NO: 4437 - protein, 575 aa, unidentified
  source 1..575: note = uncultivated organism
MKDRPTKRYVIYSRKSKFTGKGESIENQIELCRQYIAAHYSQEEADAALVYEDEGFSGGNLERPQFKKMMKDSQETPFAAIVVYRLDRISRNIGDFAKLIEDLGKRKIDFISIREQFDTSSPMGRAMMYIASVFSQLERETIAERIRDNMHELAKTGRWLGGTTPTGYESESITSVTVDGKTRKACKLKIIPDEIDLVKRIFDKFLETQSLTQTDAFLLQGKYRTKRGKAFTRFAIRGILTNPVYMIADEAAYEYLTEKGVELFSDRSDFDGRHGIMAYNRTLQQPGKAHQEKPMEEWIVSVGKHEGVIPGAMWISVQKLLELNKSKSYRKPRSNVALLSGLLVCGRCGNYMRPKLTSRTNASGEPIYTYMCAMKERSRGHVCDTKNANGNTLDAKVVDFLMKLGKNSEEMARQITMTKKIIQGNREGCDAQIAKIKSQIEEKESGIKALVLSLSKAAGSNTEQYIIQQVDELHGEIEVLKKRLQELESITQKHQLSDLEFDIIRQLLSSFGENLVDYSVEQKRAAIRTFVKRIVWDGENAHIYLFNDDGDCEYPEPTDDWDGGDSKSPSGEDSK

SEQ ID NO: 4438 - protein, 526 aa, unidentified
  source 1..526: note = uncultivated organism
MKNGKNGAHKAIETKRCAVYTRKSTSAGLEQDFNSLDAQRDSCVGYIQRQQGWTLVDEHYDDGGFTGANIDRPAFQRLIADVEAGKVDVIVVYKVDRLSRSLLDFAKMMERFNAAGASFVSVTQNFSAADAMGRLTLNMLMSFAEFEREMIAERTRDKIAGARRKGKWTGGPVPLGYTVVEKRLVVHELEAVLVREIFDLYLEHRSALGVARLLKERQRSTKRHRAANGNLREARTWKKGDVLRVIKNPIYAGFMASGGELHKAEHTPLIETETFTRAQAQLEDATKTKTTHGRNPEYILRGVLRCACCGSGFTPASTRSGRIEHRYYRCVKRDKEGKEACPSSPLPTGAIEGYVVERLREATADGTLAAEVAEGVKARVGERRKGLVTARQKLPPKIASLSAEARRIVDTMASLTGTARKLVDERLQGVGDELARCEAQLTAAERELANLDALEVEIDWVARCLTDFDGIWDVLTPENRGRLLRAVVQRVEVNEPANQVSVFLADLGAEVPAEVASQPAQQEVSP

SEQ ID NO: 4439 - protein, 584 aa, unidentified
  source 1..584: note = uncultivated organism
MRVATCTRNSTDEDHQPHSLEAQAERLAAHVKSQPDWELTRRFSDQASGATTERPELKRALAEARAGRFDLLLVYRVDRFSRSVRGLEQLLEDLDAAGVAFRSATEPFDTTTPAGRMMVQMLAVFAEFDRATIVDRVSAGMERKAARCGWCGGSRPFGYDVDQKTGCLAPQADEAPLVPIIFDRYAHGREGARALAVWLNGAGHRTKAGRPWSHTAVLTVLRSPVYVGKVFFRDTLHDGPHEHLVDEKLFSRVQTLRSERGEDWSKRASATSPFLLAGLVVCDRCGKHFVGTSAVGNRYRYRYYTCISRQRYGTKYCDAECLPAEELDAAVPDALLHTYERTNLFDKAVSAARRRARSQRVNHDQELAVVDAGITKAEDAIERYLSAFEAGSLSEAQCGKRLEGLATKMRDLRTRREELHSAMEHAKAAAPDAAEIAAMRHHIEHALTDGSVPARKALLQALVHEIRVEGRDRVVPRFRVPGGAEPKVRALARLAPPAGLEPAHPAPEAGALSAELRGHVAGSWAGTSATVPGPRTLAAPGPRRHGPGRGRWVDPAGSGPEAAGACRAAVGGSARQGQRAWRWL

SEQ ID NO: 4440 - protein, 560 aa, unidentified
  source 1..560: note = uncultivated organism
MLKLSLDRHYKAAIYLRLSREDGDFSCSSEKFESNSISNQRLVILDFLKKCPEITLVKEYCDDGYTGANFDRPDFQRMIEAVRQGEIDCIIVKDLSRFGREYIDSGAYIQKLFPMLGVRFIAINDNYDNAQPGAADNELILPFRNLMNDSYCRDISVKVRSNLEAKRRNGQFVGSKVVYGYMRSPENKNLLIIDPEAAAVVQDIFRWKIDGQSPAQIADRLNRNHIPSPIEYKKGKGSKQRTCFQTKEVAQWSAVAIYRILKNEIYIGTLVQGKTTSPNHKVKKTVRKAPNEWVRTEHAHEAIIAPAQFDLVQRLMLDDTRSPVGAKGVHLFSGKVFCADCGSPMVRKVSRSNGRAYTYFICGGNKADKHVCSSHMIRESSVYDTVLIVIQAQIAAAMDMTAALRQVDGLAWENRELERLKAKRAFQEEIADKNRRLKAGAYDDFKNGLISREDYKTFTEQFERQIRGAVEALTQLDRERNSIMGGLAKQQGWLSQFTQYENIQELSRNSVAALVDRIEIREDKDIDVRLLHADHFASIVAFLNEQRFRTNIIPIGREAV

SEQ ID NO: 4441 - protein, 567 aa, unidentified
  source 1..567: note = uncultivated organism
MSTFRRLRCAVYTRKSSDEGLDQEFNSLDAQREACAAFIASQVGLGWKLVPEHYDDGGISGGTMDRPALKRLLADITAQQVDVVVVYKIDRLTRSLGDFARIVEVFDGNGVSFVSVTQQFNTTTSMGRLTLNVLLSFAQFEREVTAERIRDKIAASKKKGMWMGGTVPLGYRVDNRKLLVKEPEATFVRGLFIRYLELRSVPALATEMTRQAQDAENNDASRPGWVFTRRVGKGMLYTLLSNPIYVGKLRHRHQVYDGEHPAIIDPDLFDQVQAVLEEQAATPRGSIANPDSHLLTGLLFDDIGDRMSPTHARAHGKRYHYYISSRIKGTRVVDNTAWRVPASRLDAIVLRAVTQFFADRPRLADSFRSQASSADVKRWLSGAAELNQRLANADAPARRSLIRSLLTKVVLRHNAIMLEISTDALINKLHTSGTDHRSDVDQDEEHTIRSITCDVPVAIERRGIEMRLVIENDQGGRTPDAALVDLIAKAHLYLRHLTSGPKIGVSDVARHFGVDRVDVGRILPLAFLAPRVTRQFLSGDHAGDQSPRRLARTTLPMLWSEHDAALR

SEQ ID NO: 4442 - protein, 511 aa, unidentified
  source 1..511: note = uncultivated organism
MAQAIRIAPQTDLHGGRIRVAAYCRVSSNSADQQNSYARQISVYKTMIEKRKDWELVEIFADEGITGTKADKRPDFLRMIRMCELRKIDLIVTKSVSRFARNVKDALEYVRKLKRLGVGVMFEKEGISTQSMADEMLLNTFAAIAEEESVSISQNLKLANRKRMEKGDYINASVPFGFERKDKKLIPLEPEAEIVRWIYESYLQGSSTAAIASELNARGVPTKSGSAKWSGFRIARIIENEKNVGDSMFQKSYTSGFPFKKRKNRGEEDKYYSENTHEAIISREIFEAAQKLLEKQRLQNARKTDITVYPFTGKIRCAKCGSVIRRKVIKGRERWCCGLHIEDSGKCSAHYVQTERLEGGFIAIVNNLRFGGNILDNAVGYLTKAIRKIRMSDAASVGISKEITELNGQLLMLEQLNGKNYIAPEVYQSKVREINKRLNELKIGKPLAAGAKLEETLKELKRLKERIEEIEEPLTTFDEGLFGEIVKSGTLSANDELTLEFIGGVRFTEHI

SEQ ID NO: 4443 - protein, 528 aa, unidentified
  source 1..528: note = uncultivated organism
MVLAAIYLRLSEEDRSKLNKGDDSESITNQRSMLTAYASERGWDIYDIYSDEDYSGSDDTRPEFNRMLADAKDRRFSVVICKSLSRFARDVSMVEKYINGLFIEWNVRFISLLDYADNFQQGSRKNIQINSLVNQWYLEDLSKNIRDTMNSKKKQGQYTGALAPYGYIKDPDDKHRMLIDEEAAAVVRRIYRLYLEGYGNKAIATLLNDEGIPCPSKYRLLKGFKTNRKEDVADELRWSDHTVWHILRNPNYVGDLVQGRYGKPTYKSKTLKEKKNPDEWIVVESAHEPIVSKEDYERVQAAKISRGQHNRNASVSRAVANIFSGIIKCKICGRSLILSGSGQLNKGARYLRCAGRKSGIANCTCAMVKYDMLVDEITNRFREIITVYCDPEQLEKHAYRRDFSSEIASLQKVKDRNLFELKRVGDALSSSYIDKTSGILSDDDFALISANLRDKREKLEEENTQIQSQLDKLHEKQSAGDRVNHIITQYRDFLELDRDIIRAFIEVIRVGERDSDTNEVDLEISYNF

SEQ ID NO: 4444 - protein, 554 aa, unidentified
  source 1..554: note = uncultivated organism
MTGMGGNGQNGRNGRVATTNNQPVKRCAIYTRKSTTAGLEQDFNSLDAQREACEVYIRNQQAQGWILLPESYDDGGYTGANIERPAFQRLMADMEARKIDVIVTYKVDRLSRSLLDFARIVEIFERHSVSFISVTQNFSTADAMGRLTLSLLMSFAVFEREMIAERTRDKMLASRKRGKWTGGVVPLGYQSVDKKLDVVPIEAAIVREVFSLYIETQSTLAVAQILNERGILKTVKTKKGLIRSGRPWTIQSVGSLLTNPIYAGLIRAGNEVVPGEQEAIIAEDELRAVQRIRESHKPNGPIIGRNPSYLLRGLIRCAHCGASMTPGSTRKIRDKGPVKEYRYYRCSTRDKQGSEACPSKPLPAKAVEEFVIDRIKDIARDKRFIAQTWQKLETDIAKEKIRLIERRRVLTAQIARSSLEAKRLAESLGSGSISGSAKKAIELQLEQTGKLLADSEKQLNDLEHRLNALNNSQTDFAWVARTLRNFPALWKTMTPINHRRLVLALVKKVTVNEETDVATVVIRDWTEMVEKEGMHDDSDSDYQDKTGQAGEDQS

SEQ ID NO: 4445 - protein, 728 aa, unidentified
  source 1..728: note = uncultivated organism
MRVATYTRISTDEDRQPFSLGAQSERLDAYARSQDGWRIVRWFTDQASGATLERPGLRGALSEAAAGVYELLLVYRVDRLSRSVRQLAQTAEELERHGVALRSATEPFDTFSPAGKMMLQMLGVFAEFERATIVERITAGMERAASQGRWVVGKVPYGYLRDKQTKLIHAHEPQADVVRRIFAMYVEGRMGAEAIAKTLNAEGHRTKNGQPFARPIVLSILANPIYAGKIEFRGMTHPGLHEPLVDAATTETARRILAERGESQALRRAHSTEYLLSGVIRCGRCHRAYVGTSARGRRGIYHYYVCSTRYRYGTEFCGGDRLPKDGLEQAVIEQMQDVYTDSSLIKQALADTAVEDSEPAEDAARRLAGVRQELAGAKRSLDRYFAAFEEGSLSPADCQERIAKLKARTDALIAEEASLTQKAAEAPEAPSAVDVAEWAKHLGTLLRAGTAQQRKALFRLLVKELRVMSREEILPTYKIPAMVRAPEGQVETSGLEPPTPVQSTSGVRGCNAPTCGDDRCPGQSRGCRGMTLLSRLSGVFVRAMCARKVDPGAPPSESTFSSGYIRAEDLGQRLGVGLTNQEGGHGHRRRNAVCSACDEEVSCVCRGDQGRGDCLPVLRLQFQHSEPGRSGGTREKDERLCNCLARPRHRVGVWLGLDPRLGIRIRGQRTDRPFQWTPDWPRNGHRRHCPRLDWRWPPLARHHRGGLQLLGQPVLLRRISIEDLSILR

SEQ ID NO: 4446 - protein, 547 aa, unidentified
  source 1..547: note = uncultivated organism
MAKRPVRCAIYTRKSSEEGLEQDFNSLDAQREACAAYIASQKGEGWTLVAERYDDGGISGGTLDRPALQKLLADIEAHKIERVVVYKVDRLTRSLADFARLVDRFDATGASFVSVTQQFNTATSMGRLTLNVLLSFAQFEREVTAERIRDKIAASKKKGLWMGGLVPLGYDAKDRSLVVNEPEAETVRTIFRLYLEHGSVRRVKEEADRLRLVSKRRAFAGGRSTGGVALTRGRIFHLLSNPIYVGEIRHGTQRYPGQHPGIIDRATFEAVSAKLEANTRGTKARTTATASSPLAGKFNDETGDRLSPSHAVRRGKRHRYYVSRRLIARSGERCVDGWRLPAVVLETAVASLIADAIKKPSLVRNAPPAAMQTLPSATQSLTETLTGDGRGPLLRAFVAAGCIEPGRLSIRLDPAALAEQLGIPPGHINEEALTLAGAFTLRRRGVEARLVLGETSSGVDRTLLKNVARGWAWFEELKAGTTMRAIAKREGVTQRRVARLVDLAFLAPDIIQAVVEGRQPVPLTTDSLIKSPHRILWVEQRAWLAAI

SEQ ID NO: 4447 - protein, 510 aa, unidentified
  source 1..510: note = uncultivated organism
MTTAIYIRVSTDEQAKEGYSCTAQENILRAWSTIKGCSEPRVYVDDGYSAKNLNRPQIQSLLRDCRSGLINAVIVWRLDRLSRSLRDTLDMVEDTFRANDIEFISATENIDTSTPSGRLTLNILASVAQNEREVTEQRVRTVCEEIARTECRHLGGVPPYGYAVDETLHYIVDPRESHAVALIFKLYSKGYGYGTIIDHLDRYGHKTRKGEQFKKTALHDMLKNEKYTGVYVYNRAAPARRDGSRNSHAQKSADRIIKIPGGMPRIIDDITWKVVQDRMAENKHMGGSFRTRREYMLSGLVYCGNCDRHMVLNTRGKDRNGTVQKYYECGNNDVRRIRLEKLEKGVIDFIVELTNNDEILRRACEIANEAAQRESDAAEAETASLREELASVVARIKSVIDFISTAGANAPASLAQELNSLDERKIELEHKIFASSNITSAVDTAALVERIKKASHIADLDPHMQREAVHQIVRRIDVYTDKVIVRLRTSNDPIGGGVALPTISLVILIR

SEQ ID NO: 4448 - protein, 523 aa, unidentified
  source 1..523: note = uncultivated organism
MPKVGIYCRLSIEDKDKSEQLDSQSISNQKSMLRDYCIERGWEIYDIYVDDGYSGIDRSRPAFCRLLRDCEQGKINIVLCKDQSRFSRDTMVIEEYLNDKFLEWDIRFIGVADHADTENESYGTIRLFTSAYNEMYVKDISAKIRRTLSYKREQGQFIGSFAPYGYQIDPEDKHHLIIDPETAPVVRRIFDLYISGEGYRKIVQQLNTDGVLSPSAYKRANGSKYTNCNADASNSCGLWTQSTVSKILTNEVYTGTLVQGKSHHVSYKNKKRKKVNPSDWVRVPDTHEAIIDAETWARAQERLNSRARTGKNAQTLSPLSGKVRCAVCGRPMKRNVYYNKAKTIQYYGLQCASYKTGAMNCPNTRSVSGKMLEKTILDELNSIVKSYCQSDEIHFNDFHSDQLKTLESSLAKLKERQESAKKRLVAMYKDKLDGVISEADYQLFRSSLTVEEQQASERIETVCEQIAACRKRIENAAGQRALLEQYTHFEQLDRTIADEFIDYIEIGMTDEQGVREIHIHWKI

SEQ ID NO: 4449 - protein, 594 aa, unidentified
  source 1..594: note = uncultivated organism
MRAAYYGRVSTADQVEGSSLDTQRERCLAAIRDRDWEIEGEFVDEGVSGAKGNRPALDKLMAACHEGDIQAVVVAKLDRFGRSMRHLARLLGELDDLKVTFVSVAEAFDSSTPSGRLQRNILGSFADFERDQIRERTMSGKMAAVERGFWWGGPPPYGYRLEPSEGHKKLVLDEKESEMIRLAVGLIVDEGKSTGEAAKVLNALGLMPRSAAAWTYHSLRRMLREARLTGDWAFGRPATYQRGSSEGKFTQRIEAIITKERHAELRAALELTSTGNPSEYLGFYLLSKGLLTSVCGSNMWGKQRRDRGTRIYNCANKIQPTQSSPGSCDCLTIPADVIEGQVWAEVENLLGDPGRLMTLAAEYLDRRGEQISSEADSVEALRIKIAQLETAKTQHAAAALKHGLLDPKLLRSAIGSLDEELSVLRRRVSQVESWRDVNGAMTGRMQQLIDLAERAHHRLDGLSPQEKRVVLEALEIHVSVLGWEHCDTCGGKGKVSGGRGGLPCPTCHMVRQSPRLRIEGTWTSALIEQYGDVWAGQNAGPTPRSPVPMSGRTSSRRPSAPPLVARSSWVRPGRAVRRAVRRREPHEAARWGSR

SEQ ID NO: 4450 - protein, 503 aa, unidentified
  source 1..503: note = uncultivated organism
MNNRIDAIYARQSIDKKDSISIESQIEFCKYELRGGSCQEYQDKGYSGKNTDRPQFQMLVEDIKRGLIARVVVYKLDRISRSILDFANMMVLFQEYNVEFISSTEKFDTSTPMGRAMLNICIVFAQLERETIQKRVQDAWYSRCQRGFKMGGRAPYGFRTEPIIIDGIHTKKLVIEPTEAAFVRKMYDMYIDPRISLHDIATQLTAQGVRSFYGKPFSRSTISLILRNPIYAMADLDIYEFFKSQGTEIYNDVADFAGTNGCYYYRSKGNIDNKHKYLQGQMLVLAPSEGFIPSELWLRVRKKIMASQSYQPARKARNTWMAGKIKCGNCGYALMSAHSCGYLYLRCTKHAENKSCPGCGTIKMRELEALVYQQMVKKLKDYKTLTGRKKKKAASPKLTAKQTELAQVESEIEKLLDTLTGATPVLISYANAKIEELDSRRQALASEIAKLTAEAVSPEQIDTISNYLDDWENVSFEDKQQVVDLMITVIRATSEKLQIEWKI

SEQ ID NO: 4451 - protein, 536 aa, unidentified
  source 1..536: note = uncultivated organism
MKTSQNIVGGALAGELQLEAPRVIVINPTVQVKKDKLRIAAYARVSSDSDDQLNSFAAQVSHYTTLIRENENWELVDIYADEGVTGLRMDKREDFQRLLRDCRKGKIDRILTKSISRFSRNTRECLETIRELKSLGVTIYFEKEHIDTGEISNEMLLTFFSGNAQQESMSISGNMRWSYQHRMKNGKFITCKAPLGYRLQSGTLQIHEQEAEIVRYVFNSYLNGKSKDEIADELTAQGVPTRDGKDRWHYSTIDYLLKNERYAGDALLQKRYTTAVLPFQKKRNKGEKDKYYIKYSHPAIISSDIFERAQELNQSRNIPTMSKRSMYPLSKRIRCGDCGSLFKRKACNGKTYWVCHNHNKGKSNCTVTQIPEPEIYGAFLRLYHKLKLNYDKILSPMLAQLQALKRHRNLSNLQVVELNRQIAELTERNHVLNGLKSKGIIDSALFISQTDELSRKIRALKAEKNKLMEKDEDDSAITETRSLIEILEDGPERLSGFDETLFDSIVELVTAESGERLKFKLINGLELAEPIERTVR

SEQ ID NO: 4452 - protein, 561 aa, unidentified
  source 1..561: note = uncultivated organism
MARKSRAIITEQKQTRFRVWRIAIYIRLSREDSRSYDESESVTNQRAIIEQHIANFNDGDEYIIIREYVDDGISGTTDDERDSFQEMLTDIKNGRVNCVIVKDLARSFRNYSDQGYYLDDWFPRYNVRFISLFHQSLDSYKEPRNMRSIAVPIQGVMNENHCAETSDKVREVFDMKRRNGEHIGSFAPFGYLKHPEDNNALVIDEPAAAVVRDIFNMFLDGMSKNAIVHTLNEHGVLCPSAYKREVQKLKYTQPSLDPAKTPLWTSTSVAGILNNRMYCGDMVQGRWRVKSYKIHVQERVPEDEWYIVENTHEPIIERETFEKVQALLKKDTRTGPQQKKLYLFSGFLRCADCGKAMARSQVKGTVYYFCRTYKDQSKTACTKHSIKHNRLEAAVLYAVQQQVYLAVHYSNTIAGINKAPLMKSQSVKLTNALDQKQRELAKIARYKQAVWQDWKDGEISHIEYRHMKEDYDRQTAELQQVIDTLEQEKAELEKGIDTENPFLATFRQYQNIEKLTRDILIELVECIKIHENGNISVKFRFADELRRITEFIEVNTHENAV

SEQ ID NO: 4453 - protein, 564 aa, unidentified
  source 1..564: note = uncultivated organism
MTSKKSKKLKCYIYIRVSTEMQVDGYSLEAQRDRLTKFADYQGMEIVREYCDAGKSGKSIVGRPDFTRMLRDVAEEQDDVDYILVFKLSRFGRNAADVLNSLQQIQDFGVNLICVEDGIDSSKESGKLTITVLSAVAEIERENILVQTMEGRKQKAREGKWNGGRAPFGYQLDTKNECLVINPEEAEIVRVIYDKFAHTNMGVESIAEYLNTHGYVKNRCRDFELGHFTRGLITKILDNPVYLGKIAYGRTTTEKVKGTRDQYHRIENDDYLLYEGKHDAIIDEDTWLTVRTKRSETGLPWVKTHSLEHEHILSGILKCPVCGRGMCGIVNRYKKKKTGEYNDRFYYRCNRRNRKKNGEHCTFSQAIKQDDLNAEVENIVLDMVRDERFYELVRAKMEDKIDTDNLQAERDNLREQLRQAEGSKRKLIEQMDKLDSSDRHYNRKFQDMQDRLDIFYDRITELEEAIITVSRKINSANGEQINADTLYKILQNFDIMYGKMSDADKKQFYQTIIKSVEIDENPSSGDRLVRHIDFMFPISYEADDSQNLLFPLNDVETVVSLSRV

SEQ ID NO: 4454 - protein, 543 aa, unidentified
  source 1..543: note = uncultivated organism
MKYAIYVRVSTEEQAQHGFSIEAQKEKDCAFVTSQDGIIHKIYIDDGYSGKDTKRPALQNLLQDAEQKKFDIVLVYKLDRLSRRLSDLVTLGEKFEKIGIGIKSVTEPFDTTTPAGKLMFNMLGSFAQFERELIGERTKLGIMRRIKNGKWSTTPPFGYDLKDGKLIINETEAEIVKKCYKLFLEHNLGVELIARRLNKEDLISKRKGKWSKNSVWTLLTNPVYIGYIRWDGEVIKGQHKPILSKQIFDTVQERLKEKDRYAPWVGISPNLFIGLIFCAKCGAQFVSSKPGNGSKKGKYRYYACKGRKHGKCNQDYIRADILEEIILNKIKEIASQDKVIQDYLKKATEENSERLKEFKREKLQINQRLTKLNEIKEKKIKWMLSHLPSKKVATEMSNEVEKLLDEIEVLKEHLAEIEAGIQKIDLDGANTEIIADFLLRFIERFEKLEIGEKKLLIQAVVKRIEVYNKNKISLKLTLPVFAENEKGERNPSLDSGVVSFASSSGLAAPRGFEPRLLGPEPSVLPLDERAKSTRDFLASNYPL

SEQ ID NO: 4455 - protein, 541 aa, unidentified
  source 1..541: note = uncultivated organism
MSEGQLAIYCRVSSQTQKDDGTSLVFQQQRGVELAQQLNLTPKIYNEGAASSHTDDLTKRPTVLRLLNDVEKGYIKNVFVWSMDRLGRNETALSLIKAKLQSADVKLYTNGGQYDLTDPQSNFMFNVMNAFSVLDNAIRMERFRSGKLERLKTSVGHWKGGPPPFGYQLEDKKLVENKKESKWVNKIFEMYSENKSLEQIRMTLMSNGVLSRRGNAVFSTLSIRKILSNTHYGGYYSYTDRKTNETITIQCPPIVPQPLIDKVSEIHSKRSKGQRKERETKQTYLLNSFLFCSHCGSRYTVYKHNSDKQLPYYYCLQKTNYHKNKTEKCVAKRNLSMYQTDQTLFDLILKVVSESNLFKETVKEELVGDRDDVISGIQKKKYNDRIKKLNTEIEKIQSSIQTLINNEMGDDEVLQKLKEKVDEHQSEIDGINQILINSKRKAGWIDWVGEFDKRIERLHSAEVSIDEKKDFLQRVIERINVESPNSKDHNIEIHFKLPYVDDKLEWRNPKDKSKGYELKDGKKLLKTTLSASKKSIQNKEL

SEQ ID NO: 4456 - protein, 588 aa, unidentified
  source 1..588: note = uncultivated organism
MADTAQSARRNGKKHRCAIYTRKSTDEGLDQAFNSLDAQREACAAFILSQKHEGWSASPTVYDDGGYSGGTMERPALKRLMADIEAGQVDVVVVYKVDRLTRALSDFAKLVEVFDRQNVSFVSITQQFNTTTSMGRLTLNVLLSFAQFEREVIGERVRDKIAASKKKGMWMGGQPSLGYDVKDRKLVVNETEAKTVRHIFTRYLDLRSVRELKEDVASAGIRSKQRIRSDGSVCGGQALGRGALYQMLQNRIYRGEITHKGAAYPGQHPAIVDQTLWDQVQALLAANRVEQTTGARAKQPSLLTGLLFDASGERLTPTHAVKKGKRYRYYVSASLMTGIRKANAAGWRIPAGNLEGLVIERLRAFLRDRGELLDTVGEHPSSDVGTRQVMERAGQIAEELTNRSPGEIRRLVINLVRRIGIGPQSIEIAVDRQRLISILQGQVVQPPDRTETDGTDPEDFVKLSIAARLQRAGREMRMVVQNANDERPADPALLRVLARSHDIANRLVEHPELSVHDIARGEKVTAAYLYSILRLPWLAPDITDAIVNGRQPPRLTARKLIRLSTHLPMDWGDQRRLLGFPQDQPADA

SEQ ID NO: 4457 - protein, 536 aa, unidentified
  source 1..536: note = uncultivated organism
MITSQNCVTGTSAKTLNPAGPQVIVIDPILQVRSHKLRTAAYARVSSDSDDQLYSFAAQVSYYTELIKENEKWEFVDIYADEGITGLRMDKRDDFLRMIRDCRKGKIDRILTKSISRFSRNTRECLQIIRELKSIGVTVCFEKEHLDTAEISDEMLLTFFSGNAQQESMTISTNMRWSYQNRMKKGRFITCKAPFGYRLVDGILEIDEQEAEIVRYIFDSYLNGRSKDEIAADLTGMGISTRDKKDRWQYTSVDYILKNERYIGDALLQKRYTTDILPFQKKRNNGEKDKYYIKYSHPSILSRDIFERTQELNRSRVLPSMSKRSVYPLSKRIVCGECGSMFKRKICGGKTYWVCRNHNNGKANCPVVQIPEPEIYAAFHRMYHRLKLNYDTILCPMLDQLQALKRHRNLSNLQVIELNRQIAELTERNHVLNGLKSKGIIDSALFISQTDELGRKIRSLKAEKNKLMEQDEDDSAIIETRNLIELLEGAPEHLEHFDESLFDSLVERGTVESGERLKFRLNNGLELAEPIERTVR

SEQ ID NO: 4458 - protein, 516 aa, unidentified
  source 1..516: note = uncultivated organism
MVIMKTIAKNCAIYCRKSTDEGLDNDFNTLDAQREACEAYIASQKAEGWKAIKTSYRDGGYSGGNLDRPGLQKVLSDIKNGHVQTVVVYKIDRLTRSLMDFSKLVEIFDEYGVTFVSVTQSFNTTTSMGRLTLNVLLSFAQFEREVSAERIRDKFAASKKKGMWMGGNPPLGYDVANRAINVNRAEAETVHHIYERYLALGSVAKLKRELHRDGIKSKAWISKRGNEMGGKHFSRGALYAILSNPIYIGKVRHKDKLYDGQHEGTVPPELWQRVQEQLKSQAVAHKGHKKSQSVNLLKGVLFDVDGTPYSPAYARKGDSKRYRYYVSQNLIQYRDHPKGTMARIPAHEIETVVGDAVSEHMVHSLGLDEVEDHQTVEHLERRLLPAEDLVKAAVSKVIVHRDELEISVNVSKLRAHLEKALSLILSEKSDQQHYMITVPFTTRRSYKGAIILKPKSAEHDPLDLPPVQLRNLIRGIVWRDEHFAGASMKEIAAREGLSKAGVQKIVMNSFETLKSL

SEQ ID NO: 4459 - protein, 582 aa, unidentified
  source 1..582: note = uncultivated organism
MENELTKRKRAAIYIRLSSEEQANEGYSPQTQKEKALDFIKNNGYEIDEKHIYVDLGYSGATDKRPALQKLLEDARKREFDVIVVYRLDRLFRNLRLLVNTAYELRELGIGLISVAEPFDTSTPTGRASLHLLGTMAEWQREVNLEARNEGALKAVKEGKWVGSGLPPFGYDFDPKTQRLKINEDEAKVVRKVFEWLVYDGLTVYQIQKRLNEMKIPTKFDRVGRKKKNGKGWWQPLTVWRMLKREIYTGVYYWRKYKKPNRSLNKEENLRPRKDWVLVKVPAIISRELFEKAQEKLSKNRMLSKRRTKNIYLFQHKLICGFDGRRYSSVFRRPDNPRHKGTIYYICPNKFRNQSPVKCKSHAIAESRLSVVWENLKSILSNPEKVFTHLKEYVEQRKGPDIREKINEIEKRIAFWKNKERRLAELYSEGIIDLEIYRKQWEECKREESKLLEKRELLNQTLLDEEEREKRVASLKELYQRLKDSLENASRQIKYEIIQRLIEKIVVKGNTLEIEYNFPFLEPLKVINKNVKEYELSSFCFKHEGICCKNKTFKVFAKVELLSRSEVSKRVWAKRKELAGVK

SEQ ID NO: 4460 - protein, 541 aa, unidentified
  source 1..541: note = uncultivated organism
MLPKQTDYKVGMYLRLSRDDERQGESLSIENQRRILTNYVQENGWSIYDTYIDDGISGTTFERPGVQRLLDDAKSGKINLILCKDMSRFGRNYIQVGQYVDYLFPMYNIRFIALTDNIDTANSDSASMDMMPIMNVFNEWHCANTSKKLRTVFHANAKAGKYMATFCTYGYYKADDDKRTPLIDPEAAAVVQRIFKMRASGMGHKSIADALNQEHITPPLDYKYDKLGRTYPLYSHHLWNAQTIRRILDNQMYLGKLVQMKETTVSYKNHKVIRNDESEWVIVENNHEPIISQELWDKVRERDRSVSRGRITTERITSPLSGLCYCDSCGAKMKMQKTPESKSPYSYRCGLHVRYGKSFCTSHNIRGTILEQLILEDIRRQIDFVTNDDKARAKYLARKQGNIALVMAEDNKRKREIEKRLDDLGKLMQKIYEDRVLGNMPDKACAELLEQYQQEKENLQAELNELRKRFDGYKREEEDVDEFIRRLKSYAGAEELTRQMCLELIEYVTIDKYVDMKTQRDIHIYYKLIDKPLRDKTNALA

SEQ ID NO: 4461 - protein, 558 aa, unidentified
  source 1..558: note = uncultivated organism
MTLARAYAVGLVGLDGHLVEVEADLARGLPGLSVIGLPDAALGEARPGPSGDRQQRASLAAAPDHPGAVTGLAAQARQRVRPIGLSSGTLLGMSRRAVIYTRISKDKAGAGLGVDRQHKDCAELAERLGWSVVGHHSDNDLSAYSGKPRPGYKALLADLEAGAAESVVCWHTDRLHRRPVELEAYIAVCEPRGVVTQTVKAGDLDLATPSGRMVARMLGSAARYEVEHMIERQQAAKLQASTAGRWKGGRRPFGYEADGVTVRESEAVEVRRAADSFLAGVSLHALARDLNERGATTSTGGTWKPSEVRKLLLRPRNAGKMEHRCEIIGDAQWPAILDEQVWQAIRAVCSDDSRRTTTGNARRWLGGSLYLCGVCGGTLRATTAGNGRGSHRAVYRCGEGKHVARSTENLDAFVEAVVLERLSRDDVSSMRDVVVDTTDLHVERLAVQARLDGLVDSYTAGTITARQMERGTGTLREQLDGLDRRLASTVTASALDGVTGANAAEVWPTLDLSRQRAILGAVMTVTVHRTRRGRPPGWQPGQPYFDTRGVEITWKGQP

SEQ ID NO: 4462 - protein, 526 aa, unidentified
  source 1..526: note = uncultivated organism
MNRQVTVIPAVMPQFVNKKTFIQKKRVAAYARVSTDFEEQQSSYEAQVDYYTRHIQSNENWQFVQVYTDEGISATSTKGRDGFNRMIADALNGKIDLIITKSVSRFARNTVDTLTTVRKLKDKGVEVYFEKESIFTLDSKGELLITIMSSLAQEESRSISENVTWGVRKRFADGKVSLPYKHFLGYEKGENDLPEIVEEEAETVRLIYRMFLEGKTAGAIARYLIDIGIPTPTGKQSWNPATIKNILKSEKYKGSAILQKTYTTDFLTKKKKVNEGEIQQFYVENSHPAIVSPEVYDMVQYEFQKRKSSKGYVTGNSPFSGKIVCGQCGGFYGSKVWHSNSKYRKEIWQCNHKFTNHEKCKTPHLYEEDIKKAFVDAVNRMIVNKNEILREYEGIIDRLTDTSALDREDDILREELETVTVLLRGCVDENARSVLNQAEYTQKYSELKDRFDRIQTDITAVSNKRMEYVAKSKSIMNFMQILQKQDGLITGFDEKLWNVAVEKVVVYANSIEKFIFVNGFEWNINM

SEQ ID NO: 4463 - protein, 515 aa, unidentified
  source 1..515: note = uncultivated organism
MTIASSGEALRVALYLRVSTARQAEHDVSIPDQHRQGEAWCSAHGCELVETFVDAGVSATSDRRPEFQRMIEAASERPAPFDIILVHSFSRFFRDHFELELHIRKLARNGVKLISITQEVGDDPMQVMMRRVMTLFDEYQSRENGKHTLRAMKENARQGFWNGSLPPIGYRIVEAERRGAKVKKTLAIDPMHADTVRLIYRLALSGDGTTGPMGVKAIVEYLNDCRICTRDGGRWGIGQTHKILTRTTYVGLHRFNMHGKGKTLKPDDEIITVAVPALIDQATFDAVQAHLRARNPKTLAPRLVNSPNMLTGLLHCAQCGGPMVMCNGKAGRYRYYACQKKARTDTSRCAGIAIPMDALDALIAKHMTERLLDRKRLKVILTQIFERQRERIARDGEGRLDELSRRGEEVRLRLKRLLKAIEMGALSLDEPSLQERLAYLQALQTRTEEEIRSLQAELNHPGTLAISPSLVRRIIKVAEQGLLQRGRGFRRSYLSVFATQIIAEAGKVQIVRARQ

SEQ ID NO: 4464 - protein, 563 aa, unidentified
  source 1..563: note = uncultivated organism
MKKRIRILLRVSSNQQLEADGDLTVQRALVMEYVQKQPDWVFDGKEYFEGSNSGYKNAVADRDILQEALQDAIEQKYDILVAYKDDRLGRRMWEVGAYIMNLKSHGVDVYTVKDGCISANFDDIMGQVMLAFRYGVAQKSSADTGLRVKDTAQKLVQAGRFMGGAAPYGYKLELSGVLSKHGRALHKLVIIPEKAEVVKYIYDLSLRKEFGSSKIAKTLNEDEYYKTLAPKDVWKGGTITSILTNPIYAGHVAYKRRERVNGKYHRLSNEDWIKSNEADENIKMIDSHIWDRTQDKRRQRREKFTKSLDNQDVTVIGRNDGMLPLVDVLHCGYCGCKMVNGSRYNYWTIKSTGERRTKKVPIYKCQHEWNGVPHKQKSQYRAESIDPIIFECLAAYIEKLQENESIFEQIQEKQNFEKKAKEANIKKEKDALQKIMKDIDTMESNIPSAMRGDYFLSLEKLSNLLQKSEEQAQAQKQVILDKELELQNMKVTADEWESLCTNLPTWRDVFLSADTATQRALVNKLIERIDITNEQVVVRFKVNLGEFIQQRMSGDFGVPKSRL

SEQ ID NO: 4465 - protein, 643 aa, unidentified
  source 1..643: note = uncultivated organism
MNEEKKIAGLYIRVSTEDQAREGFSLPEQEKRLRAMCEYKGYEIYDVYKDAGISAKTGNLRPEFERLLQDIRDKKVNTIVVLKLDRLTRSVYDMEGIMNFLEENDAYLDCANDDINTTNANGKMVARLLTTVSQNEIERTSERTKIGLTGAIKVGHIPHHAPLGYKHEDKKLVIDYATKDVAIRIFNMYHDGMTYQKISNVLNEEQVLGKTNWRDSTIVHILENLIYKGDFIHGKRTKHPTYYENVVEPLVSKEYWEECQVQQKKNSRSYKRTLNYLFLQKLKCPKCKRILGGKATTKKNGNVYYYYYCNDCKINIKENTIEEAFDEFMDSIVEYDSIVNQYFLPMIKQKVENPKEELEKEIKNQKDRFTRIREAYIEKVFTLEEYNKERKKVEEIIDKLEIELEETEVCEQLKFTPNDILVKRDIDFINSIKYPEKYKNNTKFWKEYTREEKSDLIMKYVDEIELEEVFNGKCIPKFVKFRESIVSASNELYWNGYYDRYVPSLFGNIYGNIRFSEYLSEKEVGEQIMRLRQFYDVGYYEATYNVKNQVFYFNFIEDNKALVRVFPLEDYRKIDPDMKMDTYNLGVIYVKEDNGTFLKNEDDVFKYIPAECDCNVVYSKEPIFVETKPVPYYEDEETEEVSP

SEQ ID NO: 4466 - protein, 584 aa, unidentified
  source 1..584: note = uncultivated organism
MKALIVTRLSRQVEESTSAERQRKECEELCKSEGWEVIGVAEDLNVSAGKTSPFQRPELKKWLGDGANNPGRMHEIDVIVFWRLDRITRSVTQMADLIRWTEKFDVVMKSATEQHFDLTTSMGKVIASLVSSFAEMELSAISERITADQQHRMRQGKYRGSRTPLGYTSAIAEDGSKILVQDEDQVSLIRWIIEQLHSGQSANAIAHELNNEGVLSPLDLDRESKGKEPLGGKWSGSHIRRALSSPTLLGQVEVADIIVDKNGKPVLKSGKKQYGERRVLRDESGIPIQRAEPILTRDEFKKLQDLFASRSHGKRQNRASSSLLTGVIFCGCCGAPAYKIVGGKGRKDRYRCRTKQYQVGECSASVATVEFDWINALVEEMVLDELEGSVKRKKVWNPGNQVAEEIEELEFQINDLVGLYGQEPYTVGSVPFAALQSRVNDLSKRLEDLRKKEPTSPGWEWEDTKESFADWWNSLDTKGKNQYLKDSEFRVEYVNPKQRTMGMHPHLNFHFDLEKMNGDFTQSPQQVRAIKRMEANQAGRIDPYIEELPEGIQRIKREEYACALQQDNQALMDSASNPSKKVEN

SEQ ID NO: 4467 - protein, 608 aa, unidentified
  source 1..608: note = uncultivated organism
MKVAGYARVSTSGQVKDGTSLEDQERAIRERAKKEGWKIAEIYSDGGVSGGSLDRPALQRMREDAKAGKFEAILFTKLDRFGRSVRDVHNLFFEFKTEQGIDLICLDDPSINTGGKMGNMMLGILSSFAQFEREMITERTRSGRKAAWDKGQLPIGDQLLPFGYKKNEAGKIEIVPEHAAIYQKMVSLYLDERLSSKEVAIRLTTEGIPSPSILRGKKRNSSRWNSTTILDLLRHPAFKGEAKYNKDIFEKRKGKKYMTAISRRPEEEWIKVPFPALITEDRWQEIQDRIVNQKHTPKRKYKGYEDNFLLDGLIYCDECGSRMKKKVKQDLKGKIRLYYTCYWQHCSQKELEIAGRSKCIMTSAHADKIDKEFFNQVAKLLSDPDKYARAWFKEMDSEALLEKLKNLHQKDKELLHQLKMGFEFMSHQKAELKAIYVEEYQKWQKEWESIQPEIKKTRSQLDAIHNKVDRYREFKEAMKSGGIRDKFKRRFATQIGFQRFMDRLPFSEKRRVVESLISPERGGKVRVAYLRPGDIGEGMEKLTPEQMQEPLTDRPPLVFAEFSMNLDKIEAVITSLNRKDLLKKSLKQSNPSQIAGRQEDTRGRWGNI

SEQ ID NO: 4468 - protein, 582 aa, unidentified
  source 1..582: note = uncultivated organism
MNAQRPKNVRCAIYTRKSSEEGLEQEFNSLDAQREACAAYILSQASEGWSLIDESYDDGGISGGSLERPGLKRLLADIEAGLLDIVVVYKVDRLTRSLLDFAKLVETMDKAKVSFVSVTQSFNTTNSMGRLTLNMLLSFAQFEREVTAERIRDKIAASKAKGMWMGGVPPLGYRPDGRSLKIVGKHAELIRSIYSRYLELGNVRLLSEDLERSSIRSPIRKTAKGKAYGGCVISRGQLYTILRNPIYAGLIGHKGEIFDGLHKAVIDRATWDAAQIQLANNRQGPRRQREPKKALLAGLLVDETHTPFQSSHTKKGKREYCYYVSAAGEGGAGACDAGSGAKIRIPASDIERVIREEVAGRVSDPLTLIDPSDVSPREIALAYDKASELAASIRSPRSKLIRMLLTNVTVGPNALEIDLSCSVLASELGVEENAISSSSLSFTVDARVKRSGQVLRIIEQSGLEAHRAMPNLALARLIAKAHEWWNELCGGQSDIAKLSRQEGVTASWMTRVVRLAFLSPEVVEAVLDGRARADLDTKSFLAPNAIPACWDEQRAKFLPRQTSYGSLHERMLGDVRQELAHA

SEQ ID NO: 4469 - protein, 603 aa, unidentified
  source 1..603: note = uncultivated organism
MPYTAIYVRVSTEEQARGGFSVQAQKEKLEELCKKNQWPYKVFEDAGFSAGSTNRPALRELIDEIKLGRIERVVVWKLDRLSRKMGDLYQLLSVFEKNDVEFLSLSENISTTNSLGKFLTGILGSVAELEREQIRERIKAVKDTRKKVKGLPLGHNPLGYDRNFKIIPEEAELVKEIYSLANFYGVSKTAKILNDRGITTRRGNPWTKVAVIRILKNPTYAGLLKLDNGELVEGKFEAIIPKEHWLEVQARLFRRRKSPGEAFPNLLTGMIYCGVCGKSMASSGDQKQGKRYYVCITKISMYSSACPNRRFKAGYLEEKVKEIILDYASRNRKELLEKIKTKLNSQKIGSIKNQISQIKQAITSVQSKITRLYELFEENAIDKESLIERMESLKAQKDALKSKLEELEVELRRENPKKIYEAIETVLYHFETLWTSSPREEKKKLLAVLIKKITAYPHEVHVELRWGETVKIPYIREKPLLSLSEEERNFLLQTDTIHARIILLADKGLKAKDISAELGLDYSKVCWVIRQFRQRRTEYLKRAGPLRAPQEIPNEVTEALMEKEALHISSPREVQRFLEKKGISINYNMAKNIVYKLRHGAKE

SEQ ID NO: 4470 - protein, 537 aa, unidentified
  source 1..537: note = uncultivated organism
MASKASRKRCAIYTRKSTEDGLEQDFNSLDAQREACSAYILSQAGEGWEQVDDLFDDGGWSGGSMERPGLQQLLDDVRSGKVDVIVVYKVDRLTRSLADFAKIVEVLDDNEASFVSVTQAFNTTTSMGRLTLNVLLSFAQFEREVTSERIRDKVAASKKKGMWMGGAIPFGFRLEDRKLVECQCEAKDVRHIFKRYLELKSIPALEADLAEAGIRTRVREFTSGRTVGGIQFMRGPLALMLKNPIYAGKVRHKGAVYDGEHNGLISEEQFEAVQRTLSANNRRHSIGRNSKAPSLLSGLLTDPEGRPMSPARGQRGSKIYCYYVTRDRKCEVDACPWRLPAGPIDSMVLRAVAQWLSRPSSVEQAGRDQWQDALNIRMSIKTRIETGSAADKREVLLDLSCSVRLQRDYLAITLALPGDVDSIELKIQSKIVRRGHEVKLVDVSGATPCKADPVLLRLVAQAFAARKHLIDQEPQPLVENLSKRHLARLARLSLLAPDIIQAIVEGRQPPHLAGRQLLRRGDIPLAWDKQRKLLGFS

SEQ ID NO: 4471 - protein, 583 aa, unidentified
  source 1..583: note = uncultivated organism
MVKLVQSGVVQRNAVLYVRVSDPKQAKLEGSLDTQAGALKNYVASRRQHAFQENWSIVGVYREEGKSAKEGVARPELQRMLSAIRSGEANTILVTKMDRLVRSLVQFLDLWRMFEEYEVTLISLAESFDTSSPMGRAMLKMVVLFAEMERERIAERVREGVRHRMDLGYYVGGPTLGYDFDPANPGKLVVNQDEAAQVVHLFEQYLELGSLAQVQKYAARKGVVSKQYVSKRQGLPVGGAPFSLTQVKRMLTNPLYVGLVPNSENELITGKHEPIVPERVWKRVQRRVNAQVRTRHNANEELLYGFFLKGIISCGQCQSSMTPRYAYGRSQRYYYYSCTNRTRHGTAACSLKDVPAPALDEAFLGRLKELGEQAGYVRHLSQQKNLSANVELEQLELRRKALERELAELHRRMNRWTDLLSLSKQEGAERTILHKIGEAEAREAAIRAELEELAIQKSALRERTVDPAQVCKNIHQFAELLDHAEPAEKRALVGLMVHKVIWTPEEVKYALYEQPSPEVLAEAVGAASDGSLLSEGWCTTSQTQRTNPAVLWATDQVRLTPVGRSGALAIQIGQLVKKVPRMN

SEQ ID NO: 4472 - protein, 560 aa, unidentified
  source 1..560: note = uncultivated organism
MANTPIRRCGIYTRKSSEEGLEQDFNSLHAQREACEAFIKSQAGEGWRLRKAAYDDGGFSGGTIERPALQRLLEDIRQGLIDVVVVYKVDRLTRSLADFARIVELFDTQGVSFVAVTQQFNTTTSMGRLTLNVLLSFAQFEREVIGERIRDKVAASKRKGIWMGGSVPMGYDLRERKLLVNHDEARTVKRIFERYLELGSVRLLANDLRQRGIVSSARVSKKGNARGGSEFSRGALYHLLSNPIYLGEIRHKHERHPGQHEAIVSRELWERVQQRLRDQGTRSGEGRKTEAPSSPLAGKLFDESGEPLYVQGAAKGQRRYRYYVSRSLVRGDSENAQRGWRISAPEIEQRVSAAAQAVLGDRPAIALALEESGDDPYRLPSVLKSARTWIERLASRSEAAVALSELIERVQLSRESLHLSLRLPLALTEPSDVARPVSLRLSRLVPMQMKRRGVETRIVLQGDSNPARVDLPLLKAVARARRWTDELLSGKVRSVGELAKREGIDSRSVRRLIPLGFLAPRIVEAIAEGHQPVDLTVEALTRRIDLPLLWSAQHQALGMK

SEQ ID NO: 4473 - protein, 599 aa, unidentified
  source 1..599: note = uncultivated organism
MERFAAIYVRQSVEKEDSCSLEMQEMRCRALADALGLPAKVYADPGRSGKDLDRPGFKLMMADVRAGKVDMVIVYKIDRISRNLKDFFVLMDELQNLGVGFRSISENFDTTTPIGRAALGVLAVFAQFERENTAQRVRDNMLDRARMGLWNGGPLPCGYRVTRTEMAFGGKIKNVPLLEIDEGKAEVVRRMFEDFLKGKGIRTIARELNAGGAERTWTDRSVRRVLQNPVYCAADRDAYDYFVSIGAEVACPAEQWDGKTGVVVYNRRGLSGRTHRDNPAAKWIVSVGRHQPLVDGKTFVAAQKKLSERALPPRTGTGKRGLLVGLARCGHCGRAMSVSLARKSRRDPGFAYIYYVCPGQWHGVCKGVRMRADRMEALVVEALLQITADPDFERKIDAMLAEEVSARETELRERLSALTRQVEQLKTEERNLVIALGRGTIRPELIESRLREIEEEMKAKISELESTQAAMRESELRQVNAELVRENLRRFRKEIFESMPFEEKRALLRSLIEHVEVYPDKLVIRVFVVGGSGPHGQGLAAATSMIRAGKETAAAARETVTIPSSSGWRRASSASLENSGNSSRKRTPWWARLTSPGRG

SEQ ID NO: 4474 - protein, 506 aa, unidentified
  source 1..506: note = uncultivated organism
MKAVRCAVYTRKSSEDGLEQDFNSLDAQREACAAYVLSQASEGWVLIGESYDDGGLSGGTLERPALQRLLGDVAAGLVDIIVIYKLDRLTRSLLDFAKLVETLDGTGTSFVSVTQSFNTTTSMGRLTLNMLLSFAQFEREVTAERIRDKIAASKAKGMWMGGIPPLGYRPQGRTLVVDAEQAELVRSIYARYLSCGNVRLLAEGLIAEGIKAPKRRTASGRAFGGAPFSRGQLYAILRHAIYTGRIAHHGQLHEGQHEAIIETELWEAVQRQLAGKVRGARHGDRPTGSVLAGRIVDEAGEPLIAAHARKGERRYRYYVSKALHERGREHASGAMRIPASEVEQVAAQELATLLGDPLGLVSEAALELAPSEAAPLLARCAALQEELSQGRHGLLSSLIQQVRVGAGGIEIEIAVPALAAALQLGPSPTSPTHLTRRSSLRLTRTGRAVRLVHDNGAAATADGVDLTLIRLIVQARGWWQQMNQHNLEASQPCACIGQIVAGERKR

SEQ ID NO: 4475 - protein, 564 aa, unidentified
  source 1..564: note = uncultivated organism
MKADDPKPIRRCAIYTRVSTENGLEQEFNSLDNQREASEAYVKSQAHEGWRLIRTRYDDGGFSGGSLDRPALQTLLDDVRAQRVDAIVVYKVDRLTRSLSDFAKFVELFDEHGVSFVSVTQSFNTTTSMGRLTLNVLLSFAQFEREVTGERIRDKVAASKKNGIWMGGAVPLGYRVENRALRVVEEHAAFVRDLFRRYLEIGGVVRLKAALDAENVRSPIRISGNGKRTGGGPMSRGHLYWILSNPIYIGRLRHKGQIHEGQHEAIVDPETWKRVQERLAAQTQARRAPQPDAESFLVGKLFGDRGRRMGASFAAKGARRWRYYVSRGPTKTNGHDAATVMRVCAPAIEKLASAAIASVLAKRGLAATWPGCRANASAGCNPGEKQRGAWTDQTATPNRQPDPIDVRAAIDRIQLGADCVRIVLSDAAANNGDDRTLTVPWKLSSPYRRREIIQGDSDRLEAQRPMRAKARETFLDAVRDAHRRIDELLRHPTSSLLAIAQREATSERSIRQSLSLAFLDPSLVKAAIEGRLPRGFGVKRLIDLPMLWSEQWAALGLRAPASGH

SEQ ID NO: 4476 - protein, 529 aa, unidentified
  source 1..529: note = uncultivated organism
MKTDKEIKRVLCAIYTRVSTSEGLEQAFTSLDNQRESAENYIQSQKSEGWVALPQRYDDGGYTGANTDRPALQKLIADIKEGKIDCVIVYKVDRLSRSLLDFSQLLEFFDQNNVTFVSTTQHFNTRTSMGRLTLNILSSFSQFEREIISERTRDKMGAAKRKGKWIGGKPPLGYDLDKVNHKLIINPQEARIVREIFNLYLEKRSLLSVAMALNEKGYKTKTHATLQGKKYGGVSLKSTNIQLTLKNPFYIGKVSYHGELYPGEQDRIISDELFQKAQAILADNRRERKIAGTTKNIGLLSSLLRCKACDASMYYAYSMKGKYKYYYYLCMNAQKRGYKNCPTRLVNAQTIENKILGYLRKAIPNDKLKEEIWITSSLQDQMILLRSFVKQINYDANEGLLEIILHPDKSLRFELKLEDLKHIPPHKKDIEVTKEPPLRQNLILAHQVAEIMKEKNCSLHQISKWIGMPHPRLCQIAGMINISPKVQEEIIFTSDTQLYRVPEYRLRDILSETDWQKQQETWNKLLKSA

SEQ ID NO: 4477 - protein, 574 aa, unidentified
  source 1..574: note = uncultivated organism
MARRARRTYEEAKAVKAAVTNEPILEWQTAIYARLSIENSGKDDKGESIEGQIEICKDYIEEHPYLHLKEVYCDNGWTGTNTNRPEFQRLLNDINEGKIKALVIKDFSRFSRDYIEAGNLLENVFPFMGMRFISVSDNYDSFDTDGSAESLLIPLKNLINSYYSKDISKKVSTAIHTKQLAGEHIPSMIPYGYRKSTTQEYRFEPDPETCRNVTRIFQMRVDGVPLNHIANKFNEEGIPSPGKLRYLRGTTSDKRYATSVWSAQLIKQILKNPTYLGHLVFGRMPTALYLGKPNYQYEPDESKWRILENMHEPLVTQEIFDKAKEMELAGRKAWEEKLKKGEANRKKNRPLFLYLTYCGECGSKMRYHRYRPDQKPSGTYECPNYKYKKCGGTHSIAQNTLKEIVGNVLHTQLELFCDYKKLVELLENPTVMTAQQREYKDELKSLEVKIRSKQGKRERLYEDFTDGILSAEDYQIMKQKFDEEYQTMTTRYNALQVMQHKLKKSLSSENNWLLHMQMFQNKHEINEEILNALVDKIVIHQDGKKRKVEVVLKYREDFQLLKSAYEEMMGGEQG

SEQ ID NO: 4478 - protein, 561 aa, unidentified
  source 1..561: note = uncultivated organism
MNNNIACMYLRLSREDGDVSESNSISNQRQIIKSYAKENGINLSFEYADDGFSGSNFDRPDFKRMIEDLNAGRFGIIIVKDLSRFGRDYIESGKYLQKIFPEKGIRFISVNDNYDSDNADVSDTHLILPIRNFINDSYCRDISMKVKSSKEVKRKNGEFIGSFAPFGYKKDSKNKHKLVVDTEVSHIVSRIFDMKIEGYSSKAIADFLNSIGTVTPSRHKENKGDNFNTGFIIKDAKWDAKMVNRVISNKVYIGVLEQGKTAKLNYKSKREVEVAKDDWIIVENAHESIVSKSVFALANKMLLRDIKASKENPSILSGMLYCKDCGSPMVRRKVKSKDGYNIFYICSEYNIKGKCTRHSVKEDYIMGATIHALNDYLSKYNELLKKVSNLDVSKLTISVDFESLNEEKKKYERLRQSLYMDLEEELITTEEFERFRKNYLLKIREIEKQIITKKNMVEELKEKISHKGSFVSDIIPDVEEGTLSRLSLVSFVDCIEIGEDNAINFVFNNIETVNLMQAILDTESKKDKVSDTNKANLFTIGKAYGKAVEISMPKLAVGGVC

SEQ ID NO: 4479 - protein, 704 aa, unidentified
  source 1..704: note = uncultivated organism
MSAPARTKRSPHKRRRAAPGFGDIPTGPRRVAVYLRRSTDDEHQPFSISAQEASLGSYVNSQPGWTLTATFTDDASGATTDRPGLQQALRAARAGRFDVLLVYRVDRFSRRLSDLLDLLTELEHAGVAFASATEPFDTSTSIGRMLVQLLGVFAEFERETIIDRVTKGMAMKASKGKWPGGSRPYGYHVDRDTQRLIPHPQEAPHLREIFRLFTTERLGTRAIADELNRRGVANRTGKPWSGHTINRIIANPSYAGDLAYGEVYVENAHDPLIDRETWRKACAIAAARTAASGQRAMSGGDYYLTGLITCPACGHKYVGTAATGRNRVYRYYTCFSRTRYGTHGCQAKRLPADALDTAILQALADFYTDATGLITDAVTRAVERHRDGHADSQAEHAALLAQIKQKETTADRYFTAFENGTMTEETAGQRLTTLRAEITQLTIRAAELEDAIGTEPTPPPPDVIDRIQSYLGTIITSGSHGERKATIEALIAEVRITEEGVIPVFRIPGPHTPIPETGDPSGADETTPTGEPVRTLVRSVGRLGLEPRTHGLKVRCSTIELTPLGVGVLDDARSTKRTDLRARAPHGLAGNHSGARRSPGRPAGPRRLAQQAAEQADQRPCPDPSVSFEPEHAQERCLNCSISEPSGLLRPSWRGGAMLACLACLACLAFAQQCYRNLHVCFLFVGPRSSGNGPIQGLIGQTAV

SEQ ID NO: 4480 - protein, 690 aa, unidentified
  source 1..690: note = uncultivated organism
MFTTALPTSAAVYCRVSSEAQQERQTIETQVEFAQKYCDLNNIEITEIYKDDGITGTLPLGDRPAGSQLLQDARDGKFKLLLIFKLDRLGRSTRVILDAVHDLDAMGVLVRSMTEPFDTSNPSGKFLLTILAGVADLERSNILQRMDMGATRAAKEGKWLGGIVPYGYLKNDDGFLEPNTAPIPGFNMSEPDVVRMMYEMTAQEGATTQQVADHLNALGIPPAWVAHNLGGKRRNRTSGRWSSSRIVRILRSSTYYGIHEYGKRSPKGREIITRPVPPIVDADVWKKAQAVITSNQLDAPRNAKHKYLLKSIVKCESCGATYRGNYPKTKGAGYYSCGGRSNWRRMGRNEKCQAMSINMAWLDDFVWQDCLKFINDPGLVVAAVDKSTEDREADSQTEAILASRLAELDADKERMLDLYRQKLISLDDLSGQLDKIKKDRDVAEAELEALQDKYADDQFFAARETAVNMLELLAETVNKPDISFEMKQTVIRTMVEKVTVKTLAKNRAHVTIHYRFHDDSTRTVNRKDNRADCSAGITITTMTEYPPAPEPGNTQRERLIYLRWRENLTQGEIAAIGSTTSASIGGVETGKFSSLQPSAIRAICNHFDLPYWFLGAYDRLPERTIPQQLHKFRLYRLFDMKQAAHFFEVSPRTYIKWEHGHITKALSMDKLNDWIKKQSAPAKVVSRGCR

SEQ ID NO: 4481 - protein, 636 aa, unidentified
  source 1..636: note = uncultivated organism
MIKETLYIYTRVSSEKQESGYSLAAQKKAGKELAKKLKMNYEILDEESESSKFENIDNRPKLQELLNKVEEGKAKNVFVTEIDRLSRNDLVSAHIKKIFKDNDVILYTVNGKYEFNNYDNILMYEILSSFAKRENSQRVRRSMAGKELAVKEGKYVGGIPPFGYKVDENNYLVVDEEEKKIYLQIVSYSLSGMGAKRIAKKLNEMKIPTKASKYYKKGLKLRNKYTGEIIFKDKKLFIWKQGTIERILKNPLYKGERTFKNLKIKIEPLIDEKTWQQIQDNFKKNRKFSLRNNKSNFYLLKSLVFCNRCNKVLIGRINEKKGFKVYYCLSKRSEETKFCGMKSINIDKLNNLVWEKLLFILSNSDLVRKEVKRKFSNKKINIDEIKKEIKLLKEKLKEKDIEKENLIRIATKNIITDDELKKYLIEIEIEKKSINDKINANEEKIKLIDEEESIYKWILILKDKIKELYYLKDDIKKQRIIRTFINKITVDYIEETKNHVIEIEMKYPIYDNKNTTKIYLSDGTDLDEINTENINLKERYEIENEYLEEENIKNVSKSNKNLELSNKNNDLPVQHFKLKNKYLSGKASFYCDNVISTNVSQSSKQVSFPAFLLTFSLVLTANKIEIKDDSMKLIKF

SEQ ID NO: 4482 - protein, 527 aa, unidentified
  source 1..527: note = uncultivated organism
MARKSRKQCDVASNLEIKNIYNTAVYIRLSVTDRKQKGDSIETQQAIIESFIAEHPDMELREVYIDNGKTGQNFERPEFQRMIADIENERINCCIVKDLSRLGRNAIDSGYYVEKYFPLNNIRFVAVTDNYDSANGESSGIMLSLKNMINESYALDVSRKVRATFRMNIKNGYFVGGQAPYGYLKHPDDCHKLVVDEYAAGIVKRIFEMAADGQRINAILEWLNGNQILPPNRYLCSIGKLSPKAIGSDNIYWSYRGVRSILDNRIYCGDMVQGRKTTVNSVLKRLPESEWTITENTHEAVVSREIFATVQEFLKQPNKSPRFTTPKTDNIFQGKLLCSCCNRPMARKRDGEKFYRYKCHTPKLYSSYACTGMKITEKLLKEKIFELLQGHEVVLTQATVTAPSVDTHSNELSAVKSELGKNQNFLKGLYESLILGDITDFEYKEMKSGYETKIADLTAQEKQLRDNAHTHKLQSKALSQARESVLKIESISDLTADVIDSVIEKIHVHENNRITVKFRFTEEVQEA

SEQ ID NO: 4483 - protein, 514 aa, unidentified
  source 1..514: note = uncultivated organism
MKTDASLMISRLRCAIYTRKSTDEGLDQEFNSLDAQREAAEAFIRSQRGEGLIALAERYDDGGFSGGNLDRPALERLLADIRCGAVECVVVYKVDRLSRSLIDFARIIEVFERHNVSFVSVTQQFNTTNSLGRLTLNILLSFAQFEREIISERTRDKVSAARRKGKWIGGRLMLGYDIDPRGGRLLVNGDEAIQVQTIFRLYLDYNALIPVVREIDRRGWRTKQWVTKVGASHGGKRFTKGRLFRLLTNPIYVGKIGFEKQIYNGEHEAIIEAEIWERVQPILRRNGCDGGAEVRDSYGTLLKGLLRCASCDAAMVRTYTTRDSCRQRSYVCARSQQSCHAMLVFEPTIKAALTKQVCRIGSDPRIVAHTVVKAEEQRRLNVANLILEREATQRVLARMGSELRKMDFRNQPVTQSVADLQERIGQTERRLSEISLELGSLESRAVDEGDLRATLAQFGPVWKSLDSREQARIIRTLIERIAYNGKTNKLKVRFHSEAIRRMCRGAAKDGATES

SEQ ID NO: 4484 - protein, 543 aa, unidentified
  source 1..543: note = uncultivated organism
MNARKAIGVYVRVSTEDQAKEGYSLEVQREYLESFAKREGFEIFKIYQDDGISGYTTERPALKQLLKDAKQKKFDLVYKIDRFSRNLKDMLNLVDELFSYGVGFKSATEPFDSTTSAGKLMFQQLGSFAEFERNRIAERVFPGMVKGVQQGNWQGARYAPYGYRYIKEKKLLEIDEEETKVVKLIYMMFLCNKSIRSIAEYLTKKGYRNRKSNIFSTKLIGDILKNKIYTGKLVWNAHFYDKTQKTKKGYRYIKNPPEKVIISQGKHQPIISEEDFELVQEKLKQRRVEQRRKASDYPLSGILYCARCNHKYLGISSISNHRTGVKKRWYRCMGPYRSFIRCKNKSVKAQEIESEVAEILETLLKNDKLKTSRWMNVTPAEIASVASLPRNEVKVIKNRLENNLKKQSKLTDAYLENLLSEELYKQKNEGLRQEEEEVKKLIALQEVREIERERSKDYLDRVEEFLEGYDPNKKEMDLETKKLILNLLFKNIKIAHKKLFSFEFFAPFNFLFFEEKQKCQTKNLKRVTDLLPQKSTSGLSDVK

SEQ ID NO: 4485 - protein, 574 aa, unidentified
  source 1..574: note = uncultivated organism
MPNESRSIIRCAVYTRKSSEEGLEQSFNSLEAQREACQAYIASQKHEHWRGIATHYDDGGYSGGSMERPALRQLLQDIDAGKIDTVVVYKVDRLTRSLADFAKIVERLDARQVSFVSVTQQFNTTTSMGRLTLNVLLSFAQFEREVTGERIRDKIAASKRKGMWMGGTLPVGYEVCDRKLVVNAKEAAQVKRIFELYLELGCVAKLKDRLDREGLRSKVRRSNAGKKSGGRDYSRGALYCLLQNPVYVGKVRHRDAIYAGEHEAIIPAQLWDKVQERLSANCKTRRTGSNAKSPSLLVGLLYDPQGNRFTPFHADKRGKRYRYYVSQGKIQGRTAAASSPTRIPARDIEEIVCGRIQSLLRSPEELLQATGAQSSDAAACKLFITAGKHLAKTWPSRSTSEQREFLCNVIGRIDVHETELQMAVVQSALRAVLLGEQPAHDGKSLQDVFTITMDARVKRCGWEVRLVVPAGSATQMPARPALPLIKAVARVHRWPERIMRGEFRSRQLVAQFVKVDQRYAGRILQFAFLAPDIVEAILEGRQPPDLTVQKLLRGFPLGWAEQRKRLGFPSEREG

SEQ ID NO: 4486 - protein, 560 aa, unidentified
  source 1..560: note = uncultivated organism
MARTSNRRIKAEKSITDKVEKNSFQTAIYTRISRNKKEKPSDSIENQIALCERYIKKNDGHNLVGIYKDIAKTGTEFERPDFEKLMGEVRTGKVNCIIVKDLSRFGRNYTELGNFIEKIFPFLGVRFIAVNDNLDTFHMEDPNKSLEIILKNIVNETYAKDISKKISTSHQIRIKQGGFICGTAPYGYIARKDEDGIRRLYVDENTAPVVKEIFKSYLNGLSTLDISKLLLEKKVYVATDYRKFGKAKADENELIRAWIPTTILQVLKNRVYTGTLIQGRNQKHLYEGKKRERLDEKYWIITENAHEAIILPDIFEKVKEKISSKSKLIKNSRKENKNAKDDTVFRGKLYCGICKRKMSVHRQKSGKKTVFYFSCNRFREFTTEKCGISVTEATLEKTVKAAFDTILSNNSKSYKVYLNAYDNLKIETDKKKEKEITEIERKILGFSRLQSEYYEKYVLGKCSKEDFEREKGLLSEKKAELESLKERQVAIFEKEAFELEKRHKYLTALFKGKTKKWDKDFVDSIIDKIFIGEDNTIEIKFNFEETPVFAEKVSRRKKRC

SEQ ID NO: 4487 - protein, 539 aa, unidentified
  source 1..539: note = uncultivated organism
MIKEEKQIIRCAIYTRKSSEEGLEQDFNSLDAQREACEAYIKSQMHEGWVLIKKEYNDGGYSGGTMERPAFKALMRDIENDEVDIVVVYKVDRLTRSLMDFSKIIDVFDNHETSFVSITQQFNTTTSMGRLTLNILLSFAQFEREVTGERIRDKIAASKKKGMWMGGRAPLGYEINDHKLIKIDEEVKTVQMIFNKYLELTSVPKLMEYLRNTNIKTPNDKNFSKGQLYHMLSNKAYIGKIIHKNNVYDGEHEPIIDEISFEKVQKLLYENKVDKVCGTKSSSNSLLAGLIFDDNNNRMTPSHSNTHHRKYRYYVSQAIKKFDRANVGSVSKIPAGEIEKFIVEITKEILQNKKQVQNILSDLDVTKQNKLIETAENIKDYSNPKLIKTIINKIIISEYSIEITFDKNGITRALENLYDNNDIIIISENIKVKPLIITKNIKISQPSKSGNILILPVKENHNTNYNPYLINAIVKSYYYHKQLKNGKTIEDIQNEENLKDSKYVRNILNLKYLSPYLTEQILNGTQDKDLTLKKLFKIA

SEQ ID NO: 4488 - protein, 561 aa, unidentified
  source 1..561: note = uncultivated organism
MEQTKPSIRRCAIYTRKSSEEGLEQDFNSLHAQREACEAFIKSQAGEGWRLIKTAYDDGGVSGGTMDRPALQQLLADIRRALIDVVVVYKVDRLTRSLADFAKMVEVFDAQGVSFVAVTQQFNTTTSMGRLTLNVLLSFAQFEREVTGERIRDKIAASKKKGMWMGGMVPIGYDVVDRRLVVNETDAETVRSIFRSYAELGCVRFLKEDLDRRGMVTNVRTSRKGTQSGGRPFSRGALYKLLSNPIYIGEIRHKTVCYPGQHEAIIDRDLWDKTRQQALDQTTRRKALITKAAPSPLVGRLFDESGECLTPSHAVKGERRYRYYVSKSLMNGATDDTQRGWRIPAPEIERTVASAAQQILGDQTSITAAIQDTGADANRLPSIFKAAEACTRRLQSETDAAVEMATLIERVDLQQDGIRVSLKLPMPTIEERDGSDTNKTVVAQFIPMRVKRRGVEMRLVIEGDRASPQRADPALLRVIARGHRWFDDLVSGRAASTVEIAKREKLGERHVRRLIRLAFLSPRIVEAIAEGRQPAELNAEILKHFKLPFEWQLQKRNIGIR

SEQ ID NO: 4489 - protein, 537 aa, unidentified
  source 1..537: note = uncultivated organism
MDTTPQLRGIVAKRLSHLTDVTTHLDTESESIEEYCQRKNILVVAETEDLDVSGGKPIKERPGIGPWLTPDHLDEWDVLIFYKLDRGFRNHLDFLLFYHEFCTVHGKAIVCVAQDIDMTTRMGKRFASDLVQFAEWELEEMSQRRAAAAAVIRKSGRWNGGSFSFGYEPYQDGNGWYLRPHPVYRKEVVWMAEKVVAGSSPGGVAKMLNERGIPTARDIQNAFFGRPTKGYEWSLKTVIDVLRSDLIRGYVLHYVNGSTDPPVRVVDDQGEWVRREPLIDDELWFKVQAALDASSRPRSGVRSMGSMLLQIAFCGYCGSPLYGNSARRSDGQGYNYYYLCPQCKPTASVRREILNEVVGDALLDAVGDCELTAKRILAGDDHTETLMRIGMQIADLTTQHYVHGGVDDFHAKMAELEAEHERISELPAVKPKVRRVGTGKSFRQWWTESDDEQRHSYLKAAGVSALIVRAEDYQEVVRFDRATDTADDLVLDIPTNVIKEFEGRHERPSGPKPVRFVMNLSLGTLDEQLHRASSVTG

SEQ ID NO: 4490 - protein, 558 aa, unidentified
  source 1..558: note = uncultivated organism
MKKIRCAIYTRKSSEDGLEQEFNSLDAQYEACAAYIASQKAEGWVLLPERYDDGGISGGTLERPGLQRLLADIDRGTVDQILVYKIDRLTRSLADFAKMVDRLDAAETSFVSVTQSFNTATSMGRLTLNMLLSFARFEREVAAERIRDKIIASKKKGLWMGATVPLGYAADGRSLKITEPDADVIRKIYDLYLEHRNVRLVKEAVDAKDLKTPVRTLMSGRVKGGAAFSYGHIHYILTNPVYAGRIRHHANVYPGQHPPLITPEIWDGIQEHLRSDSVKGRTFTKRNRDGAKPSVSRLAGKIFDQTGDRLTPSHTKTSKGRRLRYYVSHRLIRGSAPRDPSGWRLPAPELEEKVAGLIRRHMSSPEFCAGILQDATTEETAEIGQKLTPMGETELCATDDALSSHLTLAERIDIVPGEIRVSLSAERLAGVLNMDEDRVVDGFLILTSPFQHRKRGVETKLIIGNEPAEIDETLLRNIGRGHRFFELVVSGRTLDEVATIEGVSKHRIKQVIELAFLAPDVIRSVREGRQPVGLTSDWLMRHAFSPVWTEQREMFAAL

SEQ ID NO: 4491 - protein, 570 aa, unidentified
  source 1..570: note = uncultivated organism
MHEVEVIRANRKISERTAGKLTDILRVAPYARVSTDSEEQLSSYKSQVAYYTDLVEKRKDWVLVDIYADEAITGTQVTKRENFQRMINDCMDGKIDMIITKSISRFARNTLDTLKYVRMLKERNIAVFFEDENINTMTMDGELLLVILSSVAQQEVENISANVKKGLKMKMKRGELVGFQSCLGYDYDPVDKSISINEAEAGVVRYIFDRYIAGAGAYVIAKELTGLGYKTRYGNTQWHDTTVLGIIKNEKYKGDVLQGKTFTVDPISKRRLDNYGEEDQFYVKNHHEPIVSEEVFEKAQAILNRRGAKRRGVEKGKREKYSRKYAFSSKLECAFCGSNLSRRNWHSGTAHEKVIWQCVTATKKGKKYCPPSKAIEEKILEDAFVESYRLLCDNNSDVLDELVKRMEAVLKSNDFQKRLVKVENEIHAVEQKRNRLIDLHLEEKIDKAAYEKKYEEFELILGELSSEKEQLEKSTHEEIDLAKRIEHFRKVLEKNEVLTTFDRCVFESIVEKVIIGEVDEDGNFNPYKLTFVYKTGFYNAVQSKMHKQFKKKRRQNDMVDLPSFTSADTC

SEQ ID NO: 4492 - protein, 539 aa, unidentified
  source 1..539: note = uncultivated organism
MIEQKIYNVGMYVRLSKDDERSGESVSIENQKLLLQKYVTDKGWYVFKVYSDDGYSGTNFERPAFKEMMEDAKDGKINLILVKDLSRLGRNYIQVGQYTDYIFPAIGCRFIAVNDGVDTINNDNDIMPFRNLFNEFYSRDTSKKIKAVKKANAQHGNYIGCYAPYGYKKSAENKHKFLIDEEAAQIVRRIFELRCEGLGFRKIAHTLNEENITPPRDYYYSNKGKKNPCDISHLWADATVKSIIRNEAYIGNSVQMKTGTMSYKNKKIVSKPKEEWIRAENTHEPIIDLETWKTVQELDKKRYKPRGTGNGITNMFAGIIQCADCGAPMRFNQEVQTRKKDGRKVIYVSYLCGRYSSYGKTSCSTHTIYLNSLLTLLKKDIQKHVNKIVCNEQAVIAEIEQKLNENQTTKQSTLKITAKSLKIRLDDLEKLCQSLYEDRVLGKVPENLYISLIQKYEQERAEKQDQLNETQEKMSRIEQNKTGVTNWVELVKKYMSVDELDQNMISELIDKVEIGERTVIDGVTYRDIKVYYKFVGNID

SEQ ID NO: 4493 - protein, 603 aa, unidentified
  source 1..603: note = uncultivated organism
MTQSQSRSRGRSKRTEVKESMRVVTYRRISTNEVNQPHSLEAQEGSLGDYIERTPGLVHVGDYYDMQTGTRTDRPGLDALLDAAQERQFDLVLFYRTDRLARSVHGFMEILQRLEKYDVALRSATEPFETMTPAGKLMAQMLASFAEFEHDVLIDRILEGYTAKAIKGEWLGGRAPYGYANDREHQTLSIVPEEATTVRRVYRRYLAGLGAKAIAEELNKAGVVYRGGRRWNQQVVLRLLASPTNAGLLERNDEYFPGRHEAIVSRETFDQAMKLRQTKVGPDQYAKMAAGNSEFFLTGVVRCGACGGAVVGAAANARDRHYRYYDCSMKSKRSASERCRVERVDADALEAMVVEQLLNAYRDSDLFPAAVAMAVEKTPDQLAGLDEQIATAEAGIAHSEAAIDRYYAAFESGELNVSELRGRLDGLQTKLGAQRDELSRLTQLRIETGPGSTELVDVSAAAERIEAALGASQSWRAKRRLVGALVDSIVLNPGRQVQVTLRVPTVDCEGPGTVLPGGRVGRKRAATRSHTVEGQTRPGTALMTSPTKELVPVGQSGEWTPFRMGSHMVEMLGIEPRSISFLVAILRAQPTGDCREVHCCQHR

SEQ ID NO: 4494 - protein, 510 aa, unidentified
  source 1..510: note = uncultivated organism
MAANSGGGRKAAIYLRISQDREMDGLAIDRQREQCEALAKYRQWEVVETYVDQSKSATDRTKVRPSYDRMVADYKAGAFDAIICYDLDRLTRQPRQLEDWIDAAELRGLALVTANGDADLSTDGGRMYARIKAAVARAEMERKGARQSAAQLQRAKQGRAPKGMRPYGYATSGDVISDEASNVKAIYELFTRPDKPESLRSLARALSGSEPLSGITPAPKHSHTVSIERAERRKAEGKEPRSITPDGPWGPSTVLGILRNPRYAGLSTYTPKTAQPDGGRRRTWKAQILRDDAGEPIRGQWDPIVSEELWWRAQSILDDAERVTNTSGSTRRKHLGSGLYRCSVCGGKVTGAPRGYRCAGHVMRTGSHIDEFVTGVVAARLSQPDALAKHKTTGEINETSGFSAAIAEQRGRILRAQRDYDAEVIEGRDLKRIREAAEARIAELEAERLLQGRGGVLASILGTADPAAAFLEASLEIRRQVIDTLATVTLHAQPRGRKGFDPASVTVEWR

SEQ ID NO: 4495 - protein, 524 aa, unidentified
  source 1..524: note = uncultivated organism
MARNSVVAAKSPKAESETKTLRCAIYTRKSTEEGLQQEFNSLDAQREAGEAYIVSQKNEGWQLVPERFDDGGYTGGNMDRPALRCLLAAVETGAVDCVVVYKVDRLSRSLMDFARIVEIFDRNGVSFVSVTQQFNTTTSLGRLTLNILLSFAQFEREIISERTRDKMSAARRKGKWIGGHPVLGYDIDPKRGRIVVNPVEAAQVQAIFELYLERGSLLPVVQESLRLGLVTKRWTTEDGNIRGGKPLTRGGLHGILTNVLYTGMVDHKGTLYPGEHDRIIDQETWDRVHTTLRRNGGDKGATVRNKLGALLRGVLFCVPCGTPMMHTYTMRKAKRYRYYVCYHAQQQGWQNCETKSVPAQSIETAVLDSIRRIGTDPKLAEAVAAEALDQLARRRRELDQELDNGRRSLRQLNQSLAREAADTRADSGERFDRIRGLQQAIETTEQRLTELAAERKAYDHDRINANDLRSTLAEFDAVWSSLVAREQEQLIQLLVAKVGYDGRTGKVTVNFRSAGAKELCQGMS

SEQ ID NO: 4496 - protein, 513 aa, unidentified
  source 1..513: note = uncultivated organism
MSARPVLRCAIYTRVSTEHGLDQEFNSLDNQREAAEAYIKSQAHEGWRCLPARYDDGGFSGGSMDRPALQQLLADIQARRIDVVVVYKVDRLTRSLADFAKLVELFDCYGVSFVSVTQAFNTTTSMGRLTLNVLLSFAQFEREVTGERIRDKIAASKKKGIWMGGVVPLGYRVENRALHIVEEHAGVIRGLYASCLELGSIAAVKADLDRRRIQVPRRVDGAGTELGGTPFSRGHIEGILKNPVYAGRLGHKGQVHDGQHPAIIEPAIWDTVQLKLATTRPGRGRRSTTSSHLLVGRIRDHHGTVLSPSHAQKGAHRYRYYVSRALLRGEQPSSIRRVSAPEIEATIVRALRSCIPASQQPEDDAVLVRDHLVVAIVHPDRLELRLTADREPITIPWSATPSRPARDIIVPPGREGAQLRRMKTEDRARILKAIATGRTWMDELITSRIVSPAAIASREILSERSVRMTLSLAQLAPSIVKAIMDGRLPRGIGIRDLADLPASWTEQERALGM

SEQ ID NO: 4497 - protein, 513 aa, unidentified
  source 1..513: note = uncultivated organism
MKIDEWFCDQAKSGKTDDRPEFQRMIEGIQAGEIGTVVVHKLDRFSRNVRDTLYYLAQFNEMGINFVSITEKIDDSPVGKLMLTILSGFNEYYVNNLSTEVMKGMMENAQKGLWTGGKAPLGYDLNKETKLLEINPREAEAVTLIFNMTSEGYGYGQIIDKLNLLGYKTKNGIPFGKNSIYEILRNERYKGIYIYNKRSASRSSDGKRNNHDFKASEDVIRIPGGCPAIVSEELWNKANATRLITGKYTNNAKHPYLLTGFMYCDKCGYAMQGNVRKLKGKIKTTYRCSARYNKRTCNCKEIKASIVDDFVLSAIFDTYFTEGAISKLTDKLNEIKQKMLSDNETLNKVREELQNDIRLRESLIDVLLETNNNPAVAERLNSTEENIRKKQEFIEQFENQIVSMFTPEDIRNSIESVKEYMKTEKNNEQIKNILSNFIDKILVGDDTIKLYLKVIPPEDKSDASSTHANKIEPEDMEITSLHISMVASRSGAGTAQYYGEGPRITKIPNFKSR

SEQ ID NO: 4498 - protein, 542 aa, unidentified
  source 1..542: note = uncultivated organism
MKPIERKVYRCAIYTRKSTEHNLDLEFNSLDAQREACEAYIKSQAHEGWRLVPDHYDDGGVSGASLDRPALQTLLADVRTGKINTVVVYKVDRLTRSLADFAKLVELFDQYGVSFVSITQSFNTTSSMGRLTLNVLLSFAQFEREVIGERVRDKIAASKRRGIWVGGPVPLGYRVIDKKLVVVPEEAEAVRTIFTRYLELGSMRPLIEDLDRRGIRTKANGLTNGSVRGGIRFGVGSLAHLLKNRFYIGEVVYRGAIHHGEHEPILERELFEAVQAKLAANTVTRQVRLKGSPAILTGRIFDDRGNRMSPSHSNKLGVRYRYYVSHAILQQRKAEAGSVARVPAAEIETLVLDGVRKHLASMGEANHSTTIADRDLIERHVERVIIKPQALEVHLVPTSEASALTEESGTKDLGAIQLPTPAITLAWTAPIFAAVKGIVHAPSERLELKPESRDALLTAIAKAREWADDIRLGRIASFAEIAKREGQGERHIRLLTPLAFVSPRIIAAIVNGSAPADLTVTGLAKALPYSWAAQEQAIGLLQ

SEQ ID NO: 4499 - protein, 584 aa, unidentified
  source 1..584: note = uncultivated organism
MMKAASYCRVSTDRDDQANSFESQQRYFKEYIDRQPDWELYQVYADEGITGTSTKKRAAFNRMIADAHMGKFQLILTKEVSRFSRNILDTISYTRELKALGIGVVFMNDGINTLDPDAELRLSIMGSIAQEESRKTSSRVKWGQTRRMEQGVVFGRSLLGYDVKDGKMTVNPEGAEIIRQIFYKYGVEKKGTSIIARELREAGYKSLTGNTKWSNTYIIKVLKNEKYVGDLVQKKTITPDYLSHTKKYNHGEEELVIIRDHHEPIIDRELWDIVQAELKKRDRKGDYGGGHSNRYVFSGKIKCGECGASFVSRKKKRKDGTEYRRWGCFTAATEGNRHKDVQGNKVGCDIGKMLRDELAMDILKQSLASLQMDVDGIIQNVTDIAMDAIRAGEEQVTDCPETLEHQIEQLNKKKADVLDAFFSRQITKDEMKLVNKRYDVELDALQVRREAARSKEEIVCETEALRKDVKKKITAIVSGETDSEVFYKNLLDHMVIYKDKRVDVYLNLLPQKWVFVMESLRDANRRLSSQNVEKMGERNNDYDVSPILPPVPTPEKPGDCNGLRSVCQKDPSVPMSVRRTFCSG

SEQ ID NO: 4500 - protein, 623 aa, unidentified
  source 1..623: note = uncultivated organism
MEVQVIEKIQGRIDRATGLKINTRLRVAAYARVSTDSEDQLNSFESQVKYYNEKINKNNEWLFVEVYAYESISGTQDYKRSNFTRMIQDSLNGKIDLILTKSISRFARNTLDTLKYVRMLKEKNVAILFEEENINTLEMAGELLLTILSSVAQQESETISSHVKLGLKMKQQRGELIGYNGCLGYTYDKESKSISVNEEEAEIVKYIFSRYAQGVGSSIIAKKLTNMKYQTPKGLNVWSDSTVRRILKNEKYKGDVLQGKTYTTDPITHKRVVNMGEENMYYIKEHHQAIIEPELFDKVQQILEKRAGSREKGKRKGNYSRKYPFSSRIYCGFCGTVLTRRNWNSGTKNAAPVWHCMKFVKRGKTECPKCKAIKETIIENCFVEAYKILCSDKGDIVEKFINRINNIITENSSDKLIENIDVEKQKLNSKMNKLIDLSLDNAIDRDTFLERKEKLQAQIEQLNMKQEKLMLDERNNTNRKLSLNKIRKFLETGDIVAEFDKDAFEILIKQVIVGGYDGNENADPHAITFVLKNDNIINYKEYLQTSYNVGKLNLQESNHTCGVLCSDDIKRQPIMVKFIKSGKRVLKVKLNNIAIHQMTVLTEDNRIKKMENIVDDKKLYLGQ

SEQ ID NO: 4501 - protein, 531 aa, unidentified
  source 1..531: note = uncultivated organism
MDSKRIYDTALYLRLSRDDADVDGSKKTESGSIKSQRDILRAYVREHEDLQIFDSYVDDGYSGANFERPEFKRMMTDIQNGKVNCVLVKDLSRFGRDYIEAGRLIQKTFPALKVRFIAVADGFDSLYADKTSSSLILPMKNFINDSYCRDISMKVRAQQKVKRMEGKYIGAFAVYGYRKNPEDKNRLAVDEYAADIVRQIFAWKIAGMSLGAIAEKLNAAGVLSPMEYKRSLGMNYYTGFGGGSAAKWAAASVKRILENPVYVGTMVQGKREKVNYKVKRSIDKPQEEWICVKNTHEAIISEAEFLTVQELLKYDGRASGSSDTANLFSGILICADCKAPMIKRINSYKGKKKVFYICQTKNKSMGCSRHSIEEETLKKIVFTEIRKYFGLLVSYSEVAEVIDKLDVGYGRVAGYESQIAAYQAEYHKYYGLKNGLSVDLKEGLIDQREYDEFYHLYERKCSDLESAINGQKKIINDLRQSGVAAREKLEKIRTTRKLQELDRELLVMAVRKIAIYEKKRLEIEFRFSDER

SEQ ID NO: 4502 - protein, 552 aa, unidentified
  source 1..552: note = uncultivated organism
MEAKKKIIRCAIYTRKSSEEGLEQDFNSLDAQREACESYIKSQQHEGWVLVEKQYNDGGFSGGTLERPALREIFKDIEAGNIDTVVVYKIDRLTRSLMDFSKIVELFDKRSTTFVSITQQFNTTTSMGRLTLNILLSFAQFEREVTGERIRDKKAASAKKGIWIGGPVPIGYKIEEKKLIPDKEYIPTLETIFEKYIEFQSVCKLKNYLDENNIKSRTGRDFSKGNLYKILSNKTYIGMIKHKDTHYNGEHEGIIEEYTFNKAQDLLEKNRNNNKCKITAKSPSLLAGKIFDDNGNRMNPSHSNKKGKRYRYYVSQAIIQGNINKAGTITKIPAGEIENFVQKQIKDFLADKDKLQEYISEFDVHKQKTIISEASKFDLTNNFIRAILAKIVLYKEKVEIIICKNQLIKGLESFITGTAFLDETKPDTEYPIKIIRNIRISTTSRNGSVLVVNNAEKKEVNINPFLVKIIAKSYYWNKLINEGKARGSNDIRKMENHNNNNYVKEILRLKFLAPSIIESILNGTQPIDLTADKLRKLKTIDWQEQKKILNFD

SEQ ID NO: 4503 - protein, 601 aa, unidentified
  source 1..601: note = uncultivated organism
MAKNRDVIAIYSRKSRFTGKGESIGNQVDMCRTYIHTAFGETYAAGAVVFEDEGFSGGNLNWPDFKRMMKAAREHQFRAVVVYRLDRISRNISDFSSLIQELGRLEIDFVSIRESFDTSSPMGRAMMYIASVFSQLERETIAERIRDNMHELAKTGRWLGGTTPTGYTSEAVKSITVDGKNKRACRLKLIPEEATIVRTIYQLYRETNSLIMTEAELLQRRIKTKTGRDFTRFSIKNILQNPVYLIADRDACQYFLDKQADLFSGVEEFDGIRGIPAYNRTNQEKGRATVFLPVREWIVAVGQHPGIIPAHTWITVQESLERNRSKSYRKPRSNEALLTGLLWCRCGSRMYPKLSQRVTAEGKPVYAYVCRKKEHSKRSLCGLRNANGNLLDAAVLEQIKSLHTDDSHFLSLLEKGQRFHIDCGEDSSEQLEDLRRQQIETERRIAALVDSLADLSGSTAAVHVKKRIEELHTQQAGLCSHIRELESLTVHQTLSDMEFDLMRQLLAVFQKDVDRMTVEQKRVAIRTLVRKVVWDGQHAHVVLFGTPDADGQTDSGILPGLALDGSDDAVLEVPQKTPAKTLWGEDSKCYHHISAPLASAL

SEQ ID NO: 4504 - protein, 545 aa, unidentified
  source 1..545: note = uncultivated organism
MAKRVCCLYRVSTKGQVEKDDIPMQKQKCREFAEANGWEIVKEFSEKGVSGFKVSAKDRDAIQDIQKAAAQGQFDILLVFMFDRLGRKEDETPFVVEWFVNNGIEVWSTVEGQQRFDNHVDKLMNYIRYWQASGESIKTSIRTKTRLGQIVQEGRFRGGHAPYGYELVKNGRMGKKNRELYDIKVNPAEALEVKEMFELADKFGYGGRKISSELHAKGMINTRTGEPFHYSTVANILRNVMYTGVLRSGESHSDVIPDLQIVSQEQFERVGRGLEQRSANYAKTCEMTSQETVKLFNGDEISVARPPRMSPVRGCGKSLLSGNIYCGHCGARIFSSTTKRTGHVSNDDRIRVYRCYSRANHKQRCDGPSTYQAAKVDKVIDQLLLGIFREAKAVNEQELIKKEVEGAQSQYQVRLKQAKAEYAKAAKEYAKWESLMLDSIEGTCVFTPEQVKGRMDKIHDNMTNLGTTVAELELKAEEAGTHAAEIKKAHQQLVNWADIYKDATLDEKRAVASYIIKAVTLTRDYGIQVEFNISEAQYLSGMDMT

SEQ ID NO: 4505 - protein, 556 aa, unidentified
  source 1..556: note = uncultivated organism
MNPRSRCAIYTRKSSEEGLEQSFNSLHAQREACEAYIKSQQHEGWKLSATRYDDGGFSGGNMDRPAFTQLMADIASGKISVVVVYKVDRLTRSLTDFAKMVEQFDKHGVSFVSVTQQFNTTTSMGRLTLNVLLSFAQFEREVTGERIRDKIAASKQKGMWMGGTVPLGYTAQDRKLVVNEIEAATVRAIFDEFLRAGSVYRLQEWLRTSNITNRRGNHFFRGPLYTILRNPHYLGRIKHKKLSYAGTHTAIVDHEIWDQAQALLGANTQGERRKGRVTKESLFTGMLFDVTGVLYTPTHANKNGRRYRYYTSQAAIKRTQSGDAPARIPAPELEKAIIDRLLEWLQTPEQLLTALRDETDSSSPEEGFYSRLNAQAVTTARSWLERIAEDRTLFLKNVIERVIVHRDHVDVRLHVPSLVSEILGAGGSTAGLLPIAVIECPFHHVRQGRAVRLVVGNTSLTTDASRMAILKAIARARHWYEQITSGEVSSIEQLASIHGVSPRLIHKHMRLVPLSPQRVEGFMSRPESMPISLHDLITAVPINWREQTVGNLARSA

SEQ ID NO: 4506 - protein, 505 aa, unidentified
  source 1..505: note = uncultivated organism
MIRKADFAKVTAPVRCAIYTRKSTDEGLDQAFNSLDAQREAGEAFVLSRKHEGWVCLPERYDDGGYSGGNVERPALKRLMADIEAGLIDAVVCYKVDRLSRSLLDFSRLIEVFDRRKVMFVSVTQPINTADSSGRLMLNVLLSFAQFEREMIADRTRDKMGAARRKGKWTGGFPVLGYDVHPDGGKLLVNEEEAETVRAIFLLYLDLRSLQATAAELNRRGWRTKSWATRDGTFHEGVPFNKAHLSRMLGNPLYIGKVSHHGQVYEGEHPGIVDEAIYERVQAALAGNNVSGGARAKNRYGHLLRGLLHCTACGCAMSPSVTRRNGKAFKYYVCNHAAKAGWRNCPHPSLPAGEIEAAVVERIKCVGRDPALVAETLAQVRSIQKTRTPALTAERRRLDREVLRLKDRGDAGDQIGKIEARLVEVGEELAILQTASIDRRDLAKALSLFDPVWDVLFPAERERIIALLVERIDFDAARETVAITFRPTGIRSLAEEIEQAAEVTA

SEQ ID NO: 4507 - protein, 567 aa, unidentified
  source 1..567: note = uncultivated organism
MGRVSKRTSAPAVAVKETKVCYKAGIYARLSSDQDKRKNESVETQVMIAEKYIEDFNRQGTGRIEIIDRYIDLGKTGSNFNRDEFQRLMQDIRLGDINCVVVKDLSRFGRNYLEAGNYIEKIFPFLGVRFIAVADGFDTGIKGNDTRQMATEIKNLVNDMYAKDFSVKAKQHLKQRRQEGSYVGGPPPYGYKAEWDKKIRKLVPDESTVEIVRYIYERFIQTESYTAVSDDLNRRKLNPPYVYKKTGEVFFHPEQGEYKGWDKGSVERILKSETYIGKLVQGRTSITARDENNRVRRSEDEWVIRENTHTPIIDAAMFEEAARIREKLKEKTRSHAHPTEGYPLRENIFDSVLYCGVCGRKMTRQSHIKTYMDGRKARLDGYFCLNGKQTKVDSCPTANRISKNELVDILVPLFKMEFSVYLGKTKTYTEIVKEQIRIAGAEIDTKIKNAERSISAAKENEQTKYMAYRLGEIHQSEYVACKMQLEGKIRDLNRQKEELKTERKNLETVSKKYLAAVRALLRLKSGKELTKEMIDSLIQKVYVYPGKRIEVQFTYTNELLEGVMEHG

SEQ ID NO: 4508 - protein, 577 aa, unidentified
  source 1..577: note = uncultivated organism
MSTSASPRLRCAVYTRKSTEDGLEQEFNSLDAQREACEAYVLSQSSLGWRLVPDRYDDGGISGGTMDRPALQRLLQDIREKRVDVVVVYKIDRLTRSLSDFARMVDIFDAASASFVSVTQQFNTTTSMGRLTLNVLLSFAQFEREVAAERIRDKIAASKKKGMWMGGGVPLGYRAENRKLKVDESEAEIVRYLFSRYLELKSVRALAAEANAMRFPARSLEKDRTELESDDPTSTDPAVRRFGRGPLYHLLSNPIYIGKVRHREKVYEGEHEAIIDAEKFAAAQALLATQAPARSRATNSADLHLLTGILFDEDGNSLRSVHTKKENVRYRYYVSKAFVEERGSGTQNGWRLPARQMEQVVEAELARILTNARLLSELLQDRIPADRIPATISRASDLHATYQASTPQHRRSIIQKLFPRIDLAPAKLILRLDAENLVEQLAGSPVRSEPDDRLRYIAIERPISLRRRGKETRIVLADNSRRAVASDENMIRMLRKAHFYLAQLTDGSGRSISNVATANKMDRSDFSRVLRLAFLTPKIADQILSGSQSSELTAQTLSRLPELPHSWTEARATRRLM

SEQ ID NO: 4509 - protein, 543 aa, unidentified
  source 1..543: note = uncultivated organism
MEEIKCAVYTRKSTDEGLEKEFNTLEAQREAGENFVKSQKHQGWTLIPEHYDDGGFSGGNMNRPSLQRLLKDVADGKINMIVVYKIDRLTRSLTDFAKMVDIFDKHHCSFVSVTQNFNTADSMGRLTLNMLLSFAQFEREISGERIRDKVAASKKKGIWMGGCVPYGYQPINRKLVIKPEEAKVVKFMFEKYLEYKSPQAVGDLLEEEGLKTFPRASIARMLQNPIYMGKIKHQGTLYDGQHEAIVSEEIFAAVQNVSVKKDRTKHVCLYKKNEVGIMRGLLTCGCCHALMTPTSTQAHGVKRFYYTSTTARMFGYRKCSNGSVPVAAMDECMIKIVAQLFQDPKVFQALLEKVAPNKTMELLRVLRTPEKVFYKLTDRFKHLIMEMMMTGVTVNRDTMDINWTDLGLSLLPDSLLQKTSGHQTVVPMPFVKHKGRTEIHLPENMTAEPHFDNELIKAICLGFKYQKMLDQTKMNISDLAIKEDVDATSISRYIRLTCLSPAIIRTILKGHQPPKFYLRNLLRSEIPPIWEDQVKQFGFTILD

SEQ ID NO: 4510 - protein, 564 aa, unidentified
  source 1..564: note = uncultivated organism
MTKPRIRSAIYTRKSSDEGLDQDFNSLDAQREACAAYIASQRHERWVADKTRYDDGGISGGTLERPAMQRLLADIDAGRIQMVVVYKIDRLTRSLADFAKLVARFDAAGCSFVSVTQAFNTATSMGRLTLNVLLSFAQFEREVTAERIRDKIAASKKKGMWMGGVPPLGYDPHPDPKTRGLVISQNEAKTVEVIFHLYVQLGCLNAVMRKTTEMGLRSKRHHFKSGRTQGGNLFSRGQIYALLRNPIYIGKIKHKTNVWVGQHEAIIDIELWDRVQAKLQDASVRPRSRVGSASSHPKIGAAPLTGKLRDETGDRLTPTHTQRHGRRLRYYVSNRLISGGTDPRGWRLPAVALEQAVADIIARHLSDLARGHRICVMPDVQVSDAVCTRAKDLAQRLWNGAPKLLANITAGGQLTKGRIVLELQTTELANELGLKPEEIHPSTLQVQAPFALRRRGVEGKIVAGDREPDPDRTMLRALARAHTWTADLHKGKPLSEIAAATRHSESYIRTRAQLAFLSPAIQKVILNGRQPPELTLEQIIRKPIPLDWDRQARIYGFSRDLNHP

SEQ ID NO: 4511 - protein, 526 aa, unidentified
  source 1..526: note = uncultivated organism
MPKEKETGPTTIHCAIYTRKSTDEGLDQEFNSLDAQREAAEAYIASQRHEGWVCLPDQYDDGGFTGANTERPALQRLLSDIKEGGIDCVLVYKVDRLSRSLMDFARLMESFEAHGVSFCSVTQQFNSATSMGRLTLNILLSFAQFEREIISERTRDKIAAAKRKGKWVGGIPVLGYDIDPKGGKLVVNDEEGARVRAMFQLYLEHEAMMPVVKELDRRAWRTKEWTTKKKGNKRGGKPITKNVLYTMLNNVVYLGKVKYKEEIYDGEHESIIDFSIWKRVQDLLRENGRTGGVEVRNKYGALLRGLIRCVPCNSSMSHTYTKKGEKRYRYYVCTNAQKRGWDACPSKSLNAHEIETSVIEHIKGIGASGQVLDATVKEIRNQMDERVKELRVEHVTVKKGLARQNGRVLDLVNQSVDRGPATSDVADRLANLNDQIASLEKREAVLREELATAESQALDEEEVASLLSSFGPIWQSLPPRDQIRIIRLIVDRVDFDGRDRTVRVVFQSTGLMQLCQEFGETGEEEE

SEQ ID NO: 4512 - protein, 529 aa, unidentified
  source 1..529: note = uncultivated organism
MAARRNGVARPSPEVRRSAIYTRKSTEKGLEQDFNSLDAQREACEQYIRAQAGAGWQLVPDHYNDGGFTGANLDRPAFQRLMADVEAGRVDVVVVYKVDRLSRSLLDFAGVMGRFEQAGVSFVSVTQSFSTADSMGRLTLNLLLSFAQYEREMIADRTRDKIAASRRRGMWTGGQVPLGYEVQDKKLVINELEAVRVREIFDLYLELQSALAVARQLNARDRTTKRHRSQDGRLREGRAWSKDAVLRVLQNPVFAGYMPYGDELHEGEHQAIIDRQTFARTRALLQGKGGGGPGEGRNPAYLLRGLLRCACCGHTLTPASTRKGDKEYRYYRSTARDDLGREACQARPLPARAIEDFVVQRIREATADGSLARDVARKVAARLEEQRKELQTERRTLPPAIAALSAEGKKLAESLQLLDGPARRLLEERLREVAGPLGRHEARLAEVERQLAHLDTVEVETGWVARVLADFDAVWDVLTVENRARLVRAIVREVVVDESNGSIQAVLTDLGQCETVEESDRRGAVEARG

SEQ ID NO: 4513 - protein, 552 aa, unidentified
  source 1..552: note = uncultivated organism
MSTAPYTALSTEALDEYRAIAYYRLSKVDRNKKASESDSIANQRKLIQCYLEKHPNIVLVAEADDDGYTGTNFNRPGFQKVLDAIQSGQVNCVIVKDLSRLGREYISVGAYLEQKFPDWGVRFIAINDDVDSEKNNAGDELIIPIKNIMNESYCRELSKKLRNQFRIQRGNGEFLGAFASYGYCKSPDDKHKLIIDEFAAEVVKGIFSLKMKGHSPSSIAEYLNSELILPPSEYKKSKGLNYKSGFVSANQPKWSAVTVQRILSNPIYAGTLVQGKRGTPNYKIKRMRIREEEEWSVIKENHPAIIDPIVFDSVQKMLKRDTRSAPESTVVYPLAGVLYCPDCGRPLSRRTATKNGKKYQYYVCSTYKNGKGCSSHSIACSTLDAIVLRAITNQVNMIAEMEQLLTELGSRDVWKARIRRLDTMIEKKREELKQNEERRLGLYEALNDGLIDRAEHSKMRAIYTSRIEEAEQAIRQLSISRDEAASNASQESNWVSQFVKFQGIDSLTREVVFTLVDKVYVHADQHIKIDFNYRDEIAFYSDILHRKEKEVV

SEQ ID NO: 4514 - protein, 548 aa, unidentified
  source 1..548: note = uncultivated organism
MKGTKTVRCHGYVRVSTLRQADLEHGSLDAQADEIRNYLKFRKTPQTSFEVEGVFREEGRSAKDTDRPELRKLLDLVRQGKVDAVVVTKIDRLTRSVKDFYDLWGEFERHNVQLISVRDQFDTTTPMGKAMVNMILTFAQLEREMTAERVRNKMLWHAEQGLWNGGRPPGFRLDPKQKGVLLRHADEQPLVETIFKKYLDLGSAGELAKFLARQGIKTPVHISRRGRKVGGQPFYKTTLLKMLRNPVYIGKIRYAGKVFPGQHEGIIAQELFDQVNEHLRVHAPLRKNPRARREHIYLLQGIVFCGKCGAHMTPKACSGTKQTNFYYQCTRNGHTNGAACSMRYVPAETLETSILGKLREIALQSDDITRVVREANEHSNDALKELSDNRRRVEGELQAATDKAERLVDVLKEQGAAGLKIVGDELKKLEAERGRLEKQLAEIKQEMKLLETETMNAEVMVTSLKTFADVLDRAAPEDLKSLLPMFVERIVFHDPDEKGQGRIQLSLFERPVRREDELVGAGINQSGPSSAQSSYWCAARDSNPRPAD

SEQ ID NO: 4515 - protein, 500 aa, unidentified
  source 1..500: note = uncultivated organism
MKDNRVLNKPVGIWIRVSTEDQAQGDSPQHHEERAREYAKFNNWTVAEVYDLAGVSGKSVIEHPEAKRMLADVKRGHITGLIFSKLARLARNTRELLDFSDYFRAHNADMVSLQEKIDTSSPAGRLFYTMIAAMAQWEREEIADRVRASIKIRAKLGKSLGGAAPFGYAWKDNKLEINPTEAPVRKHMYELFAKHKRKKSVARMLNEAGYRTRNGSRFTDTTVVRLLQDQTAKGFYRSNHTHRNDKGKLIAKPEAEWVLTPIAPIVSDALWNECNNALLARKNGKPVGPKPVHLFAGLLFCGCGQKMYVFSRSPKYICPKCRNKIPMEDIEGVFREELKDFFVSKERIRAHLLNANQHLSDKKARLGAHDRNLEKVRLEMRKVYQLYQTDQITPEGFGKLYRPLEDQEKSLASELPKLQGEIDAMEMHSISADQVVDEATNLHRGWPKLDAERKRGIIESIVEKIVLTGDTIDITYCYLPSSEELTTRQRNLLGSSQPPT

SEQ ID NO: 4516 - protein, 522 aa, unidentified
  source 1..522: note = uncultivated organism
MERKKKAAIYCRISRDSTGKREGVERQYEDCQMMCRLNGYEVYEVYEDNSISAHATATKHGKERPKYEKMLSDFKRGKFDVIVAWKLDRLTRSVSGLEEMLKELASQKLRICTTDLGGSELDLSTADAVMLAQIMASFAQFEASRKGERTRRANLQRAQEGIMRRGSRCFGYDRQNRIIEPEAEVVRAIYDAYRKGSSMGAITRAIAGDDDGTLPDMPTSEAPSVIVARERGKTPPNKKWSLSTTQSILRNPKYAGYAYYAPVDSRGKCRSYNSTWRDYIVRDENGEIVRGTTWEPIVAEDVWWECQERRDSNLSRADGTHIEKKGNQKKHIGAGVYRCGICGGKVKSGATDKRAGYTHTHTYRCDGHVNRMGGKIDEFVCAVVRERLARADLRDLLCAKADSTPRLKEIQDEIASLQARVKQTEHDYDEDLIDASTRKRKIGKLTSKIMKLEDEREELMPRNASSGIISSPDPAKAFDALTDPAQISRVIDELCTVTLYPHKAGTRVTAESMAEDVKIEWK

SEQ ID NO: 4517 - protein, 530 aa, unidentified
  source 1..530: note = uncultivated organism
MTIKCAIYTRKSTEHGLDMEFNSLQNQEESCKAYIASQAFNGWQYYKTYSDAAISGGTMERPALKQMLDDMAHGLVNTVVVYKVDRLSRSILDFHNMMKYFEKYGANFVSITQSFDTSTSMGKLTLNMLLSFAQFEREVSSERVRDKIRASKAKGLWIGGTQRLGYDIVNKKLTVNPAEAGQVKHLFEKYLELQSVNDITEYAKRNGIYAKKRTTVKGRIMGGRPIAKMGMHRMLRDRIYIGQIEHKKNGTFAKGEHEPIIPEELFNSVQIALANNSNEKSQSTRTPNLLTGKLFNHNGTKFINQMTSGKGKKNTHYYATKGFYLTAPRVDEIVIKTVTHFLNSDMSKLPVNLSTVLKRIDINTMTYTQKRGFIQSLIEKVVYSQEQLIYTLTTDVQKLHPFINENYVNQNTDKMEYIINDDNITITEKVFLRKYVNPTYDRGKNGVLNITDNNNLILKAFATAWKYRELYERDGDIHRIFHNEHTSPRQFYRHLDIAYMNPTKANQILSGKLKINVNDLFTIAGENQLY

SEQ ID NO: 4518 - protein, 534 aa, unidentified
  source 1..534: note = uncultivated organism
METRAIGYIRVSTGEQAEEGHSLYAQRMAIEQFCQAKGWALVEVKVDAGISGTKDDRPALQALLRAVEQGTFDVVVVHAIDRFYRDLQGLLKALNHLRRHNVAFISITENLDFTTPWGKLALAVLGTLAEIYIDRLREETRKGKRARAAKGLHNGSPPFGYCRGNCASCTDPNGPGYCPRYGGPNIQNYTPSLPLVPHPVEREAVRLAFEWYATGQYSDGDIAARLNEHVHTLPDGTKIRFRTKGRHGCGSPARFGKDSVRDMLLRPFYVGLVPYFGVNEKGQKRKRADAVALYPGQHEPLVDQETFERCRRIRALMNHHPRSRSDSLERIYILSGILRCGYCGQPMRAQSGNGVRYYQDKSRIQHLADCPQPYVRADDVEEQFARLVQSIRLPSDWREEVIAALHPDLDAGAIREQEEAIQARLERAKRLYIDGDIDEAQYEREKMECLARLTDRVKSKENVTETHSFRQKKMLPRCPLLSLGLEYFPVSTGASEWRVHCTLGSRGGGQGRDKEREKRQQSRHFSLPPLWVKV

SEQ ID NO: 4519 - protein, 599 aa, unidentified
  source 1..599: note = uncultivated organism
MAGSDPRSVFRCAIYTRKSTEEGLDREVNSLEAQRDTCSAYIRSQKHKGWVELPKRYDDGGWSGANLVRPALQDLLTDIEAGRVDVVVIYKIDRLSRSLLDFVRLIDTLERFQVSFVSITQAFDTSDSMGRLVLNVLLTFAQFERELLSDRLRDRFATLKRRGKWTGGKTPFGYAKVDKKLVEHKTEAAIVRGIYARYPEAVSGNQLLQELRAEGVRNKTSVARDGRVLGGHLFGAGLLHRILTNPLYLGFIEYGGEWYPGEHPALVTREQWDRVQAKRALRHECQIPRRPSGALLKGLLFDSHGRRMHPDGQIHKGRRWDYYSTELSRDARRQHLKVLRVNAGEVEVLAVTALRALLCDRPRLSEALAELGILDASVDRALRAGPKVAHWLEGMERERLAAVLKCVVRRAELGREKLRLLLSCFELDRLLAWDGVGLLRPSVEIPGRVMSRVHVLDAPAALVRETRRLILPIAPRSADALSPDPRLLKLLGEAKAAREAVYANRDKTVAEVAREFGRGPSYFSRLIQLNYLAPDIMAAIMDGLQPPGFTRRTLLEASMPMEWDQQRLMFGFPTWPKEGLSMSLTARNHAPRSGGGLAI

SEQ ID NO: 4520 - protein, 542 aa, unidentified
  source 1..542: note = uncultivated organism
MKKRVVIYARFSSHSQTEQSIEGQLRECYDFARRNDYLVIAEYIDRALTGTTDKRPEFLRMIEDSKKKNFDYVLVYQLDRFARNRYDSANYKAKLKKNGVRVLSAKENITEDTSGILVEGMLESMAEYYSAELSQKVKRGIRESYERGYFIGGYGLFGYVIVDKKWTINSYKANIVRDVFTRYKNGEKAKEIIARLNGQGIKTKAGSSFNMNSLARIIRNEKYIGKVTSHGTVYTNVIPPIVDEELFYECNVIMDKHKHKPRDSKSEQPYILSGKLFCGFCGSQMTAETGTSHTGKLHHYYKCFGRKRNKHSCKKANYRQQDLEDLVFGTTVKYVLQPDVIQTVAEQVVSKFNSEITKTATLENLENELKAKEKAINALLAAIEQGIVTKSTKERLISLETQKEELESKISLEKARQIKPLEVDKIKAFLTYFARKKYENGQEKNEFFNSFINRVVLYDDKILIFYNTDDNHPTVIKRKDTEKLISHLNDIASNGKTATNDCPNTTGNNSPIVQKENSLEPQGFKRVSLGGEKGIRTLAPVS

SEQ ID NO: 4521 - protein, 579 aa, unidentified
  source 1..579: note = uncultivated organism
MTLQQKSSVRCAIYTRKSSEEGLEQSFNSLDAQREACEAFVASQRHEGWRVISQLYGDGGYSGGDMGRPALRQLLEDVAAKKIDTIVVYKVDRLTRSLADFAKIVEVLDAHCVSFVSVTQQFNTTTSMGRLTLNILLSFAQFEREVTGERIRDKIAASKRKGMWMGGRVPLGYDLKERRLAVNHEEAKLINDLYHRYLELGAVSKVKTWLDEHGLKSKERISPAGIRTGGASFSRGSLYLILQNPIYLGEVRHRNHSYPGEQESIVPRDLWDQVQAQLRSDNGGKKSDVRTKCSSLLLGLLQDVEGDQFRSSHTVKNGRRYRYYFLQKPSLDSDRQSKAMRLPAYDVERQVSAKLESFLRSKDQVLAELAIAQDHPDTARDLLTAATKQAEKLSEGPLDEARDFLRTVVCRVIVRPDKIDMELGRRELRASLTENQSGTHPRLIQQPASPEDLICLSIEARLKRFGGEMRLVVNPDSLPAQQMTPLLKAITRAHRWRQGILAGESLKRTVAAKQLGLNEQYLRRVLGCAFLAPDIVEAILDGRYPSNLSVRKLSHRQLPLNWAEQRIRLGFPPRESNGI

SEQ ID NO: 4522 - protein, 510 aa, unidentified
  source 1..510: note = uncultivated organism
MRAAVYCRISSDRDDTQLGVKRQEKDCLELCAREGYEVTDLYVDNNRTAADPDKPRPEYERMMRAVEGGKADVVVVYREDRLHRQPAELEAFASRAKKAGLTRLHSVRSGSTDLTDAAALMTLRIKGDVAAYEVAVTKERILRKQQELAESGKSHGGGRRAFGWQRVAGERDGTVVCEEEAVLIREAAERVLRGETLRSIAMDWEGRGVPTSSGRPWRVNSVRSFLSSPRNAGLRTHRGVLTPADWPAILDRDTWDQLQAVFSDNSQRQPRSVKRAYPLTGVMVCGVCGKKLTSVPRKKPIPSDPDRRVRYYGCRRDLGACGKIFVTAEHVESVVFPAILRLVDDPATRALTSAERASEGAEIKALVQANAEDGTRLAELEDAFAAGDLTRAGLQRNAKAIKERIGERQSRISALSGNAALDRFGGDVAGHWDELSSADKRSVVLTLVTSIEVRPKGKGGFNTFDPGRLVFHWRLGALAQAVERWAEHATPDDIEGEHQRYQAALLDEAN

SEQ ID NO: 4523 - protein, 540 aa, unidentified
  source 1..540: note = uncultivated organism
MRFFIYSRKSVYTGKGESIENQIEMCKQYIQAKFPHDAAEISVYEDEGFSAKNMERPQFQQMLRDMKRTKPDFVICYRLDRISRNVSDFSSLIEDLNDRDISFVCIKEEFDTSKPMGKAMMYIASVFAQLERETIAERVRDNLMMLARTGRWLGGTTPTGFTSEKLQEIVIDGKIKTSCKLKDNPEELRAVDMMFEKYLELRSMSGVSKYLMRQGVRSRNGNDYSLLGIKEILQNPVYCVADRDALAYFREHGSDVCFEEKDCSNQYGLISYNKRDYKKKSAPRLSMDKWIIAIGKHRGRVPGKKWVAVQKIIEENIPTGKKPAKMHNDYSLLSGLIYCSRCGNRMFAKQRSYKSGNTVLYDYVCRSKLRGGTGLCSCPNLGGRQADDLVCKNLMPHMKESARLVQGLEELKSGLRAQEREDPVHSVALRMKKCNDEMDNLIQTLAAGNVGAAFVQRVNVRIHELDAELTELAKERDRLREEAEPTADRERQADRLAATLSGLKDCFDLLSIHEKRTLIRLMVKKIVWDGEDLHIFMDGG

SEQ ID NO: 4524 - protein, 554 aa, unidentified
  source 1..554: note = uncultivated organism
MPDNGAEQTLHIYTRVSTVAQAEQGTSLESQRELGIKKAGELGFAYKVWDEGGRSSHHEDIADRPVLSALFSELEAGAVKHLWVYDQSRLSRNDQVASIFRYQCNKQGVTLYTKDGVYDLSNPNDRFLKQLLDAVAEFDNITRAERTRIGKLNKVRKGSWHGGPAPYGYELQDQRLAVKKDEAKWVKRIFAEVIKGSSAAQIKQVLDSHCVEPRRKRGLWTLGSINALLTNTHYAGYYIYKDQKSGQEIQVQCPSILDVTTWNAAQHTRASQSRRSPQKNATVRHFYLLREFMFCGHCGRSLSGRIIKGRAESSYYCPNKERQWVKDGGSKTPRQRGTGCGFGRAMNITQADKLVWDTIKSLHGKSSILKEEAKHRLLKEGGVVLISDKDAKAAEAKIRRYQTDHKRLSDSLGALEANRLINGLNDVAFKAAASRIKDEIGRVETELATLRLQLEGAARSRRWVDWLKSFGEEVADLDSLSDDKKRDYLAGLIKRIDVKYEAEERQHVMLMTLHLPIVNDRIDGKRIRGRMGPYVVVPGTDSVTLVAKKKDGRG

SEQ ID NO: 4525 - protein, 531 aa, unidentified
  source 1..531: note = uncultivated organism
MGIYTRISRDAAGHELGVQRQEQDCRDLAKRLGWTVMKVYKENDTSAFKRQTVDLPGGGRALRVVRPEFRQMIDDLHEGRIDGLIAYDLDRVARDPRDLEDLIDLKEVKGCDVKSVTGSLRLDSDADVTMARVMVAIANKSSRDTSRRVARRCRQRAEEGGWHGGWAPYGYEFERDSSGAVIGLLVQPQRAAIVRESADRVLRGDTLYRIAKDLNARGVGTAPSANKPDGSRWGPRQIKRMLLSPAIIGYRSHNGTLHPATWPAILDDDTYKRVRDILTEPSRADRAGGFRSTARKQALTGIATCGCTCQGHPCGRRLYSQPAGGKSTLVCVAAHGGCGHVRINYDPLEAHVLRLVGERLDTVGPPVATDTGMSPDEEAALRADVEADEARLQQLQDDYMDGLFDRDGFQRQQDRLRDRLDDNRLRLADLQRDRIARDMPTTRAEFEAMWATIEDLDRRRAILGHFLADVVIHPHPKGVATRLSPKRHESDADYGTRCRDHHAAVLGVRVQAVYAGDVADRGTAAPTGRAG

SEQ ID NO: 4526 - protein, 546 aa, unidentified
  source 1..546: note = uncultivated organism
MQQVNCAIYVRKSTEHGMDQQFNSLDNQEQACKAYIASQQFQCWQFCKTYSDVAFSGGTMSRPALKEMLADIHAGKIQCVLVYKIDRLSRSIYDFKTMMKEFDKHNCNMVSITQSFDTSSAMGKLTLNMLLSFAEFEREVASERVRDKMRATKAKGMWIGGIPPIGYDIEFGKLVPNESEVQIVHKVFETYLESSGFNDCCYKLIKMGFTQKKWTTRNGAIKGGAKITPNVVERILKSEIYLGKMPNKSTGEVFDGLHKPIIDRELFNIVQDKIKANNSHPDSRYNLSKTLLHNKMFTASGAQFKNKKGCKEFKHYRYYRAAGISLPAGDLDKIIYAEIKQFLDSNMTEKIPEEKRLAFKQKQFCEKLASEIIEKVIYSDNKITIFIHAENLEYLQPFQTHNYLNQNSVQMNNYFVNEQGQIVIEKEIFITRGVCVKNRNSGFETCVLTRSENAYIFIHALAVGWKYKQMYESGTCVKHIAKNEQRDIRTIYKYLNLAYLSPRIINNIMDGKIPIGLTVQNLFDIANKYDDFMKQKECFSKNLKFI

SEQ ID NO: 4527 - protein, 521 aa, unidentified
  source 1..521: note = uncultivated organism
MSGKEKTNGSLAMAPQIITIPAANQETTRKLRVAAYARVSSNSEDQKHSFAAQNAYYSKLITDDPNWELADIYADQGITGTSIDKRDDFLRMMEDCRKGRIDRILVKSSSRFARNAKESLEAVRELAALDVSVCFEEQNIDTAQVSGEVLIAIFAALAQRESEAISKRRRWSYQVQMKKGQFNTCQAPIGYRLDGRELEVIPEEAKVVQRIFREYLSGRNSRELARMLNEENVLGLDWKYNTIDYILQNERYAGNALLQKRYTTDTLPFCLKKNRGERPQYFVEDINEAIVSQKIFDKAQALRRERRVAQGQMHNKVSQHMRCSCGSPIRAKQVRDRWYWVCCWHDERHTCPLMPIPEEEVEQAFLRLYYRLKHYGIDVLTQLISDLYAARTGSLLWSENIVEINKQISDIASQERLLTQLKQQGSVDPDIFISRGNLLAERRRELKLQKERILRSEEDHTIQQTQDLLDVLESGPDWLDDFDEQLFSDLVEKIVVVDNEKLCFRLLNGLEVTEKIERTQR

SEQ ID NO: 4528 - protein, 543 aa, unidentified
  source 1..543: note = uncultivated organism
MRRVRCAIYTRKSSEDGLEQDFNSLDAQRDACEAYIASQRHEGWKLLPDHYDDGGISGGHLERPALQRLMEAVDAKQVDQIVVYKIDCLTRSLADFAKLVDRLDAAEMSFVSVTQSFNTATSIGRLTLNMLLSFAQFEREVTAERIRDKIAASKRKGMWMGGNVPLGYDPDGRTLKINDETEALTVRRLYELYLERGTLREVKEQAEHEGLRSKLRQSPSGRTSGGKLLDRGQIQHLLSNPVYAGRIRHKGHVHEGQHNGIIDPEMWEQVQAMLKDGAAVKRGTRHTKHASTLAGKLFDETGDRLTPSHSRKNGKRLRYYISRRLVKERSGQNPDAWRLLADQIEQVLVDVLSTMLSRPGAALEMTTGLEAGQVQRVSEKLQKRCTKPTLLNLIERVDLQRGSLQITLDTAAVSTALGCCIEEMDTAALSIDVPFQMRRRGVELKLCLGKAPPEIDRTLVQNIVKARQYLSQIFAGRTFSEIAEAEGVSKRRIQDVTNLALLAPSVIKAILSGENASALTTDYLIKNRFSAVWSEQRAQFGAL

SEQ ID NO: 4529 - protein, 530 aa, unidentified
  source 1..530: note = uncultivated organism
MPRKPSQGAEASVARLVRCAIYTRKSSEEGLEQPFNSLDAQREAAEAYIASQRHQGWLALPERYDDGGYSGGNMDRPALQRLLEALQAGGIDCLVVYKVDRLSRSLLDFARIMGALEQQGTSFVSITQQFNTTSSIGRLTLNVLLSFAQFERELISERTRDKMSAARRKGKWVGGIPPLGYEVATGGGRLVVNAGEAAVVREVFSLYQERQSVLEVAEELNRRGRHTKQWTSRRGRQHAGLPFSKNAVSVILNNLTYTGQVRYRGEAYAGEHAGIIEPAQWEQVQGSLQSRRGIERKDGGSEPSPLSGLLYCGHCGVAMVASHTKKAGRRYQYYVCLRAQQRGWKNCPTKSVSALQIEQAVWEQVRTMVPLESPAEQSGWTGESVRKIVKRVTYDRARKLVRVALREEFGGVELEFPLVRLGHKEKRGRLPRIARLMALAVRCEELLRNGTVKDYAELARLGIVSRPRMTQVMNLLNLAPEIQEEILFLPEVEGGREPVSERALRRLPGILCWNHQLEMWNQLRGRWRSS

SEQ ID NO: 4530 - protein, 505 aa, unidentified
  source 1..505: note = uncultivated organism
MTAIYCRQSVDKKDSISIETQEQECRARLRSGETDVQVYCDRGYSGKNTNRPDFQRLMADVESGRVSKIIVYKLDRMSRSVLDFELTYRELKRHHVDFVSATEDFDTTSITGEAVLRVILIFAQLERETIQKRVTDNFYSRAEKGFFMAGVAPLGYSKVADHIDGRKTSRLEEDSATSHIIRYIYRRYLSGRTIGEIVAELNSPECGINPGIQFHNVRVSRILANPVYVRADADVYSYFRSRGAVLHNDVSEFTGVCGCTVYGRRQGKTRSKFRDLSGENIQLNRHEGLISAEDWLQVQSRLSENHALKNGGGGTHSWLSGMIRCGYCGYALSVVTGQRNGKRYVSCGGRKRHVCRESKRGVTFEMIEDSVAESMLAYARKLHYHSAERGAAEISRVNTLKARRIRLEDEINGIVERFAQAENPLLRAKLNERMELLERQTAEVDSALGECSGNSRQPADTDGIIRLLDSWDVLEMEDRKAIARLIISQVTVRDSMTPIEVCFRI

SEQ ID NO: 4531 - protein, 548 aa, unidentified
  source 1..548: note = uncultivated organism
MKKHIIYSRKSKYTGKGESVENQIEMCKQKILTKFPNINENDIIVLSDEGFTGANTNRPSFQKMIELVKDNKVFSITCYRLDRISRNVGDFCNTITELQKYNVSFLSIREDFDTSTPMGKAMMLICSVFAQLERDTIAERIRDNMIELAKTGRWLGGNTPTGYKSIEVKTMSIDGKIKKLFKLEPIVQEKKVVLLLKDKYKELKSQTGLETYTINNNIKTKKDKTFTRWALVNILSNPVYSAADKDSFEYFKNLGAQVIGNINDYNGKYGLMVYNKTNQLTGKGKKDNPITDWIVAIGRHEPFYTGQEYIEIQELLKNGANKRFRKPPVNNALLSGILKCKFCGSYMRPKIYKKCGNQIKFSYLCSLKEKSKGLLCNNHNLNGNMADKLLLDTIRNLKKDDGIFYKETKKLTNSNLNLEEKKNNELIILEEKVKKNNLEIKSLVNKIKLVDYDIVPIISEEISNLKNINQELIKRINKLKTNQNNDTIINQEKIVHDILDNYFNIFEKLDLAEKRNLVKLVIESAYSDGNNLTINLVGTNYPQCESCK

SEQ ID NO: 4532 - protein, 522 aa, unidentified
  source 1..522: note = uncultivated organism
MVKKVTKIKETNNRLQKKLKLRVAAYARVSTDNTEQLISLEAQKVHYEAYIKANPDWEFVGIYFDEGISGTKKENRTELLRLISDCENKKIDFVITKSISRFARNTIDCLEIVRKLTDLGVFIYFEKENINTQSMESELMLTILSSLAENESISISENNKWSIQKRFRNGTYKLSYPPYGYDYIDGQIVVNKKQAEVVKRIFTDALAGKGTQKIAQELNDEGVRTKKGGQWRGSTIRGILRNEKYTGDVILQKTYTDDNFTRRTNKGEKDQFLIENNHEAIISHEEFKAVNLAIEQRGKEKGIKSGNSKYLNRYPLSGKIQCSECGSTFKRRIHGTKNNKYIAWCCSKHITNIEECSMIYIREDSIHQGFVTMINKLIFSHKVVLRPLLQKLKLMNYSDNLIRVQEIESKMEKNAEQLQVLINLMTKGYLEPALFNKQNNELRSEAEKLKDQKEALYRFINGGMAKITELERLIKYVSKSKNIESFNKEVFEQFVEKIVAFSPTEIGFSLKCGLLLKERMER

SEQ ID NO: 4533 - protein, 532 aa, unidentified
  source 1..532: note = uncultivated organism
MRKQRQYNVGIYERLSREDEREGDSVSIQTQDQILRKHVLEQGWNLVDVYVDDGYTGGNFKRPALERMIQDTKSGRINLILVKDLSRFGRNYIEFGQYTDYLFPSIGCRFIALHDGVDTIRDDNEIMPFKNLFNEYYLRDCSKKAKHAKRSMAERGKFIGSYAPYGYKLSGDDQRTLLIDHAVADTVRRIFHMRAQGIGARTIASALNGEGILPPSAYRGVYTKPQTGTLKWNGNTVAAIYSNEVYIGNLVSRKTETLSYKSNIRIDRDEEDMVRFENTHEPLIDRDTWEACVRVMQRNSRSRAAKTGESRLFSGLLHCADCGYILTSQADAARSGKRYYYYRCGRYSSGGKGACTSHGISERILSGLVLDDLHEQLAGASEMSDTEISRMIMKSRRKSIDESMAADQEQARALRSRLDELEKVICSLYEDKALGRIPAQTYFAMSDKYQAEQAAKKAQLRQLEERLAQTQGEEECALRFLGLAKQYLNAEVLTREMACRLIDKVVVGEKTLVDGQKNQDIDIYYRFVGRIT

SEQ ID NO: 4534 - protein, 578 aa, unidentified
  source 1..578: note = uncultivated organism
MTRVCIYTRISTDEENQPTSLASQQERLEAFCKVQEDWRIMAHHEDRATGTKLDRPGLQAALDLARQGRIDQLLVYRIDRLSRKVRQLASIAEELDTLNVILRSATEPFDTGSAAGRMMLQMLGVFAEFEHATIVDRVTSGIERRAREGRWPNGRIPFGYERNEQKQLIPDERTAPVIRRIFTKYAAGRLGAAAIARHLVDEHAPAPSRGWQPNIVLWVLSNEAYVGRVHWRDQTFPGLHEPLIDQDTFDRAQALLKQRGEDLAMRAASRAEFLLTGLVRCGRCRRAYVGMSAKGNGGTYHYYACSGRQKLGRKSCDGERIPREKLETAILSQLTGIYRDGGLIRDAIEQAAASDDTDRTELTEQRASLAKEITRSERAIDRYQDAFEAGDLNPAHFNERLTMLKARLDALHDQDQALAHDLAADTPTTPDTAALRGVADHLDHTIANGEPEQAKALLAILIAELRVNSRNEILPTYRVGAPVVCAPNSSVEPTGIKPGGSSAPRRGRPQRLVLSPQPPQPHGQAMGASDRQHRADGVRVQVPHLVGHAPCAVGERQLLGCGVAHGARTDRAGQRADR

SEQ ID NO: 4535 - protein, 524 aa, unidentified
  source 1..524: note = uncultivated organism
MSRKIFRCAIYTRKSSDEGLDQAFNSLDAQREAGEAYVKSQAHEGWKCLPTLYDDGGFSGGSMERPALRRLLADVDAGLIDVVVVYKIDRLTRSLADFARIVERFDAREVSFVSVTQSFNTTSSMGRLTLNVLLSFAQFEREVTGERIRDKIAASKAKGMWMGGNPPLGYDLPASGTRILQVNEAEAITVRHIFALYLELGSVHALQRQLVELGIVSKRRVTGAGKTVGGLPISRGALFHMLRSPIYLGRIPHKELVHEGSHAAIIDQALFDKVQLRLDEQARRHGTAGEQRMARAALTGRLFDAMDEPMTPTFSRGRSGRLYRYYVSASLQQGQARSDDRVMRLPASAFEKLVSELITRWMPSTSVPLDLPLAIRLREQEILLDLPGKLAADISRRLRDGERLLHSTKQVCRIGVPLALPLRGGRKTITIGSRTTQPDRSLIHALRRAHAMIELHRGLPYIETAPISRYNRDTLALAFLAPDIQRDILAGRQPSTLSLEDLRHMDIPLCWQRQRDLLGWHTGR

SEQ ID NO: 4536 - protein, 504 aa, unidentified
  source 1..504: note = uncultivated organism
MYLRKSRMDTDFDDVSVEETLNRHRRILESFCKERRLNVVETLEEVVSGESLSARPQMLRLLALVNTGMYAGVVCVDIERLSRGSSLESGYIMQVLQTNNCKIITPSKIYDLQNESDEQFTDMKFMFSRYELKTITKRLVRGRNQSASEGKFLGSMAPYGYRSYKLPGTKGSSLQIEPGEAEIVRLIFDMYGKQGIGYNTIAYQLNQMHIPSRTGTWGQTSIANILNNEVYLGMIRWRHEPTKRVVKDGMLVKKRVKSHDYELYEGLHDPIVTQEQWDAVRAKQRERGHVSVNTNRKLANPFASILYCEKCGALMKRNVPSKKQSTLPWYRCPTRGCNCRAIKCDFAEEAILDAMRSWLAEYTIRVKSDDLPQTDPIDTALSVVQGQLAQLRTQQDNICEYLEKGVYTVEMFTKRNETLMKELRKLQASEDDLLKQKESKSSTKSIEAEVIPTTQRILDSYPHLSVEEKNRLWKIVMKKITMYRTPEGDFTLHIYPKLPMGNTP

SEQ ID NO: 4537 - protein, 502 aa, unidentified
  source 1..502: note = uncultivated organism
MLKCGIYIRVSKDNMEQKTSLENQRDLFIKYAKEKNWEIIDFYVDVESGTSTKRKELARLLNDAENKRIDIIAAKELSRLARHSELAHKIKRIAKTNGTHIVTLDGAINTLHGKNNTFGLFAWLYEIEAQNTSERIKQALKSRAERGLFNGSTPPYGYNNINGKLVIRNDETPLIIRRIFSDYISGKGIDSIAMALYNEDVPTPSMIANKSNANNKWHGSSVKKILQNQAYIGNMIQQKESTVSVICKQRKINSQENMTIIENTHEAIISVEDFNLVQELLQTRTHQKYHQATHLFTGIMFCHDCGKGMHFKKNRKGYVCGSFNKHGKKACSDHIIREADLSKLILSDLSSFINSLNNTDFIADFKARVEKHTSEQKNIVAKYEEELNSLNSKISKSISLLMDGTITKAHYDLFISENSARIKYLENKILESKKILDKFYDDSLLQELNKIKDTIISLDELTPETLHRFIKRIEVKEDWSPRIFYRFPDPNNLKTIGTTDNL

SEQ ID NO: 4538 - protein, 508 aa, unidentified
  source 1..508: note = uncultivated organism
MKAAIYTRVSTDTQADKDFNSCESQELKIRSFISSQENMEVYKVYSDQGYTGANIDRPALMEMLHAIQQGKIDVVISYKIDRLTRSPKDFYQLIEVLEKHNANFISVTERFDTSTPSGRLLRNIMLTFAQFERELISERTRDKMIERAKKGLWNSGHTPFGYKRDNKKLIIEPQEAGIVKLIFDTYYSTGSTAEVYNKLKTEKLFNRKGLPVSHSEIRKILGRTLYIGKIEYKGNIYQGIHEPIISQELFDAVQGLHKQRIKKSKVFNYSIFPGMVRCKECGSIMSAVFTNKVKNGRRTRYFYYRCSSVTKRDISFCGTRQVSSDRLDSHVIGGLGQIAHNQQYLDSLIFTLNYQQQDSRQGIEPDGVASGYTAERTREIIQTITNAYKLPGKNDKELIIKRHIKQINYSKENIEVVINYPDQPDKIFENGAENFTNEDKSRLGRDKSAGCDCLPAGKAGRRPIAARPITPQKNKIAGSSPIKISEDNSAVRLEKLIAPRGIEPLSRP

SEQ ID NO: 4539 - protein, 545 aa, unidentified
  source 1..545: note = uncultivated organism
MKPLRCAVYTRKSTEDGLEQEFNSLDAQREACEAYILSQRHEGWTLLPARYDDGGFSGGNIERPGLKALLADVEAGLVDVIVVYKVDRLTRSLADFAKIVERLDAKEASFVSVTQAFNTTTSMGRLTLNVLLSFAQFEREVTGERIRDKIAASKKKGLWMGGPVPLGYQVIERKLVPVPEEAERVRTIMRRYLEVRSVPALIEILRAEGVVTKIQQRSSGPHRGGIPFARGSLFHLLKNPVYRGKIVHKGKAYDGEHEAIVDEDLWEQVQMHLAEKAPPRKRPKNDRNDSLLNGIITDPEGRPVVPTYSTKGCRRYAYYETRKDLARPGNPPANRFMQGQLDRHFIEQLSTLLADEHALRQLSGIDEAGKLETMFAAAEQLEQQLSKLGKAKSAIHKLVSSVMLRTDGINVMIDPAAFGIRTENLWAWSIPLPTRRPFREAKLRINPVATYGKATDDLLTLIAEAMEAQRLVLASPELSLNQLSKREGRCRTHLARLLRISWLSPQIIEVIAAGTAPRNLNRKTLLSTDIPLSWTEQEQLFGLAA

SEQ ID NO: 4540 - protein, 566 aa, unidentified
  source 1..566: note = uncultivated organism
MARPDARRRRCAIYTRKSSEEGLEQEFNSLAAQREACEAFIRSQRNEGWALARNRYDDGGFSGGNLERPALQQLIADIRADRIDIVIVYKVDRLTRSLADFARLVELFDAQAVSFVSVTQQFNTTGSMGRLTLNVLLSFAQFEREVTGERIRDKIAASKKKGMWMGGNVPLGYDASERSLVVNPAEAETVRCIFDLYRELGCVRRVKEEADRLGLRTKCSTTANGAERGGKLFSRGHIYELLSNPIYTGRIAHKGDLYAGLHPALIEERTWATVRDRLAANAGDHRRKPKAAEPSLLAGLLVDARGERLTPSHAVKKGRRYRYYVSAALISEAETDHAQAWRLAAREIEEAVIRILINTLTSPATFLERLGTAAMPSDPIRKLLGRAARVAAALSGSPEERARLTREIVENVIVDERTLTIKLRRGQLLGADLASSASGDCSNNAVELIEAVTFKRRGIETRLVLPGLAQQDHSSRCDPALVKAIARGRAWFEELATGRARSLQELARRDGITRRYIRRLVGLAFLSPQLVEAILQGRQPVALTATRLTELDLPLDWTEQHKLLAS

SEQ ID NO: 4541 - protein, 551 aa, unidentified
  source 1..551: note = uncultivated organism
MKRCAIYTRKSTEEGLELRYNSLDAQRDACLAYVRSQSHDGWTVIDERFDDGGYSGGNLERPALRRLLALIEGGRIDVVVIHKIDRLTRSLMDFAKLAETLDRHGVSFVSVTQHLNTADSVGRLSLNILLSFAQFEREIASERIREKILASRRRGLWTGGLPPLGYDACQGKLVVNKEEAERVRLIFRRYVALGSVEDLRLELQRDGVRPKIRSKGGQNKMTEFSRGALYTLLRNVLYRGKIRCGGGLVEAVHEPIVSPELWQEAADRLLSNRRRYGASLHKASGMLLGKIFDAQGTRITRSSTSRHGKSYRYYATARRRELPKSERIRVPCDLLDQLVVDAIGACMSKREWLFSHILTSPEDRLKYAAGTIGEEDDESRCRVAPSGLLASVNKVTIEDQGVLILLSQRKLRAWLFRREVKSDEERHDRDIVIRYAASFRKTGKQLCAILTGKQSKRQRAEEILGDVRLAQSWYAGLCAGRYGTLAEIAAGHRISASTVSRRITLAFLSPAIQKRLKLGQIPDHIDRQWLHKKCPLPELWSEQELIIFGRT

SEQ ID NO: 4542 - protein, 500 aa, unidentified
  source 1..500: note = uncultivated organism
MTTKANAAPRAAVYARISLDRKEEAGVKRQEKACRDLAAARGYTVTGTYVDNSVSAYSGATRPEYQRLLRDIKAGLIDKVLVWHPDRLHRRVTELSEYIDIVTANNVDTETVMAGEWDLSGASGKMVAKIIAVVSEQESEHKAERIKAAYKQMNLNGIPYGSGRRTFGYVADRTALNEPEAEALRQVAGLVVNGGSLYGAAKWLNAHGFTTTAGKQFYGSAVRDLLLNPRLAGYATHNTLNHEGKRVKSNRKVVGRAQWPAIFTEEEHEQLKAVLTNPARKMNKGRGHKPEHLGSGIFRCGCKACLADPDNARVMYVRWRKDKLKNGTVYKRRMYYSKSNENLDSVGHTSRLADPVEDYVTAAVLARLSRPDIVNALTAADDTGTVARLTAERTELRDRINGLEAELVAGNLDPSQFGRLNKALLEKMEKLDAELAACAEDNTALSAIMAAGDDVRAWWVTAPLELKRSLLDAVARVHIIPERVGVKRFNPDKIRIEWKV

SEQ ID NO: 4543 - protein, 521 aa, unidentified
  source 1..521: note = uncultivated organism
MIAAIYSRKSVLTEKGESIDNQIQLCKEYAINHLKINEFIIYEDEGYSGKNTSRPEFQRMMQDLKKKKFNTLMCYRLDRISRNVADFSNTLESLTKNDVSFVSIKEQFDTSSPMGRAMVYISSVFAQLERETIAERVKDNMLELSKTGRYLGGRTMLGFDIERIVENGKQVSYLVHNEPQMEIVKIIYQKYLEKRSVYQVLNHLTEQNIGFQYRDWSIDRISKILRSPYYVITNNNVKQYLEANGSLVVGEMNGNGMLIYNQKIAGNKSRDKKEWIYSVSRHKGVISAEDWLKVQNMMDKRYRFGYFKVTSYHSYLTGLIRCSTCGKTLTVKYGVPIKGSNDRYMYYGCLSAGTARSCKNGYIGKQLLEDTVLGYLNKLSVDEELLKSELKINEDKNNDSKKNEIKKARKQISKNDTAIQNLIKQMSNFSSEVSGYISDELNRLSLENAELKKQLSMLENSQEELDIKELNKKISYNNIKNFKKSWENCTTIEEQRFLLSSIVKKITVDLKLKEVQIELLE

SEQ ID NO: 4544 - protein, 500 aa, unidentified
  source 1..500: note = uncultivated organism
MIAIYARQSVEKEDSISIESQIEMCEYEARGEAYLVYSDKGFSGKNTNRPEFQRMMSDIKSGRKGITKVIVYRLDRISRSILDFSTMMDTFSKMKVEFSSATERFDTSTPMGRAMLNICITFAQLERETTQQRVRDTYAARSQKGFYMGGKIPVGFRKVDLTIDGIKTGMYEQIPEEVEVVKMIFEMYADVNNSNSAIAEAVRNKHSAAVRERIVTRARIQDFVKNPIYVKADMNIYNFFKSKGAKIINPPEDFIGTNGCYLYTGDKGTRKQTDLSNTVLVIAPHEGFIDSELWIECRERALSQQQIKRNPRAKNTWLAGLIKCGNCGYAIIKKTYEAKNVSYFLCSRKMNDRLCTGAGRTIHADDFENAIYEKMKEKLADYKVIEHGVAPPIDPRVEELKSRVTEIETEILETVKGVKDASPTVMRYINENVERLEDEKRQTEAEIQRLSEKSFAIKEKVICDFERFNELSFEQKRAVANAIIKKIYVSKDKLDIIWNI

SEQ ID NO: 4545 - protein, 544 aa, unidentified
  source 1..544: note = uncultivated organism
MSQKVYRVGIYARLSREDADRLESNSISSQKAMCQAYIDSHDDLVLIDTYCDDGYTGTNMNRPEFQRMLQDMRSGRIDCAISKDLSRFSRNYIEAGNYLEKIFPAMGIRYISINDCYDSIAPGSSSDVITLPFKNLVNDIYCRDISIKIRSSLEVKRKKGEYVGGYTPYGYKKAPQDKGKLLVDDDAAEIVTMIFGMYKDGFPISKIAFRLNSSGIPTPMDYKRLCGINFQTAFRMKEHSEWEYRTVRRILTNEVYIGNLVQGKRGTPNHKVRVIRDREESEWVRVENAHEAIISYSDFDTVAELLMRDTRCASSEEHLYLFSGYLFCGDCHDSMIRKTQTQGDKRYIYYNCGNNKRTHQCSPHSFSEKKLMEVVFNALHDQIETVLHLDQVLTFIENLPGKERRVITYEAQITKVEEEIARYKKLELRLYEDFADGIINKQEYLDFRENYRNLIAEKQDVVKRLKREQQDASLIGSGNRAWVQLFAQYENIQELDRRVLAALVDRILIYEDKRVEIVFKYRDEFAHAMQLVQEYRDFKLPVAI

SEQ ID NO: 4546 - protein, 569 aa, unidentified
  source 1..569: note = uncultivated organism
MIKQTLDLSFPTLDELRITKKTKDSGSGAKAVQTIAPVAVKAPKVRVACYARVSTDHEDQKSSITIQRQHFASLAAKEKDWEFVGVYYDIMSGTKKEKRPNLNRLLDDCRAGRVNLILIKSISRLARNTTDTLSIVREMTATGVGIIFDREKIDTRKMNSELLLTILASMAEEESHSYAANNRWAIQKRFKDGSYKRSVAPYGYDLVRSELVINETEAKVVRFIFSEFLSGKGCRIIANTLNEMGIPTKRSGEIQKDGKTTSGLWDSSCIVDMLRNEAYIGDSLLQKTYKDSQFRTRHNKGEQPQYYYEDHHEPIIDRESFERVSALLCQHRKECGMKPRQAHAHYTFSDKIVCGACGTLMWRCKDTRKNNKRNYWMCAKHKKGANACSMKRVMEENIENCFTTMMNKLYYCAVVIYAFIEGKRQSWREKHASELERLENQLAMVNINQANLRAQRSRMEVPLFLTQMNKWTQAEAETRAEIDLLADDQLTEGERLMEVVQGWKSRKDFAVEVFNSVIDRVVILDREDFEFHFKCGLVLREKVYHPEEKPTADMYTTEPIKVMERTPNN

SEQ ID NO: 4547 - protein, 529 aa, unidentified
  source 1..529: note = uncultivated organism
MKKRTQTDGNLALQDKQYRVITIEPTKAHQDTKLRVAAYARVSSASDDQLNSFAAQNRYYTTLISGKENWSMVDIYADEGITGTSAEKRSDFQRLLSDCRRGLIDRILVKSISRFARNTKECLEALRELKLLGVSVQFEKENIDTAVMSGEMMTALFASFAQAESESISGNMRWSYQKRMQDGTFNTYNAPLGFDLVKGKLEIHQDEAEVIRGIYFAYLNGKNSREIAASLNEHGVLQKEWRREIVDYILKNERYAGNALLQKRYTTDTFPTAKKRNRGERQMYFVEGSNSPIIPQEMFDQAQVLRKKRLPQQAVKAQAEKPLSGKVYCRCCGAIFRYKSVNQTNYWVCTKHDESKNLCSVKPVAEKEIYAAFLRLYYKLKHQGSAILEEMITHIQTIRSRRMLWSEDVIELNKKISDLSSQNQMLTQLKQQGLIDPDIFIYQSNELAQQLREAKRQKGRLLDQNGDGTLTQTQDLLEVFEAGPDILESFDAVIFDELVDKIIVDSNTHIQFRLKNGLELAETIERTVR

SEQ ID NO: 4548 - protein, 512 aa, unidentified
  source 1..512: note = uncultivated organism
MEVQLIKGHKDDCSNKKVNTDKLIRVAAYIRVSTDHEDQLSSLDNQRKYYERKINKNENWELVNIYSDEGISGTRDTARPGFIKMIKDACNEKIDLIITKSVSRFARNTVDTLNYVRMLSDKGVYINFEEEGINTMTMDSELLLTVLSAVAQQESKNLSEHVSKGHLMKIQRGEHVGTLKCYGYDYNKEDKQIYVNKEQAEVVKKIFDLYLKGNGTLAIARILTNEGIPNIQGGSIWREESITHIIMNEKYTGDLILGKYYVKNHLTHQSKKNNGERDKYLIRDHHEAIIDKDTFNKVQEIREERRKKRCHMGYSSQSRYAFSGKFKCGFCGSSMRRCKTNNRINKARYSCTFGLGYTVYKCENSKMQGEEILKKAFMQAANRLRNKIKLEHRFSDRENKKISYARKILLNKNIDIEKFDSDLFEELIKIAILGDIDENGKIQPYTVRFIIKTEINPFLEQSTKGKIDLEKINTTNILDFYSNQMWQDYDKNGRVRYNNRFRVLVDYDNEED

SEQ ID NO: 4549 - protein, 532 aa, unidentified
  source 1..532: note = uncultivated organism
MKQYNEMRLEDILQPGKRVAFYARYSTKDQGYEMQKHSVEVLLERYGCEIKKEYVDAGVSATKVPFEERPHLQKLICDAAEKKFDCIVVYKNDRIARHIEEHDKFRKQMCEMNMHVVVSSSHELYTVGEIVPQTVKDGLTRIEAALIQERTKDTFHSKAKRGAWLGGKAAYGYEYRVIEENNGGIKNRIEQFVDVEQEQQVVKEIYRLFELGFGFQQIADEIKNKKWDERIKWTKERIRYIITNPFYSGLITMNRYYKGVLNNKSEWIKGKVPNMNPIFSQEYWEYIIGLFEERKERKIHSKDYSTPFLLRNILYCEHCKEAMTTKNQEPGGTKSKNKKEKKIRRIYDCKNCNFKLQAEMVHEQFRRKYLPYVLEQVTQGKKDQVELSIEKRLKKELSDLRSANRKLETEAIELNQQIEELNREIKLHYEQEIIQEEVLEFMKILMSHRSNKMHELNVIKDNQDELKKRMNRIEQTIKEKNYLPSHDLLSEFAQENVNPQKLRAFLLQFFKCVYITSNGELLMTVNNSLIES

SEQ ID NO: 4550 - protein, 520 aa, unidentified
  source 1..520: note = uncultivated organism
MAVAELEIPTGPRRKTLRCAIYTRKSTEEGLEQTFNTLDAQRDAAEAFIRSQREEGWVVLPDKYDDGGFTGANMDRPALKKLLQDVGDGLVDCVMVYKVDRLTRSLLDFARIMDVLDKHGTSFVSVTQQFNTTGSLGRLTLNILLSFAQFEREMIAERTKDKMSAARRKGRWVGGIPMLGYDLSDKGAALVVNEDEATRVRGIFDLYLEHGSLIPVVQELGRRGWRLKEWTTRKGTSAGGHEFTKNRLYNLLTNMVYVGKVDYCGQVYEGEHAAIVDATIWQRVQDRLRFNSKTGGRQIRNKYGAVLKGILRCGSCDAGMFHTYTQKAPNKLYRYYVCVNAHQKGYNQCQTRSVSAPVIEQAVVDQIRGIAGNPEVVGEVVRQLDEQRIAGREGLEREKRVIEKDLQRLSEEMASLVRMTGKLATDRMADLQDRVAVLERQLRDVRDQLAESVGQTVDAASVRKTLQEFDAVWTEMTPREQEKFVKTLVDHVSYDGTTCTVTVGFRTAGIRQLCLEVQNR

SEQ ID NO: 4551 - protein, 501 aa, unidentified
  source 1..501: note = uncultivated organism
MKKRAAIYIRVSTRDQIDGFSLDDQLHTCEHVARQQEMVVVTIYREPGKSAYKGHRPEFERMLADAQHGAFDVVIVYKFDRFSRQTTTQLNQAEELEQVGVELLSATEPADRKTAMGKLSFTMSSALAQFTSDNIGERVASARQEAVNQGIWVGPVPIGYTRNKETRVIEPDDTASAVKLAYELYTLGTHSYTSIADNLNALGYRIYNPQTRTRNLFSKDAVRGILQNPIYIGKVRLKDRTYEGKHEPLIDQETWDAVQSRLKIRAEQGRASLQSRGKRTDVVGVLAKIASCADCGLPMHLQNGVNRAHPYYLCSGRGKRTCTASMVRIDLIDEQVYELFACLAIPETWYNRIIEAVQEKLQPQPSAPVVDRDALKRKVERLALVFANGDIDEKVYERERKGVQALLDKMAERVAPQPVDVQRILEVLKELPGRLRNGDQATQRNIVREVFDTVWIEKHRIVAIRPTTVYLPMVEAVKGLNGEPGGNRTHDQRIKSPMLYP

SEQ ID NO: 4552 - protein, 561 aa, unidentified
  source 1..561: note = uncultivated organism
MKRVNILLRVSSQQQLHDDDIPVQRSECMNFISTHDDWTFQKEYVEKAVSGFKTSVKDREILQEIQEDAKQKNFDVLVVYMSDRIGRKEDESPVFVSTLNKLGIEIWTVKEGQLKTDQHVDKLLNYIRFWQAEGESRKTGARVKDAQETFAKAGKFIGGYAPLGYRLVPSGEISNHGRLLKKLVIDSEKAPVIRKIFEYAVNYNYGALKIAKVLNEEGIAAPNTTWKACTVAEILKNPVYMGYIAYNRRQHSKCGGNFERMPMEKWILSDQQNPELVIVPKEIWYKAQAMRENRKAGIKRGMDTENRKYPLSSSGQLVLMGLVYCGYCGCRLTNGSKYDYWTTKDGEKRKKFVGRYRCTNMANGSLECQGKAYYRSEEIEPIIYSVVTSYLDSLKESDTCDDLMKLQEEQRARLEKEKAVLLKSLKAAQGDIATLQENIPAALRGESAFSAEQLSSMIRDKEEKIAGLKQQIAAKDREHRDTQLKKKDLQSMGSIISNWGELFKACSMAEQKVMLAKLIERIEIKENDIRIKFRISMEEFGEGRQGISGDSPTIPYTPCSK

SEQ ID NO: 4553 - protein, 507 aa, unidentified
  source 1..507: note = uncultivated organism
MIRRADIATQIKPVRCAIYCRVSTIDQAQGEFTSIDNQREMAEAYIKSQAGKNWICIDEHFDDPGFSAGTVERPALRRLLAAIETGSVDVVVAYRLDRLSRSLSDFMKLMDRFKAAGVAFVSVTESFSTDNAVGRLTMGLLATFAEFERATISQRTADKMGAARRRGRWTGGFPVLGYDVHPDGGKIVVNEEEAETVRQIFLTYLDLRSLQATAAELNRRGWRTKSWATKEGTFHEGVPFNKAHLSRLLGNPLYAGKVRLHREVFAGEHPAIVDAAVYAEVQALLAENNVSGGARAKNRYGHLLRGLLRCKACGCAMSPSVTRKRGRVYRFYVCTHATKHGWKSCPHPSLNASQIEAAVVEQIKCIGRDPSLVAETLAQVRAIQKTRVPALTAERRRLERELSRLRDRGRGEDAGHIGVIEARLTEIAEELAVLQAAAVDKRDLATALSLFDPIWDVLFPAERERIIALLVERIDFDAARETVAITFRPTGIRTLAEEIQVAEEALA

SEQ ID NO: 4554 - protein, 518 aa, unidentified
  source 1..518: note = uncultivated organism
MKPPPLIRCAIYTRKSTEEGLDKDFNTLDAQRESAEACIASQRSQGWKLVPTRYDDGGFSGGTTERPALKRLLADIEAGLIDCVVVYKVDRLSRSLLDFVQMLQVFERRQVAFVSVTQQFNTTTSMGRLTLNILLSFAQFEREIITERIRDKCAASRRKGKWTGGRPMLGYDVAPEGRRLLVNPREAEQVRRIFAAYLELRSLNALVRHAKDHGWRNKTWTNRKGAVCGGLPLTRSQLGDLLNNPLYIGQVVYKDERHPGEQPAIIDAALFAQVQQELQHQDRTGGAEHRVKHPALLRGLLRCAPCGCGMTHSYRAPRGTGRAYRHYLCQRKNTGHSDACPTPWLPAAEIERVVVDEIKAIGSDPLLAAEVLAEVRKGSAAELEAATQVLTSAKATFADLDRRLRMEVTGGATIDAARLADLNDRLRQAEQDAAKAKVRVAAAKAALPDEHQARTALQRFTPVFDGLSPGDQAALLQSLLVSVSFDATAGRMALAFRPTGIAALMPRDGGASTPPTGP

SEQ ID NO: 4555 - protein, 558 aa, unidentified
  source 1..558: note = uncultivated organism
MAKKRRCAIYTRKSTEEGLEQEFNSLDAQREACSAFIKSQRHEGWTELPDFYDDGGFSGGSMERPALTRLLADIETGKVDTVVVYKVDRLTRALADFAKMVAIFDAADVSFVSVTQQFNTTTSMGRLTLNVLLSFAQFEREVTAERIRDKIAASKARGMWMGGIPPMGYRPDNRSLVVDTDVAATVRHIFDRYLDLSSVRRLQFELDQKGYRTPTRTTQAGKTTGGHRFSKGKLYSVLSNPVYIGKIRHRDKIYDGQHDPIIDVETWDKVQSMLAENRCTHQSKSKARDPSALAGLLFDPDGNRMRPVHTSKNGRRYRYYVSPDLIDSSVEVGATGWRIPGEEIENAVAQAISDHLRAPDTKSGLIVASTGAADADQLMKRMDKLVDTLRDPASRHCRELLVAIVTRVDLNETALLAKIDLRPVFGADRVQELDGEYEPTLNAPIHVKRRGGELKLVLQGAARQGSTPDANLVTAILDARRRFAEYTRTEDPLSISEIAAADGISAGDVSRSMQLAFLAPDLIEAILNGQQPIELTATRLKRIDALALLWEDQRRVLA

SEQ ID NO: 4556 - protein, 526 aa, unidentified
  source 1..526: note = uncultivated organism
MRKLPNVGIYCRLSIEDRDKSGCDDSQSIQNQKAMLLACCQERGWEVYDFYIDDGYSGIDRTRPAFNRLLRDCENGCIDIVLCKDQSRFSRDTVVVEQYINDRFLEWGVRFIGVADNADTDSESYGTMRLFTSAYNEMYVKDISAKIRKSLEYKREQGQFIGSFAPYGYQIDPNDRHRLVIDPETAPVVRMIFSMYVSGAGYRSIILKLNEQGIPSPTAQKRRNGSRYINANADSSNAGGLWTPSTVAKMLANAVYTGTLVQGKSHRVSYKNKKRKQVAPEDWVRIPHAHEAIIDAETWARTQQRLKSHGRVGKRSQVLSPLSGKVRCAVCGRPMKRNVYYNRARTVRYYNLQCASYKTGAMNCPNKRAFSGQILENMILDELNSIIARYCQTDEIRFGDVYAEQMQTLEHMLAKLTDARKSAQNRLVQMYKDKLDGIISEADYRLFRETLCAEEQETARRIEEIRGQIAECAGRMQNDAGQKALIAQYTHFDSLDRTVADAFIDCAEIGLPDENGQREIHIHWRI

SEQ ID NO: 4557 - protein, 578 aa, unidentified
  source 1..578: note = uncultivated organism
MKEKITIIIYSRKSKYTGIGDSIGNQIELCKNYIKVHYPKEKYDVEIIVFEDEGFSGGTTERPQFQEMFQLIQKKYINVLICYRLDRISRNIADFSRLIEELSKHNISFISIKEQFDTGTPMGRAMMYIASVFAQLEREVIAERIRDNLLELAKTGTWLGGDSPLGFSVERFEKVNICENDEVKGLVTKTKKASKLVINDEELKIYNLIVSKFEELKSLTKLETYLLNNDIKTRKGAHYSIFTLKWILTNPVYVKNDNDAIEYFKKKGINVFCEKDNRNKFDGNYGFLTYHKTSKRKKLSSDYWIYAVGLHPGIIEGKRWIAIQMLLEKNANKCYRAAGYPKKQTIVAGLIKCKECGSYMRPRNMDKKIKDGTVNYRYSCVLKEKSCGQKCNSKNVIGEKLDNQIIKIIKEVFVPNIEIYKELMNMSIKNEGNSKHDELKKIQVELQKKNLEIQNVISKLKYIDVDIIDIINTNLKKLKLEKEELNKKIKRIKKEEIKDFIKDQIEIKTTKDICKIIDLSFKTFELFDLKTKRDIARIFIETIYGFNDHVEIIFSNTKINELQKKAFIPTYQKLDNFF

SEQ ID NO: 4558 - protein, 535 aa, unidentified
  source 1..535: note = uncultivated organism
MPKINCAIYTRKSTEHGLDMEFNSLQNQEEACKAYILSQAFNNWEYYKTYSDGGISGGTMERPGLQTLLNDIRTRKVQVVVVYKVDRLSRSIIDFHKMMQEFDKYGCNFVSITQSFDTSNSMGKLTLNMLLSFAQFEREVSAERVRDKIAASKAKGLWMGGTPPIGYDAKERQLIVNEGEAQLVRLIFQKYIETENMFAVADYLNSQGICTKKWVARRSKREHGGGRFYKSNIQRILTNPLYIGKIAHYAQNKIYDGKHEGIISRDLWDKVQGLIRRRINDPNAFLHYKCHKTVLAGKLYDDKGQSFRLTSSKKQGKKFLYYYNGVGGHYLPVEQLDRFVLNMLKTADFDDIEPLADMSAITDTQLRRWISKATCQTVGKKHYLTVFLDEKQVKTDLGNCPKMSGQVDVKPLKMARIEDTIYLRDSFMVDNISSVRLRNGSARNILTVRQLNESLIRGLARGWQLKKRMEQGIIIRELEKEMHMTKRTITRYINLCYLSPRIVEYKNPANLTLRELMNLADSQMDFAEQEKVWSQ

SEQ ID NO: 4559 - protein, 555 aa, unidentified
  source 1..555: note = uncultivated organism
MSKLKIAIYARKSVSTEKGESISNQIETCINYAKGILGADTNQLVIYQDDGFSGKNLARPQFQKMLSEIEGGDYSHIICYRLDRISRSVADFSCLVKELQELNVDFISVKEQFDTSSPTSKAMMYISAVFAEMERETIRERVVDNMTSLTSTGRFLGGKAPDGYIKQTIEETDPTGKKKKHNILVINQERAKQIQDIFKKYLEWQSIKRIETYYSCHSIFNHTGCAYKCITLRRILTNPCYCAADERAYNYFEKLGCKIMMPKSSFDGKYGITVYMRHKMIINKNNKKQAVEKSPEEWLIYVGYHKPIITSKDYIKTQEIINQKRSLTVRKPIGVHGILSGMLRCDNCGDYMRPSNVALDKNGAYNGKRFYYICENKSLSAKQNCNIKNIRGDKFDLEIIDEIEKLLINDSDIIKNIKNIINYKSAFAMDIEKEKRVINTEISKNQLAISNLIMKIAYSDETVQKYISKQVAKLDENIKNLKLKLENIDKQEALKENEKIEIEHIENIISKIKSAALKQEIKAPEDMLFIRNTLKEIIDTVVWNGETATINFKKL

SEQ ID NO: 4560 - protein, 586 aa, unidentified
  source 1..586: note = uncultivated organism
MQRSADIDSVQEKVRVALYLRVSTDEQAREGYGLSVQEEKLRAFCQSQPAEYVINDGCVYRDEGYSGSLDIKQRPELSRLFEDAEKKKFDVVVVYRLDRFFRNTRHLLNAFEVLKSYDVSFQSATESFNTNEISGRLLLRLLASIAEAERETTRERTMSGKLKAAREGKFVTGVAPYGYRIDKQTKKLILVPEQAEVVKKIFSLVIDERLSLREVEDRVNKLGLPPPYNAKYKKRKTLNYWHKRTIGRILTNEVYTGTFYYRKYKRPFNNLTSITDKRKLRPKEEWIEMHTDPVISRERFEAAKEQLLRNREFAARNKKREYLYVKIIHCGKCGFKMFGGFQPPKKEWEYAGGRYYHGVYRNDKVAGTSKRCEWCPNYSEARLEPIWECLKEILQNPQNMLAPLEKYIHEVDDPKITKDRLTEIDKELETIKRKRKKVYDLLINERITEEESREYIREYDHHERNFTDEQTRLKQTLLTKNELADRETAVRKAFNQVRSKLDTVSYEEKAQIIRLFIERITLHAKEDYAEVVFKFPQFTETRGKKLVSQEGKWFPLVLRIKTTTEAERRKFMASVNPGRFVPKALV

SEQ ID NO: 4561 - protein, 544 aa, unidentified
  source 1..544: note = uncultivated organism
MKQKTYIAGLYYRLSQEDERQGESVSIDNQRAILRKYAEEHGFEIHGEYIDDGVSGTTFDRPEVQRLLDDAKTGVINTIIVKDLSRFGRNYIEVGQYVDYVFPAFGIRFIAIQDNVDTENRDSGAMEMMPIMNVFNEWHAANTSKKIRTVLKANAREGKYHARKAPYGYVKSDTEKKTPIIDEEAAAVVKRIFEMRASGLSPHKIADILNAEGILNPSRYSMEKYGIVGRKENMGLWSFCGVNSILNNPTYLGHMAQQRWSSVSYKNHKRYKKDESEWITVYNTHEPIITQELWDKVREVEKSVAQGRKTKRGYTHPLSGFLYCADCGGKMKMNSINRNGKIDFNFNCGNHVRLGKSYCFSHFIQAKDIEEIVLDDIRTMAQRIVLDEKTIREDFIKHNTEVQEKSIKAAKKELHAKRKRTEELSRLMQVAYEDRLKGKMPEDICLNFIQRYSEEQKKVEAEIAELEERLTETTNTILSADEFIRNIKKYLEAPELTREMCYELLDRVVVGGHPKHTGKERVIDIVYKVDIASVLRYKLNNPNK

SEQ ID NO: 4562 - protein, 597 aa, unidentified
  source 1..597: note = uncultivated organism
MLSDQNLPIKRCAIYTRKSTTHRLEHDVNSLVTQREISSAYITSQQYKGWVELPQHYDDGGHSGSGLERPALARLMQDIEAGKIDTVVVYKIDRLTRSLLDFVRLIEMFDRQSITLVSISQAFDTSDSMGRMILNVLLTFSQFERELIAERVRDSIRTRKRHGRIHGGLPPFGYVAGSDGIHVDHAEAEIVRFIFAEFLRTRRYTSVMTAVREAGYCSSIKLSRRGVPRGGTAMSPGTVYGILRNPIYVGQIRGHDTTYQGVHEPLISEATWEAAQALSEERKKRSPHAKETHHFLAGLLWDDLGRHMLLDLNCQRGRTYCAYVSSNAAWSQVEFRRAYRCNADHLDRTVLAAVCEFLSDRGKLRGALKSLGLFGDDLDRLVTRGKSIGQMLETTRPEWLPDMFTALVHRVEIAEGTVSISFRSLELRSLMTWDGKTAFRGRPADWPCSDARYVLDVDVRVITAERWPSLHITPRPEGCGAHPNPKLVELIKAARKAQILVDDHRDLSIEELAKKQGCRPTHFARLIRINYLAPDIATAILDGTQPANLDRKTLLDSNVPTSWSVQRKLFGFAAPERAINTRQLYGRGLWPAAVKAK

SEQ ID NO: 4563 - protein, 594 aa, unidentified
  source 1..594: note = uncultivated organism
MRGYIYARVSTQTQNYERQLSELKLYAEQHHIEIVETFQEKISGRKTIRPEFERMKKSITGNLKRSVEERIDIILVWEISRLSRRMIDLQKNVIFFIEEGVRIYCKKDNWTTHTDDGKLDNAHLGMLSILASFAESEVQNTRERIKSSINYRLKRGDSYATKPPFGYIIKDHKLVINDEKKNGESLSEADIVRRIFSDSANGKSTHKIGIELRAETGNRNKWSNNSVLRMLKNPCYCGYAYFGRTRQHNERKEIEEKGGIANEEDVTPLVRVETPAIVSKELWEKSRDAIFERRSRSKSENQYPRALLRSLLFCPICGHRYTYSKKLYQCISLTSDKYDYCGAKGISVKNLDYAVWTMLQDLFKKEMSQQEIEKLKAPILNEIEQLEIKISNFKAQLKSISNEIKDHVGEATKFRKKNLKIAYEVEMDEISKLESEATQYEEMEKSLENEKSIKERKLRAIENSNVFITDETDKREFVLKVIDSITLYTIRLDRKYLSIEFKNGTFCDMWYRYNRGNRTSYFAYLPSEGTVSFCWKQDEIVKGLPKDLYDQIGDFSVNSGNNPYFNEKVFGDYTYDDFWNILQQYGYVHEIPLK

SEQ ID NO: 4564 - protein, 568 aa, unidentified
  source 1..568: note = uncultivated organism
MNDNRKVAIYSRKSKFTGKGESIGNQIELCKQSIHLSYPDLSDDDILIFEDEGFSGGNTNRPQFQEMLKQCRQRQIRCIVCYRLDRISRNVGDFSALIDELNRLDITFNSISEKFDTTSHMGRAMMYIASVFAQLERETIAERIHDNMLELAKDGRWLGGNPPTGYRSVEIVGSVTIDGKKRKARKLEVISEESEIVKLIYAKFLEFNSLTKTETYLIQNNCLTKTGKYFSRFAIKNILTNPVYLIADETAWNYFEIKEVDVFSERSEFNGQYGIMAYNKTSQQVGRANEIRDMKEWIIAVGRHQGIISGEDWVQVQKLLEQNKSKSYRKPRSNVALLSGLLYCADCGSFMRPKLSQRRNKDGELIYDYLCELKEKSKGQKCDIKRALGNEADRLVCEEIKKLTADESEFMKMLKKEQKCLNINDSSCQDNLKKLRKSESDTEAKIKNLLQTLARTENSSAQDYILNEINELDKKIKSFEAQIKEYEDLANTGNISDTEFESLADMLCSFADSFETMNIEQKRLAIRAFIKRIVWDGERIHIYFFGCEEGEIDLSDDEFSEPQRKGCK

SEQ ID NO: 4565 - protein, 562 aa, unidentified
  source 1..562: note = uncultivated organism
MEHAKSRTRRCAIYTRKSSEEGLEQDFNSLHAQREACEAFIRSQEGEGWRLIKAAYDGGGLSGGTMERPALQRLLVDIRRRLVDVVVVYKVDRLTRSLADFAKMVEVFDANGVSFVAVTQQFNTTTSMGRLTLNVLLSFAQFEREVTGERIRDKIAASKRKGMWMGGVPPLGYDVCDRRLVVNRAEATTVKHIYERYLELGSVRLLRGDLERHGIVSKVRVSKNGVRSGGMQFSRGALYQLLSNPIYLGEIRHKKERHPGQHEPIVSRDLWEKVQQHLRDQAATHRERPTKAPPSPLAGKLFDENGEPLYVQGAVKGARHYRYYISRGLVRGSVQDDRRGWRVAAPELERAVRAATQQILGDRAAIAGAIEQFNIDASRLPSIFKAAEVWIQSLRSEADAASVLTRLVERVGLRQDGIQVSIKLSIPSNEGRDAPTPNELTLARFVPMRMKRRGVEMRLIIDGDAASLARIDLPLLDATARAYRWSNDLLAGRARSITEIARREHLTARHVRRVMRLAFLAPRIVEAIVEGRQPADLSALAMTQRIELPPLWSAQQQALDIR

SEQ ID NO: 4566 - protein, 530 aa, unidentified
  source 1..530: note = uncultivated organism
MRTSIETRPAKNTGVAAVRCAIYTRKSSEQGLEQEFNSLHAQRESGEAYIASMKHEGWVALPDQYNDGGFTGGNTDRPGCLRLMADIESGKVDCVVVYKVDRLSRSLLDFARMMAVFEKHRVSFVSVTQQFNTTQSMGRLTLNILLSFAQFEREIISERTRDKIAASKRKGKWFGGKPILGYDLAPQPAGGSKLVVNAGEAEIVREIYQLYLEHRSLTKVAQILNARGSTSKRWTTRKGTAVGGRVWDKHLLINLLTNPAYVGKVKHKKELFAGEHAAIVDERLWQQVFQTIKHNGRTGGMHVRNQHGALLKGLIHCGPCGHAMGHTYSVNDGKAAYRYYVCYVAQKQGWHACPSGSLPAEQIERLVVDRIKHIGADPALVAATFQQLHNGIRSRTAQIEKEQAVGVREIQKLETEMRKIAATAATDANAAARLADLHERLAKANERARALRSEAAQIEGEAFTRDDVAAALGEFGATWDVLCPREQAAVLANLIKRVDYDGAKKTVAITFHPAGLTTLGQAPIEHEEVA

SEQ ID NO: 4567 - protein, 545 aa, unidentified
  source 1..545: note = uncultivated organism
MRPLSVRCAIYTRKSSEEGLDQAFNSLDAQREACEAYVLSQAGEGWSVTKDRYDDGGISGGTMERPALKRLLADIAAGKVDTVVVYKIDRLTRSLSDFARIVEVLDRAGASFVSVTQAFNTTTSMGRLTLNVLLSFAQFEREVTGERIRDKIAASKAKGMWMGGNLPLGYDLPTDKATRRLVVNAGEVETVRLIFRRYLEHGSVSALEKVLHREGISSKAWTSTRGRSMGGLRFSRGALFHLLKNRIYLGEIVHKDAVYPNAHQAIIDHALFEAVQVKLKDNAAVERQKRTGGGTAALTGLIVDAASRPMSPTVSLGRGGRSYRYYVSSPLQKGGSAIEDDTLRRISGQLTDELVLETVARLRRVDVTFSNLRNYVRQVAVFPDHMRLILIRDQTIDPDRDLATVRRRLAGQEQAMLIEHEGGLIQVVLPVRLKVRGGRSWIAEPDGRSAGTRQNVDPVLIGGLSRAHQIAGKTGLRGDRRSPPGPTKQVISSAYDRALVEVAFLAPDIQAAIVAGSQPAGLRLEHLLRGDVPLAWADQRAKFGF

SEQ ID NO: 4568 - protein, 536 aa, unidentified
  source 1..536: note = uncultivated organism
MQTKTIRCAIYTRKSTEEGLEQDYNSLHAQRDACAAYILSQAGEGWSLLPEIYDDGGYSGGTMERPALKRLMADIEAKKIDVVVVYKVDRLTRSLADFSKIVEVLDRTGSSFVSITQAFNTTTSMGRLTLNVLLSFAQFEREVTCERIRDKITASKKKGLWMGGTPLLGYDPDGRTLKINEQEADAVRWMFARYLEVKSVHQIVKDASAKGICAKRWVNRHEVETGGGPLQRGAIYYLLRNRTYIGEIPHKDESYPGQHEGIISRETFDAVQALLDETRRTRKPGKARPAHTGAPLSGLIFDSAGHVMSPVSASRKGGATYRYYVSTAVQKGRKSEAGVHPRVAAPMIEEAMLKAVAPLLEIKTAPNWDQMRDVIDRIELQREGLKIKLDPSRIAECPISDVGRMRLTQLDQEQNQPVIFCPIQITKRGGLTVLGPNGTEAIIKRHLDPALSSALVRAEAWKRKLLNGEVTRLEDLARAEDINSTYAARMLRVAFLAPEIKAKIIEGLTDERLTLQNIMRQEVPLDWDDQRALFMG

SEQ ID NO: 4569 - protein, 559 aa, unidentified
  source 1..559: note = uncultivated organism
MSKQKLNTKAGIYLRLSNDDARAGESLSIENQRRILEKYVIEQGFELVDTYIDDGYSGTNFNRPGVQRLLEDAKVGRINVIIVKDLSRFGRNYIEVGQYTDYIFPMYNIRFIALGDNVDTANSESSGMDMMPIMNVFNEWHAANTSKKIRTVIESNAKSGKYRTNSAPYGYVKGTDEKKLPIRDEPAASNVLRMFEMRASGISPNKIADTFNAEGIKTPADYKEEKFGIPNTRQSHHLWSSGTVKQVITNPIYLGHLVQMRTTTVSYKNKKTVKRDPEDMVWVYNTHEAIVSQELWDKCREMEASVSQGKKNRTGVVQPLSGLCYCADCGAKMHAGWNNTRHSRSGPRIHMRNHYNCGSFNKFRGRSCCSHYIKMATLEQVVLEDIRSKISLVEADEEKAKTQFLRKCEQISSEESTKDRKRANQISRRLTELERLIVSAYEDKVVGRIPEDICVGLLNKYQDEKKELLTEQSEIETRQANKSKEIADVNEFVRRLKSYMQVPTLTREMCMELIEFVTVDKCPGKYSKEPREIHIYYKLIDKTPPPEKKYLDGPMCEDI

SEQ ID NO: 4570 - protein, 521 aa, unidentified
  source 1..521: note = uncultivated organism
MATVRMIPATPRGGGRKNESESRKIRVAAYCRVSTDTDEQATSYEAQIEHYTDYIGKHPGWELAGIYADDGISGTNTKKREEFNRLIDDCMAGRVDMVVTKSISRFARNTLDCLKYIRQLKDKNIAVFFEKEAINTLDAKGEVLLTIMASLAQQESQSLSQNVRLGLQYRYQQGKVQVCANRFLGYDKDEEGNLVINPEEAEVVKRIYREYLGGKSYYQIGKELSDDGIRTAAGSDYWLASTLKKILTNEKYIGDALLQKTVTTDFLNKKRVINKGIVPQYYVEGSHEAIIPRELFMQVQEEMVRRARLKTGTGNRRVYSGKYALSSMVYCAHCGDIFQRTQWIIRNEKLPVWRCACRLNKRKNKIDCPSRTIYESDLHAAVVQAINEAIAQKDELLPGFKIAIEKTLGSDNSARVAEIDARLEDLEKELLKRANAKQDYSDILEQIDTIRDEKQELLLEDANNAGIQRHLNEIEAFLETQQTAIEEYDEDLVRKLLERVTVYDDHLTFEFKCGIEIDITM

SEQ ID NO: 4571 - protein, 517 aa, unidentified
  source 1..517: note = uncultivated organism
MPEIRVIEPVLFQSTAKLRVCAYARVSSDSEDQKNSFASQVNYYTKYIQAHDDWTFVDIYADQGITGTSALKRDEFLRLMRDCRQGKIDRILVKSVSRFARNAQDCIEAVRELRQLGVTVYFEKEHINTASMSNEMFLSMMSAFAQEESISISKNMRKGAVMRMKNGTFRLSQIPYGYRYNDEGVLSIYKEEAEIVRWIYQSFLSGIGMQKIAAELEKQKIPKLRGEPIWSKHGVFYILTNERYSGDELFRKSYRSENLPFKKIDNHGEKTQFFAENTHEAIVSKEIFDKVQELLRTKKEKHGKKQPVDSYPFTKMLRCSECGSHLYHRVKPKGPVWICSQHLHNSQQCSAKGVSESVVCQAFLTLIGKLAHNRKVILEEYQYQIEKLKDREFIAHSGAMEINKQIAELLEQSHTLHRLRAKECIDSAFFISQTNEIDQRLAKLKKKLRKYRDLNDYRKIVDDTQIILEALQDADLYTFQSGMFHKIVRQVLVSDDHLRFQMINGLEFDESIERRLL

SEQ ID NO: 4572 - protein, 589 aa, unidentified
  source 1..589: note = uncultivated organism
MTSDQKPILRCAIYTRKSSEEGLEQSFNSLDAQREAGEAFILSQRHEGWQALPARYDDGGYSGGTMERPGLKRLLEDIQAKKVHVVVVYKVDRLTRSLADFAKIVEALDARGVSFVSVTQQFNTSTSMGRLTLNVLLSFAQFEREVTGERIRDKIAASKKKGIWMGGPVPLGYDPKARKLVPQPIEAAIVCDIFELYLKLGCVRKLAAQLNRDNVKTKAWVTKAGATLGGKAFARGHLYLLLRNRLYVGEIRHREHWYPGEHPGIVPRELWDQVQGQLDSNLQGHRKRARDQSSSLLTGLMEDGEGNRFTPSFTIKRGRRYHYYLSQTAIDNSGALSQRPVRLPAQEVESRITERLQFFLRSDAEIFDGLSAGGEGRTSPTTLQPLIAAAKKLAAKLPSLPTGGLRDLLACFLQKVIIQDNSIQLMIRTDALRKLLENNGQVVGSDLAVTRPRVEESGLICLTIEAKRKRFGGEIHLVVPPHSNLPVRYPRPALIKAVVRSHAWYEMILAGKIVDMKSLARETGLTRRYVRNVFRCAFLAPDIVEAILEGRQPLSLKFENLYKNIPLSWVEQRQEFGFPQIPHAPKPVL

SEQ ID NO: 4573 - protein, 540 aa, unidentified
  source 1..540: note = uncultivated organism
MYKEKKRVAAYCRVSTDFTDQIHSLSAQRAYFTEYISGNDEWEMVEVYYDEGITGTSTKKRDGFNRMIADCERGKIDTILTKEVSRFARNTVDTLNYTRRLKDMNINVIFMNDGIDTNDKDGELRLTIMASIAQEESRKMSERIKWSMKRNMENGMVLGCGRIYGYKVVEGKLEVVPDEAKIVKEIFHSYLYDGKGSTRIAHDLSERGIPTLKNRVWSAQHVLKILANEKYVGDLTQWKVYKPNVLSEKYKVNRGDNPDAPLITITNHHEGIISRELWDAVQEERSKRGKKSKEGRKHSRSFWYSGLCTCGKCGYGYVSTGSSTNKYGCLSCRNRQLYGKEKRNAMNGELIGCDNHTVDERILAAAMKAVMENIQSISERLKAELLSDIRLIQKSNVTEDISVKQDEIAKLKQKKLKAVDLMLEGLLDKDGLKEQMDFYDSEIARLSEEISNHKSAETVYNNQIEAIKEAVKKIQFISDSETDNTELYRSMIERIIVPEYRRLDIFLKGLPFGFKVEYTTKKAPCKGIYAIIIDSCELAS

SEQ ID NO: 4574 - protein, 518 aa, unidentified
  source 1..518: note = uncultivated organism
MAANVKIIPPREKEPSVLRVAAYCRVSTDHAEQALSYASQIRNYTDLINGHEGWELVDVYADEAVSGTKTDKREDFNRMLSDCRMGRIDKVLVKSLSRNSRNTKDCLAALRELMSLGVTIQFEKENIDTETLTTEFLVSVFGALAQQESVSISENGRQGFRRRMELGQFITTKPPYGYHLKGSGCLEIIRSEAELVRWVFDAYLSGHSVGWIVNDLISRGIQDRKGNVHWTTRQIYYWLSNEKYIGDTLCQKTYKTGFPFTQKINHGEVDQIYVEGSHPAIISRETFEKVQALRQRKKKRRDCPDGVYPLSRKMYCEACGEALYRRTTRKGTAVWSCRNHLRNAASCSVGPIPEETIHAAFTRMYNKLRLHDGVILKPALGQLDALNEARQRNNPAMLAVNKAIAEASDQSYKVSALQSKGVLDTSAGAAKLRELDGRLAELRKERRRLLKEDDLEEALDAFRQTVNKIHSGPDRLKGFDEALFAGLVEKVTAESRSRVHFHLRGGIELAERVQEDTK

SEQ ID NO: 4575 - protein, 530 aa, unidentified
  source 1..530: note = uncultivated organism
MTEQNYIAACYCRLSKEDEIDGSSISIETQQKILGDYCKRNHFLIYDYYIDDGWSGTNFQRPSFNRMLNDIELGKINMVVVKDLSRFGRNYIETGHFLENYFPEKNVRFVAVGDNVDTCNEYDYDDLIIPIRNLFNQAYPADISKKIRQAFKTKANNGEFFGAYAPYGYKKSASNKNLLEIDDEAAETVVHIFKLVAYEGYGYKRLSKKLRQDKILMPSAYRAKYANKPLGDNPYNWNAISLKLILNNQVYLGRMVNAKTRKISFKNKKIVKVPQEDWIVVEHTHPPIISMQLWNDAHKKLNERKRVCNTGETHIFAGLVYCDTCGSTLSMAHNGSGHKVLSCTRYKQKGKDMCTCHYIRYDDLYNVVLNDIKAHIVQLNIDEKAFTARVKKQYDALNGTDTDKIKKVIHEYEKQQEEYDKRFYMLYNDRLNGILPEDKFTMLSKRLESEQQEIKTHIDALNSQLEDCRKEENRIQRFSDLLREVQNLQELDKVLLNKLIDKIIVGEREIVDGKRLQNIEIHYKFVGSIE

SEQ ID NO: 4576 - protein, 555 aa, unidentified
  source 1..555: note = uncultivated organism
MNRIVAAEYCRYSSSAQDDGYSIEAQQKAIANFALSNGYDIQYSYVDKARTGTNANRPEFQRMIEDAKNGLFDVIIIHKIDRFSRNRLDSIIYKNELSKYGVKVISVTENFGEGAEAELMLAMQESMAEYYSKNLAREVRKGMDVLSSKGLHTGGSPPLGYDVVDKKLAINEAEAEIVRLIFEMYSNKYTYNDMAKELNARGYKTKSGNEFSASSFNSILTQRKYIGEYVYNRRVAKSLTGKYNSHANKPEDEIVRIPNAVPRIIDDETWGKVQARLKQNKRKVGTYKSKSSYLLSGLIVCGECGFHYQGNSRKGGSSTIYSSYRCGRKQNHKIGCGNSELEKNKLENFVIEQLQNYLFSNEAIDEIAHQVNEYNKIAAKTNNDDLILFQKQMKQIEKQIANITKAIAKGVDEDIMIDKINELNQSKKDLQKRIDEAVLEELPTVSKDDIRQALSVFSTYLKENNTIECKRFIDNYIDKIVVHKDKVEIVLKVASSNFNTSESDNDSGALHITIVVSREELQKYPKQRRKLSPAIRLGGNFSVSYEIVLKNTHSK

SEQ ID NO: 4577 - protein, 529 aa, unidentified
  source 1..529: note = uncultivated organism
MSRGTQNGKHAATPPPQCRCAIYTRKSSEEGLRQEFNSLDAQREAAEAYIASQRNEGWSALPDRYDDGGFSGGNVDRPGLKSLMAAIEAGKIDCVVVYKVDRLSRSLMDFARLMEVFDRHKVSFVSVTQHFNTTHSMGRLTLNILLSFAQFEREIIGERIRDKIAAAKKRGKWGGGPPPFGYDVDRSNGSPRLVVNPAEASRVRHIFERYLELGSLLSVGEDLCKRGWKTKSWRTKAGVIRGGVEWDRHSVYCTLTNPIYMGKVVHKGETYQGQHEAIVEEETFRRAHVLMQKNSRTRGNELRNQFGALLRKLLYCKGCGSAMVHTFTRRGNKAYRYYVCCNAIKKGRARCQSGSLPALEIEKAVVEQIRCVGQDQSVLEETLSASRAQADAAIEQLDAELRIVNRGLGRNHAEIRRLATTEPASSASAGRITDLNDQIREAERRASEIGAAVERHRAEVLSAEDLHAAFADFDNVWTALAPREQVRMLQLLINKVVFDALDSSIEVSFYPSGVKALAGGAVEGPEAQA

SEQ ID NO: 4578 - protein, 561 aa, unidentified
  source 1..561: note = uncultivated organism
MTRPNVRCAIYTRKSSEEGLEQSFNSLEAQREACHAFVLSQKHEGWTALDGHYDDGGFSGGTMERPALKRLLADIQAGKIQTVIVYKVDRLTRSLTDFSKIIEIFDSQKVSFVSVTQNFNTTSSMGRLTLNVLLSFAQFEREITGERIRDKIAASKKKGMWMGGLVPLGYDCVNRQLVTNPTEAQTVLEIFRGYLRLKSVNRLKQLLDRREVRSKIRTSRAGRTGGGATYSRGALYHLLNNRIYLGEITHRAESYPGQHQPIVPSGLWNEVAALLKKQNQSHRSEKSQSSPSLLSGKLFDSHGSRFTPTHAVKNGKRYRYYTSQAVIRQTGTRPLIARFPAEELERLVKSQVLGLLQSPSKLMGNLEEGPFKDVATASANDLAKKWPKWDPSEQREVFGKTLNRVVLGQTTVTIEIDTAKLFAVLLAENPEALTSLHRHKFEDIKITGEFQFLRRDSGLGVIAATNGSCLEGAPTLSLAKAVARARDWYGRIVAGEINSIDQLAQRAGLTRRYVRTLMLFARLSPRLTEGILMGKHRADLTVRTILQGVPLSWQEQERRFG

SEQ ID NO: 4579 - protein, 528 aa, unidentified
  source 1..528: note = uncultivated organism
MTEQRPNPKVTVIPATAQQERIRLQGRKLRVAAYCRVSSKKDEQEHSFEIQKQYYTEKITNNPAWKMAGIYADEGITGTSMKKRDDFKRLLRACREARVDLILVKSVSRFGRNTVDVMKTVRSLQERGIGVIFEKEGLDTRNMNSELMLAFHSAFSQSESESISENITWSYRKSFENGKVNIGGNMFGFCRKGKGEFGIDYEQAEAIRLMGTLILGGHSLLDVKAELERRNIKSPSGKDTWNVATILRILQNEKYKGDALLQKTYRPSLFSKRMKNNGALPKYYVSNCLPQIFSPETFDRIQEELDRRRIRRPLSANDKDMYRGKHSGKYALSNLLFCSNCGAPYRRVTWNNHGKKKIVWRCSNRLAHGKEICKDSPTLEETALHAAIMKAIQDTFIDVNQAIETAEQSLARVFTPECAGDEFDIRSRLRKLKERRAQLVQKCLDEGDDGTYDLQFINISNEMESLKQRLTGIEEAARNKKLSDSRMEEIRELLERFKETDMEFDNDLVYRFVREIRVQVDGTLEIVW

SEQ ID NO: 4580 - protein, 524 aa, unidentified
  source 1..524: note = uncultivated organism
MQNIKVLNSAIYVRVSTERQVLQGYSLEAQKENLTNFALSQGWSIFDCYADEGISGKNVVDRPEVKRLIEDIRLKRVDVVVLYKFDRLTRDSRDTEDFIELIQKYGILVYTLSGGMVDVSTPSGRFNTRILGAAAQFERETTIDRVVDGFIKKVKNGYSLCSATPSYGYDRPKHQEIQTINESEAAVVRRIFSLYIHGKTFTEICDILNSENIPTKNNGRTLKKRGTNEYYKVNSVWMPKTIRLILSNENYIGNVRYGVNREKVTLEEAADYKNRRKGFVARGLHEAIIDKKTWDEAQTKLKKIKRVYRTNLPKEDVYYCGKLICGLCGHPLTTNRTNKRRKDGSTIVHNGYRCVNREKNLCSALGMSHKKVEKAFLQYIEKIPDLEDIEEMKPNNDSDDNIIELASLKKRVAQKNNKMKEIMKLFIDDRLEYNEYYTMKTSIEKEYAGIENEIKRIESLSVPKKNVRTTKTIAKSIKEHWLYLTNQEKFEFLTQFVEKIVVVNKNKDKKNGVPEIIDIKFYED

SEQ ID NO: 4581 - protein, 557 aa, unidentified
  source 1..557: note = uncultivated organism
MKRCAIYTRKSTEEGLEQDFNSLHAQREACEAYIKSQRHEGWKLVRTKFNDGGFSGGTMNRPALQDLLAAIERGEVDVIVVYKVDRLTRALSDFAKIVDLLDSKGVSFVSVTQQFNTTSSMGRLTLNVLLSFAQFEREVTAERIRDKIAASKKKGMWMGGPLPLGYDVNDRKLIINKPEAKTVRTLFKMYIELGTVRSLKEEADKLDIVTKHRVQKNGKQTGGKPFARGNLYQLLSNPLYNGCIPHKGKIYSGLHDAIIDEYTWDTVQSLLAENASNRTATTNTHGPFLLSGKVFDEDGEPLYQSQAHKQGKRYAYYISKHLMHGANKRNEGWRLPTATLEDAVILPLKNYLQDQAGLMDALYLKEHSPVVLSKLKTQSARVTHQITDGEFQEKRSILQTIIERVDLSSNTITLTINTEGLAETLDIACPENTDPISITIPIRLRRRGVEAKLIIQGSNAELSNVDTNLCRLVAQAKNWFDQLASGKFATVLDIAQHENTPASEITRILPLAFLAPSLVEDILNGQQAHGVTVYNLKRLSPLPLNWKSQTKTLDSLA

SEQ ID NO: 4582 - protein, 550 aa, unidentified
  source 1..550: note = uncultivated organism
MEKQETAKYNAAIYVRLSKEDVLSNQGKKAESNSISNQKQLILDFVQDKADINIVSIREDDGYTGTDYDRPGFQRMMDDIKAGNVNCVIVKDLSRFGREYINAGKYIDRLFPYYGVRLIAINDGIDTITRSSSDDFSIMVKNLMNDNYCRDISIKIRSQLQVKRKNGEFIGAFAPYGYQKSDADKNLLIVDPYPAGIVQDIFRWKLEGMNQDAIAKRLAEQGTLSPMEYKRSKGMAYKTKFKTNQMAKWSPVAVRRILTNPVYVGTLVQGVRTRPNYKIKSVVVKEEDEWVIVEHAHEAIIEPKMFLLVQKLLELDTRTSPNAEKVFPLAGILYCGDCKGTMVRKTTSSGGKKFAYYVCGTHKKEKTCSNHQISEKQIEETVLTLLQEHIQILLELDACLQVIRDAPFRRISMKKIEDRMVAVEADIDRYRRLKTSAYEDLKDGILTKDDYTDIRDQYDARIADASLAREQLQKEMSLYLQGGAESGEWIQEFAEYRNIKTLTRVMVAKCIEKIQVYEGKRIEVTFTHMQDYQILYEQVQQFYSEQKGVS

SEQ ID NO: 4583 - protein, 613 aa, unidentified
  source 1..613: note = uncultivated organism
MENKILCGIYMRVSTEDQAREGFSLEEQKLRLEAYCTFNNYKVIDYYTDAGISAKGGNHRPEYERMLQDGRDGKINMIVALKLDRITRSIRDWEGLMDYSDKYDVALAFVNDQIDTTNANGKMVSRIMMSVSQNEIERTSERTKVGLEGAVKKGHIPGKAPIGFKRENKKLVPDPIKRKIIERIYNLYYEGKSYSTIANILNKEKVNNKTNWRDTTILAIITNEIYKGDYVLGKRTNNPRYFENVVEGIISKDMWEDCQIQKKKNQKNYQRNLTYIFLQKIKCPKCGNILAGGASHKKSADKHYYYYRCQKCSVNVRETQLEINLKEILNEIFEYDSIVNEFFLPLSKHRNNLDIKKMETELQKLNKKKERIRNAYINSLFNETEYEEENKRIDKQINDTKKSILESTSINNLNINLEDILVKRDIDYLNKIKFKMLFYGTKTNWDMLTKEEKFKLIMRYIDDIEIEKHYNSWKIKQVNFRSTFWTEFNKLFKKGYLDKEKEININGKTKNIRYSEYLPIDIIYKQLEKLNRAYEVEMYKGIYNKLTNELKDIELDKEDLIVRMFPNNKDNINKNEIDVNLFISKDGESTTVLTEDIYKRWFIFESEYKSNNL

SEQ ID NO: 4584 - protein, 573 aa, unidentified
  source 1..573: note = uncultivated organism
MNHKKAYAYLRVSTVQQVDGNSLDGQEAEIRKFCEFKGIDLIGVYSDGGKSGKSIAGRPEFQRMLQDVEEKQEVDYIITWKMSRFGRNACDSLISLQLLQKHNVNLITVQDNIDTSNQMGRLFFTLMSALAEMERENIREQTINGKKYNALAGKWNGGQAPYGYNLEHGRLVINEEEAEIVRKIYAWYMESEEAGYSTVTARLNEEGIKPRQKKRLDRKAMQESGSEEEIHLPVVADWYTTSVKKILDNPVYCGKIRYGHYPVTETGDGKTKRKYSDSPLLVDGKHEAIISKEDWDRVQEKRAKVKKPHGRPDSTVETVNNVFNSIAKCPQCGGNMISASGRYTSVKGNERRYYQYICGYWNNHKKGKCRKNSINAEFLEKTVIEAILKYVNRPNVVQEIAQYMDREMDTTKLEKEIAEINMQLKELDKSENRQYEILSNIGGKYRNIRPEKIEANLEKINAQREEVQEQLENKQAQVEAIRLNKMDFEMVKELLVKFNEVYMAASKELKKRLVQSLVKEVKLGYDTNGKVIPVSMTLNFTGEQIELMRENREIFGLKESSSETVALLARKAR

SEQ ID NO: 4585 - protein, 680 aa, unidentified
  source 1..680: note = uncultivated organism
MAVGIYVRVSTEEQRERQSILTQREFGLRYSDLHQLPIYETYPDDGVSGTVPIELRPGGIRLLEDARQHKFDQLLVYKLDRLGRDTRLILNAVAELEKHGVRVRSMTEEFDTATATGRLMLTMLSGFAAHERELIRERSVAGTNRLAEAGAWLGGVVPYGYRKNGEKGRARIVISEELIPGFKLSEADVVRTIYLMSASEKKSCQKIADYLNRAGIPCGSADNARGSEAGKRSRRIATIWRPSHVRNMIVSRTYMGQHLFGRRSANRYRKVIVREVPAIVAEQTWQAAQQVLQDNRIEASRNTRQPYLLRGLIKCGLCGLTFSGMRIKRQQDHYYRCNGRQQARGLYGTNGKKCPARTLNGDYVERLVWADIESFLRYPGEILERLRKRLSMQDGERLRRQKEFDDLTGRLQQKATERERVLALFRRGRIDDATLDQQLDQVNAEAANLQNDIEAVKRELAAGDRTAQLQSAEALLETLRKRLDGPIPHDLKRRIVEILVEKIEAKTVERWGVQQSEITISYRFSQPDEPAALVLPRSHRLSNRKQAPEELNTLGDHLLRRRLVLKLLQRQVAEQIGVDKTSIANWEANRSKPGLLYMPAIIRFLGYNPLRVPTTWAERLAHARTLLGMSQRVAAAQIGVDQSTLARWERGDSEPAKSFLPRTLRFVSAVDQESREALSA

SEQ ID NO: 4586 - protein, 519 aa, unidentified
  source 1..519: note = uncultivated organism
MKKVTKIEENKSPKTAGKKLRVAAYCRVSTDSDAQAESLEAQITHYEDYINSRSDWEYAGIYYDEGITGTKKEKRPELKRMLADCKAGKIDFIISKSISRFSRNTTDCLELVRKLLTLNIPVYFEKENINTGSMESELFLSILSSMAADESLSISENSKWSIQNRFEKGTFKISYPPYGYDWDGEQMVVNLEQAKIVKQIFALALSGQGTSAIAKKLNENQVPTKKDGQWSATTVNGILRNEKYTGDCLFQKTYTDSSFNRHTNHGEKNMYFAKNHHEAIISHEDFEAARIMLEQHAKEKNISSNSEKYQQRYAFSSKIICGECGCTFKRRTHYTAGTSYIAWCCNTHLVSKDACSMMFIRDEDLKLAFVTMMNKLIFSGKVILKPYVKGIRSGSSDDSLHRVQELTTQLAKNTEQREELQKLTAQGFIDKILFNTEMNKLLSKADDYRREIDALNNTVSLDVSKVTAATDLLHFTEKYEMLNGFDAELFEKHVRYIKIKSRTEFCFELKCGLCLTERI

SEQ ID NO: 4587 - protein, 535 aa, unidentified
  source 1..535: note = uncultivated organism
MINQKTHKVGIYVRLSKESVYDEESLSIENQKFILIKHVRDNGWELVEIYCDDGFSGANQDRPGLQRMLRDVREGYINTILIKDLSRLGRNYIEMGELIESILPDHDCELISLAEQIDDMTVFRNIHNEHHSRETSKKVKAVKAMLAKDGKFAGSFAPYGYKKSDRSKHLLIPDEPAATTVREIFALRSQGKGLTGIAHHLNNAGIATPRDYYYQKREAENPFRINHSWNINTIRTILENEAYIGNTVSLKKSTVSFRIREVMHKPETEWVRVERTHEPLIDMDLWNHVRNIATSRYCPRKKSDSSVSVFGGLLYCSECGFKMRSATLKKIRKNGEHYAYTSFLCGTYSRSGKAACSSHSIGESKLYENVLEQIRNHARIAESNEKNIVEDISEKLYGELLYEHRKNLIELEKCKDDMNMLNKIVKQSYEDRLKGIISVSIFKVIAEYYESERKDNQQKICDLENRIRSFLPNESNASKWVSLIKGYSRLEELDTQILLSLVERIVVSEVQTDTGKPTREVKIIYKYVGDISWIV

SEQ ID NO: 4588 - protein, 532 aa, unidentified
  source 1..532: note = uncultivated organism
MKIAAIYSRKSKITGTGESIINQIEICKREGNHLGFEKFIIYEDEGFSGKNIKRPQFQKMLSDSKEKKFNVLICYRLDRISRNISDFTLLINELDNLHINFISVNERFDTSTPMGRAMMYIASVFAQLERETIGERVRDNMLELAKTGRWLGGQTPLGYESKKLFYLDSQFKQKTMYTLAPIKEELDVVRIIYNKYLQYKSISQVFIFIFKKNIKTKNGADFNKKRIQLILRNPLYVKANDAVIEHLQIIGMNVTGKADDKHGILTYNKSKGSKIKRDITEWIAAISTHEGIISAPLWIKVQQILDENKNKAPRLGTSAAALLTGFLKCSKCGKSIIVKHGHISAITNKKIQYYVCSTKDYSRGERCNNPNIRVDELEKIVVDNLNNITIQRSILLDELNKIKSELSKNSFMLSEMDGLPKLINIKQSQIDILINQLSLGTEMSKYISPQISKLGTELENLTIKYKNLKDISYQYKDDNSNANNFLYSLDNFSSIIDTLNFNNKRLLLNTVVKSIYWNGCKGIVKIDLVRLK

SEQ ID NO: 4589 - protein, 567 aa, unidentified
  source 1..567: note = uncultivated organism
MANPSPRRCAIYTRKSSEDGLEQEFNSLQAQREACEAFIKSQTGEGWRLIKTAYDDGGLSGGSMERPALQQLLTDIRQGLVDVVVVYKVDRLTRSLADFAKMVEVFDAHGVSFVAVTQQFNTTTSMGRLTLNVLLSFAQFEREVTGERIRDKIAASKKKGMWMGGTAPIGYDVVERRLVVNPTEAATVGEIYARYLEVGSIRLLKQELDRRGIISKIRVSKAGIQSGGQSFSRGALHELLCNPIYVGEVRHRKDRHPGQHEAIVDRELWDKVQRRLCEQAAHPRGRPTITAPSPLTGKLFDESGEPLYVCGATKGRRRYRYYVSRRLIRSPAGQSKDGWRLAAPEIERSVRSAVAELLKDRAAIGALLNEAGFPAQDLVGALKSIDAHRLGLKSDGEIARVMVCAIQRIDLRRDSGFELTLDLKPLVADQLNVPDGACLTIKRLVPLQLRRRGVELRLVMQGEAAADRSKIDPLLIKAIVRGRRWFAELAANRAADTREIAKREGLHDSYVRRLIPLAFLAPSIVEAICEGRQPPDLTAERLRRARMPYQWAEQHQALGLRLGNSRN

SEQ ID NO: 4590 - protein, 530 aa, unidentified
  source 1..530: note = uncultivated organism
MDRKVAVYARVSTEDQAERDTIENQLHACREHAEAIDANIVAEFRDEGVSGTIPLDERPEGRRLLEAAEAGQFESVLIYRLDRLAREMMLGLRAFKQLSNIGTPVVSVCETWDDSPTGRFMYREFMSIAEFERDLIRQRTMSGRQRRVREGRYMASTPPYGYTYVQATGQLKRHPQQAKVVKQMFRWSLEGLGLETIAERLNAAKIPPPGTGKTHRNRWYISTIRRVLGAPRYIGRATYAGQPMQCPTLIDEATFEKVQEGFRKRFKDHARHVRHTFLLRSLVYCRICSGKLRGVSAGLLRYYACQNRRTYKEEEAARHDGMKWHWRADHLERVVKRHVLRMQAEPDYMLRAAELYEDRADELVREETQEKARLQAQLGELDGEAHRILEWARKKIITEAELVAQRTDIKAQRVQVETKLAALQQHPLDPRQLTQHAEALRNQVTRTAHLRELYPDITSVSAGWIDDAMSVLDSPDADEAWEALIRQFVERVWVEKDGSITVEGMVDVNPLANPGTDVGGTDVSLSNPPS

SEQ ID NO: 4591 - protein, 528 aa, unidentified
  source 1..528: note = uncultivated organism
MNKSYVIILYLRLSVEDIKARGGEKDESNSIANQRDLLHDFVDGCAEFEGSTVMELCDDGYSGTNLNRPSIQKLLQMAKANAVDCIIVKDFSRFGRDYLTVSDYVDQIFPFLGVRFISVNDGYDSADYNGMTSGVDVAFRNVVYAYYSKDISQKVRSGKRTRAKSGKYMSPFAPIGYRKDRKDKNHLVIDEEAAEIVRRIFRLAGAGMSVIKIVKLFNAEQIPTPSELKNAQGLYHKWWDGVGPEKLWDTTTVTNILRDERYLGKNVYGKRHRPEVGNYLTVKSRKSDWIIVEDCHEPLITPEEFQMAQAMLKEFTEENPMIPQKHLFSGKLRCGVCNYSLQRKAKPTPRYICATKYRTEAFDCMKGYIAEADLAEVVYQAIVLYCNALLDEQKRIKKAAKATGAPNLQKQLTEYQTAFDSFDEQKAILYEKKNDGIITQQQYIAKRDALTVQQEELRRDMDVLNEKLLDLKRQKTSKIPQSEILMAYLQADHLTREMVTSFVDCIYVYSDKSIHIEWLFDEKGAKDE

SEQ ID NO: 4592 - protein, 538 aa, unidentified
  source 1..538: note = uncultivated organism
MELQSKVFKAAIYVRLSKEDGDVTDAVKTESNSISNQRELIKDFLNDKDDIEVVSERVDDGFSGVNFERPAFQAMLEDIRKGLVDCVVVKDLSRFGRNYIDAGRYIEQIFPMLGVRFIAVNDNYDSLNHSSQTDGILLPFKNLVNDAYCRDISIKIRSHLEIKRKNGEFIGAFTVYGYKKDPVQKNHMVIDEYAAGIVQNIYRWKLGGLSQQAIADRLNAQGILSPAEYKKSCGSKYRASFQTSKKALWNPVSVNRILKNEVYTGCLIQGKVTTPNYKVKKTVVKDESQWVRIPDTHEPVISREMYELVHGLLGCDMRMSPGADAVYLFSGLLYCADCKNPMTRKISRSNGKEYVYYLCSEHKRKGCCNSSHRISEQALQEAVLQSILIYMDKLQSMDKRLKQIEELPEKQRDIRITDDRISILEKDVEKYDVLKTNLYEDLKSGVLEKDEYQLMKQEFDSRRERVLEDIRHSREERDRLARNIGKHHKWIEDLLKYKEIKTLDRMALVEMVERIEVCEGKCINIRFRYEEKIWQIIF

SEQ ID NO: 4593 - protein, 552 aa, unidentified
  source 1..552: note = uncultivated organism
MARAFAYRRVSTSAQSEKYSLETQLEGIRAYCRERDIEIVEVFTEVHTGVELWERPVLTQMRERVRNREADYVVVYTIDRLARDPVHLGVVLGEARHHGVEVLFVRDEVDDSPEGQLISFVRGFAAKIEHAQTCERTMRAKKAMHEKGLYIHSAPPYGYDVTFSEGDQKWHFTPNAQAPIVQQIYRWILEGWSQTAIVRELHRLGIPCPAQARKRVYKDGRVPNWTQPAIRTIVTNTVYKGEVYNNKYRVTKENGKRVARERPREEWIRVKNVVVEPLVSADDWELAQERLRGNGGAVTRNKSGLQYLLRGRIFCSVCGSPMYADMNNTTKYGLSDQVRIYRCGSRKLSRFGLGNACGAKLINARRVETWVIEQLMELFSDEDAIRRQLEQRRQSGPDQQLQKELQSLLEQTAQIDVRIQRLRMDLMEETDERLRALLRQDMKALLDQRDAIQERIDNVQQQIINEQQVLEHIEHFTEYVRRVRINLLHADFEMKRKILEALDIKVYGQGKEWRMEGLGLDGNGLMRTRSRAIIRFTITSTSGPLLELIPAA

SEQ ID NO: 4594 - protein, 549 aa, unidentified
  source 1..549: note = uncultivated organism
MGKDSGTDSRRQSVGNTAAFYLRRSAIHERGEDTSIDYQREACERIAAQHGLEVTTEFNEGSGRSASHFKENERPEYDKALAKLGSSYTTLISYSVDRLTRRGMGAVGHLLDTASAGGGRIITNDGLDTDNDSSRMVASFMSEMARSEMVKLSERVCAAKEQHRREGRYLGGSVPYGLMAVRSLDKATYLQVDPEAAAVIVKMVDRLIEGATLYETCRWLAEEGHRTANGALWKPEVLTRFIRSPHLVGHLRQNRTQVYRDAAGNPVEVTTPIISPAKFARVDQVLKRRRNAPKDPSTPTKVRARARASLLGGLVTCGECGEPMNAARYKVGGRGYGYYICRAPTHDPLSVKRDEVEDHVAREAIDFVARLGPGSSITAEVASRMLSTFSPEQVSRRTTIEDDIEVLNSRLDELQRAHYELGDVPKDRYERMSDNLTMKRNGLEIELATLPQSTPDFGILDDLTEASRGAPEDDPVGPGSAWADLEHHVRRSIIRCLVDEVTIARRPKPSDDILGRTDITYASESNVIQMAQRPKTKRRYSTAVKVAAV

SEQ ID NO: 4595 - protein, 517 aa, unidentified
  source 1..517: note = uncultivated organism
MAEIKIIPARDRSEDIIRTAAYARVSSDSEDQINSYNAQIRYYTEMLSSSINTVFVDMYADEGITGTSADKREDFLRLMKDCRRGRIDRVLTKSVSRFARNTKECLEAVRELKTLGISVYFEKENIDTGELSSEMLLALHSQFAQEESISISKNCRMGVHKRMADGTYITPSAPYGYHLKDGRLVIDKRRAEVIRQIYAKFLDGMGTVAIANELNKIHAPLPVKAKQWYSTTVMYILRNERYIGDSLYQKKYTTDTLPFTTKYNNGEKPQYYVMDTHEPIISKEQFEAAKQIIEQRKLPPDAKKRKVYPFSKKIICGLCGTTYKRKIVGDRIYWVCRVHNQKSADLCKAKPIPETQFQLAFIKMFNKLAAHYQDIITPAYRQLQKLSDIGELANTQVAEIRKEIAEQKAQFHLLSQLNSQGVLDSVYFTSRSQELDRNLVQLHKQLHAILNSDEDEERLTKIKRLISIFESSEQLTEFDEDKFSCIVERIIVLSEKKIRFELIGGITFNEPIQRKGR

SEQ ID NO: 4596 - protein, 606 aa, unidentified
  source 1..606: note = uncultivated organism
MSLRATKSRGKAMPSSSDRNRAGSGAGTRPGAVRCAIYTRKSSEEGLEQDFNSLHAQREACEAYVASQRHEGWTVLPEVYDDGGFSGGSMERPALRQLLQAIDAGKVDVVVVYKVDRLTRSLADFAKIVEVFDAKSVSFVSVTQQFNTTSSMGRLTLNVLLSFAQFEREVTGERIRDKIAASKRKGMWMGGNVPLGYAAHDRSLAIDPDEAATVRQVYDLYRELGNVRLVQVETDRLGLVSKRRPRPDGRVLGGVGFTRGALYKLLSNPVYAGDIVHRDKRHRGLHAPIIVPEAWEAVQRQLTSQAARTRGQGSAQSPSLLAGLIVDEAGAPLTPTHANKKGRRYRYYVSRTLVAGPNAEPAASAPTRASRKSDTTTNTWRLPASEIETLVIEAVYALLIDQSRLMDQLGLGRLRPDALDAALAASAQLADALKGATGHEQRDLLQAIVERIEIGPERVIVDMNTIAIWTELGAQDMSVDPDARDPRLHLTIPIRLARRGSELKLVIADRPETNRDRNLIGRLAKGYLWFEELRTGAVQSLAAIAEREGITVPMVRRACDLAFLSTDMIEAILAGEQPIDINTETFKLAYPLPIGWEEQRRVLGYG

SEQ ID NO: 4597 - protein, 511 aa, unidentified
  source 1..511: note = uncultivated organism
MRIATYTRISTDEVNQPYSLGAQSERLASYVASQGDWELVGTFTDQMSGAKLERPGLTNALRAAKAGRFDLLLVYRVDRLSRSVRGLAEVLESLDAAGVGFRSATEPFDTTSAAGRMMVQMLGVFAEFERATIIDRVIAGMERKSSQGGWCGGHEPFGYRAVKGEGRLTVDEAEYPLIPVIFDLYANKRLGAHAIAKWLRAAGLSTRAGKPWSFKAILTVLRNRTYLGQVHFRGTWTQAEHPPLVEEGLFNAVQDILDERGEDVSKRASNSSDYLLTGLVVCGGCGRHFTGTRATGRNSTYRYYTCGGRQRYGTKTCAAERLPAEALDDAVVRSLLAAYEDTDLFTKAVAEAQERAQLGHSRHEGELRALDAELAKVEAGIDRYLRAFETGTMPESICGERVKELGLGATALRARRQDLADEMEEAELTAPTTEELSKLRDRVAEAVAEGSTAPIKVLLQALIHEIRVDSKEAIHPIFRVPVGVNLSEDDAVRAPSRSVGAAGLEPTTSAV

SEQ ID NO: 4598 - protein, 540 aa, unidentified
  source 1..540: note = uncultivated organism
MAERGKLRCAVYTRKSTEEGLEQAFNSLDAQREACVAYIESQRHEGWSLIPEYYDDGGYSGGSMDRPALKQLMADVAADRVDTIVVYKVDRLTRSLADFAKIVEVLDKAGASFVSVTQAFNTTTSMGRLTLNVLLSFAQFEREVTGERIRDKVAASTAKGMWMGGPVPLGYDLKDRKLVINEAEAAIVRRIFTRYCELRSIGDLVAELARDRVKTKVRPYKDGRTVGGIPFTKGPIAYLLQNRTYAGDVTHKGKVYPGEHEPLIDLALWEQAQAVLAGNRVERRLGSKGKAPSLLTGMLSDDHGRPMMATFTVRGPRRYRYYITRDAAQGTRGVDGPLRMPAGAIEALVTRHVADWLQAVTPTEDMDPLAAELMASKAHQHASMLRNGTQREQRIVLLELQAQVRMYAEHVTISFNPAHLLQPVLLDVPAKLVDRGSELRLAIGPDGTNVHAAVDPALLKLVALGIAARQHLVTGKPDRLVDTYSKQHLNRLARLGYLAPDIITAIVEGRQPPSLSGRTLLRFANLPIDWTEQRRLLGFL

SEQ ID NO: 4599 - protein, 587 aa, unidentified
  source 1..587: note = uncultivated organism
MTSDQKPILRCAIYTRKSSEEGLEQSFNSLDAQREAGEAFILSQRHEGWQALPARYDDGGYSGGTMERPGLKRLLEDIQAKKVHVVVVYKVDRLTRSLADFAKIVEALDARGVSFVSVTQQFNTSTSMGRLTLNVLLSFAQFEREVTGERIRDKIAASKKKGIWMGGPVPLGYDLKARKLVPHPTEAALVCSIFELYLKLGCVRKLAGQLKRQDVKTKTWVTKNGVILGRTAFARGHLYLLLRNRLYIGEIRHREHWYPGEHPGIVPRELWDKAQAQLDSNFQTHRKRARDQSSSLLTGLIEDGEGNRFTPSFTIKRGRRYRYYVSQLAKDDSDDVSQRPVRLPAHEVESRVTERLTAFLRSDAEIFDGLSGGGEGPKTLQPLIAAAKKLAVRLPSLPADDLRDLLASFLQKVIIQDNSIQLMIRTDDLRKLLENHGHVPAFEPVVRRSGMDGSGLICLTIDAKRKRFGGEIHLVVPPNSNLPVRHPRPALIKAVVRSHAWYEMVLAGKIDDMKSLARETGLTRRYVRNVFGCAFLAPDIIEAILEGRQPLTLKFENLYKNIPLTWAEQRQQFGFPQIPHTAKPVLQ

SEQ ID NO: 4600 - protein, 513 aa, unidentified
  source 1..513: note = uncultivated organism
MENKKKIFRCAVYSRKSHEDGLKQSYNSLDAQRESAENFIASQKMNGWQLLPEKYDDGGFSGGNIERPALKRLLADVEGGKIDVVVIYKFDRLSRSLLDFVKLVEFFETHNTSLVSITQQVNTSTSAGRMMLNILITFSEFEREILIERIRDKIAGAKRRGKHCGGYPVLGYDTNPETKNLVVNEKEAKLVRHIFDRYCQVGSARQVARELNEQGHKTKSWTTRKGKHNEGGKFKPDLIYRILKNPLYIGKVVHKDKTYPGEQKAIVREVLWDKAQSLLSGNLVANTGRKNEIATPLKGLLKCGNCNGSLGLTYTQKKDRRYIYYICEKDAKRAMPECPIKRVPAGEIEYMVLKYLSEIFRTPSLLAKTYFKAMEIEEAEKSKLLERREKLTAELEILRAKLIEAIQGGPGKKREKVQLIRDEIEQLSRALSEVESSLRAFDSTPISSQDVLEAFSSIEALWEELFPVERYRLLHLLIEKITISTDGLRLELKTAGMGSLVGELINPEDVEAI

SEQ ID NO: 4601 - protein, 585 aa, unidentified
  source 1..585: note = uncultivated organism
MWESLQKCDIVLRLQYNDTETSEDEDMNDTRPIVIYSRKSKFTGKGESIENQIEMCRQYICLQFGDMAAEQALVYEDEGFSGGTLERPQFKKMMVDAKEKRFRAIVVYRLDRISRNIGDFAKLIEQLNDMKIDFISIKEQFDTTSPMGRAMMYISSVFSQLERETIAERIRDNMHELSKTGRWLGGTTPTGYASESSAQVTIDGKTKKACHLKIIPEEISVVKLIFDKFLETGSLTKTETYLLQNQIATKTGKQFTRFAVKAILSNPVYMIADDTAYDYLVKNRVDLFSEQSEFDGEHGIMAYNRTLQQPGRAHQIRPMDEWIVSVGKHPGVIDGKSWVKVQTMLEQNRSKSYRKPRSNVALLSGLLICGNCGEYMRPKLSKRLNTKGEPIYTYLCSMKERSRGHNCSMKNCNGNLLDAVIVEQIKTLSEDGSEFIRQLEQSRKVLLGNRENYEEEIAKLETQLRENEEEIKGLVSALGKSSGTTAESYIMEQIEELHEKGEGVKCRLSELKELTASHALSDVEFDLLAQMLSSFKTTVDTMTVEQKRAAIRTFVKKVVWDGEEIHVVLFGSDYAYEKPLGEDSK

SEQ ID NO: 4602 - protein, 550 aa, unidentified
  source 1..550: note = uncultivated organism
MTEPKIRCAIYTRKSTEEGLDQAFNSLDAQREACEAYIQSQHHEGWRAVAKAYDDGGYSGGSLDRPALAALLDDIKAGRIGMVVVYKIDRLTRSLADFSKLIETLDEASCSFVSVTQAFNTSSSMGRLTLNVLLSFAQFEREVTAERIRDKITASKKKGMWMGGMVPLGYDRNADDDQRRLKINAAEAKSVRFIFAAYDQTPCLSTVCEATQQAGILSKPRQFKSGAIYGDKPMRRGQIHFILTNPIYAGNVRHRDKVYPGQHDAIIDPDLFDRVQDKLVINGRKPRGTVSASGRSRSPLSGRVLDADGNRLTPTHTRGKSGKAHRYYVSTSKETNTRKSGWRLPAPALEETIGQAIQNHLSIAGARRILLKDAASVWADLAAEIGTTLSSISAAELCLLVDRVTIASGQLNICLDREALAARFNLPLGQIDDNALVMTTPFVTRRRGVETRIVAGDMKPAPDQTLVSTLAKSHRWIGQMKAGVSAATIAKSEKTSDAFIRVRANLAFLSPRIQEAILAGTQPPDLSLECIVRSGIPFDWDQQERKFGFR

SEQ ID NO: 4603 - protein, 514 aa, unidentified
  source 1..514: note = uncultivated organism
MPQVHVIEPVHSHEPAKLRVCAYARVSSDSADQLNSFASQVRYYTNLIAGNEDWTLVDIYADRGITGTSTAKRTEFQRMMEDCREGKIDRILVKSLSRFARNTQDCIAALRELRQLGVTVVFEKEHINTGTMANEMLISMMSAFAQEESVSISKNMRKGVQMRMQNGTYRTPCAPFGYRLGDRGLVIEPNEAEIVKRIFREFISGKSTLSIATELQQEAIPKRYGNPIWTKKGVTYILSNEKYVGDELLQKSMAAEVFPYQRALNNGQAKQYYKELAHEPIISRDTFAHAQGLLAQRRSQFGHSQKSHSSALTKILVCGHCGAPLYHRFVNKCDVWVCAHHLSQASVCPLSPVTEDELTELFNRLVYKLTDASCPVLKTYLAELHRIQQYVASQQPEIAPLRQQVAQLLEQSHTLNRLMASGCIDSAFFIAHSNTIQQSLDKVKGMLARQRETDLVKENIDSTLRLQAVLSTIKPFEGNASRIPEFVTWIKVSEDHVIFHLTNDLELREERRKV

SEQ ID NO: 4604 - protein, 527 aa, unidentified
  source 1..527: note = uncultivated organism
MRGILFRPEKTQKGGVNNAQNRTRSDCNRQAEYCRYSSDSQTEQSIDGQLRVCTEYAKSHDILILDTYIDRAMTGTNDNRPDFQRMIKDSAKRAFSMVLVYKFDRFSRNKYETAMHKKTLKDNGVKVVSATEFVPDTPEGIIFESMLEGYAEYYSAELSQKIRRGNNESRRKGNLTGGKIPYGYKNVDKKAVIIPEEAEIVRYIYEQYSIGVYVKDIIAVLNAKGVLHKGKSFAKNTVYGIFGNERYSGIYRHNGEVFDNIYPQIVPSDIFAIVREKVNANKFGKRSEHITYLLKDKIKCGYCGKSIIGDNGTAKNGERKYYYTCCGRKKKTTDCRKQAIRKDVLEKIILENVIEQIQKANSLDYIVNGLMQEQERQAQANIVLNLLLKEQRQTENAIQNIMTAIENGGTTNTVMKRMRELETRQAELERQILIEKSKTAVQLTETQIREFYTQALALEPKLLINYLVKQITLYDDRIEIQYNSPIKQSPDNNNRGFLLCSKTVKLAYKVPFRVNLMQYEFEIEMYM

SEQ ID NO: 4605 - protein, 540 aa, unidentified
  source 1..540: note = uncultivated organism
MTATLATREPASRRKRAAATASTLATVRCAIYTRKSSDEGLQQEFNSLDAQREAAEAYIASQKAEGWVCLPERYDDGGFTGGNMDRPALKRLLGDIEAGRIDCVVVYKVDRLSRSLMDFAKIVEVFERQNVSFVSVTQHFNTTNSMGRLTLNILLSFAQFEREIIGERIRDKIAASRQKGKWTGGTPILGYDVDRSNGSPKLVVNPAEASRVRQIFDLYLELGSLLPVAAELERRGWRNKAWTTRDGRKRGGLPFDKCRVHKLLTNVLYAGKVTHKNEVYAGEHEAIVPEDVIQRVQHQLLRNGRNGSAEGRNRHGALLRGLLFCKSCKRAMSHTFTTRGNRRYRYYICTNAVKRGRAACPGRSLPAPEIERAVVDEIRCLGRDPDVLRETLAQARNRAESAIERLTGERREIEHALARLHADIRRTVSGNGDAATAPRVAELNDRARDAERRIAEIDTKLSELREELVDEADVVAAFADFDNVWTALSPREQARLVRLLVGRVEYDASDSSIEVTFHPTGIKALASGDVADNGYVEDAA

SEQ ID NO: 4606 - protein, 580 aa, unidentified
  source 1..580: note = uncultivated organism
MTDAGTIRRGRALRCAIYTRKSSEEGLEQEFNSLHAQREACEAYIRSQRHEGWVCLAQHYDDGGLSGATMDRPALRQLLADIQAGKVDAVVTYKVDRLTRSLADFAKIVEIFDAKGVSFVSVTQQFNTTTSMGRLTLNVLLSFAQFEREVTGERIRDKIAASKKKGMWMGGLPPLGYECRDHKLIVVNSEADIVRHIFRRYAALGSVRLLKEEIDTAGIRSKCRTSSTGRSWGGKPLARGALYLMLQNPIYRGEISHKGAHYPGEHKPIIDEALWDEVQAKLAANAVERTAGERARSPSLLAGFLFDGEGHRMVPTHAVKKGTRYRYYVSRPLTNQSRANIPDALRIPAGEIERLVVTRIGHFFSEPARIAEILSEQIGTAAQQRRMLQRAAELAATCSTLTAAQLRPLLAALIRRIVVSLDGMDIHLLPTRIAALLRNGSLAGPIPGAVPEPEEQPIILSVPAQFRRVGLGIRMLVDGPALAGQVSKVDPKLVKLIVRAHNLGNKLAESSSEHLADVARAEGLTSSYFTRVLRLTYLAPDITRAILDGRHARDLTAQKLLAHSRLPLSWPEQRRVLGFA

SEQ ID NO: 4607 - protein, 513 aa, unidentified
  source 1..513: note = uncultivated organism
MGTWNTAGYLRLSREDGDKTESDSIANQRNLLEQYLSAHPELDLVEFYQDDGYTGTNFDRPAFRRMEADIEAGKINCVLVKDLSRFGRDYIEMGRYLERVFPAQGVRFIAVNDHVDSQQGRYDMLLPMKNIFNTQYARDISDKVRSAIHTKQQRGEFVGAFPSYGYQKDPANHNHLVIDPAAAQVVRRIFDLFEQGYGKIKIAKLLNAEGIPSPSEYKRILGERYHNGRKIDQTTYWTYATVHRILQNQMYAGNMEQGRNHRPTMHGKAVQLDRSDWTVVPDTHEAIIGAEQWERVQALLHKRTRQLSFDQNQSPFAGFLRCGDCGRSMVKTKRAGGIYYSCGSYKRYGPTVCSKHSISHAVLEQIVLNDLNQIISSVQNLQSLAEEATPRFPRGRTGERERLEGGLERLYRLKKSAYEDYRDGLIRREDFLRYQADYERQERELSAQLQQLEESQRDDLLLHPWVQSLLQHGKLASLDRITVAETIKQIRIFEDGRIEITYTFSNELGLLTG

SEQ ID NO: 4608 - protein, 512 aa, unidentified
  source 1..512: note = uncultivated organism
MPTVTVIQPTIAEEKSRIIRCAAYCRVSSDSEDQLNSFMAQLKYYENFLADSKTEMLINVYADEGVTGTREDKREDFQRMMSDCRKGKIDRIYTKSISRFARNTKDCLKNIRELKSLGITVFFEKENIDTANMPDEMMITIMGGLAQEESTSLSQNMRWSVQKRMQNGTYKIARPPFGFDIIDGKLEVNEDQAQIVNQIFNWYISGCGLQKIADILNENNVPSSQKQKKWTADIVKYILKNERYIGDAVFQKNYVTEALPHLKRRNYGEKPKYYVTNINPQIVEKSVFEAVQRLLEERHKPYSNKGHLMSGKIICDKCGATYKFKKCGEKFYWTCRTHDKKSNQCENGRILESKIHNAFITLHNKLFYNYKQILVPLQAALQDLKIRRFSGNSNVMEIHKEIAKFKEQTHVLARLKTKGFLDNAKYIEQTSELNSKVNKLQLELKKITHLDNEDETLDQIEMLIDYFKKQDAPITECDESAFEFLIEKIVVISKNELEFHVIGSLKFTEKIC

SEQ ID NO: 4609 - protein, 576 aa, unidentified
  source 1..576: note = uncultivated organism
MKKVQLGRSRMAEEMARPSWGITTKEKATSDHISQKSHDKTEGKVATIAAVVKEKEKLRVAAYARVSTDLDSQETSIENQREHYLHYINGHEDWELAGIYEESGVSGTKAETRSELMRLMKDCRAGEIDLVITKSISRFARNTSECIAMVRELTDIGVTLIFEKENIDTSKMESEFLLTLLAAFAESESQSISTNQKWSIRRRFQSGTYKGGKVPYGYRRDKKGYVIHLGEAEIVKRIFNMLCDGKGTLVIARKLNEERIPTWTESYKGLEAQGKWRSNSIIAIARNEFYTGDSLYQKTFMENYKKCVNTGKLDQYLNEADHPAIIDHATFEQANAMIKSHGEQLGREKAAKEVKRYVFSCKLICGLCGGHMRRGKDARAYYACGNHLHKRTVMVEGTEAPCPMLPVFEQDVKNAFATALNRLAADPSILGVSDDGTERERLEAQLQSVKRRQSVLHDRALADRYTAELREKKAALDSEEKIILDALAKLEKKNPVDDLKRAVVKRGVRESFESSDEKLFKAFVDHAVLWSKEKAQFHFTCGLVVEEDMRIEKVGRSYTEVPVRTEFDEKGAFTWQ

SEQ ID NO: 4610 - protein, 565 aa, unidentified
  source 1..565: note = uncultivated organism
MKRARILLRVSSNQQLEADGDLSVQRRLVLDYVQSHDDWKLDGKEYFEGSKSGYKTAVSERDTLQEALEDARNGEYDILVAYKDDRIGRRIWEIGAYVMTLKSHNVDIYTVKDGCISPESSDDVMGQIMLALRYGNAQKSSADTGMRVKDTAQKLVQQGKFMGGKAPYGYELVLSGELSKHGRALHHLRIIPEQAEVVKYIYSLSLNQEFGSTKIAKMLNEDEYYKTMAPIDKWKSGTITSILTNPIYAGHVAYKRRERINGKYHRLDSKDWIKSNNPDENIQIISGEVWNKTQEKRKYRSDKYIKKPEHENVRIIRRNDGMLSLIDVIYCGYCGRKLTNGTKYSYWTTKGTGEKRASKTPIYRCQSAQNGIPHNKVTQFRADKIEGIIFDSLTEYIEYIQRNENIFDTIEQNQKQEKKKQEAELAKLQKELSKIMQAIATMEEHIPEAITGDYSLSLEELASAIRKQKEKIVKQERMIQEKKDSLKGMAVTTEEWKELKSNIPTWKQVFADADTQTQRVLVDKLIERIDVTNERIVIRFKINLNDFLPRISGDSDTIPYTPCLT

SEQ ID NO: 4611 - protein, 570 aa, unidentified
  source 1..570: note = uncultivated organism
MKNIRCAIYTRKSSEEGLEQDFNSLDAQYAACTAYVASQASEGWVLIKNRYDDGGISGGTLERPGLKALLADIAAGLIDNVVVYKVDRLTRSLLDFAKLVEAFDKAGVSFVSVTQSFNTTTSMGRLTLNMLLSFAQFEREVTAERIRDKIAASKQRGMWMGGTPPIGYRPDGRSLAIVEEDAEIVRHIFQRYLELGTVRALHDDLIQQRIRQPKRTTAAGRTFGGTSFGRGQLYNLLKNPLYIGRIRHGSKTYPGSHPAIIDQETWDRVQAQLADNAQGVQQAPTVKDPSLLAGKVMDHEGQPLVATHACKGKVRYRYYVSRHLQHGTPANNAAASGTNGVRLPARELEQLVIKAVVAELRDPIALAGRLGAPIDGPHVVTSLVNKAAAMVATLNGKRGLPVQILLQRIVERVAVQDEVVQFVFEPPGLSLALGLEAGTSPAKTMTVTIPARIRRTGMAVRFVLETGQHATAGAVDQKLVAAIVKAQAWWKRLQDETDMTVADLAEAEGLSRNYVNRVLRLAFLSPAVVNAILDGTAPTDISLERLKEVNLIAPSWTKQHRLLGLAAAQR

SEQ ID NO: 4612 - protein, 569 aa, unidentified
  source 1..569: note = uncultivated organism
MLILHNDTGVYGQYTRKSSEEGLEQSFNSLHAQREACESYIASQRHEGWNVVHTPYDDGGFSGGSMVRPAPQQLLADIKEGNVDVVVVYKIDRLTRSLFDFAKIVETFDAHKVSFVSVTQSFNTTTSMGRLTLNVLLSFAQFEREVTGERIRDKIAASKKKGMWMGGSIPLGYDLREHKLVINHAEAAVVNTIFRLYAELGTMRKLKAEVDRLRLRTKHRTVKGADTGGLPFRVGHLSALLSNPTYRGLVRHKGNLFTGDHPAIIAVDLWDRVHSQLASNTIARRSGETSKEPSPLAGLLFDEAGNRMTPSHAVKSGKRYRYYVSHNLVTGHIAGRRPNDKSGLRIPAQELEGHVSSAIGAYLGNAQRIDADLIAPHTPPTQRNHITRQARALAKDLGTVGASKQSELMHKFVTRVVVSNSELTVVLDRRKISEQIEVLTDKGTASSTTAIELRIPVNLRRVGQEKRLIIAAHAPEINHDPVLIAALAKAHRWFEMLKSGKAQTLGTLARAEKVQRTYITSLLPLALLAPDITEAILEGRQPVDLSLQRFRSIVPLPVEWSEQRRALGF

SEQ ID NO: 4613 - protein, 562 aa, unidentified
  source 1..562: note = uncultivated organism
MENGSNMIAIYSRKSKFTGKGESVGNQVELCREYIRAHYGEAAVNGTVVFEDEGFSGGNLQRPAFQKMMQQIERKKIKMLVVYRLDRVSRNVSDFSGLIETLSQKSITFVSVREQFDTATPMGRAMMYIASVFAQLERETIAERIRDNMHELAKTGRWLGGNTPTGYCSESVKSVTVDGKTKKACKLKLIPKEAETVQTIFKLFSQTGSLTAVETELMKQNILTKNGNCFTRFSIKSILQNPVYMVADEEAYAYLTAKGADLFSAPNDFDGVHGILAYNRTDQEKGRAAVVNPVKDWIVSVGRHKGLVPGKTWVGVQDCLERNKTKAYRQPRKNEALLTGFLYCSCGSRMYPKLSNRKTPEGKVAFSYVCKMKERSKKTVCSCKNVGGNTLDLAVTEQIKNLADDNGEFIKLLEKNKAAYFENRLDREQQLNKLHKEKADLEKKVTALVGTLADAVQPATKQALLTHIDQLNSNIEKVRQRIEEQLNLTAEHAFSNMEFDVLKQLLGTFKNGIDSMSGEQKRAAVRSLVRRIVWDGQNAHVILFGAEGELEFSKNIDFLKQI

SEQ ID NO: 4614 - protein, 563 aa, unidentified
  source 1..563: note = uncultivated organism
MRDTSILPSYAFNQQTGWRENLPANMKEGTRVLCLYRVSTDKQLYHDANNEADIPMQRIRCREFCEQRDWTIVCEMQEEGVSGHKVRAENRDKIQLIKEYALQKKFDILLVFMFDRIGRIADETPFVVEWFVRNGIRVWSTQEGEQRIDSNVDKLINYIRFWQADGESVKTSIRTSNSLKILTKQGYFTGGLCPYGYKFVKGGRLNKKKQPVNDLAINDEEAQIVRQIFEWAELWGYGAQRIANLLNEKGIKNRSRMNWHPSSIQGILKNNLYTGILQNGDAWAQRKDLIIISAERFAKVKNMLAARSRKNEAIRSAPLNTRGNSLLSGMVFCGHCGARLCVTTSGKGRKKRDGTDTVRTRYTCQTKSRTHGDCDGQTGYTVERLDKMVEAVILSLFSKMKKMDKSEILGSNFRNSQNAQKALLQKMKRDYEKAEEDLRKLKGEVIKAITGESSFSPELLNSVIEEKKHECIQLKETYHKADRELKNAASQLTRMENQYDELLEWSSAYKNATMAAKKMIVSHLIERVDVFKGYKLKIKLNISVGQFFGGLSELDEDPIDIPA

SEQ ID NO: 4615 - protein, 663 aa, unidentified
  source 1..663: note = uncultivated organism
MSEIVRVALYTRISTDETNQPYSLGAQRDRLEAFVASQPDWVIVERYTDQASGKSLKRPALAAALAGAAAGSFDVLLVYRLDRLSRSLRDVLALIEDLCKTGVGLRSATESFDTATPAGRMLVSLLGTFAEFERSTMLDRISAGMERKASRGEWTGGRPPFGYRKERGESLLLRDPDTAPIVASIFARYVQSREGAHSIAAWLDATGVRTRGGARWGSSSVLALLRNRAYVGQVSFRGVWRPSPHEPIVDRELFDAAAAILASRAASPRLCRSNPTDYLLSTLRMVCQRCGHPMVGTSARGRGGKLYTYYTCTTRAKRGPTGCDQERLPKDELERAILAQMTEVYADTSLVAAALDEAQAESRAAEAQRNAERERLRARGAELRRKLDRYLAGFESGELRAALLQARVDELAAELASVEAALEQAGEAEPEPERVDVGFVSWSLSKALGDVLATGSPRLTKELLRILIAEIRVVSPTDIRPTYRVPQSEVRILDNMVGEAGVEPAHRYRYQLLRLARLPFRHSPTATESSAADDEGADRTGYGRAWRGSCAAVARRGAAGYRGYYPLRARACRRSHLEGRVDATVADSELAASAEAAEDEPRSSRRRLIRSTTELKVPVSGLSNSVASRLPTWAETGRRMLPPSSETVPRRSRASRTGLFFSR

SEQ ID NO: 4616 - protein, 530 aa, unidentified
  source 1..530: note = uncultivated organism
MSGAYHAAVPAQTAIAAKTIRVAIYVRISTDEDHQPFSLEAQETRLRSYIASQDGWELVRVFKDQASGAKTDREDLQRALREARSGRFDLLLVYRVDRFSRRLRGLVELLDQLDKAGVSFRSATEPFDTSTPAGRMMVQMLGVFAEFERATIIDRVVAGMERRAARGAWNGGVAPFGYRVDKLTGFLVLREDEAPVVPLIFDRYVSDRLGAREVANWLNKHGHRTRSGRPWSHASVLTIIHNPVYVGQVFYRGVYHDAPHPTLVTRDTFDAAQRILAERGEDYAKRAANKSDYLLAGLLFCDRCGKRYIGGTATGNRYTYRYYTCFSRTRYGPDTCDSERLPADEVEAAVLDALMTTYHRDDFIEEAVRATRARATASLGDNERELSSVTAEITKAEDAIDRYLTAFEAGSLPEDRCGERVRSLGSRIAELRERQATLAAAVGDATIPAPTEADLEVIRGRTRAVLDGGSLPMRKALLAELVGEVRVQDRGTVVPWFRVFSTIATPEPKQVRVLGGVVGGAGFEPAATGL

SEQ ID NO: 4617 - protein, 517 aa, unidentified
  source 1..517: note = uncultivated organism
MAGRRVEAPTIRCAVYTRKSTEEGLEQEFNSLDAQREAGESFIASQKSEGWVCLPDRYDDGGFTGGNMERPALKRLMADIDAGRVDCVVVYKVDRLSRSLLDFTQIMEALEKRGVSFVSVTQQFNTTSSMGRLTLNILLSFAQFEREIISERTRDKIAAARRKGKWSGGRPILGYDVAPGGGRLVVNEEEAARVRATYEVYLDRQSLIETIKELDARGWTNKRWITKKGRESGGAPFNKHSLYSLLTNVLYIGRLTYKDEVHDGEHPAIVDEDMFRRAGQILKRNGATGGRHVRNRFGAILKGLINCVPCNCAMVPTHATKKDRRYRYYVCVNAQKRGWHTCPSKSIPAGEIEKFVIDQVRGIGRDPSLLVETLGGARAEAKERMKELEAEKAGLERELKRHNAQMRELAGAAGSGGTATDRMADLLDRIRGAEQRLAQVRDELARLERGMIDENEAAKALAAFDPVWETLTLREQARVLNLLIQRVDYDGDKGTVSVTFHPAGIETLSREYAEENA

SEQ ID NO: 4618 - protein, 528 aa, unidentified
  source 1..528: note = uncultivated organism
MRSKRPRQTIEIPLPKAAANHVRCAVYTRKSTEEGLEQEFNSLDAQREAAEAYIASQRHEGWSLIPERFDDGGYTGANMDRPALARLLTAVEARKVDCVVVYKVDRLSRSLLDFAKLMESFDRCGVSFVSVTQQFNTTSSLGRLTLNILLSFAQFERELISERTRDKMSAARKKGKWVGGHPVLGYDIDPNGGRLLVNTAEGPQVKEIFDLYLRHNSLMPVVHQLERLGWHTKQWKTEAGRERGGKPFIKKAVYMLLTNPLYTGFVNHKGKLYQGEHEALIDEATWNLVQSNLHHNGHTNGGGNKNKYGALLRGLLFCVPCGAPMVHTYTARGPKVHRYYVCYNAQQRGWKSCETKSVSAPGIETAVLDSIRALGRDGKLRAQVVAGVEADDRARRAQIEAEQEELRKKLHGLNGDLARQAADKKSSSAARFDRIAGLQQEIEAVERKLTELAVKMKAAEAAAADPDDIQRTLDRFEPVWESLTTREREKLIRTLVNKVGYDGRTGKVTIGFRHAQGRDLCHANTNNQ

SEQ ID NO: 4619 - protein, 554 aa, unidentified
  source 1..554: note = uncultivated organism
MAFTSKPALAQARRAALYLRVSTGRQAANDVSIPSQRNLTTKFCDSQGWDVTAEFIEPGASATDDRRPVFQRMLEEARSADRRFNVIVVHAYSRFFRDGATMELTIRSLRKLGVDVVSMTQPTGDDPSQQLMRQIVGLFDEYTSRENGKNVTRSMIESARQGFWNGSTPPLGYKIVAAEQRGAKTKKRLAVDPVDAELVRQIFTLYVQGDGTTGPLGVKGVTKWLNAHGYRTRKGATFGVGPVYGILTNRSYAYGKYLYGVRSSRTGELHDPANVVEVEIPTILPEALFERVQAKLVRHNPKVTPPRVVNGPILLTGLAVCATCGAGMTRTGTKRGARSYTYYSCAGCHQKGPSVCKGRHVPLAKLDQLVLDNVKAQLLAPERLNVILGALIERNAAKDHAVAERRRSLEADLGHKKDRLSRLYRAIEDGVVEMDADLRDRIQALKAERDLAQATLDRIKSQVEAKAGVTPERIEAFSKLMREKLDEGDIQARKAYLRSVVSRIEVDDQCVRLIGEKADLADVIAGRQTGAGNVRGFVRSWRARNDSNVRPSDS

SEQ ID NO: 4620 - protein, 513 aa, unidentified
  source 1..513: note = uncultivated organism
MPVAKLIAPTTKQEIPKLRVAAYCRVSSNSADQRNSFATQERVYTKYIAENQEWELVDIFADEGLSGMKADNRPEFQRMLRMCELRQIDLILTKSVSRFARNVKEALNYTRKLKLLGIGVQFEEEGINTLAMADEMLLNTFAAIAQEESKSISQNQRLSIVKRMESGEYIASNAPYGYRLIDKKLVIYEPEAEVVRWIYRAYLNGLSIGGIARELTTMGVATKSGQNCWKGSIIAYILRNERYNGDSLFQKCYGENDVPFKERRNHGERDQFFAKNTHRAIVESDVFDSVQVLLRKRRNQFKREGTQNRYPLTCRIRCSECGSFYHRKVRSGVIKWVCAKHAADTNACNSSYYSEERIYDGIITMINKLRFCEEDILGQTIQKLEFAAAAYKRNNRAASQLSQSIAELNAKLLALERLRSKGYLAADIYHTQAREIRQQLGKLKTERYSSFESRITTMLENVRKLKSLIDELEQPLEVFDEKLFHDIVTDICINNRDEMTATLLGDLKFTEQI

SEQ ID NO: 4621 - protein, 562 aa, unidentified
  source 1..562: note = uncultivated organism
MHVSDKRSPFVTGSIRVATYTRISTDEEHQPFSLEAQAQRLGSYIQSQDSWQLVHRFTDQMSGSTLERPGLEAALALARAKRYDMLLVYRVDRLSRSVRGLAQVLEELDHAGVSFRSATEPFDTGTAAGRMMVQMLGVFAEFERATLIDRVIAGMERKAARGEWLGGQAPYGYRLNRETALLEPNETEAPVARLIFDLYTKKRLGARGVANYLSCHGYRSRPGQLWSHVSVLNVLRNPAYVGKIAFRNVQYDAPHAALIEADVFAKAQRLLRQRGEDASTRRSNTTEFLLSGLIICAACGRRYVGTAAHGRNTRYRYYTCFSRNRHGRQGCRSDVLRADLLDQAVLESLLATYADTEVVNAAIERWRSRAAEEAPDSASQLRRLEAEISGTKSAVERYYSAFENGRLSESRFGSRVDALERRLTQLRAKLAELRDAAMNIEAPSKEAIRSAEEAVRDAMLHGTPGQRKALLKELIVEVRVESRDSIIPTFRLPATPVRVTEAMVGRGGLEPPTSAVLGPERSTNKSGECLEMPGVIGLGDSGSFPILAQATFALLIRSAVVP

SEQ ID NO: 4622 - protein, 548 aa, unidentified
  source 1..548: note = uncultivated organism
MSKKVAIYCRVSTVEQAEEGYSIDEQRRRNIEYCEKEGHEVFKVYEDRGISGKNISGRPGLKELLQDANAGKFDLVIVWKLNRISRKLIDILNIVDTLDKNKIAFRSLTESFETETPAGKLQLNIMGAIGEFERGTIAENVKMGMIARAREGKWNGGKVLGYDIVEIPSEGKKRKETKLVVNEKEAMTVRRIFELYSTGHGYKATVSRVNAEGHRSKKGNPFATATIKEILKNPVYIGKIRYNLRQDWNEKIRKNINPDPILVDGEHEAIIDTETWEKVQIILKDRSKTHNRVYDSELILSGLLKCPVCGASMTVSRSTRKRKDGSKAVNEYYACGNWKNKGTAVCNSNSVKAEVADEVVINKLIETVNNELLLKKVINNINKNKSSKLKPKLDEMNLVNKEIDKLNGKKNSSIELFEDGILTKNELAERVKKLNEEIDTLKFRLDEIKQDVMLAEGEPVPFELVSQVMKKFGQVFNESSTRQQRKQLLNLLVSKVTIDKSRAIDTIELQINEDVIRYLVKEGSSEEDEDLSFFHVSMLNCTCLKFVI

SEQ ID NO: 4623 - protein, 560 aa, unidentified
  source 1..560: note = uncultivated organism
MNNIVDQVFKVAIYLRLSKEDGDLSFSSKGKYESDSINNQRDLILGYLAMHPEMEIVDEYVDDGKTGTNFDRAEFQRMIEDLKAGVVNCVIVKDLSRFGRDYIDCGYYHDKLFPELGVRFIAVNDNYDSANATSSDNLVVPFKNLINDSYSRDISIKVRSNLDTKRKRGEFISNYAPYGYIKSEEDKNQLVIDDYAAEIVRDIFKWKIDGLSPEMIAKRLNDMGILSPMEYKRSCGIKFRPKDVSQSGWNHITVRRILQNEVYIGVLAQGKRTTPNYKTKKFVYKSENEWTRIEGTHAPIISRRDFEIVQELLREDTRACKGTEVSPFSGRIFCADCGASAVRRTVSTKDKKYVYYVCSANKADKKVCTKHSIREDVLEEVVLATIQKHIDAILELDNVLNGAMEMAWERSELQKIEASLEIQNEQLRKNNMLRLGIYEDLQQGLVDKNEYKAIKEELTARIAESLRAVDELNRIKGELVEGMSSRRSWMEQFQEFSNISKISRRLIVHLVEKILIYENSEVEIVFRQADKVASAYQFLEEQKKPQVDCQILVMPRLEVV

SEQ ID NO: 4624 - protein, 532 aa, unidentified
  source 1..532: note = uncultivated organism
MPRVIRIEPTVDIRTHTSISSIKKRRVCAYARVSTNSDEQETSYEAQVDYYQKYIQAHNEWEYVGIYADEGVTGTSTKRRNGFKEMMNDALNHKIDLILAKSVSRFARNTVDTLTNIRMLKDNGVEVYFEKENIWTFDSKGEVLLTIMSSLAQEESRSISENVTWGIRKRFSDGKYYMAYKHFLGYEKGSDGTIVINEEQAEIVRFIYRRFLEGATARNICTELEKQLILTPGGKEKWSPSTVLSILSNEKYKGAALLQKTYISDFLSKKVKKNNGELPQYYVENGHAPIIIPADWDVVQEEIDRRKEAGKAYSSATVLSSKLICEDCGGFFGIKVWHSTDKYRRVIYRCNNKYANKTPCRTNHFTEIEIHNMFLAAYNEYMGNRENIIRGAEKMCRVLSDTTDLTRKLEQKTAQRETKAELYRAWISQGAGARSENFKKHEEKLYADYDAVDKEVNALTQKLTDINNRHTKLVNYIKGLQEKPLILEKWDTAMWITTIRHCIVHRDDSITFVFRDGAEIDIQPAGRTRGII

SEQ ID NO: 4625 - protein, 560 aa, unidentified
  source 1..560: note = uncultivated organism
MNRIACAIYTRKSSDEGLEKEFNSLDAQREACEAFILSQKHAGWVAVRDLYDDGGLSGGTLERPALQRLLTDIKAGKVQIVVVYKVDRLTRSLADFAKIVDVLDAHDASFVSVTQSFNTTTSMGRLTLNMLLSFAQFEREIAGERIRDKIAASKAKGMWMGGTVPLGYDVKHRKLVVNAAEAETVRLIFRRYAELGSVTLLQAELDSQGLRSKRREGAGERLAGGRPFSRGILYLILQNRLYRGEVEHKGNVYPGQHEAIVEQEVWTLVQEKLASSRRDRKLAIGAEAPSLLSGLIFDSDGNRMTPTHANKRGRRYRYYISASLLDRTKPGPNPMRVPASEVDGLVLERLRRLMASRQKIADTLASLCLKARELEAALERAGALGKKWLMLPPEELRKLTRSVVAQVMLSLEKIEVTIGVKQLAVALGSPVKSENDTGLTIVLSIPAELRRSGQGKRLVIGEPYMQIGDASLVEFLKEAFAARQALLADTSETLNEITARTTKSKGRLTALMRVSYLAPDIVSDILAGRQPPELSVKRLVRTSQNLPRDWGGQRAFLGMG

SEQ ID NO: 4626 - protein, 518 aa, unidentified
  source 1..518: note = uncultivated organism
MGSNVTYIPPKAAKPEALRVAAYCRVSSDSSDQLHSYATQIKAYTEQIGAHADWELVDVYADEGLTGTRMDKREDFKRLLADCRKGKVDRVLCKSISRFARNTRDCLATLRELSALGVTVYFEKENIDTGTLTSELMVSVSGALAQQESISISQNQRMSYKRRMERGEFITCKAPFGYRLVEGKELEIIPEEAERVRWIFASYLSGKSLEWIAEQITKAGIPTTDNTPYWQQTSIHYILTNEKYIGDTLSQKTHSCGFPFRKRRNRGEADQYYIENTHPTIVSRETFEKVQRLLQRKGARQRMEHPRSPLARKIRCGQCGTAFSRRAGRSGLVVWTCRKHDRDAASCPVGRIPETEIHAAFVRMYNKLRANADIVLKPALAQLDALETSLQREDPAMLEVNRAIAQAAEQSHNISKLQAAGLLDADACAAKLNAISIQLTQLRRERRRLLEHDDIEDAIGRLHQTADTIKAGPEHLDTFDEDLFEELVEGIVAESQTRIRFRLHGGIELAEEVGRAKR

SEQ ID NO: 4627 - protein, 568 aa, unidentified
  source 1..568: note = uncultivated organism
MDAEKKITVRMLLRVSSNQQLDADGDLTVQRRIVADYIKKHAEWELDSYKPEYYEGGVSGFKNSVDDRQALQDILADAENGEFEILVCYKDDRLGRREDEIPQYIKKLASFGVLVYTVREGCITPQSHMENLLNYIRYWHAEGSSIDTSQRVKDAAKENVRLGKNQGGNAPYGYKLEFSGEYSKHQRALKRKVIDPERAEIVRHMYHLAKTSGYGAQKIASILNADEAMRVMSPNGEVWKSGTVRDILRNPIYTGYEAYNRREKRNGHYIRLNHSEWTLSEQCNEEIQIISPELWEEVQELREQRKKQIDTRKESNGHVQTRTSQLLGLLDVAYCGYCGRKLTNGSKYNYWTTKDGEKRKSAVGYYRCQSKHQGELCEGKTSYRADNIEPNIFDFVTDYLTSLEDNSTVLTKLIETEQEQKLVTQRNINNKKRALEQVGKNIETLEETIPLALRGDCAFSAEELKEQIRKNREKQQELEEEIDKMKSDMLTKYSEVAEVDKFVSHIPEWKEVFKNGSIDEKRVIINKLIERIDIWDGKIQIYVRVNLKEFLSRKYTYERTTPYTPGLR

SEQ ID NO: 4628 - protein, 506 aa, unidentified
  source 1..506: note = uncultivated organism
MRVATYTRISTDEDHQPYSLESQAERLGNYLASQDGWELTRSFTDQASGATTERPGLQRALAEARAGRFDLLLVYRVDRFARSVRGLAQLLEDLDSAGVAFRSATEPFDTTTAAGRMMVQMLGVFAEFERATIVDRVIAGMERKVARGGWCGPRPFGYVHDPASGFLAAKENEAPLVPLMFGRYAHSREGARSVANWLNAAGHRTKAGRLWSHTAVLTILRNPVYVGKVTFRGEYHPAPHVHLVEDKLFDRVQALLSERGEDYSKRASASSDYLLTGLIICERCGKRFVGTSATGNRYRYRYYTCFTRQRYGTTTCNAERLPADDLDTVILDALRRTYERSDLIEKAVHGARARVEKLRTRNDQELVLIDTETAKAEESIERYLGAFEAGTLSEAQCGARMAKLGAKVIDLRRRREDLVAAMEQGSVDVPSDTELSDLRAHIEEALINGAIPAQKAVLQSLIHEVRVESRERVVPWFRVRGGEPAKVRALGGFVGARGLEPPTSAV

SEQ ID NO: 4629 - protein, 504 aa, unidentified
  source 1..504: note = uncultivated organism
MKGLINMTAIYARRSVYNADSISIETQIEACKNIVKGESIQIYKDNGFSGKDTDRPDFKRLMTDIKAGVINKVVVYKLDRISRSVLDVAELIQELEKLHVDFVSATENYETTTPMGKAMLNMSATFAQLERENIAARVKGAYISRSHKGFYMGGRVPYGFELTPTVICGVNTKKYIIEPIKAHTIQRMYEIYGQPNTSLGDVRRQLISEGIIRDDGSNWTTAKLSDLMRNPVYVKADSKVYEFFQNERANIVSPLDEFNGINGCYLYTGENTNRKTWDLTNQTLVVAPHEGFISSDLWLYCRKKLLGNHQIKWTKAKNSWLSGKVKCGHCGHAMVIRKANQKRTRYFVCSGRSDYNCKKPMPTIYADEFENLIKMYISRKLDDLTLKPNAKKSECDLQIHKLEAEIAGIDADIRKLVDMLMQVDEASMKYIQEKIKDLDRDKQNKLDEIQKSKSNSANNLNLGELHNVMTLWDKLSFDDKRGVAELLIEKITVYPQSVEIIWKV

SEQ ID NO: 4630 - protein, 541 aa, unidentified
  source 1..541: note = uncultivated organism
MPPRRQHPAKGWAGALDRTSLVRTDIAQDSSENQQRLNRETARAYGLELKAGYDFSERGTPASKPITRRELERGINAVVSEQAIEALLVSSVDRLSRLGMRHVGEMLDAVDAVGGRIIFNRGNLDSSQPASRAIIAFLAEQARDESNTLSWRIETWREGCRLKGKWTGRHPYGYLVIDGRLSPHPDEAPVVRRIVTWFLEGQPARQIAIALNEAGVLAPAAAKAAQIRAEGREPTKGRSTWWSTQAVARLLRSPVLVGWARHNGRIVLGPDGEPVSFGEGILTPGEHARVLMELERRTAIVRQSPTRTREAGRRTGGGRPSRYLLVGMARCRGCTYAMSVGGIRSDDGRGLYYDCAGAGAGRTCPAAASIKVETADAEVMRQLRLRLAAMEPDDPILGAIAERWRELTMPEGEGDRAVLQSRLDAVRGRIVDLEEARYVRGEFATADDVARWDGMMTRLKLQRDAVLREIEELGPPPDFDLTTLRATYSSKVWDATPLPQRRKWLQVAVAKVLVTSARRRKLPAADRVRVILVGEEPESAG

SEQ ID NO: 4631 - protein, 578 aa, unidentified
  source 1..578: note = uncultivated organism
MSTLAKRSIRCAIYTRKSSEEGLEQSFNSLDAQREACQAYILSQRQEGWRAVDTQYDDGGYSGGNMDRPALKSLLADIEARKIDTVVVYKVDRLTRSLADFAKIIEAFDARGVSFVSVTQQFNTTSSMGRLTLNVLLSFAQFEREVTGERIRDKILASKRKGMWMGGPAPLGYDVNDRHLIVNETEAEHVREIYRLYLEFGCVKKLKAHFDAREVKSKIRVSSSGRRTGGTSYSRGALYSILRNRLYLGEVPHKEKSYPGQHVAIVDRELWDKVRMLLAENAHARRYGTNTKAPSALRGLLYDEDGTRFTPTHACKHGKRYRYYVSQKVIEDAASAIGKPGRIPARELEKLVLAKLKGFFSSADKVVSALALPDDELGITQKLIESAAWYAKRLDEQSNSSLSEMLETIVARILIHQESVEIQLDRATLRAQFLGPSYTDPQTQSAAIDLDHEPITLTITTKLKRCGGEMRLIIPSQSAEQAPGRSVPAIVKAIGRAQEWVRQIVAGEYKDQRAIAKAAGLNERYVSRIIQCAFLAPEIVEDIIKGRQAPEMTLVTLLGKVPLSWAEQNARIGLVFER

SEQ ID NO: 4632 - protein, 557 aa, unidentified
  source 1..557: note = uncultivated organism
MKPKSKKGPGSGAKAEGLPSAPRKCAIYTRVSTDEQAALEYNSLQAQEEICKNYIAIRAADPQMERKWVYAKTYSDAGFSGGTLERPALKQLIADFSAGKIEVIVAYKIDRISRSISQFYEIWKLLETHRVDFASATQEFNTATSQGKLMLNLLLSFAQYEREIIGERTRDKIAAAKKNGRWCGGKPILGYDVEKERKRLVVNEAEAEIVRDMFQVYLNEGSLLKALKVVHAKGYRTKEWIAASGNKVGGQPFDKCTINRVLLNEAYIGKVRHLNKLYPGQHKAIIDDDTFARVQKMLGDHHKPHPTDRVEYDYLLRGIVRCGCCDRAMSPGYAAGKMGKKYFYYTCQRAIREGAGACKVRSVSAPRVEKALLDRIGELASDKSIVAGIVKRAGKVAVERTPEIREQRDRLEGELRKRKGEAARLVEAIASGASGASLLSDRLRDGEDAIRVVESRIAKLNDEAARLQATLVDPEGVRAALGQFAAVWKTVPQTRRPLLVKHFVRQIVFDQRDRSGGRIVWQIAPFAPIGDPKESGALFQERRDLRGGRDSNPRPSA

SEQ ID NO: 4633 - protein, 604 aa, unidentified
  source 1..604: note = uncultivated organism
MAEEVITVAIYGRKSVEEDPSSSVDNQIERGIAYCKLRGWNYIIYRDDGISGKDTDREGFQRMMKDAEAGRFKYVITYKLDRISRNVADFANFTKKLDQLGISYISLTENFDTSTPIGRAMMYIAAVFAQLERETIAERVRDNMIDIAKKGIYVGGPICFGYDKGYTEIEMRGKKKRITVPQINPDEAEAVKNFYNWYLEPDGSVRKVVFRANQAGIRTKNGRLWSINQMARVLSNPVYCIADEAAYNYFKNETQVIITSEKSEFNGRNGLRVYNRRMPFKNTTKLRDENEWILAVGMHEGIIPGELWVSVQKKLEENSDKPPRKGTGYKGLLSYLIKCGKCGAAMGYYVTKKKNGNKTEYGYYKCSTKYTHLKDGCDQKNINAEVIEEAVLNALKKICADKSFVENALNKAKEAIKTKKAPLLKELERLKNEIEKNNDEIKNLVIALGRKTLPEYFIEARIKELQQINNDLNNRMIDLNNEINIVGNNDDVDIVLDQLKKFETSFEQMDFDQKRFFLRTIIKDIIVEDDTVTINLFFMQPQYMDKLENLSRMQSHALQNYLPIHIDLTKHFEELRIKHIDMYSLKIYFYKKEGILFLNIEYLF

SEQ ID NO: 4634 - protein, 507 aa, unidentified
  source 1..507: note = uncultivated organism
MAELHVIAPTITPEIEKLRVGAYVRVSTDSEDQENSFLTQYDYYSNLIQSKEEWEFVDMYADEGITGTDMKKRDDFNRMVEDCQDGRIDLILTKSISRFARNTYDCISTVRELKRYGANVFFEKEGIDTRNMSSEVELTMMSSFAQEESISISKNITVGFTHKMMDGTFIYSKVGYGFRKEGTQIVIDEYEAKNIRWIFEMCIQGKTIYEITDALIKAGVRKTDGTTDWKVSAIKFIIKNRMYMGDALTRKTYSEGFPFKRKNNIGQRDQYYIRDYCPAIISRETYEQANKIMKLRKIGSAENRYEGIFKRMVFCSVCGEPMKRTAYNNGWNCHDHSGRGKNSITDDMIQQGFIACYNRLYLNRENILTPVINLSYEYKEWQNRTNYKLEEIKNRIAQITEQVLIIKKLEAQGCMEPAISMQKNSELNKEISQLKQEKKFLTGKNDCDKLIRQTTTLLRILETAGPIAEFDEGIFKAMVAKIWNNSDVEVTYELINGVKLKINKEEV

SEQ ID NO: 4635 - protein, 503 aa, unidentified
  source 1..503: note = uncultivated organism
MNNRIDAIYARQSVDKKDSISIESQIEFCKYELKGGNCKEYKDKGYSGKNTERPQFQQLMRDIESGLVRKVVVYKLDRISRSILDFAKMMDFFQEYEVEFVSSTEKFDTSTPMGRAMLNICIVFAQLERETIQKRVQDAWYSRCQRGFKMGGKTPYGFRTEPYVMDGVRTKKLVIEPTEAAFVRQMYEMYADPQVSLHDITKKLTADGMRTYHGRPLSRATLSVILRNPIYVMADLDIYEFYKSQGTDIYNDAADFAGTNGCYYYQGKGNTEDKHKHLQGQTLVLAPHEGFIPSELWLKCRKKLLASHTYQPARKARNTWMAGKIKCGKCGYALMSAHSNGILYLRCTVHADSKACPGCGCVKLHELEAVVYGAMVKKLKDFKTLTGRNKAAKISPKLTAKRLELAQVESEIEKLLDTLTGASPVLLSYANSKIEELDARRQSIANEIAKLSADAVPMEKMESISGYLDDWENVSFEDKRQVVDALITVIRATNEKVEIEWKI

SEQ ID NO: 4636 - protein, 557 aa, unidentified
  source 1..557: note = uncultivated organism
MSTKRQIRCAIYTRKSTEEGLDQDFNSLDAQREACAAYITSQKAEGWIALPNRYDDGGYSGGTLERPALQQLLRDIEDAAVDVVVVYKIDRLSRSLMDFSKLVEVFDRKLVTFVSVTQSFNTTTSMGRLTLNVLLSFAQFEREVTGERIRDKFAASKKKGIWMGGNPPLGYDVASRKLVVNRTEAEAVRFIFQRYLDLGCVRLLCADLVGRGMVSKHRTFGTGEKRGGKPMGRSALYCILNNRVYIGETTHKGAFYPGEHKSIVPRALFDAVQQRFADLRPPVTSGARSPQDAPYADLLFDETGTAMLPTYAIKRGGLRYRYYVSRPAMRGERSGATISRIPAPPFEVFMAGVIGRLGLSGDNKEVQPRTLIQRIEIQPKSIVVQFQRADALALWRVASLEEAGRCDQEVIDFRRGSLVIGENLADDGEKLTLSLPVRARFRGGRAYILHPAGTAQPTSRLDMALVKALARAHCWRRFLLDGEVASIEALARRVKLDRGHVGLTLNLAFLSPALTRAILRGEQPPGLRLTHLLAANIPLSWREQEALIRRAANAAGG

SEQ ID NO: 4637 - protein, 525 aa, unidentified
  source 1..525: note = uncultivated organism
MAADRRLNCAVYTRKSSEEGLEQEFNSLDAQREACEAYVASQKHEGWRLLKDRYDDGGISGGTMERPGLQRLLADVAAGKVQIVVVYKVDRLTRALADFAKIIEVFDAQGASFVSVTQQFNTTTSMGRLTLNVLLSFAQFEREVTGERIRDKIAASKRKGMWMGGNPPLGYDCRNRKLEVVEAEAETVRHIFRRYAALGNVRTLKADLDAAGIVSKLWTSASGRRVGGKPFARGALYHLLQNRLYLGEIVHKGQTHPGQHAAIVDQSLWDEVQAKLAANRIDRKRGTNAKEPSLLAGILFDEHGRRLTPSHANKGGRRYRYYVTDPRDDGRIPAIRLPAKEVENAVLSELRRYLESECIRQGRSLVGDSDCLSFLRSDVIKVVLGEAEIEVLLKAPNDSEEHSLCVPYTLRRRGVETKLVLDPDIHPRQSNPDPALIRGIAKAFMWNKRLMAGDPSSLRTLARAEGVSVRYIQKLLPLAYLSPSIVGVILEGHQPRDLTLEALVNSEVPVDWKSQATMFRFLHCF

SEQ ID NO: 4638 - protein, 559 aa, unidentified
  source 1..559: note = uncultivated organism
MKRMIEHAKAALYTRVSTSYQVDKDSLPHQREELINYSQYALGISQYEVFEDAGFSGKNTDRPAFQDMMRRIRQGEFTHLIVNKIDRISRNLLDFAAMYDELKELGVVFVSRNEQFDTSNAMGEAMLKIILVFAELERHVTSERVTAIMIDRAQKGKWNGANVPLGYKWSEEKKFPVIDESESKIVKKIFDMYISGDSMLAISIYLNKNNIKTKRNGRWTNATVRQIINNPFYKGTLRYNYRSSARGKIKKESEWIVIENNHPGIISTEQWEEVQKITVSRRSGKGVERKKYDHIFIGLISCICGSHASGHIQYNKKERIYSRYYCLRSHVLGRGECDNNASVSDSMIGEFLFSYLQNMIYVQDNLDKIDSLEQLEKELLYGVYLDKVSYIEEKSLQDIYNNFLQKSNVKYQQKEVVKLEELDKAQTLLNEQKSHQKALERLNKAYLYGDGILSEKEFLTEKQKIQENIRKTELEIKRLQQNKNVNNDDVKFLQETSDFLIKNTISKRGTINWKEFAANINNRDVNIFLNTIINKIAFYHKKIMYIEFKNGIKHRFVYK

SEQ ID NO: 4639 - protein, 564 aa, unidentified
  source 1..564: note = uncultivated organism
MIKPRIRCAIYTRKSSDEGLDQDFNSLDAQHEACAAYIASQRHEGWVPDKTRYDDGGISGGTLVRPAMQRLLDDIDAGRIQMIVVYKIDRLTRSLADFAKLVERFDVAGCSFVSVTQAFNTASSMGRLTLNVLLSFAQFEREVTAERIRDKIAASKKKGLWMGGVPPLGYDPHPDPKIRGLVVSQNEAKTVAAIFHLYVQLGCLNRVMRKTIELGLRSKRHHFKSGRTQGGNQFSRGQIYALLRNPIYIGKIRHKTNVWDGQHEAIIDIELWDHVQAKLQEASARPRSQVGSVSSPSKAGVAPLTGKLRDETGDRLTPTHTKRHGRRLRYYISNRLISGGTDLSGWRLPAVALEQAVANIIARHLSDLARSHRICVTPDLQLGDAVSSKTEGLAQRLRKGEHGLLANIAAKGQLAKGRIELELHGAELATELSLKPDEIDPSALHIQAPFELRRRGVEGKIVAGDPEPDPDRTMLRALVRAHTWTADLRRGKSLNDIAAATSHSESYVRTRAQLAFLAPEIQKEILDGRQPPELTLEKIIRKPIPLDWDMQARFYGFSRDLNRP

SEQ ID NO: 4640 - protein, 534 aa, unidentified
  source 1..534: note = uncultivated organism
MTTTRAAVTRASLYVRLSREANPDNTSLDTMTSALRELVARERFTEVALHVDNGSSGGYRDRTEFMAWLADAKSGRADVLAAFSVDRMTREGANVAGPILDLVEGKDPDTGRPLATGHRVRLMDTQGLDSAGDPEAFRWSFVIKAEVARAERQRISERNLRASRALRAAGRWAGGGAPYGYRIITDDTRPGKYLALEPSEAEAVREAAERCLAGQPLGSVARWMSENHSPRRAAAWSRVTLRQVLTGDAVLGYTKVDGALLRDGQGKPVQAWPAILTPAEVAELRKLLAPMPDARKGGRHPARLLSGFLVCSGCGARLQVARRTRGGATYRCPTKSDGGTCNASVTVAAEALEQYVERCVLEEHGEVSVMEDHVVVGDDGGAAEIDEAIAATLRALGENPTTDLFARLQSLKAEKDALAASARSAPAQTATVWTGRTFADDWRDADHLDDRRRLLASVLTQVAVSRGRPGPRGVDPERLDVVWAERPGWVAVVSGRVARLSGAQVRAVIGAATERWEAMTDADREAAADDAATA

SEQ ID NO: 4641 - protein, 561 aa, unidentified
  source 1..561: note = uncultivated organism
MARASERAERMKMVRCAIYTRKSTEEGLDQSFNSLDAQREACEAYVRSQRHEGWTLTPDSYDDGGHSGGNMERPALKRLLADVEAGRVDVIVVYKVDRLTRALSDFAKIVEVLDKREASFVSVTQSFNTTTSMGRLTLNVLLSFAQFEREVTGERIRDKFAASKAKGMWMGGTIPLGYDIKDRKLIVNEVEAEQVRHVFRRYAALGSGRLLIEELRATGYRTKRAGSRGGNIFARGSLFHLLNNRLYLGEITHRGTAYPGQHDAIVAQELWDAVQETMSRQRVERQRGSNSVHPSLLAGRIHDGEGRRMSPSHAVKSGKRYRYYVTPADDCTTGDPTPWRIPAIEVETAVVSLLKTMLGDRRQIVSIVGSSDSAILNAALIQSRLLLRRLEDSAEKRAIMNELDVSVRLGADHVEVVVAGSSVAASLGTKIEADEGAYPPITLRASAIKARRGNDIKLIIADHHGRADAFRDPALINLLVEARATYQLMLDSPDISIRALVKQHSRCRNRFYKLLRVAMLAPDIVMACVEGTQPVHLTAARLLEAQLPMRWQDQRKLLGFA

SEQ ID NO: 4642 - protein, 506 aa, unidentified
  source 1..506: note = uncultivated organism
MTGVIYARYSSDSQREESIEGQLRECKEFAEKNGITILNTYIDRALSAKTDNRPEFQRMIKDSAKGLFDVVIVWKLDRFARNRYDSAHYKAILRKNGVKVTSARETIAEDSTGILLESLLEGYAEFYSAELSEKVIRGMTENALKGKYNGGSLPVGYTVDSEQYYQIDTHTASSVLEAFKRYDKGATIADLVRWLNSKDIRTNRSLPMSIDCVKRMLHNRRYIGEYSYRDVVQPGGIPAIVPQDLFDRVQARLEKNKKAPARFKAKEELYLLSLKLYCGLCGAFMIGESGTSHTGRIHQYYKCSTAKHKKTCPKKTVQKGWIEDLVVTETVKMLMDDAVVEYIADLVMELQERENVDLPRYKAQLAETETSIENMLNAIQQGIFNSSTKQRLDKLEAEKDDLKVKILQEEMQRPLLTREQVLFWICRYRKLDVTKPEQRQRLIDGFVNSVYLYDDKIILTFNYKKGCKTISLHDIMETVNRSDTCATGAPSKDVGLDTTSKPRKAQ

SEQ ID NO: 4643 - protein, 542 aa, unidentified
  source 1..542: note = uncultivated organism
MKIAALYARVSTQKQEKEETIESQIAEIRTRIELDGYVLPSEHVFVDDGWSGELLDRPELDRLRDAIRGKGFEALYVYDLGRLSRNFLNQLILIEEIKKAEVKLVSLHDINAENEEQLFARNVMGLFHDFERKKIAERFRRGKLYKARMGKYMNLQAPYGYNYVPKTNEKDPYLIINEEEAEIVRKIFHWVADEKLTTRGVIKRLYELGIPPRKRKRITWTHGPVFRLLRNEDYIGRAYYNKNYAVVPVNPKNNSHYRKVLKSSRKRRPKEEWIESKVPKIIDESLFLKVQERLILNQKFNRRNRKTKCLLPQKVFCICGRHRNIEGVREHRYYRCTDRIYMDPLPRKCFASGVDAFHLDDLVWRNVLGLFTNEDLVMRQARRWMDNKTQEGAYSKVDMEGDKKLLRKLEDEEDRYVKAYGAGLLSLDQFKERQNEVKERKQKLELSIASKSDVVVTPVIDLSSISSLTERFGDVLKSLTFEEKQLFLRDVLDKVVVGDGAKVLVKGCIPISNQIESEVQNNGLWPLCRDSWVAECRKVDAV

SEQ ID NO: 4644 - protein, 618 aa, unidentified
  source 1..618: note = uncultivated organism
MNEPERLCGLYMRVSTEDQAKEGFSLPEQKERLEALCKFKNWKIIDYYEDAGISAKTGNHRPEFDRMIEDAKKGKINTVIALKLDRLTRSIYDWENMLNMSEKYKFDLVCANDEINTTNANGKMITRIMMSVSQNEIERTSERTKVGMAGAIKQGHIPGLCPIGYRRTPNKTIEPDPLTKDIVIRIFNLYFEGKSYSTIANIFNEEKILNKTNWRDVRILKILSNPIYKGDYVAGKTVGRPISYENVVEPIVSKELWENCQAQKKKNQKNYMRTQHYIFLQKLRCPKCGRILAGGASHKIKADKWYFYYRCEDCKNNIKEEVIEKSVKKMLADILEYDNVVNEFFLPVLKAKIDNPKEQLEKELKSLHNKKDRIRKAYIDSLFTEDEYKEELSLIESQIELINAKLLENKQCEQLNFTPEDILLKRDMNYINHLKLPISYYAFNKCWELLEREQKSNIIMRYIDDIELEMKGNKFEVKQVNFRSTFYNDFETLYKQGVIDKTRPIFFKYDGLVTGGSIRYSEYLPIKDVLENLYRLNIFYEVNFYKGTYYKKTEELKIGPFLKDEAAVRMFPLQPNDNENEDWVSVGMLTTRPSPNDIKVNIRDVFEKLPPKVSKDLP

SEQ ID NO: 4645 - protein, 566 aa, unidentified
  source 1..566: note = uncultivated organism
MEKSRKHIIYSRKSKYTGKGESVENQVDLCKQKILAKYPNLTDDDIKVFTDEGFTGANTNRPAFQKLLNEIRDNKVESVTCYRLDRVSRNVGDFCNLINELEKYNVGFISIREDFDTTSPMGKAMMLICSVFAQLERDTIAERIRDNMMELAKTGRWLGGTPPTGFKSVEVQTFNQDGKKKKLFKLEEISDEKNLIILLKNKYKEIKSQTGLETYTIQNNLQTKNGKRFTRWALVNILTNPVYCKADIDAYNYFTEKGALVIGEKEDYDGKYGLMVYNKTNQMTGKSKKDNDISEWIVAIGKHKGFWSGKEHVEVQQLLELGSNKRFRKPNINNALLSGLLRCSYCNSFMRPKIRSNSSGDEVKFTYLCELKDKSRKTKCDHKNLNGNEADRLVTNEIKELTDTKGEYYTSLRNLANGKLNMFDEKSSELYTLTNEKKKNEKDIESLIEKIKIVPADIVDDLAKEIQKLKKANLEIDDKIKLLDINKSTIIEDSENAKLVLNILDTYCKKFDDLDLLQKRTVIKLLISSAYSDGENLFLNLTGTRESSKLTKFPLGDNCEWNIDAF

SEQ ID NO: 4646 - protein, 532 aa, unidentified
  source 1..532: note = uncultivated organism
MNRQPGQPLVRCAIYTRKSTSENLDMDFNTLDAQREAAELYIRSQGWTVLPDRYDDGGFTGANMERPALQRLLEDIDGGKVDSVVVYKVDRLSRSLLDFAKLIELFDKKGISFVSTTQAFNTSQSLGRLVLNILLSFAQFEREMISERTRDKMSAARRKGKWTGGAPVLGYNVDRDRRRLEVVPEEAEQVRLIFHLYLRLRSVDAVTDKLRALGWRKKTYAKKDGQPTGGKPWDANTVHRLLRNPTYLGKVAFKGETYEGEHEAILDEATFQKVQQLLSSKSCGRGPRRQRNPDYLLAGLLHCRCGSPMTTSSTKARNGGEYRYYICRSQMPRGPKTCDHPRLPAPEIESLVLERIRTVCADSALRRDLTDRLDDGNASIGRKLATQQAALQLQISALNKEGRELLDSVRAAGGQGSTIAAARLGEIELHLDELRTQAGEVSDQLRGLSAAVGRVNTALELIDHFDQLWTCLVPEERLDVTRLLVRRIDVDEPAGIVRMQLHDLADPLPDQPGDIQPDHGDAPVAAQEVAAP

SEQ ID NO: 4647 - protein, 520 aa, unidentified
  source 1..520: note = uncultivated organism
MCRQYIISKFPESVSGSGIAVYEDEGFSAKNTDRPRFRQMLADMRTCRPDYLVCYRLDRISRNVSDFSALIEELNERGISFVCIKEEFDTSKPMGKAMMYIASVFAQLERETIAERVRDNMLMLARTGRWLGGTAPLGYGSEKISEIIIDGRIRTACRLKEIPAELETVNTIFDKFIELQSVSGVSKYLISRDIRSRSGKFFSLPGIKEILQNPAYCTADRDAFMYFSSVNSDICFDEKDCSGRFGLLAYNKRDYKKKNAPRRPAEQWIVAIGKHSGLISGRRWSAVQKIIEDNIPTGKKPAKMHNGYSLLSGLIVCEKCGSRMFAKPRSVLSSNGRLYDYICGSKLKGGTKLCSCQNLTGMQTDELVCRSISGYLKESPRILVLLEKLVRDIRSAENENPSEAIEAAIKKLSDEADNLICALSHGDLSPAFVQKVNARIAEIDSEIKKLECKKSGLEAEADRLGQTDTAEIIAEELFDMKKIFSEPGVLSVYEKRSIVRLLVKRIYWDGENMRICIGVK

SEQ ID NO: 4648 - protein, 531 aa, unidentified
  source 1..531: note = uncultivated organism
MEKVEKKKIRCAIYTRVSTSEGLEQEFTSLDNQRESAESYIASQKSEGWVALPERYDDPGYSGANTDRPALQKLMADIKEGKIDSVVTYKVDRLSRSLLDFSQLLEFFEQHSVTFVSVTQAFNTNTSMGRLTLNILLSFAQFEREIISERTRDKMGAAKKKGKWIGGRPPLGYNIDKVNHKLVINPKEANLVKEIFDLYLEKRSLLSVAIALNSKNQTTKSYTASDGKKFGSVKFKSTSVQLIVKNPLYMGKVSYHGQIYPGEQERIISDEIFQKAQQILADNRRERKVAGITSNVGLLNGILRCKACNSTMYYIYSMKGKNKYYYYLCMNAQKRGYKSCPTRLVAAQVMENRFMEFLRSISKDPRIDAKAWEKITLEQKIPILKSIAKVAHYDAHNETLEIVLHKGDKSHEFALKLAELKHIPHHRRQLEVSKEPLVRQNLILGYQIDAISKERGRSLREIANWLGMNHPRICQIVNMLLLSSKIQEEILLSDNKALFNIPEYKLRDVISEVSWDKQQEVWSKLVKSCRN

SEQ ID NO: 4649 - protein, 531 aa, unidentified
  source 1..531: note = uncultivated organism
MLPAYIFIYARWLFLFVERTELMEKIDAIYARQSVDKIDSISIESQIEFCKYETKGAPFRVYKDKGYSGKNTDRPEFQQMLAAIRNGEISRVICYKLDRCTRSILDFATLMEEFQKYGVAFVSCTEKFDTSSPMGRAMLSICIVFAQLERETIQQRVFDAYHSRNKKGFYMGGKVPFGFRLEPYYLEGKKTSHYVVNEDEAKILEFMYSLYAYPLASLGDVVNALADAGIAHPRKEDGRWTRTHIGRMLHNPAYVKADLDVYNFFKENGVIIHNSPEDFIGSNGCYLFSEKGKTHPNYRLEGHHLVLAPHKGIIPSDIWLRCRKKQKYAGETVRQCKIKNSWLAGKIKCAKCGYALVIQKTTKKNGKVFRYIICSEANGTGKRCDGIRGIKADNAEEIALGEIKKKLEMFSSLSAPKEIRINPEIAELNIKIAQLEQEIEKTTSKALEATGTLIKYLSDRVTELDAQKKICLSRLNRLEQSATVNECNIDKLTDYISQWEDLTLEDKIIVVDVLIDKIKLSESEMTIIWKI

SEQ ID NO: 4650 - protein, 612 aa, unidentified
  source 1..612: note = uncultivated organism
MSLKIAAYVRVSTEEQAAVVEGSLDNQKYRMTEFIRAKNLVEKNWGSLVDFYVDDGYSAKDTKRPAYQRMILDIKKGKVNLILVTDLSRLSRNIQDFSNLLSYLDSNKSKFLSMKEQFDTSTPAGKMMIFNMINLAQFEREQTSERVALNCHARAMRGFVNGGKAILGFDHNPDEPGVLKVNEAEAEMVKTIFQKFLELGSRGQTIKFLNQVHVYPKTHKNKVQNSKIRKWNVQNLGDTLSHAAYIGFREVNRLNKAEDQAELKAWQKYKLVKAAWPAIIDRDTFDRAQILLEETANFLRHRKAMTKNRMFLLSGILVCGECGRPLMGQTSHGRMSVHRYYVHSQHDKSVDCQIQRYRADELEEMVVKHLVTGLSEAGYFEDLGERIKKSAKASNSIFAAEEKRARDVLYDLEKRISQAWQIQSKGKLTQEALQVISDDLNKLAQEKKTLKEYLDGLTGMRVDQEDVEVRRELLFERLEEFEKGWAKAPQSSQKILLKRVIRNVVTQADGININYRLRDGIDEKRNQSITVGADQKNGNIIEFASGFREKGSLGNSRDLKVLGSLKVRNGRGDRIRTYDPLVPNQMRYQTALLPDGKQEPNNFSGFCQTTRF

SEQ ID NO: 4651 - protein, 520 aa, unidentified
  source 1..520: note = uncultivated organism
MSAKKNVQIIHATAPLPDIVRVAPYVRVSSLSDDQLHSFHLQYSHYHSLVTNTKGWVLVDVYADEGLTGTRADKREDFKRLMRDCRAGKIDRIIVKSVSRFARNVEDCLDNIRQLKALGVSVYFEEEDIDTAHMTDEMILSIRSVQAQQESMVNSRNANWSYQERMRQGKFITYHAPIGYIRVDGKLVVDEKTAPVVRRIFEEYLSGKGQTAIAKELDEDGIQAPEGGTWNMTVIGYILKNEKYIGDALLQKKYTTDTLPFTKKINRGERPQYYVEESHEPIIQREKYYRVQELLQWRNRNMQVQKECIRQPLSGKLKCAECGTPFLRKPLRAQIAWVCKKHNLDAGECPVPNVKEDEVYEAFITLYNRLKKRKGEILYPMLKYMEQAYTMGEDNPQETALLNSRIAEAAKKLARLNGLAEKGVLSDALLAKNRAPLERELYELRQEKKQLQVRDDPEDVKELWALIRIIEAGPEVMVEFNPIIFNNMVCTISVAKEDFLIFHLMGGLALKENIQRRTGR

SEQ ID NO: 4652 - protein, 552 aa, unidentified
  source 1..552: note = uncultivated organism
MPPAEDCLPHAVRCAIYTRKSTEEGLSQEFNSLDAQRECAEAYILSQRQAGWAVLPAHYDDGGFSGATLARPALQRLLADIQAGRVDCVVIYKVDRLSRSLFDFARIMQILEKHAVGFVSVTQQLNSNTPMGRLTLHVLLSFAQFEREIISERTRDKQSAARRKGKWTGGYPVLGYDADPSRGRLVVNDEEAAQIREIFALFLRDGSLDATLAEMQQRGWRMKSWSTRKGQPHAGQPFDRAALVRLLSNVLYCGEVRHKGKIYAGEQAAILDRAVWRQAQDMLRRRPRGNGVKRPEALLQDLLRCGVCGGRMVAGYSTKKKRRYGYYVCRKAQQQGAAACPGQSIPAARLEGSLLAGLEKLAEAGERQPLREALRGWSGLERAARQRRLASVVERIEYTGHQGEASVCWRVPLMNAAPVSIPIRNRASVRPSPAPESTAAAPAGRLPRITRLLALAVRFEGLLRDGAVRDYAELARLGGVSRARITQIMSLRMLAPVIQERILALPAVCLDTDAWNERLLRGVAQRWDWREQMRMWEALEAGLRKSTEERKD

SEQ ID NO: 4653 - protein, 508 aa, unidentified
  source 1..508: note = uncultivated organism
MAIALYSRKSIERENSISCETQLEYCKSMIKPDERSEQVVTFIDNGYSGGNTDRKGFQKMMKQIEQGKISKVIVYRLDRISRSLSDFVNILNIFKEHGVEFVSSQEAFDTSSPYGDLIVKILAVFAEFERNSIIARVTQAYEHRSEMGFYMGGRKPYGYTLEPVTINNVHTKRLAPIADEIEQVKYIFKIYAVENVTLGKLLKNLVENDIKPLSGGGWTTAKLSTILKNPIYVKADNQIYDYFQRYNTQIISPPESFDGIHGLQLYGRTKHNADNTDWSDIKAVVMTHEGVIDSDIWIKCQKKLAKNKQIRNAVSNKTSWLGGKITCAKCGRTMTTIKGKTGGGKTRVYFNCTGKSHFKDCTGSKATIYAQCLEDMIYKEISKKLDDLKGSGRQKSNNISPMLNELKNKLKSIELAESKLADVITNDEVNSDLLIILNSKAGKLKKDKTDILAKINELQNKALDTKAAVNLSAKWKTASFEEKRGVCEILINKIIIDYDGNAEIIWNI

SEQ ID NO: 4654 - protein, 519 aa, unidentified
  source 1..519: note = uncultivated organism
MQLKAAIYGRVSTDRQSELSIEAQIEACERYCEQQGWDIYDHYCDFGLSATSADKRPALQRMIRDAKAQCFNVVVAHKVDRAFRNMRDYENVKYELQKHDVFMAFTDSGPVEGVQGEFFTGLMALMAQQYSMNLSREVKKTMRKNVEQGNFLGGLPPLGYKIVDRKYTVDPETAPIVQEIFRQYAKGQSMREVADYLNSKGYRTSRGGPYQVTTLHGILKNEKYIGIYVHNRNQYNRFGKRKGKKSNDDTEVIRVEGMIPAIIDIKTWKEVQARMEKNRTLGRGKSRNKRMYLLSGLISCGECGSAYAGQPTKNSRGYETVYYTCGGRKRKNGCTNKPIKRDWIEEKVIDSVALMCQALDAEKLKEDANKIIREMKRNQDQERERHEALLAQKRREETNIVGSIARMGGNKALEERLLETQKEIENLEDYLERLAPRTIPEYKADAIAEAMQHVLNDLRTGPPEARKKALQSVVEGVEVFKDRVVVKIKAGLDETSFFRSGVADHLVAEAGFEPATSGL

SEQ ID NO: 4655 - protein, 528 aa, unidentified
  source 1..528: note = uncultivated organism
MPRITVIEPTIDVVSNLPIFQKNKRRVAAYARVSTDNDEQYTSYEAQVEYYTRYIKEKEEWEYVETYADEGISGTSTKKRASFNKMIEAALNGKIDLIITKSISRFARNTLDTISKIRELKAHHVEVFFEKENIWTFDPKSELILTIMASIAQEESRSISQNVTWGKRVAFQKGKVSMAYSTFLGYRKGANGEIEIDEEQAKLVREIYRLFLFEGLTPHSIAERFNRAGIPTVTKGSKWYKNGVLSILTNEKYKGDALLQKTYVENYLDHKLVKNNGVLPKYYVENSHPAIIDRGEWDMVQAEIKRRSEIGAIYSANDIFSAKLICEDCGGFYGRKVWHSNDAYRRIVYQCNHKFDSKNQHKCQTPHLTEDEIVQKFMEVYNQVMTEREQIIDDLTEVAELLGNQEALDNKISKAKEELEVVETMVQMLIDKRTKTNELSEEEFLKQYETLEERNNKLTARINALIIEKTIQRGKKEKILASVELMQKEPGTILKWSKEAWMAMVESAIIHKDKTISFKFYCGRTIKV

SEQ ID NO: 4656 - protein, 537 aa, unidentified
  source 1..537: note = uncultivated organism
MKDKYLAIYSRKSKFTGKGESIKNQIEKCQNYLKLKYTNEYQNIKNNIKIYSDEGYTGYNINRPKFQKLLSDIEKGAVKTIIVYKLDRISRNVTDFCNLKDKFQKYNIDFISVTENFDTSTPLGNAMIMISSIFAQLERDTIAERIKDNMYELAKTGRWLGGNTPLGFNSIKKEFIDNTGKKRNIYQLEPNYDEIKIIKLLWDKMIELKGIHKLESYLIQNNIKTRNNNYFTRFSLTNIFKNPVYVIADNKSKAFFEKQGVTIYNSENINNSYGLISYNKRKEKKGKNNDIKDWIIAVGKHQGLIDSSRFIEVWTLITQNKDKRLRTPRQNESILSGIIKCKYCGSYMRKRIRKTYNKNGKRNFSYLCELKDKSRKKLCTCQNIDGIDTDKLILQKISNLKVPKELLIQKLKKYINDTKEPDKISNEMKNLKTMYQKNKIKIENLINKLADIDNDILKDVTIQIKKLKQKNKNIKIQINKLENNKNSLSVNQINDYLNIILKNKNNFNNLNLLDRRKLLRLIVTKVESDGKNIYIYY

SEQ ID NO: 4657 - protein, 614 aa, unidentified
  source 1..614: note = uncultivated organism
MSKDKIDALYCRVSTDMQREKGESIRNQKERLTQYAKDHNLNPQFYIDEGISAKDTKRPALQRLIDDIKNDRVGMVLVTKIDRMTRSLKDLIDLIMLFEDYSVAFKSLTQPIDTSTAMGRGQISLMGVFAQMEREMTSERVGEDMRHRARSGKWNGGVVPFGYMAQTQQLRLNLKAGMKREEAEQRAKVQCPINKKLYLREEEAEVLRQIFDKYLETESLRAVTHWLNTKKYASRYGGNWAANSVSRVLRSPLYIGQLVYNKRVSAKATGRLKQRPKEEWITADAEHTPIIRRDVFDRVQAIIKRQAVEPRRKKSEYLLAGLLRCGVCGARMHGYTMQKKNEKKFSYYKCCAHQQKGTSVCTGASANRYLLETAVVSAITKLFQGKQMIDLKKAHELYKKKQKINVEPLQKEKHRLEVRNEEIARKKKVLLERLEDETITSDEYKARQRELEDELERNRNAVFQCESQLNDLGIGAISFDVVLETLKDFKKIWRSANIMKKKELLDALISKVVYKDAKTPIKLELYFLDNCIGLLPQGHGFMAATKRKLAGNVIWLFALEIVMHPSSSGPRRVSSASRRNSGSSSRKRTPPCESDISPGRGDGPPPARAIAEAV

SEQ ID NO: 4658 - protein, 666 aa, unidentified
  source 1..666: note = uncultivated organism
MDEQKKTSGSLALNSTPRVITIAPSTPVRDRKLRVAAYARVSSRSEDQLNSFAAQNAHYTELITDNPEWEFVDVYADKGITGTSAEKRDDFQRLLADCRRVRVDKILVKSSSRFARNAKECLETVRELKALGVGVCFEEQGIDTSELAGEFLTAIFAMMDQKESENISDNLRWSIDMRMRAGKYNTCTAPFGYRLVKGKLELIPEQVPIIRYIYEAYLSGKTAGDIAAALNLFSKGKLWKPQRIDYILTNERYSGNAFLRKRYTTDTLPRKIKYNHGQKPMYFVEGINEAAISQEVFNKAQELRRRRGDSQVPGIAGQRPLANGWLYCGCCGKALRPKCINRKWYMACRGHEESTELCDLLPIAEEAVVSAVFHLYYKLRHQGGPILTQLLADLQNARKGKLLWSLDIVALNQKIADITRQDRLLAQLKQQGLVGPDIFISRQNELAEQLRAAKLEKERFLEAEEDQTIQQTQELIEALEAGPDFLDAFDGELFRELVDKIIVESNDRVQVRRQERTTPCKKSPAQKELRKLCGGSPPAWVERQVLGLLNRLIQHPERITCPVLEDEPPPEVKKLRRGLDELLHRPPVDEVQTRDLAFRLADLQLNAIGPEEYETLRLRRLFQGWAPMAELEQELLHQSVRRIAVSNGTVTVLLKNNQTLEGGHYT

SEQ ID NO: 4659 - protein, 596 aa, unidentified
  source 1..596: note = uncultivated organism
MEYFQSKYFLPRKEIDVLEDTEKEYKVFAYCRVSTDKTDQRNSLASQQDFFDMVREGHDNWKSFRLFSDEGISGTSLNRRDGFNEMIRLAKAGEANLILTKEVSRFSRNAKDTLNIAYELKEHNIGIYFINNRIYTGNEQGCRNLAAISSAAEDESYNISDRVKFGQRVQMKKGVTFGRREMFGYRIHKNEKKEETYEIIEEEAEVIRKIYEWFAAGDGTHRIARRLEEEGVPTFRYSNGWSNTVILRILRNEKYVGDLVQGKTYTPEMLTHKKKYQKDKAQWVKFPDHHTPIVERELWDKVQAILDEKSPSEEQKIKHSNRYWLSGKVFCGVCGGRYVSCNKKKKTCSYKSWVCFEANSRGLYREDTIDGIPRGCNSGGMINDKVFKEIVHDLITHVIKKQKEQLINDIYEKQKSSIKPKKSNKAKIKKLEDEIYKNKIRLDNLYVDKLDGTCSQEDYNRFSMRFRREIESLELELQKEKADEINEKNIEKETKDIIKNIEYLVSLEDKDCNEDLYARITKKIVVYPEHVIEVHIVGYPEPFYFHFTAKGKLDKYEVENDFLLKEEAMAIVGDKISNHVGGKVAKKPASKIKAEE

SEQ ID NO: 4660 - protein, 575 aa, unidentified
  source 1..575: note = uncultivated organism
MARNKNESTIDNRKIAVYVRKSKLTETGKSIEIQKEKCISLACAQFDAQKEDILIFEDEGKSGFYADRPQYKKMLRHIENNEIRAVVCYKIDRISRRTVDLLNLVQQMDQKGIAFVSVSDKELDTSSRTGKIMISLLSAIAEFERDIIAERITDNMYELAKEGRWLGGECPLGYYSQKEKLTIGGKKTTINHLEPIDEEQRIVKRLFDLFLQTSSLTGTAASLNNEGFKTKKGNAFTLIAVKNILQNPVYALADEDLHSYFTSLNAMISSDDNDFDGTRGIMAYNKTEQIKEIGADSTALNPKFVQKSSRRNIKEWIVAVGKHQGIISGANWIKAQNLIAEISKNNSARPKEASKALLSGLAKCGVCGSRMYVKAESGRHNPDGSLRYGYRCDVKYRKKGGCENSPNIKGQELDNFVVEQICSMGTGKNEFYDELLNTKGILLLKSQEAEKELTAAKKRLSRIELDIQSQVSNLRAAPEGIKQAIFADIQLLNKEFEEKQSIINKIYTERKSQSNQIENIEKALQIILEFPRLIESVDYEAKMQLLRKILECVIVKGDIIHLFLKGTNSDDYFIK

SEQ ID NO: 4661 - protein, 533 aa, unidentified
  source 1..533: note = uncultivated organism
MKKQIRCAIYTRKSSEEGLEQDFNSLDAQREACEAYIKSQMHEGWVLLDKQYNDGGYSGGTMERPAFKELLKDIENDEVDIVVVYKVDRLTRSLMDFSKIIDVFDRHETSFVSITQQFNTTTSMGRLTLNILLSFAQFEREVTGERIRDKISASKKKGMWMGGKVPLGYSKEDKKLVVHKEDTQKVQMLFEKYLELKSVPKLMQYLKEEEIKTKTDKYFSKGQLYHLLANKVYIGKITHKDKVYEGEHEAIICDEIFEKVQKLLYENKVDKICGVKCSSNSLLAGLIYDDLGNRMTPSHSNNHGRRYRYYISIALKNNKETGSISKIPAGEVEKFVIETTKEFLQDKKQIQNIVSEYKISKQNKLIYIAQNIQDYSEPKFIRAIIHRIVVSKNLIKITYNESSIKKVLNALANNQEVIMPDKSEELIPIVISKNIKITQPSRNDNILILNAKEYDTPEPNPYLVNAIVKSFYYHKQIQAGKTIEDLQTEEGLKDSKYIRNILNLKYISPELTEQILNGTQPEELSLQKLINLK

SEQ ID NO: 4662 - protein, 573 aa, unidentified
  source 1..573: note = uncultivated organism
MQMSELKPAVGYCRFSSNMQREESIDAQKRIITKYAEVYGYTVTDWYCDEAKSGTTTNRPEFKRLMDDIENNRIQNLIVHKLDRFSRSIRDTLDCLSVLQEHHVAFMSVAEKIDSTPAGSLMTTVIQALNEYYVQNLATEVLKGQRENAFKGWWTGGIAPLGYDIVDKRMVINEDEAKAVRLIYEMSADGYGYGQIIDRLNLLGYKTKRGQPFGKNSLHDLIRNEKYKGVYVFNLRAAKKGRNRKRNNHAYKHDEEIIRIPNGCPAIVSEDLWNRANSTLRVTGKYKTNAKQPYLLSGLLVCGECGAKMHGNLRKTPSGNQYTTYRCNVKNNRRTCSSKEIHAAPLDKFVLDMVFKNYFTEERLPVIAKQVNRQMRENILNDETLLKAKEELHTKIHIRDTLIQTIVKTGEIDAISQQIKQLEIEIKKLRQFVSNAEKGTTATITADDVRDFLQPLRERFQSAECNEQVKVILSQIIDRIVVYRDRADIYLKMQFENAQDGVKKESEEEKNIENVIPTFTPTYFQGVSVSMTDVAKRKPDYKPLRDMSALLKGRTYEMPEFDAEAVRSRYTAS

SEQ ID NO: 4663 - protein, 593 aa, unidentified
  source 1..593: note = uncultivated organism
MNENSIFAIYSRKSKYTGKGESIETQIELCRQYINAHFGEKAAENILVYEDEGFSGGNLARPEFKRMMADAQSGKFSAIVVYRLDRISRSVGDFSQLIETLNEMRISFISIREQFDTSSPMGRAMMYIASVFSQLERETIAERIRDNMQELAKTGRWLGGNTPTGYCSESMEKVTIDDKVKRAYKLKLVPEEADIIELIFKTFIETKSLTKTDAFLLRNGIKTKKGNNFTRFAIKTILMNPVYMIADEDAYLYWSQHSDALFSDKSEFDGKRGIMAYNRTIQRPGKAIKYRPISEWIISVGFHPGIVPGATWILAQELLTRNRSKQFRKPRSNVALLSGLLVCGNCGDYMRPKLTKRTNSNGEFIYTYMCSTKERSTSTRCNIKNLNGNTLDKVIIEEIKKLPRDDSDFLVQLSKTHKAIEESARSYETCLESLKKELSQCTKEMDVYLKTLTIAEGEAAGKHIIDKINELDKRLQSIRVRIDEMTQLAQSHALSQMEFDLIKDLLARFQVTIDDMSVEEKRSILRTFIKRIVWDGKRISLFLFGSDDGIRPDAPFHTNNGFNKSTKIEPNKEKVFDTSADVPLCEHSIFNTP

SEQ ID NO: 4664 - protein, 562 aa, unidentified
  source 1..562: note = uncultivated organism
MNTILNTDVYDADLYLRLSREDEDKEESDSIINQKELILEFLKSRKDIRIHAIRIDDGYSGVNFERPAFQEMLKDIKNGTVNCVITKDLSRFGRNHIEVGKYIEKIFPYLGVRFIAINDNYDSLSKDSQSNIIVPFKNLINDAYSRDISMKTRSSLEVKRRRGDFVGAFAPYGYCKSESDKNRLEIDEEAAEVVRYIFRLYLQGNNAYGIADLLNRENILTPMDYKKERGSAYYTGFKKEIKGRWSHSSVLRILSNPVYIGALIQGKVTTPNYKIKKRTNKDQSRWSKVEKVHEAIISDIDFQNVQAALKLDTRTAKDKEKVYCLSGVVRCRECGANMVRKTVPDGGKKFVYYVCGSHKANKMVCSSHCINADMLEDNVLKVLNSQIENVADLEAVMRQVENSRRESGELERKNRQICRLEEETQKYCQLRLELYEDFKAELLTKEEYLELKAVYAERIKSLKKALEKLEEDAQKLNQSYSDNEWMKEFQKFGRLNELTREAVVSLIKKIYIYEKQEGENYPRIEVCFKYAEEFQVSLDLIESMQHQDSIEKEGDEAHGEDE

SEQ ID NO: 4665 - protein, 561 aa, unidentified
  source 1..561: note = uncultivated organism
MITKKIYHAAIYVRLSKEDGDVKDAAKAESNSISNQKNLIKDFLKDKEDIGVVSERVDDGYSGSNFERPAFQMMLEDIKKGIVDCVIVKDLSRFGREYIDSGRYIERLFPALGVRFIAVNDNYDSLEGKDQSDEIIIPFKNLINDAYCRDISIKIRSHLEVKRKNGEYIGSFTSYGYQKSGDDYHKIVIDPYAAGVVRDIFKMKLHGMSQDGIAKRLNEAGILPPAEYKASTGSSYRTGFQTKEKSEWTSVMVRRILTNEVYIGNLVQGKRTTPNHKVKKTVLKEECDWVRIEKNHEPVVGDREFEIVQRLLSMDTRTAPEQEGVYPLSGLAVCGDCGMPMVRKTSTVSGKTYAYYVCSTHKAEKKCSPHRIAADKLEETVLSLLQQHISNILELKRILSFIGTVPFQQIDLKKLEERRAKKEAEAERCAELRTTLYEDMKDGMISKEDYRELHAAYEARRKNARIAIRQIDMEMEKVLERKNDGSAWLDYFTEHQNIRGLDRFVAVSLIREVRVMDKKNIEITFDFADCYREVLESLVSAGHEVSLDESGKLNIRTKEAV

SEQ ID NO: 4666 - protein, 525 aa, unidentified
  source 1..525: note = uncultivated organism
MAKKITRIPATKALYTNAPLAEARKKKVCGYARVSTDHEEQQSSYEAQLDYYTNYIQAHEDWEFVGMYADEARSGVTTKRRDGFKKMVDDGLSGEFDLIITKSVSRFARNTVDSLTTIRKLKEKGVEVYFEKENIWTLDAKGELLITIMSSLAQEESRSISENTTWGRRKQMADGKVSFNYHWFLGYDKGEDGNLVINEEQAETVREIYKLYLAGLTCTAIAKELERQGRTSPANKHWHDGTVKSILTNEKYKGDALLQKYYTVDFLRKKMVKNDGTVPQYYVEDHHPPIVSAEVFERVQREIERRKNLPHDYRGGSIFASKLVCGECGCFYGSKVWHSNDKYRKIVWQCNGKYYRPTKCKTAHLKEDEIKEYFMKAVAALWKDRETYIEDIEILKEDATKLDSIKEQMRKAKAELKQIAEAVENTIYDNAHKAQDQGEYQKGYEELVGKYEAKQSEYEALEKKLDDTKAKAEAIDDFIETLKKMQTPTKEFNMWLWGSMVENMTINLNGSVTFNMKSGMKITVK

SEQ ID NO: 4667 - protein, 660 aa, unidentified
  source 1..660: note = uncultivated organism
MYNTKEGKSCVIYIRVSSERQVKGYSLDGQKHYLAECAERRGMTVLDIYVEEGKSGKSIEGRTEFQRMLDDIQSGKVHTDYVLVFKLSRFGRNARDVLNSLEFIMKYGVHLMCVEDGLDSSTSMGKMMITILGAVAELERENIIAQSLLGREEKAKSGGWNGGFAPYGYRLVKGDDKSKGKLETVLEEKAVVQLVFDMFLNRNMGYTAISGYLNRNGYTRPPAKNAIRPSYGEWSSDHIKRMLSNPVYTGRVAWGKRRTEKVPGSDNEYRLVKQDEYILSEVISHEEFVSKEDFDKVQEIKAIRGKKGNHNIGQYNAHLLSGIVKCPQCGAPMYIGMTKWTNQDGTERRTESYVCSYATKHRGTSVCRRNGVVASQVEDEVMEYTRKIVRNPQFIKDLQEKVMTAVDMTEVENDITAYKNQLSALQRSRDSLERDIDRIAPDDKYAERRRADMTRRLNDLYDQIYKAEDLLQESLMKKATLESEQMSVQSMIGILSSFDAIYDRMNAAERRDLVKYLISEVELFPREEQKTQKRFVKAIAYKFPIEQKVLTQFDECGASVETVCQLVLRKPAVHINIDVDVEELVQDKRGTATYGQIKDYVLEHSGLKVSSLYIAQVKQKYGIIERENYNKTKSENVKQPQCPPEKEKAITEALKHFGMI

SEQ ID NO: 4668 - protein, 559 aa, unidentified
  source 1..559: note = uncultivated organism
MTEVKIIKAKTSEDNTSLNKEKKKVCGYARVSTDSDEQITSYKSQIQHYTKIIKDNTDWIFVGMYADEGISGTQVKNRVQFKKMIKDAKEGKIDMIIAKSISRFARNTMDTLKYVRELRDKKVDVYFEKENIHTLNLDSEMFLTLYSAFAQAESESTSQNVKMGLKAKMKQGGYCGQANPFGYNWNKKLKKLEINEKEAPTIKLIFELYEKGLGCKRIAEKLNELGLKPRVADKWDSKKISRVIKNEKYVGDLLGQKYYVDDPMTHKKKKNFGEKEQYYASDVHEPIISRDLWNKCQEIYKKRSKKYAKEQGHTTKYSMKYPFSSKIECGCCNGSYTRRLGGKSGKENKRVAYWRCSNIVYNKKNCQAKDSIREVYLKDMFKCLFNKLALHKYNKNHLKDIIKDVLNDKDNENILKNLYEEKNKYEERLSHLIDLKLDNFDNVKVYESKEKEINRLLKEINKKIEKQLKEANKGNKIEKQLLEIEKILDMNISIEEFDEDLFKLLIKKIVIGDYNENGLFNPNSVKFILNIDEENLIFKRNKNVSYCDEDITSGTAILS

SEQ ID NO: 4669 - protein, 559 aa, unidentified
  source 1..559: note = uncultivated organism
MNNISAHERAALYVRVSTRYQVDKDSLPFQKKKLKEYCKLLNISDYEIFEDDGYSAKNTDRPKFQEMMHKVRSGHFTKLIVYKVDRVSRNLLDFASMYKELKDNHVAFISMNEQFDTSTAIGEAMLKIILIFAELERNMTSERVTSIMLNRAEEGLWNGARMPIGYKWDDNIKFPVPDENEAKLVQYIFDEYERTHSCSKVLRNIVSQGIKGKRGGKWTSKLINDVIRNPFYIGTYRYNMRESARGRLKPQSEWIIKENNHTPIISKEQFERCNRIMDSNGSHNTAKFRHTVHVHIFSNKLKCAYCGSGFNACKDRARANGYRPSVYRCNRRAALLDCPSKTISDTVLGEFVFNYIANLITAQKNFTRDIKAFKASLLSGNQFNGLHINRVDLEKTYNIMHSTGSHMIKNIMTDNIPADDNDNSFQLDIYIQQKNKYKKAIERLTDLYIYDPESMSKSQFTVKRKELQDNIKLIDNKIAELSNTYPVTSASDMSFVKKASAFLVSRQLIGGHIDFVNLAMNIDNNILKDFINQTIDYVLVKDGHVAAIRFINGLEHNFE

SEQ ID NO: 4670 - protein, 543 aa, unidentified
  source 1..543: note = uncultivated organism
MGEIRCAVYTRKSTDEGLEKEFNTLEAQREASENFIKSQKHQGWVLIDEHYDDGGFSGGNMKRPALERLMHDVEAGKVDMIVVYKIDRLTRSLTDFAKMVDIFDKYHCSFVSVTQNFNTADSMGRLTLNMLLSFAQFEREIGAERVRDKVAASKKKGIWMGGGIPYGYQVINRKLIIKPEEAQEIKFMFESYLQYKSAQTVSRLMEEQGYKKLARTAIVRMLKNPIYMGKIKHKDQLYDGQHEGIVSEEVFNAAQQVCETRPSTQRACLYKNNEVGIMRGLLTCGCCHCSMTPTACKTRGVKRYYYTSTAAKLHGYHKCTNGAVPLAAMDECMIKIVSQLFQDPKVFQALIERVAPNKTMELLRVLRTPEKVFYKLADRYKLLLMRLLITGVTVNCETMEINWTDLGLSLLPENLLQNSTGHQTVLPMPFIKHKGKTEIHLPENISADPHYDSELINGISMGFKYQKMIDQSRKSIAEIALKENVDAGNISRLLKLTSLSPAIIRTILKGHQPPTLCLRRLMRSDIPPIWAEQHEKYGFTILD

SEQ ID NO: 4671 - protein, 544 aa, unidentified
  source 1..544: note = uncultivated organism
MKETLYIYARVSTQVQRDEGTGLEEQKKLGAEKAKSLNMDFVILDEGSASGSHDDIDKRPVLSNLMSLIRSGEVKHLYVYNQDRLARNSLVSAIINHDITQNGVTVHTQFGTYTDSPQDSLMMDMVGVFAKYENKIRNARLKSGRFARAKEGKWVLGATPFGFKVGKTKKLEVDKVQSVYVEKMFEWFDKGIGIYEIANKLDGKVRTNRNNIIWKAASVRNILSNTHSKGFYTYLGLTVNCPPIVSPQLWDSVNERLEGKGRSKRQSNTRKHDYILRPIMKCGDCGENMVGESSKRRGEYRFSYVCGSRQKSYRNKTNTGNWERGKNCVNAVSIETGRFEEIVWETLSNILKTSHQEKEKFKQLSLSSKKSGASRDKEEKKLYTEMVQISNTIKRLDKAIIVNEKDKVLTPNKAKQLAKLNDELEVQKNLELQKLQKTENLLSGLRNDDVWVDWVKDYGKKVKNLDKLDRDARNAEILKYVDKILVSFNENKRTHNLNIKLKLPIIDDTLKYEGMDKKKGYKLGDGSDVAAVDIQSHTKKLGKR

SEQ ID NO: 4672 - protein, 614 aa, unidentified
  source 1..614: note = uncultivated organism
MTERPVELQAVFDRLGPVLLAQAHQLLVPERRGPRSSSSRQPGKDPCDADRRDLRPGLLRPAKEQQTIQSQTAALLAHAAEQGLDVPPEWVFEDEGYSGATLYRPALERLRDLVCQVPVEVVLCYAPDRLARKYAYQALLVEELARAGTEVVFLNGPTGDRPEDALLVQFQGMIAEYEKAQIIERTRRGKAHRARSGVVNVLSGAPYGYRYVRKSDHAQARYEPVEPQDSVVRELFRRYTEDGLSIADLARWLTAQQIPTATGKARWDRSTVWGMLRNPAYAGRAAFAKTLRTDQPARLTRPARLQGRRTSRNPLILDRPAAQWVEIPVPALVSEETFQLAARRLADNQRFAARNTKVPSLLQGLAACEGCGYAYYRTSTRTSARKLYYYRCLGSDDYRYPGGRRCANLPVRADYLDQVVWDHVTRLLADPALVCGELDRRLAELRAANPATATRARLEREQARTATATARLLEAYQEQLLSLDELRNRMPALRAKQQTLHAQLDTLDAQLVDQQTTLTLAENLEGFLGRLRDTATTASIPERQRVLRLLVKEVLIGPDRVVVRHRIPVTSPEPAPGYLLRGRSRHTALRAAAERRVPRPVLQVPGLEHALQQP

SEQ ID NO: 4673 - protein, 637 aa, unidentified
  source 1..637: note = uncultivated organism
MSAASRPDPPLAGSYAGAAGSLVRVSALAADHDPSSPANQRRLNHQAAARDGVRILPEFEFEEVVSARKDVERPLLERALKALLEGRIKTLYVNRLDRLSRRGMAHVGMILDELEKVGGRIVFVGEGLDTSKAGTRQILAILSEQARAEADNIAWRMEQWHAGNRRQGLWLKKRPYGYRVVDGRLHPDPVEAAVVRRIVEEFLAGGSLRGIATGLNRDGIECPNAVKHDEARLAGRRVRALATRRWSYHTVRAVLLGPSLAALMSHKGQLVRDDNGDPISAGTGIITLTERARIMAEFERRGLTVRNAKDPERIGKRTGAGRPPKYLLTGFVRCPHCIGAMSRHVGRHGRDPAPIYRCARNGRGHQCPGVSVLAADLEREVERRFLTKLAALEPGDPLLERIAERWLALVVPDDHAGRAILAEKVRDAEARLGDLYDARYARGEFSSAEDVARYEAIRQRLAEQRDAARDALAKLGPPPTLDLAGLLDTELSSKAWPHLPLQRKRTLLGLAVSRVYVLPSRGRGWHALPAEDRVHPVWIGEPDPFVDGTWLANGSADEAPGDGLGLTPRELGVLRLLAEGRSNRQIAGELFISAKTVTVHVSHILAKLGVSSRVEAAALAHRLALFDDAGPPAGPAG

SEQ ID NO: 4674 - protein, 532 aa, unidentified
  source 1..532: note = uncultivated organism
MRNGRRTSLSPVEDTAPAAPARTVRCAIYTRKSTDEGLEQEFNSLDAQRESAEAYILSQRGEGLVALPEHYDDGGFSGGNLDRPALKRLLADIEAGAVQCVVVYKVDRLSRSLMDFARIIGTFEKYSVSFVSVTQQFNTTNSLGRLTLNILLSFAQFEREIIAERTRDKMSAARRKGKWTGGHPVLGYDIDARGGRLVVNPEEARQVRAIFELYLDFQALVPVVREIDRRGWRTKRWLAQTGKTRGGQASTTGMLFRLPTTAIYTGKVDFKGQIYEGEHEGIIEARMWERVQAILQRNGRNGGAEVRNNYGALIKGIIQCAACDAGMIHTYTVKGPRRYRYYVCVKAQQKGWANCETKSVSAPAIEAAVVAQIRRIGSDPRIVREALNRVEAQRRSRIVDLSIERDLAQKELAACGAEIRSLAPLVGSQNLTVTDRLADLQARLTRSEGRRAEIDREIAGLECGGVDEEDFRAALKEFGPVWESLNSREQARIIHALLERVAYDGRSNKVTLSFRSAGIREMCRGREGGSES

SEQ ID NO: 4675 - protein, 526 aa, unidentified
  source 1..526: note = uncultivated organism
MARNSAPRSPANCSTGSPEKKVLRCAIYTRKSTEEGLQQEFNSLDAQREAGEAFIVSQKQEGWQVVTDQFDDGGYTGGNMDRPALKRLLAAVESRSVDCVVVYKVDRLSRSLMDFARIIEVFDQNGVSFVSVTQQFNTTTSIGRLTLNILLSFAQFEREIISERTRDKMSAARRKGKWIGGHPVLGYDIDPKGGRIVVNPEEAEQVRTLFCLYLELGSLLPVLQEAERRRLLTKRWTTEDGKVRGGQRISKGTMHGILTNVIYTGMVDHKGTLYPGEHERIIDQNTWDRTHETLRRNNGDNGASLRNKFGALLRGLLFCVPCGTPMMHTYTMRKSKRYRYYVCYNAQQQGWKNCETKSVPAQAIESAVLDSIRRIGTDPKLAEAVATEALNQVARRRQEIDKESESLRRSLRQLNQNLAREAADTRVDSGGRFERMATLQREIETMERRLAELTSERRDRDREHVNADDLRRTLAEFDAIWSSMTTKEQEQMIHLLVTKVGYDGRTGKVTVNFSNAGAKELCQGKC

SEQ ID NO: 4676 - protein, 544 aa, unidentified
  source 1..544: note = uncultivated organism
MPQKIYKTGIYARLSREDADRMESNSIQSQRAICLAYIEGHDDLELVDTYIDDGETGSNTDRPGFQRMIQDMRSGRIDCAVSKDLSRFSRNYIDAGNYLEKIFPAMGIRYIAINDNYDSMAPGSSTDVITLPFKNLVNDIYCRDISIKIRTSLEVKRKKGEYVGSFVPFGYRKAPQDKNRLLVDDDAAEVVSMIFGMYKDGFPILKIARRLNTSGIPTPMEYKRMQGVRFETAFRTKERPEWEYVTVKRILSNIVYTGVLIQGRRGTPNHKVRVTRPREETDWVRVENAHEPIISCTDFEAVAELMRRDMRCAGDSDKHDLFSGYLFCGDCEGAMIRKTHKAKGKAYVYYNCGNNKRTHQCSPHSFSEAKLADIVFHAIHDQIEVVLHLDKVLCFIDSLPQRDRRVFSYEAQMARLEEEIQRYKKLELGLYENFVEGIINKAEYTDFRENYRGLIEEKQEALKRLKREQQDAAAMGSQNRAWVQVFAQYENVQELDRRLLLALVDRILIYEDKKVEIVFRYRDEFARAMETAKNYKDRPLPAVG

SEQ ID NO: 4677 - protein, 527 aa, unidentified
  source 1..527: note = uncultivated organism
MVAIYTRQSVERADSISVEQQAQLCRDALTARELETCKVYTDKGFSGKNIDRPALQQLLADAESGQIDKILVYRLDRISRSVHDFTGLCARLSAQKIHFQSVTEGITLDDTPSGTVMAQIMMVFAQFERETIQRRVTDNYFARAKTGMYLGGRPPFGFDKGETIVGGKRTACYVPNPAQAALMTGLFERYLHEGETLGSLVRRLNANGHRTARGGSWSTLPLGRLLRNPAFVQADAAVYRYLQSRGATMNDPVEAYDQRHGCYCYAPLASAAPGQRPTRRKFTDLHGSFITLAPHEGLVDAALWLDVQHKLDQNRALKNSGSGSHSWLSGLMKCKKCGYAITVVNKPGGMRGHYINCGGHKRGNAICPGRSRVITLEQIEDAVQAQLLGFLKSYRSVEIQAKQHRSAAVNQIEMQISRLEQQIAQLTQNLAHIQEPDVIHIVAAQIHEANSRLEDCRAQRDRLLYQGQPADLEPYFAAVLEEWPDYTIQEKKVIAKAVIERVDVDDDTIDVVFRADCGPGAPQSCGQ

SEQ ID NO: 4678 - protein, 606 aa, unidentified
  source 1..606: note = uncultivated organism
METKTKQPNKNPRAALYLRVSTTEQAKEDHYGIPIQEEKCKAYCGLLDYSYDEASIYKDEGVSGALPVEERPALNRLLQDARDGKIDVVVVKALDRLSRNLRILLNVIHELEGLDVKLVSVLEQFNTTTAMGKSQVNMMGTFAQWERDTITERMQGGRKRAAQDGKWVWGSPPYGYRLKGEKKKKLVIYKEEAKWVQSFFSWLVDEKLSLTGIQKRANELKVPCYALRERRRKENTGYWQKSSIARILCNPIYTGSDEFYRYKRGKKRLSVLLGDEIQQHDESQWVSFTTEQVVTKKQFESAKQQLLKNRNMASRNLKSVYLFNKLLYCGICGLKMFAGNNKPKTPEQKTFRFYHGGRDPKWKSDHVVNSTRCKSCGDIGEVRLESIWDTIEQLLTNPTYMMSKLRDYDVSVPVENAKTKIDELDKRLKAIQQRKKRVSQVYEESNTMDYATFQKKMDECKKDEEKAKNEVALLNQKLLRKDEVRVSEQHFENLFKELKTNVVSATYEEKSEVIHLLVDKIFIYKRKELAEVRLNVPVSASSDTRRSSNYIETDEELNTNSSETVDIKDDGLRTHRPYSMDTKRGAENLLSTHRFCRFTPTWQSAC

SEQ ID NO: 4679 - protein, 518 aa, unidentified
  source 1..518: note = uncultivated organism
MANVTVIPARRRRMQTDEAQKIPKIKVAAYCRVSTDSDEQSTSYEMQVEHYTEYITKNPEWELVDIYADDGISGTNTKKREEFNRMIEDCMAGKIDMIITKSISRFARNTLDCLQYIRKLKDKNISVFFEKENINTMDTKGELLLTIMASLAQQESQSLSQNVKMGIQFRYQAGKVQVNHNRFLGYTKDEDGNLIIEPKEAETIKRIYREYLEGASLKDICESLMADGILTGAGKKNWIPSTVHKILTNEKYIGDALLQKTVTTDFLEKKRQINNGLAPQYYVEGSHEPIIPKHIFMRVQEELVRRANLRSGKDGRKKRVYSSKYALSSICICEKCGDVYRRIAWNNRGKKSTVWRCCTRVEHGPGVCDAPTIPEEALQAAVMNAINEVLGRKSEVIKNMEKLLEQTVSTDYDEQIADIEARMKELQLKLVSVGVSDEETAAHSNDIIKLREEKTQIELLIAEDKGRQMKKKELIDFLNEQTTEYVEFDDGLVRRLIEQITVHRDGSLTVEFKSGTIV

SEQ ID NO: 4680 - protein, 529 aa, unidentified
  source 1..529: note = uncultivated organism
MKNRSASAVRCAIYTRVSTDQGLDQDFNSLDAQSDASQAYIRSQAHAGWALLKTKYDDGGFSGGNTDRPALQRLLEDVRAGKVDVIVVYKVDRLTRSLADFAKLVELFDKQNVSFVSVTQQFNTTTSMGRLTLNVLLSFAQFEREVTSERIRDKIAASKRKGLWVGGMAPLGYDTKDRRISVNKAEAERVRDIFRSYLKLGSINLLMRNLRHRGIVTKPRKLKTGQTVGGIAFTRGPLAHLLRNRFYIGEVAFKGEILAGEQPATIDRDLFEAVQSKLDEQLNNHNVTRTSSEALLIGRIFDDRGNRMSPSHAQKRGIKYRYYLSSALLQGEAERAGSVRRVPAVEIEALVIRSVREELKLTESVDDPSLVNTYIIRVEIQPEQLVIQLAPIQKSKRQTKGEGRILHVPWHKTPSTRHRELLLPRGVQPEHARANRSETRATLVASIARGRRWLSELIADPTSDAGSIANREGCSLRKINMTISLAFLAPDLVKAAIEGRLPRGMGVARLCDMPAEWSRQYQTLGLSSQ

SEQ ID NO: 4681 - protein, 550 aa, unidentified
  source 1..550: note = uncultivated organism
MNTKKLRCAIYTRKSTEEGLDQDFNSLQAQRESCAAYVMSQTHEGWNALETLYDDGGFSGGNMERPGLQQLMTDIEAGQIDIVVVYKVDRLTRSLADFAKLVEVFDKHSVSFVSVTQAFNTTSSMGRLTLNVLLSFAQFEREVTAERIRDKFQASKEKGMWMGGRPILGYDVKDRKLIPNPDEIDNARYIFETYLEIGSAMALKRRLNLEGIVSKRWVTQKGKQAGGKPFTRGSLYGLLSNPIYIGKIRHKDKTYDGQHEAILDKGLWDRVQALLAKNRIVDLNRTRAKSPSLLAGILFHEDRRPFKPSHSNKNGVKRRYYQHPSCTLPSNEIESVVLSEIKHLLSSSSKVAEILNIKDQERLKTLLTSAKLRMTELEATPRPMAFKATLKKVIVSADQLQLHICPDKFIAFLSSDQEADLTDSASDRARHIITLQTQLKRCGHGKKLIVRSDSSTDATSVDTSLIKLIGRAHMWFDQMKTGLSFKEIAEKEKVDERLVARTIRCTFLAPDITSAILRGQEPSDLSGQKLLRLPNLPAAWDEQRELLGFT

SEQ ID NO: 4682 - protein, 609 aa, unidentified
  source 1..609: note = uncultivated organism
MPERSLRCAVYTRKSSEEGLEQAFNSLDAQREAGLDYIKSQKHQGWAAVPSHYDDGGYSGGSMDRPALQRLLADIQSRRIDVVVVYKVDRLSRSLADFARLMQTFDEHQVSFVSVTQQFNTTSSMGRLTLNMLLSFAQFEREVTGERIRDKIAATKRRGIWVGGVPPIGYRLPRGGDEGHISGDRTLKVVEHEAAIVRFIFKGYVETGSLVALAKRLHDVGHTTKRWRSAHGKPHGGRRLTTSQVYRILTNPIYLGKITHTRVGKTEVYDAEHTPIVPRTLWDEVHTRMERIERETRHRWTHTHLLKGKIRTCEDFAMSPGSVQKVAKRNDASVGSKAIGYYTSQKALKQGYASCPVKSINAGYLDDLVRAIVMDHVMKATSVNLRSLANDQRDHWIRQVIERVVLAPDLLAVEIKPEEVKRVAKESDVPGTSAGLRARDRKCRGGRANQVATAGSDIPACPFQVQVDDSGSRTKLLVGIQLKRVDGRRVIVSPSGDDLTLKFRADASPAARQYIIRAVGRAFAWHHEMFRHGTRAVDIARRVKLTKSRIGQLLALTQLCPGLLAQIFRSELSPNVSLDDLLCAAKHLNWDEQQRMLKLACGPLANPIQ

SEQ ID NO: 4683 - protein, 519 aa, unidentified
  source 1..519: note = uncultivated organism
MAQLARVTALGYIRRSVIKVGQRTDSPGKQRANIERICEEKGWQVEWYEDAAEGKHFSGRSEEHRPAWQELKRQLTRSDVAAVVVNSLDRASRSPKDFFNFLDEVEKHDVALVSCKEQFDTTTPMGRAFLGILMVVASLESDMASERISSTIEYRKNKGLHWGNTPYGYEKLEDGTMVESEDAPTIREIYEMYASGRWSYYAIAKHLNGQGIRMTNRYDERKPFDKKNIRIFIQSHWLYRGWIVPNGRHGEYSFEHDETNPPEGAISGQFPPLVSEELAMDVARALKVRQNMAPKRRPDHVYLLTPILHCAQCGESLRGKPTRDAYYYAHSKQTCLRGYGNIPEEPLDQQMIDMLRNFRIPDDWRAALQQKLQERIDAIQSPAQRQVTEDVTRLQRSLERLREVYVYGDIEPEEYQRQRDALHEQLAALQFQQVQPPYDIDELLQRLETIGARIALAERNKQKQLIEALFTRLETKKNDAGDWIISSAVVRPIFADFFVDLKKVRQSVPPREFESLSQP

SEQ ID NO: 4684 - protein, 566 aa, unidentified
  source 1..566: note = uncultivated organism
MKAKEMYYAAIYLRLSRDDEDSKTSGNANVSGMKKTESNSISSQRDLLRSFIRKHNDMQIYDIYVDDGYSGANFERPEFQRMMKDIEAGNVDCVIVKDLSRLGRDYIEAGRLIQKTFPAFGVRFIAVTDNFDSLTADKNDTSLVIPVKNFINDSYCRDISQKVKSSQKIKRENGEFIGAFVVYGYRKDKLNKNRLVPDDYAAGIVKSIFLWKIEGMSTTGIADKLNDSGILSPMEYKRIHGENYSTSFATGKRTKWSAVAVKRILTNEIYLGTMVQGREERISYKVKKAVKKPEDEWIRVEATHEAIISKEDFEMVKKLLTVDTRAAQGKERAHIFAGLLYCGDCGELMIRRVNRYKGKEKVYFICQTKHRGEGCSRHGIEEEVLSEIVLQSVKTNVGLYLEKCEQLSYLEQKDICFEEVAMFDKEIALLHKEKEKYLTLLGSLYEDLKEGLITEKDFKNLSNIYEENYQEAEVDLKKQEDMIKELFKSGIAAGVNLEKFKQALSMTEIDRNILMSFIFRINVYEDKKVEITLRFQERLSKLLLLSHFQEDRERLHKQPLSSREVV

SEQ ID NO: 4685 - protein, 559 aa, unidentified
  source 1..559: note = uncultivated organism
MAVRVIPAMPRVDGSSALRTDGTLLRVAAYARVSTEFEEQESSYEAQCTHYEAYIRNREGWTLAGIYADEGLSATSTKKREQFNKMIADCEAGRVDMVITKSISRFARNTLDCLQNVRKLKALGIPIIFEKENIDTMGASGELFLTIMASLAQQESASISQNTRMGCQYNFQQGRPMLNQSRFLGYTKNRGDMKLTIVPEEAEIVRSIFRMYLEGYSVGDIVRTLEEKRVKTPGGKTKWCHSTINSMLQNEKYMGDLLLQKSYVADFLTKRREKNNGVLPQYYVENAHDPIVPKEVFYRVQGEFERRRETTTVSDRKTVNDRKYALSGKLYCGECGKKLGRCTGTERYPHAVWRCREKGCCTAIREEDLKQAVVTAFNRVSDCHEELVRMQERLEWGEMNRLSTEISDVDVRSAELEQALSMYASNGELDPHLVYLYGDGTDNVEAAIEGIQVEKENLACMKLELLTQKGELAMKEAQIRSLIRLMDAVERRRHVKSMDPDPACPTLEDFYDRTDDISVYGPVRKYDKRLVRRFIARVEVGTERLVVWFKAGVSVEVEI

SEQ ID NO: 4686 - protein, 574 aa, unidentified
  source 1..574: note = uncultivated organism
MAIKGSCSGGVEQRCAIYTRKSTAAGLEQEFNSLETQREVCGAYIKCQAHRNWIELSRHYDDGGFSGGSLERPALRKLIDDIEAGRVDIVVVYKIDRLSRSLADFVRLIDTLDKFGVSFVSVTQTFDTSDSMGRLVLNILLTFAQFERELASDRTRDKKAALMRRGLYVGGTPPFGYTLAPGGRLVIDPERAQLVREMFDRFPAVPANQLSREFRARGCHTRRFITKSGRERGGWPIYTSRILAILMNPIYVGFIVHRGEWIKADIEPLTSRAQWELVQEVRRTRFPAKRDPVRNFMLGILHDEQGRRMRIHGASGRSRGNRYYKSEYTSWSRDGVTRRVMVDADRTEQLVVAALGAFLVNRLQLKEAVLSQGLYSDQIRGLLRMGGKAAKRLVAMDPQQLRALLLALVPRAEVNTSELILYISCHELSRFLAWDGVGLFDRSAIRPRQSADRVHAVHAPACLICGHPRFALPVDPCATQGSAPKPWLVQMLNQAAELRSFMLANRSKSISELAREKRMGPSTFARMLRVNYLAPDIQAAIVDGTQPEHLTCWHLLKGPLPLDWEQQRRLLGFV

SEQ ID NO: 4687 - protein, 519 aa, unidentified
  source 1..519: note = uncultivated organism
MSHKHNEKPEDRKSYRCAIYTRKSTEEGLEQEFNSLDAQREAGELYIKSQKHEGWDCLDTKYDDGGFTGANMERPGLRRMLVDITAGKIDCVVVYKVDRLSRSLLDFAKIIEIFDRYQVTFVSVTQSFNTASSMGRLTLNVLLSFAQFERDMISERTRDKMRAARRKGRWIGGKPILGYNVENTKLVVEPLESLRVQQIFDLYLELKSTLQVSKVLNERRWRMKEWTTKKGKTIGGGEFNKNTVTAVLTNATYIGMIEYEGQLHPGLQEAIIKRDVFDRVQEILKQNSRMKNDLKQCKHNALLQGLLRCAACNCGMSHSYSKKGSTLYRYYVCHKAQKQGWAICPSPSLPAAEIEGFVVEQIRRVGQDPVVVRDTLAQSRVQTQTTVERLKKEKNALERAILGHYERLNKVIAEGAKESAFADIQDQIRDKEQRVYEIVDELTAVSSLLIDESGVRAALGQFDEVWSALTPAERAKALRQIVDSIQYDGHSKDLSITYHPIGIRTFSQEQQSKEGATTC

SEQ ID NO: 4688 - protein, 509 aa, unidentified
  source 1..509: note = uncultivated organism
MICIYARQSIDKKDSISIESQIESCKLHISALRIAEETKIFIDKGYSGKNLSRPDFGRMMGDIENKLVSTVIVYKLDRISRSLLDFAQIIEMFKKQNIDFVSTQEKFDTSTPMGNAMLSIIMVFAQLERETIQLRIRDNYYARGKMGMYLGGPAPFGYKKVNASLNGKKTYRLEADENACGTLSYIYQQYANTEKSLGKIVKELNDKNIPSPSGAAWDSSKLSRIMKNPAYVKADADIHSYYKSKRCIISNDISDFTGENGCYLYGKRQSNERKYTDVSDHTLSIALHKGLVSSDVFLRCQRKLDSNKQIKRSGASTRSWLSGLTKCPYCGYAMTILNSHKDVCVFVCSGRKNHVPCEREVLSFHVGVIEKNTEKYLLNALSAIKDKKLISTGQPKADNELKIKLLQTEEKIANLVEQIADGNEVVGKYLNDKILELDKEKLSIIEKMQKQKKETVEPTKIFSYLAMINNWSELPMEVKKEIAKVFIERINFYDDKIQVLFKERLKDMQ

SEQ ID NO: 4689 - protein, 518 aa, unidentified
  source 1..518: note = uncultivated organism
MSNDKTPPTIRCAIYTRKSTEEGLEQDFNSLDAQRESAENYIASQKGQGWQCLSDHYDDGGFTGGNMDRPAIGRLLADIDAGRIDCVVVYKVDRLSRSLMDFAKILERFENKNVSFVSVTQQFNTTTSMGRLTLNILLSFAQFEREVISERTRDKIAMARKRGKYTGGRPVLGYDIVPEGGKIIINETEAEQVRTIFGLYLKHGSMLPVVEQLDRLGWQTKTWITRKGKVHQGHLFNKNSVHSLLTNPLYIGLVRYDGQNYDGEHEAIVTTETFDDVQRILAENHRLPSPTRFGKYGGLLKGILRCKACNSGMSHSFSKKKDKRYRYYVCQNAISRGWKNCPHPSLPAHEIEQFVINEIRTIGLDKNLIDKIVSHSRESVKDDTAEHRKRLTLLRKELTSYNAQLKPMLAMPNQDENQFASLQERIVITERDITTTINRLKELQNNVLSTADIRTACKQFDPLWDTLTNKEQWRMLGLLLERVEFDAEAESINITFAPGGVKNLNRQSNETSLQEATT

SEQ ID NO: 4690 - protein, 594 aa, unidentified
  source 1..594: note = uncultivated organism
MARYGEEIMKVALYTRVSTEDQAREGFSLEVQKNFLLQYAKSFGWEVFCSIPGREIYEDDGYSGYITDRPALQKLLFDARHKKFDLLMVYKQDRLSRKLKSLLEMLEELESLEIGFKSATEPFDTTSSAGKFSLQMLGSCAEFERNRLIERVFPGMIMGVKKGHWQGSRYAPFGYIHNKESKKLEVNPKEANMVREIFAMYRNGKSTSQIAAHYYDLGIPSRQGGKFYTKFISDILKNKVYLGTLIWNRKHYDMKQKTKNGEGKGYKYVNNDPSKIIEVPNAHEAIISQQEFDEVQRLLKRNRTTNIIRFKNNVYHLSGVLKCNECGRPYRGHMSTVNHRTKDKRAWYHCSSKEQYYTKCSNKSVTADAINKQVWEIIDTIAKNLHILEELGDAIKLSATEPEQCYIEQLEEKEKLLHRNLEKQKGLYEVYREDKINIDIYKEKAELLSNEEKKLKADIKAIQLKILEKRNAVNLTYATQDFLLRLRNTPPSEPSDYMIKSFMRIIFKGICIYNQEIVKVDINQPWKMCYEEGLKWLKQAKIEPKPEKKARRSYVSFCVPSADRWFRSHRTILPFLEEIYQDKLAELTSYVPRG

SEQ ID NO: 4691 - protein, 502 aa, unidentified
  source 1..502: note = uncultivated organism
MYDAIYARQSIEKADSISIESQIDFCHYEARGNKYKKYIDKGFSGKNTNRPAFEKMISDIKSGLIKRVIVYKLDRISRSILDFSNMMEIFQQYHVEFISSTEKFDTSTPIGRAMLNICIVFAQLERETIQKRISDAYYSRSKKGFYMGGQIPYGFSLKETVIKGVKTSKYVPIEKEIEQIKTMYSIYSQPNKTLGDIIRQFNKQGLSHLRGKTWCTARISELLRNPIYVKADSKIYDFYKSQGSNIINDATDFIGENACYLYREKVGGQKQYSLENTYLVLAPHKGIVSSTEWLKCRMKSINNKQVATNHKAKNSWLVGKVKCGNCGYALVIRKSDIRRKTIIRYFICSHKSTNKIRNNCGTIKANDLENFIFENIKNKLANFNILTNASNYILDPEINEYKIKILQINNEIDELFKKISNANDILMKYINERIEKLDNEKECINKKLIQLLNKSHDSNICTITDYTSLWNKISLDDKILVVDALIKVIYVSDKKIKIIWKI

SEQ ID NO: 4692 - protein, 535 aa, unidentified
  source 1..535: note = uncultivated organism
MIRKRCAIYIRVSTEMQVEDGYSFEEQEVRLLERAKEKGFEVVGVYRDGGISGKNVTDRPEMKRLIQDIKTNRIDVLMAWKMSRTFRKLKDLLDVFDIMKDNGCIFYFEKDGEIDPNSSSGKLHAQVLGMVAEIERDGIAENVAMGMEARAKAGKFNGGAPPLGYALENSRLVIIPEEAQIVRKVFDMYNSGSGYKHIAQVLNNGGYRTKQGRLFSVGTIQGIISNETYAGWIIWGKVRNWNEKRRKGTNPNPIRAKGKHEPIISQETFDTAKKVRLERGGKAKRKHNDLNILTGILRCPECGSGMVLSRSVGGGKPVAYYSCGRWKNKGNCGCHSNSIKLETANNKVLGEISRLINDEVLVRRITREINNKTSDLLEGAMYDQENTELLLKRTETEVQKLQKRFLESDDIEPDFYKRRMKELTEHMEVYKKNLYSAREQISKNTKCSYSLEQVKTILKLIKPILEKSKVDEVRTLMHLMIEEITIDRKTRSVDTISIKFNRQLTEYLCLQEGASKEASFFSALKEEELAFVIRL

SEQ ID NO: 4693 - protein, 506 aa, unidentified
  source 1..506: note = uncultivated organism
MKCDDSQSIQNQKAMLREYCHERNWEIYDIYCDDGYSGIDRSRPEFHRLLHDCEAGKIDIVLCKDQSRFSRDIVVIEQLINDIFLEWGIRFIGVADHADTDSESYSTMRLFTSAYNEMYVKDISAKIRRTLAYKRENGQFIGSFAPYGYCIDPEDKHRLVIDPETAPIVQLIFGMYIEGNGYRKIVQTLNEQGVISPTEYKRQKGSNYVNGNADASNAKGLWTQSTVAKILANEMYIGTLVQGKSHHISYKNKKRKKVAEDEWIRIPNTHEAIIDRETWNRTQERLHSHTRVGKRSQELSPLSGKVKCAVCGRPMKPKVYYNKAKTIRYYGLQCATYKTGAMNCPNRKSISGLVLEQKILDALNEIIEQYCESDEIQLTDIRREQMNALEKRLSVLTQQHNAAKKRLVSMYKDKLDGIISDADFAVFRESLDAEEQALAVQMADIGQQLDECRKRQENAESQKSLIQKYTHFDHLDRSIADEFIDTVEIGMTGENGEREIHIRWKL

SEQ ID NO: 4694 - protein, 585 aa, unidentified
  source 1..585: note = uncultivated organism
MANNQDVIAIYSRKSRFTGKGESIGNQVELCRAYIRTAFGEAYAAEAAVFEDEGFSGGNLNRPDFKKMMKAAREHRFRAVVVYRLDRVSRNISDFSALIQELGRLGIDFVSIRESFDTSSPMGRAMMYIASVFSQLERETIAERIRDNMHELAKTGRWLGGTTPTGYTSEAVKTVSVDGKSRRACRLKLIPGEADIVCTIYRLYCKTDSLTGTEAELLRRGIKTKNGRDFTRFSIKNILQNPVYLIADPDAYRYFQGKQADLFAAPEEFDGIRGILAYNRTDQEKGRATVFLPVSEWIVAVGQHPGIIPARVWIAVQESLERNHSKAYRKPRSNEALLTGLLWCRCGSRMYPRLSGRITEEGRPLFAYICKRKTQSRRSLCGLHNASGNLLDIAVLEQIKTLSPDSRRLLIRLEQGKRFSSGNWEDIEKEQEELRRQQAEIERRISALVDSLSDFGNSSASAHVKSRIEELHGHQEELRIRIHELETRTARSALSDMEFALMGQLLAVFRSSIDRMTVEQKRAALRLLVRKVIWDGQCAHVILFGTAEKEWTAGTGTPAAPAPDDTDNCISELTFANTPWCEDSK

SEQ ID NO: 4695 - protein, 539 aa, unidentified
  source 1..539: note = uncultivated organism
MADKNRVCCLYRVSTDKQVDYSNGNEADIPMQRKACHRFAEQKGWNIVFEEQEDGVSGHKVRAENRDKIQLIKDLARKKEFDILLVFMFDRIGRIADETPFVVEWFVKNGISVWSTQEGEQRFDNHTDKLLNYIRFWQADGESEKTSIRTKTSLRQMVEEGHYKGGSPAYGYDLVKSGRFNKRKHELYDLKINESEAAVVKLIFDKYTNEGYGTWRIANFLNDNGYRTRSGKRWHQASIRGILSNLTYTGVLRSGDARSPLLPELQIINPEQFKTASDIFKSRAKKHSENPTVPLNTRGKSLLAGNVFCGHCGARLTLTTNGRYRKRKDGSIDKSPRIRYVCYGKTRKQTDCNGQTGYTMHKLDGIVEQVIKNIFAAMKGIPKSKIVSARYKKEVTDKKYRLADTEKEYNKALQKLNLLKAEVIKCLQGESTFSKDILSELITDTEKNCNELAKLLEKLETELKQSEDLQAELCRSYDEIISWADLYDSASIEAKKMIVNSMIKRIDVFRGYKLKIEFNFDIKQFFLGIDKEITFDMTA

SEQ ID NO: 4696 - protein, 525 aa, unidentified
  source 1..525: note = uncultivated organism
MAQDIIRCAVYTRKSSEEGLEQDFNSLDAQRHAAEAYIASQAGEGWILLPERYDDGGFSGGNMDRPGLAKLLADIEAGEVDVVVVYKIDRLTRSLTDFARIVEIFEKADVSFVSVTQSFNTTNSMGRLMLNVLLSFAQFEREVTGERIRDKIAASKARGMWMGGLPPLGYDIPEPGSRTLRLNKEEAKRVRHIYHRYLALGSVYTLQRELASDGITSKRYVTRMGKVLGGTDFSRGALFHLLRNKTYLGLINHKGETHQGEHQAIIEQDLFDQVQAQLDANSRRWIESKERSVARSPLKGKLVDAAGEAMTPSFARNRHGKLYRYYVSVSLQQGQPVPDDDVVRRLPGAQLDRLIKQLLQRWLPTVDDPMQILKEVRLAPQGMIVSLAGDRSIDCTASLQEGEKLISANKRRTLVEVELALPLRGGKRHIVLGKRQPRERDKTLIAALRRAHTMVDKDRGMPLATYASPSPYERRVQRLAFLAPDIQRAIIDGAQPPGLNLERLIKSELPLSWKEQREKLGFSSH

SEQ ID NO: 4697 - protein, 517 aa, unidentified
  source 1..517: note = uncultivated organism
MRAAIYCRLSEEDRNKQNESDDSNSIQNQKAMLLQYSMAQGWDIFNIYSDDDYTGSDRGRPEFQRLLQDAEQHKFDIVLCKTQSRFTRELELVEKYIHGLFPLWGIRFISIVDNADTANKGNKKSRQINGLVNEWYLEDMSENIRSVLTNRRQNGFHIGAFALYGYKKDPNQKGHLVIDEEAAAIVREVFTLFSQGHGKTAIARMLNDRGIPNPTEYKRLHGLRYQQPKQKNSTLWKYFAIADMLENEIYIGNMVQGKYGSISYKSKQNKPRPKAEWYRVEGTHEPIIDRDLWDRVQTLLGQRAKPFGGGSIGLFARKVRCANCGYTMRSSKNRGRHYLQCSSRHVAKDACIGSFISVEKLERIVLSELNRLSAEYLNKDELERNIQFCGNPQNKKKQLQKAAESYQKKINEYAKGIRELYLDKVKGIITERDYLDMTREFSAEKERLECLTENCRQQIAELDTRLAAGDNRKAIVEQYANLQHLTREMVEALIDYIAVDKRIPGTSDVPVEIHWKF

SEQ ID NO: 4698 - protein, 518 aa, unidentified
  source 1..518: note = uncultivated organism
MKRITKIEPARVQAAASKIRVAAYCRVSTEADIQLSSLETQKSHYEKLISANPDWEFAGLYYDEGISGTNKDKRPALLQMITDCETGKIDRILTKSLSRFARNTADCLELTRELLDLGVTIYFEKENLDTGSMESELLLSIMSSLAESESVSNSENNKWSVRHRFENGTYKLSYAPFGYNMKDGEMTVNEDEARWVRWIFARALEGQTGYAIAKELNGLRVPTRKGGRWTSATVREMLMNEKYIGACLFQKTYTDHRFKRHHNYGNRDQFYVEGHHTAIIPQEDFDAVGALMEQRAREKGVKKKDPRYKNRYPFTGKLVCGGCSSRFKRHISSSGNVKHPVWACKQHLEDAGSCGMKYIRESDLECAFMTMMNKLIFARREILHMLLDSVRYGTQKSNLRRIEEIDRKLDENAERIQTLTMFMTQGYIGPALFNKESNELAAESKALEDEKERLSRAAAGNAQRMEELIRLVRYVDRAEPSGSFDGSLAEEFLDHATVHSKTEITFHLKCGLDLLERM

SEQ ID NO: 4699 - protein, 560 aa, unidentified
  source 1..560: note = uncultivated organism
MKNKHFLAAMYLRLSRDDSDVGNATDGKGNVKSESNSIGNQRELIRAYIHEQQDIELYDIYVDDGFSGSNFDRPEFKRMMSDIEAGRANCVIVKDLSRFGRDYIESGRYIQKVFPALGVRFIALTDHYDSIHADAGESSIVLPVKNFINDSYCRDISTKVKSQFEVKRKNGECIAPFAVYGYRKAENNKNQLIIDEYAADIVRKIFEWKMEGMAVSAIAEKLNGLGILSPKEYKKSIGSNYKGGFSGAVKSMWSSSTVKRILTNEMYLGHLIQGKTEKINYKLKKSVEKPKEDWVKVENTHEPIISQDNFLIVQNLLKADGRVSPVTEKNSIFTGLLFCGDCGEQMVRRVNRYKDTQKVYYICSTKNRGEGCTRHSIEEEKLKEMITPLIQRYANCFLEEKRVFEKSLELETNFESIVRYDTEIARLKQEQDKYYSLCSGLYEDLRQGVITKDEFERLHSEFKRKVSELEEAQKKQEVMIKELFKNGVISAGRLKTMQNCSELKEIDRHTLCSMVKKIIVHENQRIEIVFYYTNQYRIMNEVNRKMRDNGKIKRLSERSA

SEQ ID NO: 4700 - protein, 526 aa, unidentified
  source 1..526: note = uncultivated organism
MAQVKNVAQGAWVSVIDARPLSTARLRVAAYARVSSDSDDQINSYLAQVDYYTKYIASREDWELVDVYADEGLTGMETRRREEFNRMIADCRDGKIDRILVKSVSRFARNQEDYIYFMRELMRLGVTIHFEKENIDTGKMTSEQVADIYGAFAQMETTGHSQNMRISYRMRMEKGVFVPAKAPYGYRLINNELVIIPEEAEVVQRIYQAYLNGHGIFDIMNALNQKGILHTNGSGKWNRYAINYILTNVTYTGDQLWQKTFATDVIPFRKVRNRGQKPKFFAEDCGPAIIGKETYQRVQALIAERQECYRFKPEVETLFRKRVYCAECGSLCKRKVCRGTVNWACRRHDDGKANCPSQQILETAIEEAIRSFYRKLHHGRNAVLRPMLTQLEDLRERELRANNRISDIDREMARLAEQNLVLNRLKDKGYVDPALYLSQQDEINGKALELRRLRRSIMERTRGDETIRKTETMLDYLEDGPEWLDEIEPELFENLIDRIFLSADRQIKIRLINGLEVTEPLEKEVP

SEQ ID NO: 4701 - protein, 547 aa, unidentified
  source 1..547: note = uncultivated organism
MKNTQSPKIAIYSRKSKFTGKGESIENQIELCRQYIKIHFPDTDENGILIYEDEGYSGGHTDRPKFKAMLKDARNKKISAIVCYRLDRISRNIGDFAKLIEELNESQISFVSIKEQFDTSSPIGRAMMYIASVFSQLERETIAERIRDNMLELAKTGRWLGGNTPTGYASESMEKVTVDGKVRKAFKLTLIPEEARLVQTIFSKFLEENSLTKVEAYLLKNHIGTKKGNVFTRFSIRNILENPVYMIADEAAFKYYEELEVELFGGKEAFDGTHGIMAYNKTIQKKGKANQTRDMSEWIIAVGKHEGIISGADWIQSQRLLDQNKSKSYRKPKSNSAMLSGLLYCVCGAYMRPKQSQRRNKDGELIYSYLCEMKEKSRCQLCDSKNPSGNILDKMICEEIKKLSPDKSAFITVLEKAKESILADTEGYEGELERLKGAAAETEKDINSLVSALARSPESAHDYITKQIDDLHTKAVSLKERIAELESITQNHVLSDEEFEILHGILSSFAKTFDIMSLEQKRAALRTFIRKVTWDGENAHLYLFGSN

SEQ ID NO: 4702 - protein, 543 aa, unidentified
  source 1..543: note = uncultivated organism
MEKETKKRIYCAIYTRKSTTEGLDQDFTSLDAQREAAESYINSQKHEGWVALPGQYDDGGFTGANIDRPALQKLLSDIKAGGINCVIVYKVDRLSRSLMDFAQLLEFLDKHNVTFVSVTQAFNTNTSMGRLTLNILLSFAQFEREIISERTKDKMAAARKKGQWVGGRPPFGYDVEKDGKKLLVNPEEAKIVREIFKLYLEGNSLLKVALILNEKGYRSKQGASKAGKLYGGKKFGVTQIQAIIKNVLYIGKVNYAGQIYEGQQEPIINEETFKKAQEKLRQNRVERKVLKNTECTGLLTHLLHCNTCNTIMFHTYTMKKGTHKYRYYVCTNAQKRSYQACPNKSLNAQAIEDATIECLKHIFSDKKNFEDPTKEMKALLSPVWDTLYPEEKRRILKILVKEASYAVETKKLGIILNGSDLKLEFDIDLKQVRPLNRWHKEEEITKEPQIRNALILAHQIQQLVDRGKIKHPRKACKWLNLSVTRMDQVMNTLFLCPTIQNEILSMDTPAISTITEFHVRPLLKEVDWDDQLSQWQTLITNNH

SEQ ID NO: 4703 - protein, 513 aa, unidentified
  source 1..513: note = uncultivated organism
MPIAKLISPANRQVLCKLRVAAYCRVSSNSADQKNSFATQERVYRKRITENPDWELVDIFADEGLSGMKADTRPEFQRMIRMCELRQIDLILTKSVSRFARNVKEALSYTRKLKLLGVGVQFEEDGVNTLAMADEMLLNTFAAIAQEESKSISQNERLSIVKRMERGEYIATNVPYGYRLIDKKLVVYEPEAKIVRWIFDAYLNGMSATEIARELTAQGIPTKDNKANWKSNRLTYMLSNERYAGHTLHQKFYGEATVPFKRHRNCGEYDQFYAENTHEAILAPDVYEAVQRLLAARRKKTESVKTTNTYPLTSRIRCSECGALYHRKTSNGVIKWVCSRHAADTAACGSHYYSEARIYDGIITMINKLRFCEEDILGQTIQKLEFAAAAYKRNNRAASLLSQSIAELNAKLLALERLRTKGYLATDIYHTQAREIRQQLDKLKTERYSSFESKILTMLEDVRKLKSLIDELEQPLEVFDEKLFHEIVTDICINNHDEMTVTLLGGLRFTEQI

SEQ ID NO: 4704 - protein, 572 aa, unidentified
  source 1..572: note = uncultivated organism
MKKQSKPLIRCAVYTRKSSEEGLEQAFNSLDAQREACESYIHSQRHEGWNTLTTPYKDGGFSGGNMDRPALANLLTDIKSGNIDVIVVYKVDRLSRSLADFVRLIELFDNHNVSFVSVTQQFNTSSSMGRLTLNVLLSFAQFEREVTSERIRDKIAASKQKGMWMGGRVPIGYDVLEKLLVVNESEAITVRHIYDRYLDLGCVRKLKTELDADGYVSKARIVNDKASGEKPFSRGSLYALIKNPIYIGKTHHKGTLFDGQHAGIVDPSIWQQAQERITRNKHLNQTRTLAKDPSLLAGLIFDDKQHPMSPTHTRKHNRRYRYYVSQAALQFQENETGSVIRIAAQVIESLVVNTLMTLLSTAATLLDAIQLDAHSANDVKRYIEHGNKLATSWKDLSPSEHINLLNQIIHRITLGNREMSIVFSRRGLRSVIAPELESGSIEEPSPNEDQYTVVKSVYLKRCGIETKLIIAGEPTSPAHPETVQAIQNALAKALKWNDALVHGQVSSIKAIATQENVTSQFITRRIKLAYLSPDIMEAIFKGEIPHTLSMGLLEKSIPLNWEHQRGTFGFAS

SEQ ID NO: 4705 - protein, 524 aa, unidentified
  source 1..524: note = uncultivated organism
MAKQKPSKTKDTSPTIRCAIYTRKSSEEGLDQEFNSLDAQRESAEAFITSQKAQGWVCLPQQYNDGGFSGGSMERPALDRMLRDIDEGKVDCVVVYKVDRLSRSLMDFSRILEAFEKREVSFVSVTQQFNTTHSMGRLTLNILLSFAQFEREIIGERIRDKIAAQKRKGKWTGGVPMLGYDVDRSEASPKLVINAMEATRIRQIFDLYLQHGSLLPVVHELTRRDWRNKKRTTKKGKLIGDKPFDKCTLYNHLTNPIYIGKITHKGDVFEGEHDAIIELDVFERVQTLLKSNGRSGGAETRNQYGALLRGILRCQSCNRSMTHTFTTTRGKHQTQYRYYRCVGSIKSGCDTCPSGSLPAAEIERVVIDEIRSLSKDKTLLKEVMSNSHSKIESELQSMQTERDDLTKEITRYHRELRTLATDANASTDRIARLHDLIAECEQRLPTIESRIKKLEHETITEHEAQEVFSDFDTLWNNLSPREQARVIKLLIASVDYDAKLERISVTFHSTTISALLKQSKKDAA

SEQ ID NO: 4706 - protein, 507 aa, unidentified
  source 1..507: note = uncultivated organism
MIKIDAIYARQSVDKMDSISIESQIEFCKYETRGEEHRVYQDKGYSGKNTERPQFQEMLNAIRKGEIKRVICYKLDRISRSILDFATMMDEFQRYGVEFVSCTEKFDTSTPMGRAMLNICIVFAQLERETIQQRVTDAYCARSRRGFYMGGRVPYGYKLEPYQIDGKRTSRYVVDEEEAEVIRLIYSLYSEPQISYNDIVKHLIENGIRNKRLPSGCWDKARIADMIKNPIYVKADLSVYQFFKGQGSELHNPPEDYIGTNGLYLYAEKTARRKTVSLENQHIVVAPHEGIVPADIWLRARLKCLNNKQVAKPLKASNTWLAGKIKCAKCGYALTVRKAKTKVGRYLICSRHMQTLNGCDGVGGLHAFEVEEAVLDAIKERLKKFDVLTDSTQRTNNSNTQIDELNLKIEKCQTEIEKLMDKLADADDVLTDYIRTRIKELDTKKKDCQKQIGELEPLMTATQDVHEITGYMDKWEELTVSDKMAVVDILISKISASENNIEITWKI

SEQ ID NO: 4707 - protein, 649 aa, unidentified
  source 1..649: note = uncultivated organism
MDYKNQDSIPKVAGIYIRVSTEDQAREGFSLGEQEEKLRQLCSFKEFQVYKVYQDRGISAKDMEHRPGFQQMMDDMRKGKINYIVAYKLDRVTRSVRDLEQLIDELEKYNCYLICERDDVNTSTANGRFFVRMLTVLSQLEIEVVSERTKFGMNGAIKAGHLPGTCPLGYYRDKDKVVKIDPITSQVVKRIFKMYLEGKSYYRISEIFNDEKVLYPRDKKWTEASIRTIVNNQIYVGDYIRNKTSDNESDRVVYENVVAPIITRAEWEEVQKQKEKNKQAFSRDRVYIFYQRLYCSKCGTLMNCTSPGGKKRGYLYYRCDKCKTAVNESNVEKEIMNFILSLVEYDSVVKKYFYPILADKENVSSKNIEDKIDELNQKRENIKQAVMLGIFKAKDFENEIKSIDDQLNELKEKAMNNKEVDTKKFSLMKIMADRDFEIEERINSNRFVEDLKDAWDLKTDIEKQEFLSRFIESIVIEKGEEPGKVKILKTNFRSGYLSEIKKLYALDAIDLAQPTDDERKVIITRSTPRVTKKELNEYMKYLKEYYDVEYYEDYFDWTHEYEDMRDGLISLPRERENEKIMRTFYVDKGKKYPIKNSKGEFKGKYGLVSYREKGTPHLSDEEYFALKSKKAQEQDALDDEDDDEEIFEE

SEQ ID NO: 4708 - protein, 509 aa, unidentified
  source 1..509: note = uncultivated organism
MKNCYIYIRVSTDEQAKKGFSPDNQIRQCRDYAEMHQYHVKEVFDDSGRSGRTTDRPEIQKLLKAIEEKPVEAIIIYKIDRFARNVTDFSRIYNELKTKNIKLLSINEGDLMEGNSLIPNIFASVAQWESEVNGQRTRDALVQKFIEGWQPTPPPIGYRTVGGEKEKKTCEPDPYTAPIIKELFDLYSTGNYSIYELQSWLAEQNILSKSGTSIGHSVVHTILNNPFYYGLIRWHGEAKIGNHQPLLTKEQYETCQYVLAKHRNFMMRKRVHQFLLRGFVYCADCGQRYTAEWHIKPIKLKARGGKIAYYHCPKMNRNGCPSPYVEIEELETLVENTLKSICFQDGFIKAVVKEAKSVLEKSRNTASSETQGCINQKTALEGKRNKLEDALLDGTIDREVFKRRHTDIQEQLKLIEQRQREIENNTLLDMDLIEEVLNFTRDVDRTYKDSPEFLKRHYLRFFYEKILVKDKQIHDVVYTPIFASLQANREVIISKHWLPRVDSNHEPYS

SEQ ID NO: 4709 - protein, 575 aa, unidentified
  source 1..575: note = uncultivated organism
METKVAGIYIRVSTEDQAREGHSLDEQEDRLKKLCDYKQYQIYKVYVDAGISAKDTNRPQFQAMMKDMKKGRINLIIAYKLDRITRSVQDLEKLVEEIEIYQCGLECAVEEINTSNANGRFFIRMLTVLSQLEIERTSERTKVGLTGAIKKGNIPGKTPLGYKREGRKLVIDESTAPIVRKIFELYTSGMSYYRISQMMLREHCNLRVWREDLISKIMNNRIYCGDYVLGKVIDKNNTVIFEDVVEPIIPKKQWFECQAQKGKNERHYSRSRTYIFMQKLKCPKCGTIMAGNSAGTKPHMYYKCPKCRTYIREDWVEDKLYDFLGEMTDLYNILNDIQIPILTGEETDKLDEKLRSLQELNKRQEKLKQAYLHEIITIDIYEVDNKSIEFQKKLLTEDIMKLEAIKNSQIDKNMIRLYFDSKAILQRKMCAIANTKINSWTILNQKEKQQIIFDYIDTIEISKHPKSNTRTSYVDIEKINLKETKIHEFFNMMNNRVLDVALKFDSKILSVSTETNRNEIDLYLNRLRSFYDIKVEEMNLEMITKEYLTENDVIKIFPISKDDTWETRKYLVMSV

SEQ ID NO: 4710 - protein, 514 aa, unidentified
  source 1..514: note = uncultivated organism
MAEVQVIPPKAARPDTLRVAAYCRVSSDSTDQLHSYAAQIRAYTQAINAHDGWELVDIYADEGLTGTQMDKREDFNRLMADCRKGKIDKIVVKSISRFARNTRDCLASLRELSSLGVTVKFEKENIDTGTLTSELMVSVSASLAQEESISISKNQRMSYQRRMERGEFITCKAPFGYRLVNKKEMEIIPEEAHYVKWIFNTYLNGASTEWIADQMTKTGLLTSDGGHRWYISTIAYLLTNEKYMGDTLCQKTFASAFPFTKQMNCGERDQYYVEHSHPAIISKDIFEKAQALLQRKGQRIDLQRERTPLSKKMTCGLCGSTLVRRISKAGYVSWVCRKHDRKAADCPNGRISEDSIHTAFLRMYHKLRTHDGIVLSPILKQMDALSDAIHRDDPAMLAVNTAIAAASEQSYHLTKLHSAGLLDMAALSAKQTELNAKLTELRRERRKLLCNEDIDEQVDVIRLTIDAIRSGPDTLSSLDEALFTKLVERIVVVSQDSIWFQLHGGLEFQEILEA

SEQ ID NO: 4711 - protein, 578 aa, unidentified
  source 1..578: note = uncultivated organism
MDKSKEFAIYSRKSKFTGKGESIGNQVELCREYLRARYGDSAADNAAVFEDEGFSGGNLNRPGYQRMMKTAHEGGFRAIVVYRLDRISRNISDFSALIEELSRLDVDFVSIREQFDTGSPMGRAMMYISSVFSQLERETIAERIRDNMRELAKTGRWLGGATPTGYASESVKSVSVDGKTRKMCRLKLIPEEAEIVRDIYRLFAEYDSLTAVETELLRRQSVTKTGRNFTRFSIKNILQNPVYLTADADAYQYFADRQAEIFSDLSAFNGAHGILAYNRTDQEKGRAAIPLPVNEWIITVGQHPGIIPAKTWIRVQESLERNKSNGYRKPRSNEALLTGLLFCRCGSRMYPKLTKRMTADGKPVYTYVCKMKERSQRSRCNLRNANGNALDEGIIEEIKKLSGDDSHFIEQLEKSKRFYTGSRGQYDATLDELRKEYAENEKKITGLVDSLAELGDGASRKRVAARIEELSRAGETLRVRIGELEGLTEQKALSEMEFDLMRQLLTNFRDSIDAMSVEEKRAAVRTLIRKVIWDGEFAHVVLFGASEDEIEYPDLKPLISGATDADSDLETLLCEDSE

SEQ ID NO: 4712 - protein, 503 aa, unidentified
  source 1..503: note = uncultivated organism
MSEKIVLGYSRVSSEEQAAHGISIDAQRNILEGYAAMTSQQIRIYEDAGYSGKNTNRPALQQLLTVCRSGSVSAVVVWKLDRLSRSLRDTLTIIEDVFQPAGITLVSVTESIDTSTPSGRMMLNLLASFAQLEREQDSDRVVMAHKHLARDCKYLGGHVPLGYCVDTDKHYQLDPVTAPIVRRVFEMYLSRSGYAPILEYLNSFSLPGTRKTPFGKSDLKFLLKNEIYSGTYVRRMGADPRHRITSPETIRVPGGVPALLTQEEWQRVCTLRSQSERAAAIYNTRRVYPLSGLVYCASCGALMPLNYGGKDRDGSVQRYYTCKAKCARPARLEHIQDAVFAVVEQMAVSGPEAIAAACAVANSYADAADEDHAAEARAIDQQILEVNKKISRIIAFITDHGSAAPASLADDLTRLEKDRDALQARAASLRKPVSRYDTAATVKAIASCEGIKKQPPDQQKVLLQAAVYKVLVSADDYKIVFNWHTCGGDEPPHPVCQSFQRRT

SEQ ID NO: 4713 - protein, 522 aa, unidentified
  source 1..522: note = uncultivated organism
MQITDITPELKKREEKIRLAAYCRVSSDSEDQIHSFAAQIKHYSDYAKKNPQYTLIDIYADEGLSGTGMTKRDELNRLLKDCSQGKIDRIITKSVSRLARNTEDLLTMLRMLKDFGVSVYFEEQDIDTTQMNMEMIVTFPGMVAQQESENISGNLRWSIQKRMETGKYKISRYAYGYCLRNGVIDIDEDKAKIIRKIFALYLRGMGMQQIADFLNEQKIPRLYNSKEKLWQRRTIAYILQNEKYIGDALFQKKYTTDIFPYKKKINNGQKAKYYVENYNPSIIEREQYQKVQELIAVKTKETAKNKAAYLLAGKVRCKDCGKLLRVSMSKGKTTLACSTNDRAGSCAAHRAREEAVYETFTRMIYKLKFSARTLIDELIKSLECLYEHTEECRENIKAIDKQIADLCAKNLVVTKIYTNGILNAADFTRQTTEIGNRIKSLRSERKKFFEQNTDEANLEELKDLQETLRTYTPSSRFNEKLFEDIVQKIIVEDNATLQFHLIGGVILTEKIKVKSRCKKNEK

SEQ ID NO: 4714 - protein, 527 aa, unidentified
  source 1..527: note = uncultivated organism
MKPLKTLGSSALSPEREIIRIGAALTPDTARVRMAGYARVSSDSADQLNSFSAQVRYYTGLIEKHDGWELVEVYADEGITGVSTEKREDFNRMLEDCRKGRIDRIITKSTSRFARNTLDTVRIIRELKEIGVTVLFEKENLDTATLTSENLLTLYAMFAQEESVGISQNCKKGSRMRMRSGTYVSSNPPYGYRLVENQLQICEPEAEIVRRIFAEYLGGSGCGEIAKGLTADGVPFKDGRMRWRFQSVNKILRNERYAGDMLLQKTYSEDAMPYRKRKNRGELPQYYVKDTHEPIVGRVEFELANLLLAERGAAISGIPSGEYPLSRKIRCGECGTAYRRKVTNGIPYWVCRRHDDDKDLCGAQRITEEALHRAFVNLYNKLKRNYAGILLPMLSQLEKLREARMRENPELSTINRQIAELSERNHVMNGLLTKGILDSALFIFQTDELNRQLRALKLAKAKLLEEQAADSLLEQTEDLVELIENGPDRISGMEETLFADMVEKVTARDTLTVDFTLLGGLVLTERL

SEQ ID NO: 4715 - protein, 519 aa, unidentified
  source 1..519: note = uncultivated organism
MRKITKIEANKDSPFNISKLRVAAYCRVSTNSDEQLESLEAQKTHYEKYIKTNQDWEYVGIYYDEGISGTKKDKRLGLLQMLSDCENNKIDLIVTKSISRFARNTTDCLEMVRKLIELGVFIYFEKENINTKSMESELMLSILSSLAESESASISENNKWSIQKRFENGTFKISYPPYGYKSVNGDLSIMPEQAEVVKYIFKEALSGKGTQKIADALNEKGIPTKRGAIWRATTVRGILKNEKYTGDVILQKTYTDSNFNRHINKGEKNKYLIQNHHEAIISHEDFEAVEKSINQRAKEKGVERNSEKYQNRYAFSSKLICSECGDVYKRRIHSTGKRKYVAWCCSTHIEDISKCSMKFIRDEDIKSAFVTMINKLIYGKDFILKPLLANIRTMTKSENIAKLDEIEMEIEDNISQEELLVKLMAKGYLEPALYNREKNELLMARAEMTSKKEGLVDSLNNEMSKGHEVNKLIKYVNKKEYLTEFEEKTFEDFVEKVEVYSREEIGFVLKSGLTLRERM

SEQ ID NO: 4716 - protein, 531 aa, unidentified
  source 1..531: note = uncultivated organism
MNRNGNARKNGNGRTRPTTAVRCAIYTRKSTEEGLDQSFNSLDAQRESAENYIASQNAEGWDCLPDRYDDGGFTGGNMDRPAVQRLMADIEAGKVDCVVVYKVDRLSRSLLDFAKLMEVFEKHKVSFVSVTQQFNTTHSMGRLTLNILLSFAQFEREIISERTRDKIAAARRKGKWSGGPPVLGYDILREPGGSKLIVNAEEAERVRYIFGLYLECASVSATIRRLDELGWVNKVWTTKQGRQRGGKPFDKSTLFNLLTNVVYRGQIAYHDQLYAGEQDAIVDEDLFSRVQAQLRINRNSGGKYARNKYGALLKGLVRCTSCGCAMSHHFATRGNKRYRYYVCVNAQKRGWDNCPAPSLPAAELEQFVVDQIRALGQDEGVIVDAVRAAQEQLQQEVAALREARKTTDRRVMRLTEKLQRLTAEGRRADHVERLAELQDRLRDAEQRVTELDDQIVRAGKRLIDEDELVGAIEAFDPVWDALNPRERERIVRLLVAQVAYDASQEAISVTFNPTGIAALSNDEEAACTMAG

SEQ ID NO: 4717 - protein, 507 aa, unidentified
  source 1..507: note = uncultivated organism
MKKAVVYARYSSDRQNEQSIAGQIDVCTEWAKNNDINIVNIYHDEALSGKTDNRPDFQRMIRDAKGAGFDYIIVYKLDRFARNRYDSAIYKAQLKKYGVRIISAMENIADGPEGIVLESVLEGMAEYYSANLSQNVLRGMRQRAELGKYMGGTIPLGYKIDKDKNYVINEDTAGIVKRIYEMYADGYTVREICKELNSAGYKTSIGKPFSYHSLYRILSNRKYIGRYEYLDTVLEDAIPRIVDDETFEKVQQRVAHNKRAPASAKSDETFYLTGKLFCGKCHSSMVGDSGTSGTGATHYYYSCIERKRKHGCKKKSVKKDFIERTIVDVTVNQVLTDENIEKLSKAAYAVYKKDREDTSEITALEHALKETQKTIDNIMKAIEQGIITETTKQRMMEAEERKNNLLISIEKEKIAKPELRERDIKFFLYDVKNKVYNEEEKIETIINTFINAVYLFDDEMIITYNFREGENLKKLRISDLEKFGFNNRRYAMQNNPERSSFRVVFLR

SEQ ID NO: 4718 - protein, 514 aa, unidentified
  source 1..514: note = uncultivated organism
MPQVQIIEPTIKPQEQKIRVCAYARVSSDSDDQLNSFSAQVEYFTQLIQSHSDWEFVDIYADEGITGTRADKRDEFQRLMRDCRAGRVDRILVKSVSRFARNSTDCIKAVRELQALGVSVIFEKEQINTGNLSNEMFLSMMSAFAQEESISISRNMRKGAIMRMKNGTFRLSQIPYGYRYDEHGVLIIQPEEAEIVRWIFKSFLSGKGVQTISRELEAKQVPKLRGEPIWSKHGILYILTNERYAGNELFRKSYRTESIPFKKIDNFGEKTQFYAEDTHEAIVSLETFEKAQSLLREKKKKHGKKQSSEPFILTKMVVCEECGSVCYRRITSQGTMWTCSTHLSDLSRCSTKGILEDTIYKAFLSLTNKLEQNQSEILETFLLQIQKLRDREYMAHPGVIKLNQEIAELLKQNHTLATLRAKEYIDSAFFISQTNELDQKISSLRAELKRYRDLNDYQELIRGTQAVLETLSKTTSNSFHPSTLKKIISKIIAGPKSLKFQLINSLELIEPIER

SEQ ID NO: 4719 - protein, 549 aa, unidentified
  source 1..549: note = uncultivated organism
MKEKTYQAAVYLRLSREDGDVTDGGKTVSNSIANQTELVVDYLKSHPEIKVIDTYTDDGFSGVNFERPEFQRMLSDIRAGKVDCVIVKDLSRFGRNYIESGRYIEKIFPMLGIRFIAITDGYDSINEDMGSDMIIPFKNLINDAYCRDISIKIRSHMDIKRRNGEYIGAFAAYGYLKDEENRNHLVIDDYAADVVRDIFSMKLCGMSQQAIADKLNADGILAPLQYKKSIGVGLNSCFAKSMKPKWSYNAVTRILKNEVYTGTVVQGKCTTPNYKIKKRIHKDEADWIRVEDMHDAIIPKSEFDLVQEILLKDTRVSPEQAEVFPLAGMVFCAGCGEPMVRKTVPAGGKRYVYYVCSGNKKDKHTCSSHSISERALINTVTELAKTFIGRAITASFAMDILNATPNKKPGALKYESRIKKLREEAESCHNRKKNLYEDFKDGILSQEEYSMLRNQYQTQIDDIEKSIAAVEAERDVMLASGTGKQEWIEKIKKYEGVSTLDRELVTFLIERVEVVDSETINVKYRFDKVLSEMERIVRFYSSEGLKEAM

SEQ ID NO: 4720 - protein, 553 aa, unidentified
  source 1..553: note = uncultivated organism
MKKLRCAIYTRKSTEEGLDMDFNSLDAQREACEAYVTSQRSEGWTLVPTAYDDGGVSGGTMERPALQRLLCDVRAGKVDVIVVYKVDRLTRALSDFAKIVDVLDAAGASFVSVTQAFNTTTSMGRLTLNVLLSFAQFEREVIAERVRDKVAQSKARGIWMGGVVPLGYDVEDRKLMPNAVEAATVVHIFRSYLDQPSVRALKLVLDAQGVRTKIQQGKSGPRGGVPFSRGALYWLLSNPIYIGKLRHKDKVHEGQHEAIISTDLWDAVQAKLAASTAERANAIVPNGIALLTGMIRDADDRPMSPSFTVKQGRRYHYYVSSISKDIDREVPSKPAAPVARIAARSIETAARDAVRELLRDPARIAGLDDRAGAAVTSARIDTAAELARQVGPHADHGARNLFERLELTVEVDPARVAASLSARALIAALDHLPEGGDHGPDRIDLVIRTDVQRGKRGTKLVIAGPEPEGRKPDARLVNLIARAHRARSDLFGDQASPRDRHIERLARLAYLAPDIARAILDGNQPAALTSRRLMKLAALPLAWADQRRLLGFT

SEQ ID NO: 4721 - protein, 549 aa, unidentified
  source 1..549: note = uncultivated organism
MADTKEAKKRIYCAAYCRKSVEERADETFGSIENQHESILNFIASHKHEGWVPLTERYDDNGFTGSNTNRPSLQKLINDIKESRVNMVVVYKLDRLSRSLVDFVQLLKFFDEHGVAFASITQPIDTSTSTGKLMLHILSSFAEFERELISERTHDKMGAARKRGQWLGGRPPFGYSRDKEGKKLVINKDEAKIVQEMFELYLKGNSLLKVANILNEKGYRSRAGKQKDGKPYGGLKFGVTQIQQAIKNVVYIGKVFYAGQVYDGQQEAMIDEETFKKAQKVLKDNRIERKAVKNIECSGLLTHILHCKTCGHSMFHTYTLKHKTHKYRYYVCTNAQKRGYNSCPTKSVNAQAIEDTVVDCLKMLFAENRKNKEEQNKQEIEALLSPVWDTLYPQEKRRILKALIKEVDYDSNSKKLGILLNGSDVRLEFEIDLKQVRPLNKWHKEEEIENEPKIRRNLILAHQLQKLFDEGKVKSLKQTSAWLNFEQARLDHLMTMLLIAPTIQSEILNGDKQIISLIPEYKIRSLAAEADWKKQTQIWQNIKEALSKK

SEQ ID NO: 4722 - protein, 560 aa, unidentified
  source 1..560: note = uncultivated organism
MARRSRTITDKIKQKFRVWRIAIYIRLSKEDARNNDESESVSNQRAIIEEHIASFNDGDEYIIVDEYVDDGISGTTDDERDDFQRMLGDIKKGRINCVIVKDLARSFRNYSDQGYYLDDWFPRFNVRFISLYHQPLDSYKEPQNMRSIAVPIQGVLNENHCAETSDKIREVFDMKRRNGEHIGSFAAYGYIKDPNDKNALVVDEEAAEVVREIFTKFLDGMSKNAIVHYLNEHGVLSPAAYKRERLGLKYQNPSIDPAKRPLWGAVTITGILKNRMYCGDMVQGRYRVKSYKIHVQEVVPEDEWYIVENTHEAIIDRDTFDKVQRLLLRDTRTAPQKKQIYLFSGFLRCADCGKAMTRSKVGGTVYYYCRTYKDQSKSACTKHTIKHNRLEVAVLYAIQQQVYLAVDYTKTIERINRAPLVKSQSKKLSDAIEQKDRELAKIARYKQAIYQDWKDGEISHSDYRHMKEDYEEQAEALNEVIDKLRAEQAELENGIDTENPFLKAFRQYGNIEKLTRDVLIELVDHIKVYEGGNISIVFRFADELRRIQEFIEVNNPSEAV

SEQ ID NO: 4723 - protein, 542 aa, unidentified
  source 1..542: note = uncultivated organism
MKIAIYSRKSVFTGKGESIENQIQLCNDYINSHYSVSKDDIYVYQDEGYSGSNTNRPMFKKLLSDANSKKFDCLVCYRLDRISRNISDFSSLIEHLNKLNIDFVSIKEQFDTSTPMGRAMLYISSVFAQLERETIAERVRDNMYELAKTGRWLGGRTPYGFKSSCITYFDENMTQRKMYKLETDKESMEVVKYIFNKYIKLGSLTKLHKHLYENGIKGPYDGSFSPSSVSTLLRNPAYVNATEEVFNYLRSKHFDVIGSPDNKHGLLTYAKNSSTPIAALANHEGVICAKDWIKVQQLLDINSNKAPRAGTGSNTLLSGILKCSICGSSMRLSYKSSANGTIIYYVCGKKKNLGKSACSCKNIRADIIEPLVISRIKNVNVESMIKEYKKSKLINKQNSKDLDIKISSLSSTIKEKETLVDNLVMQLAKFKDSLASSFIIKKIEMLNNEILNLKSELDSLKSHTQEINNSNLNLDVLINNLNRFNDEIDNANVDKKKLLLNSILESVDWSSSNNTLIINYVGFNPQLNSLNPTDKINSKLHF

SEQ ID NO: 4724 - protein, 542 aa, unidentified
  source 1..542: note = uncultivated organism
MRLLGAVRLSDLTDESTSPERQNGKITSFAQLGNHELVYVAEDLDVSGAVSPFDRPDLGKWLDQPDEWDGIVVARLDRLTRSLFDFLIFWRWLEEHGKTLISLDPQLDFSTPFGRLVAQILVMFAEFERQMIADRVREAYYHLRQAGQFPGGSVPFGYMPIRLVPKGWRLVPDPELAPIVEEMVNRYLDGQSYHQISRWLNESGIPASRDTQRRRSGKADQDKGWSPATVAKILTSPSLIGQTSSKGQPLRDSDGMLVMLDPLIPVERWERLQTAIKERKYGRREHPSLLLRVAFCACGETLYMASHNKVGETTPGRRQFRYYLCQGRRKGDCQAGRIPADALEEWTWATFLSLVGETEILEPVHVPAVNQSAEVAAVEEAMTHLEDQYVSGQVYQGTEGAARFSAMMARLQERRDRLAAMPSSPARTEYRSTGRTFAERWAELDGDPEGRRQLMIGAGYKVWVVRKSLPGQGRQSRRTLLHGQSRRPSRPFTEVRVVSLDPDLARRAALAAADLPVHVPADGEELQAVLEPLRQLIRQPPA

SEQ ID NO: 4725 - protein, 523 aa, unidentified
  source 1..523: note = uncultivated organism
MIAAKTTKVTAPAVRCAIYTRKSSEEGLEQEFNSLDAQREAGEAYIASQKSGGWVCLPEQYDDGGFTGGNMDRPAMARLLADIAAGKIDCVVVYKVDRLSRSLMDFAGLISLFDKHKVSFVSVTQNFDTTSSMGRLTLNILLSFAQFEREIIGERIRDKIAAQRRKGKWAGGIPVLGYDVDRSGPSPKLVINADEAPRVREIFSLYLKLGSLLPVVQELEKRGWCNKAWTTRSGKAKGGKPFNKCNLHGLLTNPIYAGKIKHKSELYDGEHEAIVPAKQFQKVQALLQHNGRTGGVEVRNRHGALLKRLLYCKACGRTMVHTFTGRGSKRYRYYTCTHAIKSGHDACPSKSLPAGEIERVVVGQIRCIGQDADLLADVLQQASQHTEAETSRLDVECRDIERQLRRDDAEIRRLAAKGPASGAKVARIADLAERVQRAETQLAELRKKKDALTRERIDEAKLKAAFEDFDNVWGALSPREQAEVLRLLIARVDYDAAESSISITFHPSGIKSLSDGQQQEEAA

SEQ ID NO: 4726 - protein, 523 aa, unidentified
  source 1..523: note = uncultivated organism
MSRARKKTPVKTTVRCAIYTRKSSEEGLDQEFNSLDAQREAAEAFIASQKAEGWTALPDHYDDGGYSGGSMERPALDRLIRDIDAGKIDCVVVYKVDRLSRSLMDFARIMETFERQGVSFVSVTQQFNTSHSMGRLTLNILLSFAQFEREIIGERIRDKLAAQARKGKWTGGAPVLGYDVDRSGPSPKLVVNAKEAARVRDIFRMYLTEASLLPVVKELVRRGWANKQRTTKKGKQLGGRPFDKATLHVLLTNPIYTGKLRYKDELHDGEHEAIIEQDLYDKVRAKLKDNGRARGAEFRNKYGALLRGLLRCKTCDSAMAHTFNGKSSKHRHRYYRCINAIKNGRDACSCGTLPAMEIERVVVDEVRALGRDEALLAQVLADAHAAMGTEHVALRRDRDDLAAERKRNHRELRELAAAGTTTAETTSRMADLQERLLDADRRLPELEKRLAELDGETVSRAEAQAAFAEFDGVWTSLTPQEQARLLKLLLSKVEYDGDAGTVSVTFRPSSIRSLINRKLENAA

SEQ ID NO: 4727 - protein, 592 aa, unidentified
  source 1..592: note = uncultivated organism
MPGFLLKIACKALSYDFFCKVRTAVIEYITEKELKNRQIQKLSDFCGQAVNFKEVKFMYNATKYLRLSYTSDRANESDSIANQRKYIDEFVKRNPDIKIVNEQVDDGYSGIVFDRPAFKAMIEDIKSGKINCVIVKDLSRLGREYNETFTYLRRIFPALGVRFIAINDNIDTAKEAVTGDISVSFKGVMNDEYCRDISVKVRTALNIKRKNGDYVGAVPVYGYKKAADNKNQLVVDEYAARVVKDIFKMRTDGYSADRIANELNRLAVLSPREYKKDNNIPLPRNGYCDKENSKWSATTVIRILKDEIYTGKLIQGKYGKPNYKVKEYVKRNADEVFVTENAHEAIISKQDFELVQRLMRLDTRISPKKNALHLFSGILICGCCGNRMTRKTVTHNGEKYFYYYCPTGKKNGCLGGNMIKETDLVNCVTGSIKGHIKNIASLDDLISGINSNAISRDMCNKISVQITEVKKQLDKTSEYKSTLYENYISGILSKEDYKALNSSYTQEKKSLEKALKQLETELDEYKNNTSKKLQWIERFKAFENIDEIDRNVVIQFIECIHIYDKTHLQITFNFKDEYEQALITLSEYKEVI

SEQ ID NO: 4728 - protein, 513 aa, unidentified
  source 1..513: note = uncultivated organism
MIKTATRTIRCAVYTRKSTDEGLDRDFNSLDAQREAAEAYIASQKAEGWVCSADKYDDGGFTGGNMDRPAVKRLLADVAAGKVDCIVVYKVDRLSRSLLDFARIMESLDQHNVSFVSVTQQFNTTTSMGRLMLNVLLSFAQFEREIIGERTRDKMSAARRKGKWVGGTPVLGYDIDPDGGRLLVNEDEAARVRAIFELYADHQSLIATVQECDRRGWTNKQWRNKKGLDSGGKPLDKAGLLRMLSNVIYLGKVNHKGQIFPGEHPPIVGEDLWEKVHVRLRRNAADRGTSVRNKHGALLQGLLHCTPCGCAMTHAYTAKGTKRYRYYVCVQAQKRGWDTCPTKSVPAAEIERFVVDQIRCIGEDRAVVLETLRRTRDKAEDDITGLQAERRLLERELTRHQREVGKVAGRGDGNRLADIQDRMSRAELRLTEIRSEMATLEGQQVSEDELAAALAQFDPVWDSLAPREQVRLIQLLVERVGYDGREGTVSVTLRPAGIKTLAAQGGRREEVQV

SEQ ID NO: 4729 - protein, 501 aa, unidentified
  source 1..501: note = uncultivated organism
MKKVCAIYTRKSTDERLDMEFNTLDAQREACAAYILSQRSEGWTASKEHYDDGGFSGGSLDRPSLNKLIADIKAGKVHVIVVYKIDRLTRSLMDFAKLVDIFDEYGVTFVSVTQSFNTTTSMGRLTLNVLLSFAQFEREVTGERIRDKIAASKAKGMWMGGRPPFGFDIENRRLIINEEDAPKAKLIFELYLKLGCVKKLKQELDKLDIKSRKRTSVKKGLEYGGKPLSRGTLYSLLKNPAYIGKISHKGKIHEGDHPAIITDSLWQEVQSKLQDQSAPREPENSKHENLLTGIIFDENNNPYTPVFTVKKNKRYRYYLNEFLNQTKSHPNHVIARLPAHEIEAVIETNVRRNILKLLETESHEIQQYIQENQSQIPTYKLIRNTVQSIIVMRESLHITLKPSNLEKLIKEYLDLNIKKVAKNIEFTIPYQTKRAKSGAVLIETEHRKGLDSLSKPDLKRIVQGHVWREEHFAGTYIQTIAERENCSSRYVRKVIMASLDI

SEQ ID NO: 4730 - protein, 530 aa, unidentified
  source 1..530: note = uncultivated organism
MTRKKADAPPATLPVVRCAVYTRKSSEEGLEQEFNSLDAQREAGEAYVRSQAGAGWACLADRYDDGGFTGGNTDRPGLQRLMRDVEAGRVDCVVVYKVDRLSRSLLDFAALMRTFEQYNVGFVSVTQQFNTASSMGRLVLNVLLSFAQFEREIVSERTRDKIAATRRKGKWAGGWPVLGYDVDPAGFKLKVNDAEADRVRAIFALYLEHGSLLPVVEELRERGWANKRWELRKGGFRGGSAFTRTSLYHLLTNPVYVGKVRYKAEVHAGEHAAVVDAAVWQRVQAHLARNGRSGAGGGRAGAGDALLGGLLRCAACDAAMSPSHTTKGSKRYRYYTCTAAARNGWATCPAKSVPAHAIEPVLVNQIRAVGRDPAVRAAVLTQARQQDEARTAELEREQQAIETDLRAWHGEMRHLSGLFRPGDGNEAVVRRLAELQERVAAVEGRSRAIRDQVAAAQRQLVTEDEAAAALSLFDPVWEALAPREQRRVVRLLVERVEYDGRRGKVAVRFRPAGVRTLARELADEREARRA

SEQ ID NO: 4731 - protein, 527 aa, unidentified
  source 1..527: note = uncultivated organism
MDKKLIRCAIYTRKSTEEGLEQDFNSLDAQCEACESYIKSQVHEGWILVDKQYNDGGFSGGTMERPAFKELLKDIENDEIDIVVVYKVDRLTRSLMDFSKIIDVFDKHNASFVSITQHFNTTTSMGRLTLNILLSFAQFEREVTGERIRDKFEASRKKGLWLSGVCPFGYEKDDHYMLHPQQPYADNVQIIYESYLEIKNVLKLKKYLAEKKILTRNGKELAKGSLYHILSNKVYLGKIVHKNKEYDGLHVPIISEELFNNVQNLLKANSVQRKHSTNAKTGSLLAGLLYDDKGNKMSPSYSSGKGKQYRYYVSQAIKNPVDYERGEITKISAGEIENFVQNDLTKLLKNTHKMQAYLENYSVEQHKLMLNLMKVYESDKVFLRTAIKRVDLNVDSISLSYDIAYIVKLFATLAFNAEFNHTEEDEQIITNRIDVRISLTPQRQNKIIIPGKANYDMKLIQAIVKSFWYNKLGAERKLPIEARNGNNKRLRKLRFLPPEIIESIMNGTQDPELNVKKLIAMAEKCCK

SEQ ID NO: 4732 - protein, 568 aa, unidentified
  source 1..568: note = uncultivated organism
MARTKRKVNYVQPAIETISAPVSQVYRAGGYVRLSVEDSGKPGADTIYAQKDLVLKYIESQPDMTCCGMYCDNGRTGTNFERPEFERLMTDIREGKIDCIVVKDLSRFGRNYLETGNYLERIFPFLNVRFIAVNDNFDTLTAERNTDGYIVPLKNIINGAYSRDISRKSSSALATKQRKGEFIGSWAPYGYQKSAADNHKLEPNEETAPIVRMIFQWRVSGDAYLQIARKLNEMGIPSPSRYHYMRGEVKAERYANSIWHVPIIKIILQSETYLGHMVQGRTYNSLPEGRKLCKRPKSEWVVVPNTHEPLVDEDTFRIVQEMAEQRRTVHQERVGRFDDLGRIPHILRGLVFCADCKRPMARYKNVSERCKHLYYSYICMTHSENPASCPKKYLRETTLLEILWDTLQREIALAGSLKAASEKYTRSSKAVDTEDAITQEISDASNALERARMLYDSLYQNYVDRLMTEEEYTELRNRYKRDIENARVRLAAAEQQRQTERKKTAENPWLIVCEKYADELALTEEMAHTLIERIEIDADSHVSVTLRFRDEYRTLIALLAENGEAVPV

SEQ ID NO: 4733 - protein, 565 aa, unidentified
  source 1..565: note = uncultivated organism
MARTKNRFNAVQIPEAVTAGVPIKQGKSFRVALYARLSVKLKSRPSESIANQLSILREFIRDKAEFAEYHEYVDSAVSGTSFDRPAFGQMMDDVRKGKISCIIVKDMSRFGRDYIEASNYIETIFPFLGVRFISVSDHFDTEAEFNQNKALEIALKNLVNDMYAKDISKRVSVSRRLDMERGKFTGSNAPYGYKVDSGDALRKYVIDRDAAAVVRQIFELAADGVTLREIAKALQEYRLALPGDYLKTGNLYVEEGAEAKAWYPGTISNILKNQAYIGNMVQGKRRTSLYDTEARHATDENDWIVVENTHEAIVDKELFNKVRAVMDKKVEESIFTSDRGKNLPIKEDIFAGILFCGNCGRRIPLASRILEKDGVLERQYFYSCRYNYDFGGKQCGCTIMEQELIKVVNNLLTTQIAVLTDSDRTEASMRGVMDRELKEHDMRIQKIQKQIDRKNYEESKEYQSYVTGEITRADFKCRQEKNADAIMRLRGQIADEEASRRRVKRFCEKKIQWLKAIYRFQSEVTLDRNMIKILVDSIYLYPDKRLVINLNFKDEYARMTDGEEI

SEQ ID NO: 4734 - protein, 524 aa, unidentified
  source 1..524: note = uncultivated organism
MRFATYGRKSVYSDKSDSVDNQERMCREYADFRFKGQVESFEAYSDEGLSGANTDRPGLKRLLADVDEGHIDALIVYQLDRLSRDVKDFANIYDKLAEKGVMFISLKESIDTNTPIGKAMMFITATFAQMERETIAARVTDNLNGLAKKGFWTGGKPPYGYVKKQIVTDGKKHVTFAIDPEASKHVEWLFDTFLDNRYSVQQMETAMRRQGIRTPQDAFFSASQLHRTLSMPYYAQATAEVYDYFSALGCQMDSSPREAWDGTHGIMLYGRTKSTSPNRGSVQPHSNWIVCIGKHEPFISAEKWLAAQERLHKNVFDKTLKYNVPLLKGVLRCAKCGCKMQIGRKKIKDRVDSQYRCLKRIHEGKEGCDTRAIKCEKLDNQVLDIFRKIELDPETVKEYASISQPENHSSTIKKKEAEASRLRTRINHLTDALAMAEQSSAAQYIIAQIEAENLNLDAIKRDIELAKSKLRQEQKETVSLEKKVSEIIRMMQGLDAFTDVERNEIIREVVKECTWNGETLFLRL

SEQ ID NO: 4735 - protein, 542 aa, unidentified
  source 1..542: note = uncultivated organism
MKNGQANTAGVPTVEPKRVAIYTRKSTDKGLERDFNSLDAQREACEQYIKSQAHLGWKVTDTRYDDGGFTGANIDRPAFARLLNDIDAGRVDVVVVYKVDRLSRSLLDFAKVMDRFNKAGAAFVSVTQNFSTADAMGRLTLNVLMSFAEFEREMISERTRDKIAGSRRRGKWTGGAVPIGYEAQDKKLVIVEHEAHVVREIFERYLDRQSALSIAQHLNETHQLTKQRVTSKGRVRPGRAWSKDVVLRILKNPVYAGLMPYRDEVFEGEHEAIIEPAIFHRVQVYLKKFGAGRTGKPRSGEYLLSGRLFCVCGYAMTGKSTRKKKGNTKRYRYYQCVNRDKRGRRACDARPLPANAIESFVVTRIRDVTADGNLADEVTRRMDAYFEQKRGALEREQKKLPTLIAELSSEIKKLIDTIIGVNESARRQIETRIDELGQAMAKHEMRLVEVERTLNGLDDLQSEGRWVSGALKTFDTVWDVMSPANRMRLIEAVVKKVIVNEPENEVTVMLNDLGAPDRKDATTGDAEAGDPAFAPLAMEASP

SEQ ID NO: 4736 - protein, 540 aa, unidentified
  source 1..540: note = uncultivated organism
MNVGLYIRVSTLQQVDKDSLELQESMLKSYCKTHGHKVINLFKDAGLSAKKDNVRPALKQLIQFVKEKKIELVLVTKIDRISRSLKDLLDMICLFHEHDVAFVAITQNIDTSGYMGRFTLNLLGAIAELEREMTAERVSEVMRHRASNGKWNGGVIPYGYTTQQRIYKQSIKEKKSKAEAMGIASKLAPQPKLLYTDKDEVIILKQIFKTYIETKSIRETTRQLYLAGYKSRSNKIWATTTISRILNNPTYTGKVLYGKRKTDSKTGKLKKAEVANQTFVDGLHEKLIDDETFKTIQHILSNTSLKKSNAEKQYLLSRLLKCGKCGGSMNGHTYNKSKNEKSYAYYKCSNHFKVPSKCEGLTIPSDKLEDFVIKTLTNLSKDEVFLKDKEKMMKTLEKEASPDESKTKEDLVKLTSTEKDLLSRRDNLLEAMERKLLDDKDFQERYEKLKVDLENNRATQQKLHSFVDNVDIMKNALNASFEEISSFGLNWEYLDFEGKVAKTRAIIKEINVTEEDINIQIYLDTESSSSLSVVPRTDTD

SEQ ID NO: 4737 - protein, 525 aa, unidentified
  source 1..525: note = uncultivated organism
MNLYHNYSINRTYGLQKKYKVGEKMKKIAIYSRKSVYIEGSVSIQTQIEMCKEYANKKYTNVSFDIFEDEGFSGGNTNRPAFQRLLKAVSLKQFDVVICYKVDRIARNTLDFLNTLEMFKKNNVDLISISEGFDPNTQMGKVMLTLLASFAEMERSNIQQRVKDNMLAIAKSGKWTGGSPPTGFKIGVEGGLELSAPDLIKTIYSMKYSNCKNSEIITTVENEYNHKFSNTTLVTSLKRPIYVRSSKEVSTFLSNNGYQVLGIENNINGYLTYTDKDTKYAVVSNIEGIVDPDVWIKVNKDIKSKNSRGTNRFNKDYWLTKTLVCPICNKTYAGHTKKWNKTYVRKDGSIYENSNTYHYYMCRDMLRGTLKECSNTKRIKQEHLEDKIEKYIYSLKNKEVFKSSYSVKKSNNTHEIKKLNKLLKTKEVAINNLVDKLSLLTSSASSIIIDKIEVLAKEMDDIKLKINELELEDMDNTLNNEDIIYENIKSFNKQMSIDEKRTSVMNIFEKIVYYSDSDTFEVYFN

SEQ ID NO: 4738 - protein, 554 aa, unidentified
  source 1..554: note = uncultivated organism
MKEASLDSRKAAAAAISSGRPNRPSLCSLMISWRGVSIPIAPKTFRVMGVPNILGGIIGSVPKTPVQELKTVAVYCRISLDRKQESESPERQAALCRQYVEAKGWTVGEVFIDRDASAYKKVPRPQLDRLWAGVESGKFGAVCVWKLDRLTRRFTDAGAILKRLQDASVELVSVTDNIDTTTPLGQAVLGIFVAQAETESRNTSLRVSAAWEARAAQGKPHVGGRRCFGYTQHMEQIPGEAKAARWAVKRMLAGDSLSSIANRLNEQDTKTAAGGKWNHGNLRQWASAPALAGIRTHRGIELEGAWKPIITRAQRETLLVRLGDARPANGTKKVHKWLLTGLARCGAERCGGRMSMSHGRNYACEVCHKVFASRVAVDGYVTDRLFTLLSNAAIEPLPDTPDPGAMQRAIDEDEKRLEDLNRARFVDGAIGEDEWKPARDALVRRLEATREALTAMETDLGSELNPGSREDLEAWWTDATIEQQRAAVRDAFVAVIINPTERRGCKFDTSRIELRWRTFSGAGRRIMEKVNAEGWEPTGEPGDGLTDEERYGVG

SEQ ID NO: 4739 - protein, 576 aa, unidentified
  source 1..576: note = uncultivated organism
MTKVDAGADGQRSRRVRCAIYTRKSSEEGLEQEFNSLHAQREACEAYIRSQKHEGWLCLSEAYDDGGVSGGTMERPALIRLLDELRAGKVDVVVVYKVDRLTRSLADFAKIVEILDHAGACFVSVTQQFNTTTSMGRLTLNVLLSFAQFEREIAGERIRDKIAASKQKGMWMGGSPPLGYDAKDRKLVVNENEAMTVRHIFRRYVELTSVRLLKQELDAHGIVSKSHVSLEGRHWGGRPLARGALYLMLQNRIYIGEIVHRNKHYAGDHAPIVDRDLWDKAQTLLAANAVHRRHRAGSRNPSLLAGLLFDSEGLGMTPTHAVKNGKRYRYYISRPLVTEGRMAAPNGCRIPAAEIEQLIGDRIVSFLADSGAVFDAIRPHVTEPAKQQQVMETTAELARCWPDVLAARQRAVIGTLIKRVEVHAERVEVSLIPSRVAMIATAETGFATDSATPDPIAWSIPACLKRIGKETKLIISNQVGLQQLPNRGLVGLLIKAHQFQQKLLRGDRTNVSSLAAEEGVTGSYFTRLLRLSWLAPDIAAAILDGRQPPTLTASKLMEGASLPLDWRAQRSVLGFL

SEQ ID NO: 4740 - protein, 513 aa, unidentified
  source 1..513: note = uncultivated organism
MNKTIKNCAIYTRKSTEEGLDQEFNTLDAQRESCEAYVLSQKADGWKTLKTNYDDGGYSGGNIERPGLQGLIEDIKAKKVQIVVVYKIDRLTRSLADFSKLVEIFDEYNVTFVSVTQSFNTTTSMGRLTLNVLLSFAQFEREVTGERIRDKIAASKKKGMWMGGFPPIGYQRIDKKLVPEEQGQRTVQLIFEQFIKLKSVKALSEFLLSQNIKTPIRISNKGNVYGEKSFSRGHLYRILNNPVYTGKIQHKDKIYNGQHERIIEEAVFNKAQEILKEQTKIRKSKSTPTGQLLKGLLYDIDGTVYSPTYTSKSHKRYHYYISQNLLQYRDHPKGLLARIPAHEIEDTIKTAIINLLRNKDFLNQTFPDIDSHITKWVLKQEVDLNHEDLRKFLNKAILSTDHIELKVDTSETYKHLKQLLGIDIQPPVVKEVSHMISYKTKRVNNGAIVLDSSDQKKDGLDIPHDQLARIVKGIVWRDEHFAGEALRDIAKRYKHGENYINKCIREGFAFLST

SEQ ID NO: 4741 - protein, 599 aa, unidentified
  source 1..599: note = uncultivated organism
MDEIEEQKTKKVALYLRVSSEDQVEKFGLPMQLESLTSLINSKGRFEDGSPKYELAGERYIYQDGDVSGTVPLEERPQFARLLEDLTFSKKGSRPFDVIAVYKIDRLARKLKILLKATDIFKDYEIELISANESIDTSNAFGRAILGIVGVIAELEIETTKQRTTDGRNLAWKIGRVMGQQAEYGYNKDKEKKRIIFDKEAEIVKRIFRDFVFFGLSAEQIARNLTDEKVPSPSASAIIHKKRAGKKSKKKNSIFFWRDDVVRKILRDEVYLGLYYYGKTKKGKRISKDKWQLSPHRHKPIIDKPTFLEAQEILRRRYHTFKSVQKRDDSHTYLLSGLLRCDTCKRLNESSEYELATWNGKKKEIVKGSGNYSYYYECGRKTKSKTEHTCSVLQVPANELEEYVLNFARKLLRDPKSVFQYQKNLQSTRLHIKHLEKRLEKIREQYNAIPNVNKNLREQHKYGYIDTEELKNEMDKSERRAATYAQEINKLMAEKAQTELPMYYSATLEQFAQKYAKGLENVENNREEINELLTHLISDVVIYSRPLKADDKVSGPKTTKKRFMPNGIKIVMRLPHEILMHLIEDQEVKQEFGVKPVHL

SEQ ID NO: 4742 - protein, 645 aa, unidentified
  source 1..645: note = uncultivated organism
MENEERKIAGIYIRVSTEDQAREGFSLGEQEEKLRQLCRYKDFEIFKVYKDAGISAKNMKDRPAFQQMLEDMKAGKLNYIVAYKLDRVTRSVRDLEVLISTLEQYHCYLICDRDDVNTSTANGRFFVRMLTVLSQLEIEIVSERTKFGLNGAIKAGHIPGKIPLGYYRDTDKTLKVDVTTKDIVLRIFELYLEGKSYQTIANILNQEKVLYPQVKQWIDSSVNRIINNKIYMGDYERYKNDNDRETEIYMDVVPPIITRAMWEEVQKQKETNQRAYCRNRVYIFFQKLVCPTCGQIMTCKGTGGKKSKYMYYFCDTCKLYYNEDEIENCLIDYILDLVEYDFHVKKYFYPILAEKKDDGSKKIDEEIKKLLQQKDRLKKAYMNGILEMEDFSEDYKLIEEKLSTLENKRIDALDFDKENYNPQHLMAERDIEREKLTEHEMYKDVLLKLWTMKSKDEKQSFISKFIDTATLKKNKDGSFEIEKVNFRSSFIEQIDKLYDKGIVDIPTMIERNGKLEDAKVSVNMNKNRLEDYLGTLKKELDINYMDLGEYYFHDDKIDENYDTKTEVAKIRNGAVEFKVKKNQKIIRFVAIKQFKNFLAKPQKENCAWVLLPILLRRKSVNNCCKTTIYIFFATIKLTWHVLFLL

SEQ ID NO: 4743 - protein, 568 aa, unidentified
  source 1..568: note = uncultivated organism
MIDMRKTAIYSRKSKFTGKGESIESQIDMCREYISREFPNVEESDILIFEDEGYSGGNTNRPQFQKLLKACRERQIAHIVCYKLDRISRSIADFLKLTEELEKLNVNFVSINDKYETHTATGRAMLQMTMVFAQLERETIAERIRDNMLYLAKDGRWLGGNVPTGYRSVETESKTRSDGTKRKVHKLEIVEEEAEIIKLIFNKYLEFQSLTKVETYTLQNDIKTKNGNDFSRYTIKGILFNPVYMIADEQAWNYFQSADLDMYCDKSEFDGIHGMMVYNKTNQRSGTSNQYNDMKEWVITVGRHKGIISGNDWVQAQILLNQNKSKSYRKPKSEVALLSGLLYCGNCGSFMRPKLSSRTNKNSERIYDYLCERKEKSHGEKCNMKRPNGNELDRLVCEEVKRLSEDSSDFMKNLKRGLKSIDYNDESYQDKIKNLKNSKTGYENKINNLINSPSESEQSSAHDYIIATINELAIKIKLLDKQIQEYTDLANTTHISESEFEIMAEMLSNAANSLDNMTVAQKRTALRSIIRRIEFDGENVHIYFFGSDENEIDLSEEDNLEPLREGCK

SEQ ID NO: 4744 - protein, 529 aa, unidentified
  source 1..529: note = uncultivated organism
MRNLTDIYVRLSDEDRDKRCAIDESESIQNQKSMLINYCIEQGWKIHNIYCDEDYSGADRNRPAFNQMLKDCEEGKVDIVLCKTQSRFSRDMEMIEKYIHGKFLEWNVRFVSIIDHADTNVAGNKKARQINGLINEWYLEDLSDNIRRTLHHKKIKGEYCCPYAPYGYKLNPEDKHKFIIDQPAAEVVKSIFEMYKQGMGYIRIAKALNEKQILPPGMYKELQGLNYRNPNAENVSSRQWRDSTIYYILRQEVYTGAIVQGKTTNISYKNKKRIKLPRSEWIVVPNMHEPIIDEELWNAVQDRLKNRQGNDKQFKSNTYEINPLRGIVFCKECGSGMWRMSYQCSKQRYKYYRCRTVKNSTGVCNNTHSIRQIDLEDLILKELHKMSETYFDENEIKLQKKRDSQNRLSTLQEEKRQIENKIAKLQNDSVQLYKDKLSGIVSDEQFKIFSDSFNSELSNYNERLELIEKECIGLSTEKKTTLSREMILEKYKNIDKLTFELVHELIDKVYVGALNLETKEREIDIHWKF

SEQ ID NO: 4745 - protein, 506 aa, unidentified
  source 1..506: note = uncultivated organism
MDAIYARQSIDKKDSISIETQIELCKREGGEDKPYLIYSDKGYSGKDLQRPDFQKMLSAVRERQISRIIIYRLDRLSRSLLDFASLIELFRSYGVAFVSTQEKFDTETPMGMAMLNIAMVFAQLERETIQARVRDNYYSRAKTGSWLGRRAPFGFSKDTIVMPDGQHSYKTLQKDKSQSVILQKLFHMYGREMLSLSAIANQLNQEQIPSPEGSVWDSSKISRILRNPVYVKASPAIYQYYQRKGCQITNDITDFVMDNACFLYGKREENARKFSDVKDHYLSLAMHQGLIDAELFLKCQQLLDANIRFGSRHGSYRSWLIGLLRCGHCGATMRVNASRGGKYLYFTCQNKSRGLCQGKSYCAAVPTIEEAVKQQLFQQIQPLATIQVPGQPTCQQEIKQAQARLAAIEEQIARLIDMALQGGELTGKYLEKRLCGLEKEKNQAKRAILKLQSQSNQPVLPPQPKDLPRLWEQLNTGQRHEIAKIFIKKLLLDERGLSIYWQYNLQ

SEQ ID NO: 4746 - protein, 551 aa, unidentified
  source 1..551: note = uncultivated organism
MNNKNIYDTGLYLRLSRDDADVDGSKKTESNSISSQRDILRAYVQSHEDLQIYDIYIDDGYSGANFERPEFQRMMADVRAGKVNCVLVKDLSRFGRDYIEAGRFIQKTFPALNVRFIAVTDGFDSLYADKTDSSLILPIKNFVNDSYCRDISMKVKAQQKVKRMEGKCISAFTVYGYKKNPEDKNSLVVDEYAADIVRKIFAWKIAGMSLGAIAEKLNATGILSPMEYKKSLGMKYYTGFEGSSTAKWAAASVKRILVNPVYIGTMVQGKQEKVNYKVKKRIDKPQEEWICVKNTHKAIISEVEFLTVQDLLKYDGRASSNTDTANLFSGVLICADCKAPMIKRVNSYKGKKKVFYICQTKNKSMGCSRHSIEEETLKRIVFKEIKKYLELMASYSEVAEYLEQMNVNYEQVVEYDSQIATLQTEYNRYYGLKSSLFADLKEGLIDKKEFDEFHNLYERKCSELENAIAAQKKIIKDMFQNGVAAKSQLEKIKETLELQELDRELLVTTVRKIYVHEDKRLEIEFRFSNEMDKLAVMSQMCHEKTSMQEVI

SEQ ID NO: 4747 - protein, 570 aa, unidentified
  source 1..570: note = uncultivated organism
MRNIRCAIYTRKSSEEGLEQDFNSLDAQHVACAAYVASQASEGWVLIKNRYDDGGISGGTLERPGLKALLADIAAGLIDNVVVYKVDRLTRSLLDFAKLVEAFDKAGVSFVSVTQSFNTTTSMGRLTLNMLLSFAQFEREVTAERIRDKIAASKQRGMWMGGTPPIGYRPDGRSLAIVEEDAATVRYIFERYLELGTVRALHDELIQQGIRQPRRTTSAGRTFGGTSFGRAQLYNLLKNPLYVGRIRHGSKTYPGNHPAILDKETWNRVQAQLADNSQGPQQGPTAKDPSLLAGKVLDQEGQPLVATHACKGKVRYRYYVSRHLQHGAHSNDASSDSKNGVRIPARELERLVIRAIVAELKDPIALSRRLGTSIDGPRQVAALVKNAEAMVAALDGKRGLAVQTLLGRIVERVTIQDDVVNLILDSAAFCDALGLEASSSAPDAFRIMIPAHIRRTGLAVRFVLETGQQAADSPVDQKLVAAIVKGRAWWKRLQADPGMTITDLAKTEGLAPNYVDRILRLAFLSPAIMNAILHGTAPTNLTLERLRDVKCIAPSWAEQHRLLAMPAARS

SEQ ID NO: 4748 - protein, 559 aa, unidentified
  source 1..559: note = uncultivated organism
MTKQSHYNVGIYVRLSQEDERAGESISIENQKKMLMEYVSKQAGWNLVEIYEDDGYSGTDFNRPGVQKLLDDARSGKIDLILVKDLSRFGRNYIEVGQYVDYVFPSFNIRFMALSDNVDTLDRNSTAMDMMPIVNLFNEWHAASTSKKIRAVMVSNAKQGKYHAPVAPFGYLVGDTEHRLPVVDETNAPYVRMMYKMRSEGASSPQIAKALNAQGVITPSDYTYQRLGKPNPYVSNHLWNAAMVRDILQNPVYIGSVVSQKQTTVSYKNHKKYIKDSEDWIVVENAFEPIVDKELWDKVQEVNKSCSHGKVTKSGVILPLGGLMYCADCGAKLKNNTTFHTSKKRGDYKVVSYICNTYANHGKTVCSSHSILQRVIEGLVLEDIRARAKRVIEDEDGERKRYLAIKASERKQQSDDESRLLKQAEKRLAELETIISKTYEERMLGRLPEDLSAKMLEKYSAEQKELSAQAEQLRKSKIQAEQDNQDVEKFILRLKKWSEAPCLTRELCLDLIEFVVVHARPEEYGAPRNIDIYYKFISKPLADSRNLLLPQNCVEIHQS

SEQ ID NO: 4749 - protein, 502 aa, unidentified
  source 1..502: note = uncultivated organism
MHRVSAIYTRQSVDRLDSISVESQVEFCKREVGCSEYAIYTDKGYSGKNTDRPAFQDLLNDIEHGKIERVVVYRLDRISRSVLDFANIIEVFQKHKVDFVSTMEKFDTSTPIGKAMLMIVMIFAQLERETIQQRVTDAYHSRSKRGFYMGGRIPYGFELVDAQIEGIRTKKYQVVEREAEVIKLIYELYAQPQTSLGDVVRELGSRNIVKRDGMPFSRARVRELICNPAYVKADYRLYEFFKANGSVVINGPEDFIGTNGGYLYSGDVKKTKSISLEGHTLVLAPHEGIVDSGKWIKCRTKSLANRRVADPTKAKCTWLAGKIKCGCCGFGLVTKEGRRKTKANKRYYLCHSKYNGYECTAGSVDADIVDDIVFERMKQKIDQFRTLKQGEQDGYSLQEVKLRTRISRIDDEISALLEKIMEANPTVMKYINDKVNELDAEKKQLNAELFQIEEQKKNSVPEIVGYMERWEELSINDKIIVVDSVIERVVVLENEIEITWKI

SEQ ID NO: 4750 - protein, 509 aa, unidentified
  source 1..509: note = uncultivated organism
MRITDITPQKTVADKKERWVAYGRVSSKSIEQLHSFTAQIRHYKDYFKTRPDCELVDLYMDEGITGTDMYKRDEFLRMIDDCKREKVDKIITKSVSRFARNTEELLNVIRLLKSIGVSVYFEEQNINTEKLNAEMILTFPGMAAQKESETISGNLRWSYKKRMESGEYNCTRTPFGYKWVNGELQINEAEAAIIREIFKLYLQGNGIQKIADILNERKIEKRYGYAEWHKNTILYILNNERYMGDAVLQKKYTTDTFPHKKIKNKGQKPKYYVENSNIPIISREIFEKSKQMRKDKGKASVEIIKYPLSNKIFCSECGSAYRRETKVGQKIFWHCMRTAVGVSHCKSKRLSEDCIYNAFVNVFNTLKAYRSEIIENYMYEINRLNASVSDIEDKIKEMDVKVANLSAKNLVITKLYTNGSLSVADYNAKTFEITTKLAELRAERKKLLGEERDRQIVELIELNETIKISPYISEFNEELFNATIDKIIVGSDNLVTFCLVGGLKIKEEV

SEQ ID NO: 4751 - protein, 607 aa, unidentified
  source 1..607: note = uncultivated organism
MIKLGNGFSLGEQQEKLEALCKYKGFEVFKVYKDAGISAKDMEHRPEFQQMLQDMRDKKINYIVAYKLDRVTRSVRDLEVLITELEKHHCYLICDRDDVNTSTANGKFFVRMLTVLSQLEIEIVSERTKFGLTGAIKAGHLPSNAPLGYKRVDKKVVIDPATKGIIERIFELYLQGKSYQTIANIFNEEKVLFPEKKKWTDSIIEKIINNRIYIGDYERYKRVGKEQGKETEIFMNVVEPIISRAMWEDVQKQKEKNQMSYCRDRVYMFFQKLQCPTCGKIMTCKGSGGKKKKYMYYHCDNCKLYYREDLIEDCLIENILQLVEYDFHVQKYFYPLLAEKKDDNKINEINNEIENLEKKKNRLMKAYMDGIIQEEDFSTEYKLLGEKLSNLEQEKLNMLDLNGSEFNPQHLMAERDIEREILIEGEIYKDVLLKLWTMKDKAEKQELISKFIDTVVLKKNSDGSFEIEQINFRETFIEQFDKLFKLGLIDVPQKYEELGITNYFRMAVNIDRKQLNDYIEKMKTEFDIEYVDLGEYYYHDGSFDETYDPKNPMVTFKDKNINFAPLKNKKIIRSVMLMEKQNFLAKPSAKVHFGLVARKTSKKKHKK

SEQ ID NO: 4752 - protein, 541 aa, unidentified
  source 1..541: note = uncultivated organism
MLEKYMMMNQERQLVNTKKKVAAYCRVSTDRDDQANSFESQQRYFRQYIENNPDWELYGIFADEGISGTNTKKRKEFQRMITCAENGDFDLIITKEVSRFARNIVDTISITRELKKHGVYVIFMNDGINTMDGDAELRLGIMASIAQEESRKTSERVKWGQKRRMEQGVVFGRSMLGYDVRNGKMTINEEGAEIVRMIYHKFVNEGKGTHVIARELAEAGIHPMRVKEWSNTVILRVIRNEKYCGDLVQKKTYTPDFLSHEKKYNKGEEEFVIIKDHHEPIISRELFEKANRILDAKSLSQEGKAKHSNRYIFSGKIKCGKCGSSYVARYKKRKDGSTYKAWRCYQSAKYGKKGCSCDSIRNEDAMYIMYLVCRDLKYNRRKIVSNLTSAIESVLFSECVSDRTELTAQLEKLTKKHTGLIELYTSGDISKEEFTDLRQKYSTEIDSLKSTLNGMEVQQNMKNQHSELIADIKKSIDEIINGVQYEDEFYAQILDRMVVNDKNHIDVYLNMLPYKWSFAVEKIAISETHLPISVSKPFTSA

SEQ ID NO: 4753 - protein, 514 aa, unidentified
  source 1..514: note = uncultivated organism
MMPQAKLISPITRQEVRKVRVAAYCRVSSNSADQQNSYANQIRVYTTLIQRKKEWELVEIFADEGLSGMKAQNRTEFQRMIKMCEQHQIDLIITKSVSRFARNAKESLEYVRKLKLLGVGVQFEKEGIYTLALGDEMLLNTFSAIAQEESKSISQNQRLSIVKRMQTGEYVDSNAPYGFRLVDKALMVYEPEATIVRMMFENYLSGQSTSEIARELNSRGIKTKTGKSVWRSTKVAYILGNERYCGDCKYQKTYRDTTVPFKQSRNRGQEDMFYASMTHAPLIDRDTFDKVQLLLKKRQDIFGKSTTQNIYPLTSRIQCSECGSYFRRRMVSGTAKWGCSNHIQDRTQCNSNYYSEERIYDAFIAMVNKLCFSEYDILGQTLSRLESAERKRKQKNTAAQEISRNIVDLNAKLVMVEQLHARGYLKDEIHKAQVREINDQLRQLKRERQSEFSSGITDMIGELERLKKLLGELEKPLDRFDEKLFSEIARAISINHRDEMVVTLIGGLRFTELL

SEQ ID NO: 4754 - protein, 537 aa, unidentified
  source 1..537: note = uncultivated organism
MNRTSIQSLSSARQPAPEENGATRCAIYTRKSTDEGLEQEFNSLDAQRESAEAYIASQKHEGWSCLPARYDDGGFTGGNMERPALQRLFADIESGEIDCVVVYKVDRLSRSLLDFARMMELFDKHAVSFVSVTQQFNTTSSMGRLTLNILLSFAQFEREIISERTRDKMSAARRKGKWIGGQPILGYDVDRQGGKLVVNEEEAAQVKAIYQLYLEHQAMIPVVEELGRRGWHAKRWTTQKGKDRGGKPFNKGSLFRLLTNVTYTGKVAFKGTIYDGEHDGIVDIDLWQRVQDTLRRNGRTGGKAVRNKYGAFLKGILYCAPCGTGMIHTYTNKNGRLYRYYVCLNAQQRGWSSCPSKSLNAQEIENAVVEHIRGIGSNETIIAATAAKVREESEKRLAELKKERQSHERVLKRLHARVQKLMGESFSAASDQKLAIDQLADLQDQIGSLDQRMTAIREEAISIQNEAVDEGDLAKALTAFAPVWESLSPREQTRIVRLLVERVGYDGRDGKVTVTFRSPGIKALCSDAAVRDVEGTA

SEQ ID NO: 4755 - protein, 562 aa, unidentified
  source 1..562: note = uncultivated organism
MIRQRCAIYTRKSTEEGLEQDFNSLDAQREACAAYILSQKHEGWAELSDRYDDGGFSGGSMDRPGLTQLLNDVEVGRVDVIVVYKVDRLTRSLADFAKMVDLFDGAGVSFVSVTQAFNTTSSMGRLTLNVLLSFAQFEREVTAERIRDKVAASKRKGIWMGGAVPMGYDVKDKALIMNRREANAIRTIFSEYLAVGSVRGLSDRLDALSIVSKRRTDRYGRTTGGTSFSRGALYNILRNPIYIGKTRHKNELYEGLHEAIIDNVIWQKVQDQLANHGGKKMSAARRSAKRLLDGVLYDSNGRLMRTTYAIKSKSSGGTKQSQRYWYYASTPSGSDEQSIIERLPAGEFERLVLTGLKNHLNDQSWLTLKIRMAVDLDPSSITKILQTAGSLRNQITDKGEHSDAQYLNGLIDRIDLSKGQFCVRLDLGALQKTEETMLPISAAFEVPFQKRQNGRAKPIIIAPPDAPQPDQDLINLVADAKRWSVELLNGKSCTIRQIEDRERLRSGSVSRVLPLAWLAPDISTAILEGSQPQHLTAKKLRILAELPLEWQEQRKILGFPHQ

SEQ ID NO: 4756 - protein, 551 aa, unidentified
  source 1..551: note = uncultivated organism
MEVRKIPPRLNRVRKPSPVASVEEKPIAPALPAQPRITKIKAAPKTETKKLRVAGYCRVSTGSIDQASSILNQREHYEAYIKANPDWECVGIYWEADVSGTKASNRSELQRLISDCKAGRVDLILTKSISRFARSTTDCLEMVRTLTALGVNIRFEKEGINTGTMESEFLLTLFSSFAEEESKSISLNETWAKRKQFQNGTFRFSIAPFGYDLVDGSFIINTEQAPIVKEIFNAALSGKGTTKIARELNARGIPTGTKRNDGSPGVWTAYMVNGIIKNVVYLGDVLHQKTFNDHFHMKYNYGERQQYYNEGHHAAIIDKETFDAANAALRQRGAEKGNVPKDRHLRNNPHNNRYAFSGRLTCACCGGKMKRVTQKTTQGMRYHWSCAQHLADKEACTMKREQEESIRNAFSTMMNKLVFSHSLILDTFLEGEKEDSTKAAELNKIQDEKRRLTLLLTKGCGESALYYQKIMQLECQENELRASPTSDRVLRIKELKAVLNDWKKGGDPDTFFTKVCDGAAVKTGEYAEFNLKCGLKLRESLKGEQHDTIRL

SEQ ID NO: 4757 - protein, 563 aa, unidentified
  source 1..563: note = uncultivated organism
MPEEVSILKAPKVKRIALYCRKSNDENLTNNVTSIDAQKSCCRSYIEIQKSNGWEECQEAFDDPAESGKSLKRPAMQRLLKRIAEGKVDGVIVYKIDRLTRNSKDFHGLLELFEKHDVAFVSATESIDTKSPQGRLMTAIMIQFAQYDRELDVLRSQDFHLARAKKGLWSGGWHPLGYDIKEKMLVVNEKEAELVNRIFNMYVKYHSTMRVAQELNQLGFRRKLYKIKTGKTYGGKPFDMDGVLTILQQKAYMGSIQNTRTKQAFPGQHKPIINPELFAEVQELLLSRNHRGGEVHFAVNKHGFLLKGLLSCGECGNAIVPTFGNKKGKAHLYYKCLSGSNGLPHNCAITPLGARKLEAYIVENIAAIGWDRPFLESVVTKTQQKAKECLTPLAKDRQVIEGQLKTIQGELRQLVNLVKAGSASAEVADEIQHLEEAKKDLAGRILKIEALTSHSLKAVYDVDVIQGTFQRFAIFINRLPVELQIKAIRLLVERITIFKDHVVVKIFESPVEDIQKALDEKFVFRGGCLPEQGGPKTNFKQNNPRIGVVEVDKSWRGQGDSNP

SEQ ID NO: 4758 - protein, 541 aa, unidentified
  source 1..541: note = uncultivated organism
MCKSKACIYLRLSREDGDVEESNSISNQRELIHNYANKQGIEILKEFVDDGYSGATYNRPQFNEMIKSLENKKFDTLIVKDLSRFGRDYIGAGRYIQKIFPDMQVRFISITDNYDSQNADMNDTHLILPIKNFINDSYCRDISNKVRSAQKVKREKGDYIGAFAPYGYKKSKENKNKLEIDEKAAEVVKRIFGMKLLGYSSNSIAYHLNDLGIDSPLIYKEKSGLNFNGGFRPIKGGKWSVNSINRIIRNRVYIGYMEQGKRIKLNYKSEKEICVNPNDWVIVKNCHEKIVSKEIFNIANNLLDRDVWQARNKNPDIFAGLMFCKDCGSPLIRREIKSGGKKIIQYICSNYNKNGSCTRHAVKKEELLEVIKDIFTQYISFQELLYKKIKNKKIKLSAIDYEGRELIRQKEKYEAILSCLYSDLEDKILTKNEFNRFREAYKSKIKEIDKEIQNRENIKSNVYKLLEENKKWINEIKRNKQLNKIDRLSLVMLVNKIVIGENKEIQVVFNHAEEFKILNKMIANDKELDSLKNISSARRIS

SEQ ID NO: 4759 - protein, 567 aa, unidentified
  source 1..567: note = uncultivated organism
MQQNEDVIAVYSRKSRFTGKGESIGNQVDLCRSYIRSTFGEQYADRAVVFEDEGFSGGNLNRPGFRKMMDDARAHQFRAVVVYRLDRISRNISDFSHLIEELGRLGVDFISIRESFDTSSPMGRAMMYIASVFSQLERETIAERIRDNLHELAKTGRWLGGTTPTGYASESVRNITVEGKCKKACKLKLVPEEAEIIRKIYHLYSRTESLSETEAQLLREGIKTKTGRDFTRFSIKAILQNPVYLMADADARQYFLDRDAEVFSPPEAFDGQRGILAYNRTHQAKGRATVYLPVSQWIVTVGQHPGLIPSGVWIRTQESLERSKCKSYRKPRNSRALLTGLLLCRCGSRMYPKNTSRITDDGRPIYTYVCKAKERSKGSLCSCSNVSGNALDAAVLEQIRALPEDTGALVSRLSAHRQFYAGQQDTDLPAQLRRQQSEIQRRIRALIDSLPELEDSAAALHVKERVEELHAQAATLRSRLSALETPPGPQALWGPRQDTLARRLAGLQSALDALPPEQLRSVIRAVVEKVVWDDRQAHVVLWGAAYEASPAEHPTLPEQTHLREDSK

SEQ ID NO: 4760 - protein, 556 aa, unidentified
  source 1..556: note = uncultivated organism
MANAAQKGTLAPLVRCAIYTRKSTEEGLDQEFNSLMAQREAAEACIVSQRELGWKALPEPYDDGGFSGGNIDRPALKRLLADVTAKRVDCVVVYKVDRLSRSLLDFAGIIGLLDQHGVSFVSVTQQFNTHTSLGRLTLNILLSFAQFEREIISERTRDKMWAARRKGKWTGGYPVLGYEVDAVGGKLNVNQAEALQVRKIFRIFVSKGTLMETLSEMRRRGIGTKSWTTRKGSVHAGKPFNRHTLEYLLSNEIYIGKVRLKGELHHGEHSPIIDLPLWREVQERLKAAKRSRPDQAGQPQGALLRGLLFCEACGTPMVPACTTKKNRRHRYYTCLSAQKKGWKTCPSRALPARRIEDSVIERLGQLRPLGADPARCPDRRYLMENLVERVTLHGGTGQVRITLTQAARCRREESMTEVERRTIVFHLPSKKTPPPARRTKTRAGRLPRIARLMALAIRFDQLLRNGTVKDYADLARLGRVSRARITQIMNLLNLAPDIQEGLLFLEPVRSWRDALHERAVREVVKEISWERQRKIFAGLLSRQSGVERKSVEELER

SEQ ID NO: 4761 - protein, 511 aa, unidentified
  source 1..511: note = uncultivated organism
MKDQRKMVRCAIYTRKSTEEGLEQEYSSLDAQRDAAEAYVSSQKHEGWEIVAKSYNDGGFTGSNMERPALQNLLADIEAGEIDCVIVYKVDRLSRSLLDFTKIVEKFDQHGVSFVSVTQQFNTSTSMGRLVLNVLLSFAQFEREMISERIRDKVAASRRRGKWSGGMPLLGYTVENTKLIVDEVEADRVRQIFELYIEHCSLLPVVKVLRQRGWTTKQWVTRKGDHRGGREFTKNALYKLLTNITYIGKIRYKDETHQGEHDAIVPSDLFCQVGIRLKANGQSGGTGVRNKHNALLKGLIWCKSCGRSMTHSYSCKGIKRYRYYVCGTAMQNGWAECPAPSVPAGEIERFVVEQIQSIGTDEDLLNQTIGQIESRSKQRLEAFESECKGLRRQLRNDHEKLRAIAANLTNNRRVAGLPELQTRIDAAEDRLKLIAWEQQSLKDQSIDAADVRRVLRGFEGLWETIQPREQVRLAKLLIDRVDFDGVAGNVAITFHDTGLQSLSAGEREVMA

SEQ ID NO: 4762 - protein, 561 aa, unidentified
  source 1..561: note = uncultivated organism
MGAALMKRKQSGPPRVERAGLYVRVSLDRSARGLQDEILSPETQEDRARQYCGAQGWPVETVERDIDESGYRQHYSQREGLVRLLDAAESGTLTKIVVWKFSRLSRRLREFIEICDRVEAAGAGVVSVTEQVDTSTPAGRLIRNILASFAQFQSEEISEQIFETWLTKARRGERPPGAAPFGTLNRKGVLEPDPDTHSHLLAIFRTYLETASVRAVWDCLTARAVPPPLAGEWNLTTIRGILANPVYIGRIEWAGQLFEGRWSPLVPPDLWQGVQDLLASRRTGPKGRKGDHLLTGLVQCGLCGRTMWTRYTRTAGAHVLRRVYWCCSHNNLRRGCRLPALDGEEAEAAVWDAVAALLKLTRLQDLVADQVMSTLRRTGEAVARPREAERERVAAAAAALAGLLAEGSISREQYARQNERYQRRLRALEGPPKGAHRRPPPTRLTAEALASQALHSLTQTEKRQLLMALEASVSIQPHRVELRLEGGLVVHLKARRVGEVFHFGQQYQRLDCQASLLTDKQLAFICRTYRWAPKKAIAAKLGRSYATLVTVARRLRLQGLL

SEQ ID NO: 4763 - protein, 557 aa, unidentified
  source 1..557: note = uncultivated organism
MTTDRVLRCAIYTRKSSEEGLEQSFNSLHAQREACEAYIKSQAGEGWALRRGRYDDAGYSGGKLERPALRQLLDEVTAGRIDVVVVYKVDRLTRSLADFAKIIDTFDNAGVAFVSVTQAFNTTTSMGRLTLNVLLSFAQFEREVTGERIRDKIAASKAKGMWMGGIPPLGYDPPVSQDSRALVVNEPEAKTVRLIFRRYLELGNTLALQRWLFEQGVRSKRWLSTRGRQMGGYPFSRGALQHLLRNRTYLGEIVHKGTSHPGRHPPAVDQDTFGAAQALLARNSKIRRTRIPKAAAALLYGRLFDCDGQLMEPIITAGKRRRIYRYYASSLGPRASGSATDDAIRRVPAAAIEELILRRLSSLCAAAESELVRDDVRALVARVEIHATAVHVVLWTKALGARSAQRMSVDAVRRRLQPGEQVTTEPSDTRKLRLHVPIRLKVRGGRNWVLGPDGHVLAATPPPDKTMIQRVRSAHAILRACGAHPDARNEQLRYARAPRSSHQMRRARWAFLAPDIQRSILEGRALTGSELSERADATIPLLWSEQRALLQITAKHQ

SEQ ID NO: 4764 - protein, 514 aa, unidentified
  source 1..514: note = uncultivated organism
MPQVSLISPITKQAIGKKKVGIYCRVSSNSADQENSYSKQIHYYTEYAKKKPDWDLVDIFADDAISGLKAENRPDFQRMIKMCRLRQIDLIVTKSVSRFARNVKEALEYVRELKLLGIGVQFEKEGINTLALGDEMLLNTFTALAQEESKAISQNVRNSIVKRMTRGEYVDSNAPYGFRLTEKKLTIYEPEAEVIRRVFAMYLAGHSTSEIAKILTNEQVPRKGGSVGPWRSTKIAYMLGNERYAGDCFYQKTFRDNTVPFKQSVNRGQEDRYYAKDTHEAIIDRNTFDQVQNLLSKRHEQFCRTTEQNIYPLTSRIHCAECGSIYRRKVTNGCIKWVCAKHKEDKTSCNSNYYSEERITDGFTATVNKLRFGSEDILGVVIAKLESACLIHKRNNQEATQMSQSIADLNSKIVMLEQLRNKGYLAPEVYQSQLREINNKLSELKSNRQNAFESKILETLEEVRKLKSLIFEIEEPLETFDDKLFLSIVKSITVNNRDEMTLTVLGDLRFTELI

SEQ ID NO: 4765 - protein, 525 aa, unidentified
  source 1..525: note = uncultivated organism
MSKRDKPKSKPDSPTVRCAIYTRKSSEEGLDQEFNSLDAQRESAEAFIASQKAEGWVALPERYDDGGYSGGSMERPALDRLLRDIAAGKIDCVVVYKVDRLSRSLMDFSRIVETFENHGVSFVSVTQQFNTTHSMGRLTLNILLSFAQFEREIIGERIRDKIAAQKRKGKWAGGVPILGYDVDRSGGSPKLVVNAKEAARVREIFPMYLDKGSLLPVVSELVHRNWVNKRRVTKKGNELGGRPFDKATLYMLLTNPILTGKIRHKGEIYEGEHEAIIDQGLFDEVQRQLKLNGRTGGVEVRNKYGAILRGLLRCKTCGSAMTHTFSGKHRKNFYRYYRCTRAIKNGRHVCSVGTLPASEIERVVVDEVRSLATDKALLAQVLEDAHVAIDAELAELRRAHEDLVRETKRHHAELRQLVAEGKTSPDATSRIADLNQRITEAERRLSELARAITDLEADTVSPAEAQATFADFEGLWESLIPREQDRLLKLLLTSVDYDGDAGTVSVTFRPTSIRSLINRRLEEAA

SEQ ID NO: 4766 - protein, 577 aa, unidentified
  source 1..577: note = uncultivated organism
MPAERRERSAPSIPRSANRRCAIYTRKSSEEGLEQEFNSLDAQREACDAYIRSQRGEGWMALATRYDDGGLSGGTLERPALRRLLADIRAGRLDLVVVYKVDRLTRSLADFAKIVEIFDAAGVSFVSVTQQFNTTTSMGRLTLNMLLSFAQFEREVTGERIRDKFAASRRKGMWMGGTVPLGYEVRDRKLVVSEAEAATVRRIYADYLTLGSVRLLEGRLRGEGVVSKAGRPLRRGALFHILQNRVYRGEVVHKGNVYPGEQAAIVGQVLWDAAQARLTESRAEQRSGERVGHPSLLVGLLHDGCSGERLTPSHAVKAGRRYRYYVSQALITKGRGAAPAGRRVPAGDVERLVSERVRHFLASDAEVFAAVRPVFPDAAVQRGLLDHAARLTRSWAELAQSEERTALRDLLARVELHADRLDLYLVPNRLVDLLRGEADGAGRPPLSDVAAVPPLVLSVPVTLRRAGREMALVVGAEPGALPTPDPALLQLVLQARALWDMLLEGSVAGLGELAAREGMSGSYVTRLVRLAFLAPDLLTAIMDGRQPKGLTAAALLRECRRGLPPDWREQRTLLGFG

SEQ ID NO: 4767 - protein, 518 aa, unidentified
  source 1..518: note = uncultivated organism
MGQPQHRPRVGIYTRISDDSRDGSERGLGVQRQLEDCLARVAREDWDVVETFSENDVGASSKSRKPRPLYKRLIERAEEGDIDIILSYSASRLTRRPMELEQLISLHERKGVLLRTIVSGDTNLATADGRAVARTIAAWDAAEAERIGERVARAARQRREEGKWHGGNIPYGYRHLGDGKLGIDPDRAAVVNEAARRILSGESLYGVCADLNRRGVKTGLGTRTPNGVGWHGRTLKRVLTTPASVGCMRKDDGTLRQVAEPMLERATWDRLVERLYEPSRFTETRKRDWSNRRKYPLSGLLFCSLCGHWMSGSLRAASKRKDGTDREKVKTFTCAPANGGCGKLRIDYAAVEAWVLGQVFARMDVPGVQTALSSSEESADDDELRQKIADAERRLEGLDDDYADGTLDRARYRRQVARLTERVDAMRSQLAETLRSTFVVDTQGRSLREAWDAHAEDVPWQRALLEHVVAKVVIHPHPAGVTSTLTRRRQEHDEDLIRRRLEHSERLLLQRVRIAWRD

SEQ ID NO: 4768 - protein, 575 aa, unidentified
  source 1..575: note = uncultivated organism
MVKVAAYCRVSTDKEDQANSFESQQRYFKEYIERKPDWELFDIYADEGISGTSTKKRAAFNRMINDANLGRFDIIITKEVSRFSRNILDTISYTRDLRRKGVGVIFLNDGINTFEPDSELRLSIMGSIAQEESRKTSSRVKWGQTRQMEKGVVFGRSMLGYDVKNGVMTINPEGAEIVKLIFHKYVNERKGTSMIARELREAGYKTMTGNVFWTNTAILKIIRNEKYCGDLCQKKTYTPDYLSHDKKYNHGAEEMVFIQNHHDPIIDRELWDKAQKELERRDVDSSVKEGHGNRYPLSGKIKCADCGAVFVARYKKRNDGNKYKCWRCGTAAAHGRKRRDVAGNEVGCDIGRQIRDEMCMNILKQTVSSLSVDKKAVIENITNIVTEVIRGCESSEQLNLDKLQKQMQELTEKKKSVLDAFFSQNITKEEMRMMNEKYNADISLTADKISAGKKKQSLSYSCSDIKADVRKSIESIVNCNEQRDNFYGSLLDRMVVYGDDRVEVSLNLLPTKWMYVIESLKDIQKHTGGGKNASFDYSKGEMGEADYIKEVAHCDPSVPISFKVAFAFSVGMEYR

SEQ ID NO: 4769 - protein, 509 aa, unidentified
  source 1..509: note = uncultivated organism
MSEKTTITGSLALEQTTPIVKVIEATNAPTPDRLRVAAYARVSSDSDDQLNSFAAQVRHYNDLIQSKPAWVMVDVYADEGITGTSTKKRDDFNRMMNDCRRGQIDIVLCKSLSRFARNAVDCLVALRELKRLGITVRFEKEKIDTTQMRDETITAFYATFAQQESESISGNMRWSYQRRMQSGQFVTCKAPFGYDMANGKLVVNEERANIVKDIFLSYINGESLDSIASRINALGIPTGDGKAVWTRSTLTYIIKNEKYCGNALLQKKYTTATLPFEKKRNHGEVAQYFVEGSHPSIISADIFKAAQTLCLRRASNTAAPRKDYPLSKMMYCEECGSIFSRKKNGDAVSWCCRTHAKGSQLCSVKPILENEVYAAFLRLYFKLRAHQEQIITPIIKQFQALKRNRMLWSKELVELTNQIADITEQDRKLNGLKAIQNVDPAYFIHKSTELADKLRTLKLEKERLLAQNADTSLEDLQFLVSTLNNGPEFLEEFDTAIFSANNRSHHRER

SEQ ID NO: 4770 - protein, 525 aa, unidentified
  source 1..525: note = uncultivated organism
MAKTVRAIPATISRYTSSPINSRKKRKVAGYARVSTDHDDQITSYEAQVDYYTNYIKGRDDWDFVGMYTDEGISATNTRHRDGFKRMVKDALDGKIDLIITKSVSRFARNTVDSLSTIRKLKEHKIECYFEKENIWTFDSKGELLLTIMSSLAQEESRSISENVTWGHRKRFADGKVSVAYSRFLGYKKGPNGGLVVVPEEATTIKLIYKLFLEGLGTTTIAKQLTKRGLKTPGGKSKWSARTVYSILQNEKYKGDALLQKSYTVDFLTKKTKINEGEVPQYYVEHDHEAIIEPQTFEMVQAELKRRNKARKYFSGTSIFSTKIQCAECGGWYGAKVWHSNDKYRRIIYQCNNKFRNNTGCRTPHLTEEEIKMYFVRAMNQMITEKDEIIQIIEDARQVICDNGDLLAKRNAMQKEIGILVEMAQNAVERNARVAQNQEEYQKQYDDIISRYDAMKTEYEQLCEKIENRQDRNEQLGRFIQELKGRKNLLTEFDHSLWCALVDKMIVKDKENVTVIFQDGTEIKA

SEQ ID NO: 4771 - protein, 553 aa, unidentified
  source 1..553: note = uncultivated organism
MTTAARKSVRCAIYTRVSTESGLDQDFNSLDAQYDAAQAYVRSQVHAGWTLVRTRYDDGGFSGGSTDRPALQQLLDDIRAHRINVIVVYKVDRLTRSLADFAKLVELFDAHGVSFVSVTQQFNTTTSMGRLTLNVLLSFAQFEREVTSERIRDKIGASKRKGLWVGGVVPLGYQAKDRKITVVADEAKTVRHIFRRYLNLGSLNLVLADLRKTSIKTKLRPLSNGRAIGGIPFTRGSLAALLRNRFYIGEVRFKDEIFPGEQAAILDRALFEAVQTKLDQQRTNYTKARQRSQSLLMGRIFDERGDRMTPSYAVKNGVRYRYYISSALIQGQPDKAATLNRVPAAEMEKLILSTVRNHLAEKPHNKMEAEEGPDLLDDKELISVQVARVDVRPDHLAIQLCAKSERDSEGQDHRHSAEEDERVHRAQNVLVVPWKKTPSKRPRVIILPASTSSRPDPRPIRAETRVKLVTAIAKGRHWLDELIAGTVTNVEQIAAREKCSIRQVNRTITLAFIAPTLVQAAVDGRLPRGVGVATLRDFPAEWARQYKRLGLSS

SEQ ID NO: 4772 - protein, 516 aa, unidentified
  source 1..516: note = uncultivated organism
MSIGTMDRPALQRILQDIRARKIDVVVVYKVDRLTRSLADFAKIVEVFDAHGVSFVSVTQAFNTTSSMGRLTLNVLLSFAQFEREVTGERIRDKIAASKKKGMWMGGLPSLGYDVKDRKLVINEAEAATVRHIFHRYLELGAVRTLQADLDAAGIISKRRTASDGSQYGAQRFSRGALYLMLKNRIYRGEIVHKGKSFPGEHSAIIDEELWAQVQRHLEDNRVERRKDGKAPEQSLLAGILLNANSIPMTRVRTLKKGTRYHYYVSRNLITGTVAENPDGKRIPAPNLDALVMNRMRSLFADPVEILNAISKGQHNAPVQKSLRDAATALSARWDVLSAESLHDIVRAVIVRTQVYADRIELDVDPARLAGRLLGDRGANACRESSPVEDGKEEPLIILSIPARLKRTGMEMKFIIQGATNPTPADMSLIRLLVRAQKIGKRLFESGSPTLEDIAREGKIVPSYATRLLRLTFLAPDIVAAIVAGNQPADLTANKLMVDTRLPLDWCDQRTALGFA

SEQ ID NO: 4773 - protein, 549 aa, unidentified
  source 1..549: note = uncultivated organism
MMNKRKRVRILLRVSSNQQLEADGDLSVQRQLVTEYVNQHEEWVLDGAEYFEGSNSGYKNAVQDRDVLQQALQDAEKRKYDILVAYKDDRIGRRMWEIGGYVMQLKSFGVDIYTVKDGCISPESNDIMGQMILALRYGNAQKSSSDTGMRVKDTARKLVQQGKFMGGKAPYGYTLVLSGALSKHGRALHELQIVPEQAEVVKYIYELSLDKEFGSAKIAKELNKNVYYQKLAPRDVWKAGTITSILTNPIYAGYRAYKRREKLPDGRTKRLGHSEWILSEKPNPNIQIIDPDDWNLVQSRRKKRGKKYKKSTNNQRERTITRNDGMLPLLDVIYCGYCGCKCTNGSKYHYWTVKKTGEKKSKKVPIYKCQNAWQGVPHDKNDQFKAEKLEKIVFVTLADYINKLQENHDICDRITQNAREARKEQEHILLREQEQLEYIRKNIGELEDKIPEAMRGECPISFDYLLSLIEMQKKKLGKQKIMITELKAKLKETDVSFQKWESPGKQVPTWKDVFLHADNQIKRVLVNKIIDKILVKKEEIVIRFNFHPE

SEQ ID NO: 4774 - protein, 512 aa, unidentified
  source 1..512: note = uncultivated organism
MPQVEVIKPIRQHVTAKLRVCAYARVSTDSADQLNSFASQVQYYTNYIESRADWELVDIYADRGITGTDAHKRDEFLRMMEDCRKRKIDQILVKSLSRFARNTADCIAAIRELRQLGVTVIFEKERINTRLMANEMLISMMSAFAQEESVSIAKNLRKGILMRMNSGNFRLSNLPYGYDHYENGRLSVQNEEAKAIRWIYDRYLSGYGVNQIARELPCQLPAEARIRGSKNGILYILSNERYMGDELLRKSFTSDTVPFRKIMNCGQQDQVYIRHSHEPIIEVEKFHAVQTLLADRRGQFGCEEPRKTYLLTGKLICKSCGAPLYRRVTGKGICWICKNHVYHPERCTEKGYSEAAVLQGARCLCRKLKTYSKELLQWYLQTLLKIESHDRACRPQVQDLYQTINDILIQSHTLQRLYASGCIDSGFFISRKNELDHQLTENKARLHEAKATLCGDIIRQTRIMMDALEQDATPTDEVIWGQLIVKATVGEGRISFSMLNGLELTSPLEEEG

SEQ ID NO: 4775 - protein, 565 aa, unidentified
  source 1..565: note = uncultivated organism
MARTANRGTMSASSPISYNVMRWRLGKYIRLSKEDLLRGRDESNSVVNQRRLLEQYHQAHLDEFYEGAEADVYVDDGKTGTDTNREDFQRLLSDISSGRINCVIVKDLSRLSRNYTDAGNLIENLFVRLNVRFISLAEGVDSYRNPDSVSNIIVPITNVMNDQYCYQTSKKIRQVFDMKRRNGEFIGSYAPYGYVKDPGDKHALLVDPEAAEVVKSIFSMFLSGMNKRGITYYLNDHGVLCPTAYKKQQGLKYNAPNAQSNPMWSTITIDTILKNRVYVGDMVQGRQRVKSYKIHIQERVPEEEWFIVENTHEAIIDRETFDKVQGLLKRDTRTAPKAKQLYLFSGFLKCADCGRAMSRIASKGIYVYYQCGTYKSLSKKACTMHSIKSDRLEAGVLFAIQQQVHLAVAYSELVSRINSAPLKKSKSKRLEDAIAAKEKELAKIMRYKQALYQDWKDGEITRNDYRHMSEDYERQAEALNNVLRTLTDEQEQLESGVDAESPFLAAFLKYQNIDKLTREILAELIDYIKVYEGGNISVKFKYADEFRRMAEYIELNAPMVQEAAG

SEQ ID NO: 4776 - protein, 1215 aa, unidentified
  source 1..1215: note = uncultivated organism
MDQIDKSLWINKLWDPLEKIDDSPLHSKREGIKVAAYCRVSLDSLGLSHSLESQVSHYTHLINSRDNWTFVGIYFDNLVTGRKASLRRGFTRMLRHCEEHRIDLILVKNVSRFSRNTKELIEVIERLKEINVAVYFETENITSTRSETAYLLKTYASIAQGEIEATSQAIEWGHEKRMMKGKVNISNTYGYDKTKVGNETIITINEEQAQVVRQIYQMYLDGMGCRAIAAELTKRNIKTYFGKELWGSQTVDSILSNISYTGDVKARKNTRDLMSNKMRPSEGIRDQYLIENHHPPIIGKEVYELVQEKRSTKKKGSHPKTYRANPLLNRVSCGNCNRSLRRSSNRSWDYFRCFTAATDKALCATPTIREDAMSAFMLGAFKERFDVKDNRIIKILQRILIKINQNDYFEFHRLKALTQIQLAKRLKGIEFTDEAISQMERDYEKFEKLLVEIEDDRKYRLDSTKWLENIKSFDEFEERATIEYMRAWIIRVVIYSKEDYKIYWIDGKETEVGNCIPIKPNAKEQLPELQPKGELSVQKDTGFEVMTNIQITSEKGGDQNNVDEEVSMMIAERRLEPNLLVKNIQKQLSNSVIMQTSVPVVREKKLKVAAYVRVSTELEQQKTSIKTQYSYYLYLILKDPRYILADIYIDDGKSGRTTEGRPEFKRLMEDCKAGKVDLIITKSLSRFARNTVDTLTYLNMLKSLDPQVDIWFERENLRSLDEKSNVLISLLSALSQEESVNIGEAIAWGKRSLAQRGIVNPGNIGYGFQYGKNKEWLINEEEAEIVRLIYNEYEAEKRISRVKDLLTSKNIPTPDRKKRWHESTIKRILTSEIYRGNYIYQRYHTGFTLENERVKNTGELPMYFIENHHEGIIDSAQWDRVQNIIEESEKRRKENIQEYPEDGGKNKAFDNKLYCGKCGSVVGYYRAIRRQKKSYEMRWWRCRQALKGYCDVPYMRQEYIEENFSQLLLDIKFNPAFDDYIHSFIENLKIKPEEEKQRDKLKEEKEKLNMELYQAVENELGKNGKDAKLVDYLTDEIMKIRAEILNYTKREEQLEAIEAEILNLRKALEGFKDKRKDPIGYYQNTIEFQSELFEQFIEKGIVLEDGQITYQFISGFEWEVPINYGSFQEQIRIKRAAKRAAEKEAFLNGPEVKDLLKFCREPKSLTKMREYLPKYAQNDTFKRNIVIPLMEKGILKQTLPDQPSSRLQKYYSVKK

SEQ ID NO: 4777 - protein, 554 aa, unidentified
  source 1..554: note = uncultivated organism
MNCIRCAIYTRKSSEEGLEQSFNSLDAQREACEAYVASQKHEGWHLLPAHYDDGGFSGGNMERPALKQLMAEIQAGKVNVLVVYKVDRLTRSLADFAKLVEQFDKMNVSFVSVTQQFNTTTSMGHLTLNVLLSFAQFEREVTGERIRDKIAASKKKGMWMGGTVPLGYTAGDHKLVLNEAEAATVRTIFNEFLRLGSVHSLQDWLHENNIKSRLGNHFFRGSLYMMLRNPHYIGLIKHKKETYPGEHAAIIDRALWDKVQALLDDNIQGKRRKVRATKESLFTGILYDAMGTHYTPTHACKNGRRYRYYTSQAVIKKTEKSNVPTRIPAHDLESAVVGRILDWLQTPTELLAALRVETAEPAQEGFYARIVAQAVETAQGWRERIAVDRTQFLKIIIERVVIHPAHVEIRLRVPALVSEILGGGLSVPDLSLIASIESPFRHVPQGRALRLIVGDTNITTDSSRQAILKAIARARRWYEQITTGETSSIAALAGLHNVSPRFIHMQMKLVQLSPRSIETLMTRPASLPLSLDDLLASISMRWTEQSFGSPVQSA

SEQ ID NO: 4778 - protein, 519 aa, unidentified
  source 1..519: note = uncultivated organism
MKRATVLAIDAPPLKRCAIYTRKSTTMGLEQEFNSLDAQREACEAYVRSQAGAGWQGVDAHYDDGGFTGANIDRPAFQRLLADIDADRIDVVVVYKLDRVSRSLLDFATVMKRLNDAGVSFVSVTQNFSTTDAVGRMTLNLLATFAEFEREQIAERTRDKMAASRRRGKWTGGPVPLGYSVSNKKLVVDELEVVAVREVFDLYLEQRSVIAVAGILNKRGRTTKRHLATSGRMREGRPWSKTDVARVLKSAVYAGYISYGAELHEGEHQPIVDRETFQAVGALLASAGGGNGTRYRNPDYLLGGLLFCSHCGSALTAASTTKGSREYRYYRCVKRDKQGRAACPTKQVSAPRIEQFVAERLRDAIAEADLAGALVAGVNERLDGKRRELEIEHRRLPSEIASLSAEGKRLVDKVGEVAPGAQRLLDKKLEEVGTQLQRLERRLADAERELAALDATQVEAKWIGQCLRDFDAVYDVMTSENRSRLFRAVIERVDYESSTGEVRVTLADLTSETTEATKA

SEQ ID NO: 4779 - protein, 562 aa, unidentified
  source 1..562: note = uncultivated organism
MERTKKLVRCAIYTRKSTEDGLEQEYNSLDAQYDACTAYALSQRHEGWSVVKDRYDDGGFSGGTLERPGLKRLLADIEAGKIDIILLYKIDRLTRSLSDFAKIVEILDRKGASFVSITQSFNTTTSMGRLTLNMLLSFAQFEREVTGERIRDKIYASKRKGIWMGGPVPLGYDVIDRKLVANEVEAKQVRQIMQLYLKASSVPELVDELAKNDSHTKIQQRKDGGTRGGVHFKRGNLYHLLSNRVYRGMTVHKGEAFEGEHDAIVAEELWDQVQVKLAKQGQGGSSRKVSPRTGVLAGLIYDGEGRAMVLTHTQKGNRRFHYYANRYETLGDNTASRVSARDIENIVVDQLSQALASGSQMQSMLMHGSYTSEHLHNVISRCGKVATELGVAKYARKQEVLRNVVHRVDLHEDQVIIRIDNRGLLNVIKADSSVQPSSTNLTIQRQALRLRRGKALRLVIPAPLSGDRVQMRDERLIALIAESRAIMQQITANLGKSIPTLAAEQGRCRVRMMKVAKLVCLDPDIVTAIVEGRQPLKLSPGKLLAADLPLAWADQRRVLGFS

SEQ ID NO: 4780 - protein, 513 aa, unidentified
  source 1..513: note = uncultivated organism
MATVTVISPVTGKPVEHKRVAAYCRVSSNSADQENSYQAQIRYFTRHIKANRDWELVDIFADEGISGTSAEKRDAFNRMITMCELKQIDLILTKSVSRFARNVKETLEYVRKLKLLGVGVVFQKEGINTLSMGDEMLLNTFSAIAQEESVSISQNIRFSIQKRMQMGEYVDSNAPYGFRLIDKKLCEYPPESAIVKELFERYLGGMSTDELATLLVERKVPTKTGKEKWRANKIAFILSNEKYIGDSLYQKTYRTATVPFKQKKNYGSEDQIYAEGTHEGFIDRDTFDKVQTLLKKRKIQHSRITEQTIYPFTHRIQCSECGAFYRRRIIGGSIAWGCVTHINDRTKCDSHYYREDRVMDAFIGIINRLRFAEEGIIAESIELTEKAILLKKRNNLQAMESSQSMAELNAKLLMLEQLKSKGYLAQDVFESQSREINGQINEIKTKRIQSLSSALDVALEEFKTLQARLNEIDEPLDSFDPKLFEEVIKGMTVNNRDEMTFRLIGNLTFTVRL

SEQ ID NO: 4781 - protein, 541 aa, unidentified
  source 1..541: note = uncultivated organism
MQKHAALYCRLSVDDGSFGGSVSIDTQKILLEQYCQSHEITSYEFYCDDGYSGTNFNRPAFQRMLTDIHADKINTVIVKDLSRFGRNYVEVGLQVEHFKEQNVRFIAADDHYDSTINEDDLMFPMRNVMNEMYARDVSKKTKAAKKAKAKAGQYIGSKPPFGYKLDPNDRHHLVIDEPAAEVVRRIFRLTADGAGYNKITRIFREEKVMNPITYFNQNNPDYFKADYWRKEFDWHVTSVRAILNNEVYLGMLVYGKRRNKTMKSKQMVKNPREEWIVAENTHEPIILKELWDTAHKVMSSKRRPAKTGELQIFAGLIYCADCGHCLTYGKKKRKDGSYYGAYDCWMYRTHGKEYCPSHYINYDTVYNLVLINLRTVLWNYRNNAQQFKSILEKKFQTDSAKEAKKLQAEYEKKQSRFEEIDKILCKLYEDSALGKISESRYEAMSAQYESEQREIKETLPVLRQRIEQLKAEIDATDQFVNLIKKYTVIDQLDAAILNELIDKIVVHHKEVAEDGRVFQQVEIYYRFIGKLENAAESEKAA

SEQ ID NO: 4782 - protein, 541 aa, unidentified
  source 1..541: note = uncultivated organism
MNKIYRGAAYVRLSKEDGDKIESDSIGNQKDLIRSYLREYPEIELCSEQVDDGYSGVDFQRPAFMAMLEDIKAKKIDCVIVKDFSRLGRNFIETGKYIQKIFPFIGVRFISVNDRYDSLNPKTSADNLIIPVKNLMNDAYCRDISIKIRSQLDIKRRKGDFIAPFAAFGYLKSEENKNKLIVDEFAAAVVRDIYAWKLEGMSAQAIAHKLNEQGALSPMEYKRFIGLNFSTPFKMNTKAKWTAAAVLRILKNPVYIGILEQGKRSSPNYKVKKRFDKPPDQWIRIENNHEPIIETEDFENVSKLLQADTRTAPKKDTVYPLSGLIYCADCGRSVIRKNNAYASQRYVYYVCSTYKRGNGCESHSVRDELLEKAVLESVRAQLNIIDTERILQKIEALPLTKREVKKADDRLTLKREELKKLNARKLRLHEDYADGLISKDDYILFKEQYEERAREAEAAILSIELEIDAIVSNKGPAPAWIDYFKQYKSIRELNRKLAVELIDRVTVYPGGKIYIQFKHQYYYDQLANLHPAMSAPLTEVM

SEQ ID NO: 4783 - protein, 522 aa, unidentified
  source 1..522: note = uncultivated organism
MEQYLIYLRKSRKDRDMEEQTGQFDTLDRHRRRLLALAEEKGLTITGIFEEVVSGDTIAERPEMQKLLSAVETGEYAGVLVMEVPRLARGNTRDQGTVSETFQYSGTKIITPDKVYDPSDEADEEYFEFGLFMSRREYKAINKRLQRGRMASLEEGKYIGGAAPYGYRKVKIAHAKGYTLEIIPETADVVREIFQLYTKGEPQADGTLAPIGSYGIANLLNSRGIPSPGGIKWAACSVRDIIKNPTYAGFVRWAYRPQTKRMVDGKIETTFPVNANAIVKKGVHAAIIAPELWNKADEIIKCRSHAPVPSSKQISNPLAGIVYCSVCGRSMLQIPHGSKSGPMLMCPTAKCATVGSRLDVVESGILDSLGNWLKSYRVQAGSKMEEDKPDDTEKALKAARRDLQQLHAQKNKLYDLLESGVYTQEIFLTRSRVLAGRISDAEKAIANLEDHVKQKSLAENTRKQMIPRVQNVLKVYSTLNDPAEQNALLRSVLDRVVYAKSVGGRYVQSDLQLFIFPKISPF

SEQ ID NO: 4784 - protein, 557 aa, unidentified
  source 1..557: note = uncultivated organism
MARKLKAAAYMRYSSAAQDDGFSIEAQQRAIHDFAIKNNIEIVEEYIDRAKSGTNANRPEFQRLFSDCEQREFEIVIVHNLDRFARNALDSKMYRARLKEMGIALYSLKDDLEDTPNGKFFTAIKEAYSELYSDNLSQEVKKGLKEVALRGLHTGGSPPLGYDVVDRRLVINEAEAEIVRTIFKMHTQGKSYNDIAKELNAKGYTTRAGNEFSKSSFNAILQNRKYIGEYTYNRRVGKDSNGKHNSHRNKPEDEIIRIKDGVPRIIDDKTFNKAQRILATHKKGKSSFRSNSSYLLAGLVKCGECGFSYQGNTRKSGNGSTYSSYRCGRRAGRADIGCKNPEIEKHRLENFVIEQVFKYLFTDEGIKEIVKQINTYHKEMQSTKGKDINLYKKQVKALKAKQNNIAKAIANGADGQAFIDEINKITQSIKDIEQRIEKETPAELPAISEAQVRNAIKSLEEELKNETDINAKKDFINAYVESVVINKETVEVTIKVASAVFFACGFDNTSGALLIHTSITRSDLRHRCKQKQKTPRKFSVSEDKYFAGFEIVNNPLL

SEQ ID NO: 4785 - protein, 553 aa, unidentified
  source 1..553: note = uncultivated organism
MTTAIYIRVSTEDQVKEGYSLEVQREYLESFAKREGYEIFKVYSDDGISAYSTRREALQQLLKDGKQQKFELVLVYKIDRFSRNLKDLLTLVDELSSYGIGFKSATEPFDSTTSAGKLMFQQLGSFAEFERNRISERVFPGMVKGVQQGRWQGARFSPFGYTYNKAEKLLKIEKREADIVKLIYTMYLAGKSTQDIASYLNKKKYQTRTGKQFYNKFICDILKNRIYTGKIVWNKKHYDKNQKTKKHYKYIKNDPSKIIIAHGKHTPIIDEQDFEEVQKLLAVKKKRWRPRAKNQEYLLAGLLSCAKCSHKYHGVSSISNHRTNKKKRWYRCSGPYVSRVRCTNRAVKAEDVEPEATKIVAQLVENDRLKQYRWTTGTLPGGANFPDFGENTKINATLLRNKLDDNHKKQAKLTDAYLENLLGEDVYRDKMETLRGEEDGLKKLLAGYELKEIESERSEGYLNRVKDFLDSYDDGLTKVSFEQKRQMAGLLFKNIKIAPAIGGARPQKRISFSLFPPFNFLFSESERKSQCQKNQIFTKIRRKKSTSVPSAAR

SEQ ID NO: 4786 - protein, 584 aa, unidentified
  source 1..584: note = uncultivated organism
MGEKKRVRMLLRVSSNQQLEEDGDLGIQRQLVKEFIAQHEEWHLDSKEYFEGSNSGYSNAVENRDILQQALRDAQRNEYDILAVYKDDRIGRRMWEIGAYVMQLKSYGVDIYTVKDGCISPESDDIMGQMMLALRYGNAQKSSSDTGMRVKDTAQKLVQQGKFVGGKAPYGYKLELSGEISKHGRALHHLVIIPERAKAVKHIYELSLDKEYGSSKIARELNLDEEYKELAPSEVWRGGTVTSILTNPIYAGYTAYKRREKKENGKSKRLDSSEWILSEEPNPEIQIISPDDWNLVQIKRKQRGMKYRTAPQNKGVKVIARNEGMLPLIDVIYCGYCGCKCTNGSRYNYWTIKDTGERRASRQAIYKCQDAWQGVPHYKVYQFKAERIEKIVFQAIAEYIDKLQENEDIFEQISENGRKAKKEKAKELSREQERLKHIQQKISVMEDKIPEAMLGEYPVPVDKLVELIEKQKQEKEQQEKVIAEKQKELDGADVSFNEWDSLRMQIPTWKDVFLNADNPTKRVLVNKLIEKISVKEDEVVIRFKININEIRSKALKKSGSIVPENKLEDKSVILDSLKIYPKPE

SEQ ID NO: 4787 - protein, 532 aa, unidentified
  source 1..532: note = uncultivated organism
MNDNAKSKGSLALAAPRVITIPANDPEIGRKLRVAAYARVSSNSDDQAHSFAAQNAYFSKLIAGNPNWELADIYADKGVTGTSIDKREDFLRMMEDCRKGRVDRILVKSISRFGRNTKESLEAVRELTGLGVSVLFEEQKIDTAESTGEMLTAIFATLAQKESESISEKMRWSYRMRMRSGTFLPSSMPYGYNIKDKQIRICPEEAETIKGIFSSYLAGQSMQAIANRLNLESIPRRVSSKTQCWRISTIEYILSNERYVGDSLWQKTYQTRELPHRAKKNKGELEQYFLPDTHLPIIDRETFLKAKQLRLSRKQCPARICEGDILRKRLRCGICGGPFRSIYGRNTHSYECQAKNRGSKKCTSLRTSETQLQQAFLRLYFKLKRHGESVLTQLITDLRTARNGSLLWSEGVVELNKQITDIAGQERLLLLLKQQGAVDPDLFLSRSDQLAEQRRTAKLKKERLLRSEEDHTIQRTQDLLDHLRSGPDTLESFDEALFSELAEKIIVTDNETLRFRLINGLELTESIERTKR

SEQ ID NO: 4788 - protein, 576 aa, unidentified
  source 1..576: note = uncultivated organism
MKRVRVLLRVSSNQQLDADGDLDIQRQIDLDYIREHKDWVLDKKEYFEGSNSGYKNAVEKRDILKEILEDAKNGEYDILVVYKDDRVGRRMWEIGSYVMTLKRYGVDIYTVKDGCISPETDDIMGQMVLALRYGNAQKSSSDTGMRVKDTAKKLVQKGRFMGGKAPYGYSLEYSGEISKHGRALKHLVIISEQAEVVVFIYDLAFYKEYGSVKIAKILNTHEKYKDMAPNDIWKAGTITSILTNPIYAGYTAYNRRTRTDGVYHKLGSDNWIVAEECNPEIAIVEVYIWNGVQDLRKKRADNIAKTDEHKDPNITVMISNRGTLALMDVLYCGYCGCKMTNGSRYNYWTIKSTGEKRSGKVGIYKCQDAWSGAVHPGRGFYRADKIEPIVFNSISEYIGRLQENDDVFQEIEINKQKEKKTVRTELEKEKQELLKIQKKIDVMEENIPQAMTGEYPLSLDDLVRLIDKQKETYSKQQEIIKQKEERLKNMDVSISEWGYLREQIPTWQQVFLDADSHTKRVLVDKLVERIDVMEEQITIRFRIRLEDFISNPEKTSQNLLATASDKSIILNDIKIK

SEQ ID NO: 4789 - protein, 539 aa, unidentified
  source 1..539: note = uncultivated organism
MKAPSVRTVRCAIYTRVSTEYGLDQDFNSLDAQYDAASAYIKSQAHAGWTLIRSRYDDGGYSGGSTDRPDLQRLLDDIRSRKLDVIVVYKVDRLTRSLADFAKLVELFDAHGVSFVSVTQQFNTTTSMGRLTLNVLLSFAQFEREVTSERIRDKIAASKRKGLWVGGPLPLGYHMKGDKIAVVEDEAERVRLIYRRYLELGGVNALVRDLRKRDIRTKSRLLATGVTRGGILFGRGSLFYLLRNRFYIGEVKYKDEILPGEQPAIMDRALFDAVQQKLTDQWTTRSTLRNANDHLLTGLLFDDAGHRMVPTHATKAGVRYRYYISLPHLYGESKTASVGSVSRVPASDIEDTVVNFLARRLIVQKKNSNSSIACVDGRKAILEQVARIDVHEDRLAIRLKSADDEETADAADGHLLSIPWQKPPSKKSRQILIPDGVPKSEIRPTRIERRARLVSAIARGRRWLDEIVSGAVTDVQQIATRQKCSVRQVNMTISLAFLAPDLVRAAVEGRLPRGIGVERLRDAPAEWSQQFEALGLNPQ

SEQ ID NO: 4790 - protein, 514 aa, unidentified
  source 1..514: note = uncultivated organism
MEFNTLDSQREACELYINARAHDGWQLIPDHYDDGGFTGANIERPAFQRLLADIEAGRVDVVVVYKVDRLSRSLLDFAQVMDRFNKAGVAFVSVTQNFSTADAMGRLTLNMLMSFAEFEREMIAERTRDKIAAARRRGKWTGGRLPLGYDTVDKKLVVNEVEAIVVREIFDLYLELRSALAVTKTLNDRGRRMKRSTAKNAGDQKKRPWTKDAVLRVIKNPLFAGLVASSDGLHQGEHEPIVPRETWERAQALLGTGSSPPKGRAPNPAYLLRGLLRCRCCKWVLTPASTRKTGREYRYYRSIAADKKGKDECRVRSLPAEAIEDLVIKQLREATAEGTLAEEVLKNASSLAGDRRKELSKKRASLPKTIAALATEGQSLAAKVQETEGPATRILDDRLREVGTDLASYERQLAEVERQLEALDERVAEAEWVAAALRDFDTIWEVMTVKNRYRLVHALVHEVVVDEKEGKVLIELADLNGVEDHQEVSVSPPSESTLPPGRSEAPSPTAEASP

SEQ ID NO: 4791 - protein, 557 aa, unidentified
  source 1..557: note = uncultivated organism
MTKKIRCAIYTRKSSEDGLEQEFNSLHAQREACAAYITSQKAEGWVLLPELYDDGGISGATLDRPSLQCLLSELDEGRVDQIVVYKIDRLSRSLSDFARIVDRLDGAGASFVSITQSFNTATSMGRLTLNMLLSFAQFEREVTAERIRDKIAASKRKGLWMGGNVPLGYDPNGRTLTINESEAETVRAIYRMYHTHKTTFEVTTEAKRKGLRSKRRTTPSGEIKGGNLIDRGHIYHILTNPIYAGRIRHKKAVFEGQHPAIIDPQDWDEIQRKLSNRSGRKRGVRVAAHPSPLAGKLFDETGDRLTPSHSSKDGKRLRYYISRRLATGKSREHPDAWRLPAPQLEQSIARVVHSHLADPAILPKLLGKIDATKLDLLQAKTNLLADTVAPHQTTSKWSALIYLATIAPGKLVVELNGEAISHQLDVPEDHIEANHLRLNAAFQLRRKGVETKIILGCEPPEVDEVLVRNIVKSRNWFEAIKRGETFATIAAREGTSKRRIQDVVDLAFLAPDILADVVAGTLPMNVTSDVLIKQGIPGRWSEQRLLFKENPIRSNAA

SEQ ID NO: 4792 - protein, 523 aa, unidentified
  source 1..523: note = uncultivated organism
MKKAAEPIKTVRCAIYTRKSTEEGLEQEFNSLDAQREAGEAFIASQKAAGWVCSAERYDDGGFSGGNADRPALQRLMADIEAGMFDCVVVYKVDRLSRSLLDFARMMETFERHGVSFVSVTQQFNTAHSMGRLTLNILLSFAQFEREIISERTRDKIAAARKKGKWAGGRPVLGYDLVPGPGGSKLMLNKAESDRVRGIFDVYLAERSLLRASDVLNDRGWTTKRWVSKNGEPQGGRRFDKAVLHKLLTNPVYIGKVRHHDDLYDGEHEAIVDDDVFREVGELLASNSAKRGRSPCNKHGALLKGLVVCKACGCAMGHHFATSKNATGGSKRYRYYVCGRAQKEGWSKCPGPSLPAEELETFVIGELRSLGEDNVLVRDAVLAAQATLRERLVSLEHDRDALCVELDAARSELRDIVSEGRDRNGNAAVATELRERIRDLDARSQRLDARIASLRDRVLDEDELVGALEAFDPLWEQLNTKERERLVRLLVKRVEWDAETETITVAFNAEAAAGVDEEAVCPN

SEQ ID NO: 4793 - protein, 543 aa, unidentified
  source 1..543: note = uncultivated organism
MDKQNGSIRVVSYARVSTTEQASEGTSLDFQKSQLTGYCQLQGWTVVNSYVDGGYSGKNADRPGLQRLLTDAKLGLFDKMVVFKLDRLARNLSLLLEIEKTLKEHGITLISMKESVDTSTPTGKMAFSLFGVVSEWDRANIVERTRNGRLQRYKEGCWGGGKSPYGYSYDKKTRKLIINESEARVVRRMYSEYVNGKSLFAISQGLNQDHIPPRAKRSQGWWQTAVRQVLLNPVYRGTEGVNRHAHISLINSMDLSNAIMMSVPSLVSEQEWHIAQNRMQANKHVKPNKQKTHLLQGMITCAICGYHFASKRHYYTCRGRMKYVHPDGLSRCKAPYIRADWLENELWQRIEEIMNDPNKLLLVIKESIENLRRAEADLSERIRPIDERLAEIAAQKAKLADDWIVKYMDIERFKELRENLDGEEARMKSLRAAVDPAQLSKLEDTRKALDYWEYQARGMRAWNTENEDGTMFKQVYQTHEEALKLVGLDDPDRSKLEGFPTSKRQLLDKLQIRLSVFDDRVEVKSLFPVQPIGIQPCTSSRRD

SEQ ID NO: 4794 - protein, 529 aa, unidentified
  source 1..529: note = uncultivated organism
MWSNVDNISNNIFKVGIYARLSDEDKYKKNKEDDSESITNQKDLLIQYVKENNYQLVDIYVDDGYSGTNFNRPEFKRMISDAEDGKINMIITKDMSRLGRDYIETGKFIEKYFPEHGIRYVAVTDNVDTFIDGTHNDIAPFKAIMNDMYAKDISKKIRSTLNAMKKSGKYMSGRPPFGYDLDPNDKKHLIVNEEKAEVVKRIFELFLEGNTFYMVAEILTKERVKTPAQYFEFKWNYKYNTTLGKWNAKTIEDIIKNQIYIGDMVQGKRRKVSYKVNKIVRNNPCNYIIVSKTHEPIIDKEVFFEAQKIVPKNVGRKEKKENHLLDGLLYCGNCGHRISVTSRRKDNNQCYTICNHYRAFMKQHVCTTHSNNYDKLEKCILEKLINECKKNISINKISSEVKKINIEKEKKKKQIKKEKLKKELDKTILNLDDAYIDKISGKINEEMYNRVKEKLEEKIENLKRSLGDFDMEKSLNNEVIGYDEYVKKFISDFLNQENPSRDLIVKLIDKIYIYEDKRVDLKLCFNNKI

SEQ ID NO: 4795 - protein, 521 aa, unidentified
  source 1..521: note = uncultivated organism
MKRVTKIDHTADASSKNRKLRVAAYCRVSTDSDAQLESLEAQRAHYEKYILSRDDWEFAGLYYDEGITGTKKEKRPELMRLMADCAARNIDFVITKSISRFSRNTADCLELVRTLQNLGISIYFEKENINTGAMESELFLAILSSMAEGESSSIAENSKWSVVRRFQNGTFKLSTPPYGYEWNGEEMVVNPEQAQVVKRIFAETLSGKGSEAIAAGLNADGIPAQKGTHWSSTTIRGMLENEKYIGDAIFQKTFTDGQFNRHRNVGQKEQYLATDHHEAIISREDFEAAAALVAQRAAEKGAVKGSRKYQNRYCFSGKIICGECGGTFKRRIHTSTGGEYAAWCCTTHIEDKTRCSMRFIRDDDLKVAFITMLNKLIFGHKFILRPYLKALQSTSGDEGLKRIQHLEQMLEQNTEQRETLTKLMAQGYIDQILFNQENNALLAQADGFRADIQAINSSMTGDTSKVVEAERLLHFAERGSMLAEFDDLLFTKFVDSVRVDSRQQVSFVLKCGLTFKERIGE

SEQ ID NO: 4796 - protein, 517 aa, unidentified
  source 1..517: note = uncultivated organism
MKAALYCRLSEEDRNKPAGTCDSGSIQNQKTMLLQYAMEQGWDVFDIYSDDDYAGADRRRPQFNRLLRDAQQHKFDIVLCKTQSRFTRELELVEKYIHGLFPAWGIRFVSIVDNADTASKGNKKSRQINGLVNEWYLEDMSDNIRSVLDSRRENGFHIGAFALYGYQKDPKQKGRLVIDEEAAAVVREVFTLFSQGYGKTAIARLLNDRGIPNPTEYKRRHGLRYRQPTKKNSTLWKYSAIADMLENEIYIGNMVQGKYGSVSYKTKQNRPRPREQWYRVEGTHEPIIERALWEKVQALREQRVRPFAEGTVGLFSQKARCMYCGYAMRSSKSRGKHYLKCPNRHVAKDACVGSFISVARLEEIVAAELNRINAEYLDQDELARRLEYSGNLEQKKTRLAADVTACEKKLEECRRGLRGLYLDKVKGILSEGDYAELSKDLSAECDRLERSAAEGRKKVEELEAQAETDGGCRERAGRYMKSGRLSREIVEAMIDHIYVGKRIPGTKNVPVEIHWDF

SEQ ID NO: 4797 - protein, 503 aa, unidentified
  source 1..503: note = uncultivated organism
MQTAVIYCRYSSDSQTEQSIDGQLRVCTEYAKSRDILILDTYIDRAMTGTNDNRPDFQRMIKDSAKRTFNIVLVYKFDRFSRNKYETAMHKKTLKDNGVKVVSATEFVPDTPEGIIFESMLEGYAEYYSAELSQKIRRGNNESRRKGNLTGGKIPYGYKNVDKKAVIIPEEAEIVRYIYEQYSIGVYIKDIIANLTARGILYDGKPFVRNTVYKILKNERYSGIYHFNGEVFDNIYPQIVPQETFDIVRKKVNCNKYGKRSDEITYLLKDKIKCGYCGKSIVGDNGTSRQGERKYYYKCRGRKQKLNDCHKQAIRKDILENIVLESVIEQIQKTNNLDYIVNGLMQEQERQAQANIVLNLLLKEQRQTENAIQNIMTAIENGGTTNTVMKRLRELETRQSELEKQIAIEKSKTAVMLDKDQIKEFYTQALALEPKLLINYLVKQITLYDDRIEIQFNAPIKVSPDSDESRRGFSLCSKTVKLAYKVPHRANITKLEFEIEIYI

SEQ ID NO: 4798 - protein, 571 aa, unidentified
  source 1..571: note = uncultivated organism
MPTEAKPRIRCAIYTRKSSEEGLEQSFNSLEAQREACAAYIASQWHEGWRLISTAYDDGGYCGGTMDRPALKRLLQDVEAGKIDAVVVYKVDRLTRTLSDFAKIVEIFDAAKVSFVSVTQQFNTTTSMGRLTLNVLLSFAQFEREVTGERIRDKIAASKRKGMWMGGRIPLGYDLKERKLVVNAGEAQRVRDIYRQYLRLGCVSKLKIYLDRKGIRTKERVSRRGRKEGGVPYSRGALYQILQNRVYLGEVAHRGQVYPGEHAGIVPRELWDKVQERLRTNNYGHRSGSRAKEPSLLVGLVYDERGNRFTPSHTVKNGKRYRYYVSQAAIKHPGSCHQGPVRIPAGELETAACSALHSFLESATNVTDALAVQRRNADSSQDIIRAAAALSKRMLSGSPAERRAFIRTVVSRIIVRSEGLEVLVRKQALRNRVLQSPARHRNQSSEPLLSLKIDTHLAVGGRETRLVLTGDSVEGIAGRPTHSIIKAVARAHDWYERIMRGELRYCRSIAKLTGLDDRYVSRILRCAFLAPDIVDAILEGRQPPGLTVHVLVSDLPSDWAAQRQRLGFAAK

SEQ ID NO: 4799 - protein, 564 aa, unidentified
  source 1..564: note = uncultivated organism
MEKETTILYPGKIQIATKRAAIYVRCSSDEVRKGRTDDRDKSEEAKRGYSPETQEEKAKNLINNEGWQLDPKHIYNKDIGYSGSTDKRPDFQRFMQAARNKEFDVAVVFRMDRFFRNLRLLLNTVAELRALGIEFKSVTEPFDTSTPTGRAMFANMGVFAEWMREVGMESRDEGMIKAMKEGKYLGGTTPNGYKFNKERQRLEIEPKEAETVKMIFGWLVEEKLSEYKIQQRLNIMKVPTKWDLLGRKKKTKSVGWWNRKTVDRMLTNEIYTGKYTYRKYIATGRTRNEKNLRPKEDWIEVEDDSIKIIEKEYFDRGQKQLKINKQQAVRNTKEIYALQHKVVCGKDRYRYQCAIRRNKKNGNSTKYYFCVGIRNYLTPNHCLSSTISESRIMPPVWDKLKETLTNPKLIMAEINKYINRESNYDKLQKQLGNITSAIESAHNKKEGFAELYGEGSIEKTFYDQKIKLCDKDVEELKKEEKTIAQSMVGEEENKRRVRSAELLFDRLKNRLENATYEIKVEILQMLVGEVEKIDDDLKIEFILPFLDEQVPSGELDCSDNARMD

SEQ ID NO: 4800 - protein, 517 aa, unidentified
  source 1..517: note = uncultivated organism
MKNKMNCAIYTRVSTDTQAEKEFSSCEAQEEKIRAFIKSQNNWEVFKVYSDPGYTGANLNRSALQELLEDIRQGKINIVLVYKIDRLTRSPKDFYYLMEIFEKYKVDFVSITERFDTSTPAGRLLRNIMLTFAQFERELASERTKDKMLQRAEKGLWNGGIPPFGYRAVNKKLIPDERESEIVRLIFETYVETGSIAEVYNTLKERNILNRHGKIFTKSSIKNILSNPVYIGKLKYAGKIYNGLHQPIISELLFNGAQELHKKKIRKMKLFRNYLFAGLITCEECGSKMTPTYTNKKAKRGRKRYFYYRCTSTLKRDWQVCTIRQVNADRLERFVLENLERVSRDEPYIENLVFRLNHNPDELVRNSLIKNRVSGDRAGFELRKELLKIDPQNLIFQLKTFLNTLSSFSRTEQVLLIRERIDSIKYSKKRIRVNFKYSLNINNLNPSQQSSGQVEVGGGISEKENQNFLSSCSPDLVRKENLAPRAGLEPATYRLTADRSTIELPGNFIIKIFILNF

SEQ ID NO: 4801 - protein, 520 aa, unidentified
  source 1..520: note = uncultivated organism
MAKKQERKAPVNVMADDKWIAFYGRQSVEKDNSISIDTQFEWCRSKLTPDEQSMRIKEYKDEGKSGGNTDRKGFQDMMRDISKGKISKVIVYKLDRISRSLKDFLGIWEKFKQYNVMFVSAQESFDTTTPVGEMAVQLMVLFGELERKTTMKRVQDAYDSRSSKGLYMGGRLPYGFKLVETNVSDLKTKMFDEVPEESAHIKYIYDVYSSGGISLNRLLKSLINEGMETIRGSSWTSNKIGTVLRNPIYVKADASIYEYYYSRGATIVNDVCEFDGTCSIYLHGKGKHKGGVDDLSDMKVVLAPHKGYIESSTWIKCQELLRKNKQIPRSVTGNRSWLSGLMVCEQCGSGMSVTQYQDTRYFNCNTRRTKYKCNGPKEVIYVDALEELIFNAIAEKILGLKVNKYVLSDEESAELNSLNAQLVKLKVKEDNAVNALLEDSITDNSVSSLNKTMDMISKKKKELSDRIEKLKTNCIKYEDLSPLKRKWRESTYEVKKKVANLLIEKIVVSADGGFEVIWKV

SEQ ID NO: 4802 - protein, 600 aa, unidentified
  source 1..600: note = uncultivated organism
MKNNTDSIAIYSRKSKFTGKGESIGNQIELCKEYIRAHYGDDALDHLVVYEDEGFSGGNLNRPDFKKMMAAAKERKFKAIIVYRLDRISRNISDFSSLIEELARLDIAFVSIKEQFDTGSPMGRAMMYIASVFSQLERETIAERIRDNMHELAKTGRWLGGTTPTGFESEGEEKVTVDGKKKKTFKLKLVPQEAEIVRLIYDLFTETNSLTMTEAELMKRRIVTRNGNYFTRFSIKAILQNPVYMIADQEAYDYLTEKEADLFSDRAAFDGKHGIMAYNRTDQEKGKTTQYNPVSEWIVAVGKHPGLIPGKTWVRVQEALDQNKSKAFRRPKSNEALLTGLLYCRCGNRMYPKLSKRRTADGDVIFTYVCKLKERSQRSLCNNRNANGNTMDLAVVEQVKRLNDHNAEFIDQMEKSRKFYTGNRVQYEEQLAALQKNKAEVEKKIEGLVDSLVELGDSTAKVRVAKRIESLTAESDALEVRIQELTALTSQHAMSDIEFDVLRQLLSVFQENIDDMPLEQKRAAIRTVVCKVIWDGVNAHIVLFGADDEEIEMPDITPLLADAEAEETLEPFADVDYEEDLENAAESGSASMTPWREDSK

SEQ ID NO: 4803 - protein, 518 aa, unidentified
  source 1..518: note = uncultivated organism
MRVAFYTRISTDEDHQKYSLDAQRDRLDAYCKSQYEDYEVVKIYRDASTGTNMNRSGLEEMLYDAENKLFDALIVFRVDRLSRNVRQLAQMVESLTDYRVILRSSTEPFDTSNSAGKMMLQMLGVFAEFEHATIVERTKAGMERKARNGEWCGGFVPFGYQKVEGEIVIDEEEAAIVRRIFRNYVHGKKGATKIFKELNDAGFRKRSGILWENRAIINMLKNPFYTGVIKWKDSIFEGKHEGIISSEIFEEAQKILEKRNIQSNGKRFKRDSDFILTGLIFCGRCGKGLVGISAHRNGHRHRYYACANRSYHKGCDLPFIRADVAEELIRKDLSAIFNNHQLLENIWKHIDGQLKERLPDKDKEMDRIQTEIESTKSALDRYFEAFESGTLKAEILRDKMEELNLKLQQLEEQKVNLDSQLEELRLKELNLSIIKEYVDIFEFVMVEEPNEKKKHLLKLLVEKVLVHDRDRYEIEYCLHDGSSMLNALENVPDETDKVLSVNHLAPTVCNQEHAAPRV

SEQ ID NO: 4804 - protein, 529 aa, unidentified
  source 1..529: note = uncultivated organism
MGSNRSYSLDAQREACEAYVLSQRHEGWSLVPNRYDDGGFSGGNMERPGLKALLADVDAGLVDVIVVYKVDRLTRSLADFAKIVERLDAKEASFVSVTQAFNTTNSMGRLTLNVLLSFAQFEREVTGERIRDKIAASKKKGLWMGGPVPLGYQVVERKLVPVPEEAARVRMIMRRYLEVKNVPALIAILRAEGVVTKVQQRTSGPHRGGIPFERGSLFHLLKNPIYRGKIIHKGHVYDGEHEPIVDQDLWDSVQMHLKERAPPRQRPTNDPQRALLSGLLADPEGRQMVATYATKRCRRYAYYETRKDLARPGDPPSTRFQQGALNRQVIDHVVTLIDDEHTLRRMAGLDGAEQLRSLFAGARDLRAKINTTGQAPAAVRSLIALIKVQRDHLELTLKPRALGLDGQPCWTWSIPLPARKPFREAKLKLDRASSNPASDQQLVRLLAEAFEVRELVLASPGLSLNQLANRQGRCRKQMAKLLSVSWLSPRIIDAITDGAQPRTINRTRLLETALPVDWSEQEALLGLAA

SEQ ID NO: 4805 - protein, 544 aa, unidentified
  source 1..544: note = uncultivated organism
MQIVNCAVYVRKSSERGLDQEFNSLDNQELACKSYIASQTFQGWQYFKTYSDGGISGGTMARPGLQEMLSDIKTGKIQCVLVYKIDRLSRSIYDFKSMMKKDFEPHDCNLVSITQSFDTNTAMGKLTLNMLLSFAEFEREVASERVRDKMRATKSKGLWVGGVPPLGYDIQFGKLVPNETEVPLVKTIFETYLNSTGMLDCRNRIAALGIRGKAWQTRKGEMRGGREMTANIIEQVLKNQIYLGKLPNKSTDEVFEGQHPAIIDNTLFDAVQAKIQANNNHPGSGYRIGTALLHNKIQTADGTVLKNKSGQKHYNSHRRYRYYSGGGVSLPMGDIDAIVIDTIKKFLDSDLGCFNDEKRLCFKQTTFSPELISPMIAKIVYYCQKLVIFINIADLGYLTQFRNTGHINTNSYAMPCAISSDGNYAIIETDVIISSRTCINHRNSGGSRDLLTKTENAIMLIKALGYAWKYKQQYENGTEIRELAETEKRDQRTIYKYLNLAYLSPRIINDIMDSKIPPHINLQTLFQIASTYENFAEQEREFYG

SEQ ID NO: 4806 - protein, 552 aa, unidentified
  source 1..552: note = uncultivated organism
MNDPPNNGARKVRCAIYTRKSTSEGLDSDFNTLDAQREAAEYFIRAMAGEGWEALPHRYDDGGFTGANTDRPALKRLLADIEAGEVDCVVVYKVDRLSRSLMDFAKLLALFDQKNITFVSTTQNFNTTNSMGRLTLNILLSFAQFEREMIAERTRDKMAAARKRGKWLGSRPPYSYLGDHDKRQLVVCEEEAERVRTMFRMYLRLGSVNAVAKRINDLGWPKKLHRTKAGSEIGGGRWRDKDVHLVLRNATYLGKVDFKGELYVGEHEAIVSEELFARVQSVLTSKACGRGRRRGRNPEYLLQGIAWCGLCDKRITTTAGRGRNKEIYRYYVCSNRGRKGRDGCDHPRLGAEELEQLVVSRVKARCTDPLLREEIVARMEVGRVEAKAAITSERERIVADEAKLHAEGRKLMDAIGSEAGTEGKLLAERIGEIEAQLDVLSTERCSLDAQLRGLQNATEQVRATVNILEVFDAVWDEFEAAEKQDLVHLVVKRVVVNEPEGKLDLEFHDLAAPFEPLATEPEDDPNEEPPEDDAPTVAHSAPVSAPAMEASP

SEQ ID NO: 4807 - protein, 553 aa, unidentified
  source 1..553: note = uncultivated organism
MQSKQRQLNNTGIYLRLSKDDERAGESLSIDNQRLILQKYVAERGWNLVDEYVDDGFSGTDFERPQVKRLLDDAKTGRINTIVVKDLSRFGRNYIMVGQYLDYIFPAYGIRFIAINDNVDTADRNSTGMDMMPIMNVFNEWHSANTSKKIRAVLEASQKAGKYTSGCYPYGYLVGDDENRTAIIDEPAAEIVRRIYDMRIQGLSPYRIARVLSDEGIPNPTLYRTKKDGSKINRRAPNWWSHKTVREMLADPTYKGCTVQHRRSTISYKNHNTYWLPQEEWIVKRNAHEPIVSEEVWEKAQEAAKSVSRSKITQSNAPHPLSGFLFCADCGQKMKLSGSKSKIKDGITYNCECYICRTYANLGKNYCTTHAIQRKDIEEIVLVDIRAKCDFVLKDEEAAREEFLKSKSKRSATARNFDIKQLNAKKKRMEELDVLIRTAFEEKVLKKMSENLCNSLCEGYQKEQQTLQTEIAALEMKLQDESKDQADVEEYIRRIKLYGNCPELTREMCLQLIEFITIDAKTEHNNRWHPPAPRNIHIYYKLIDKEHANISEN

SEQ ID NO: 4808 - protein, 551 aa, unidentified
  source 1..551: note = uncultivated organism
MKNRAVIYVRTSSEHQGEKSSPTEQEADCRKLAADQGLTIVNVYRDIEKYRVKNKLVEPSGTRADRPGLVAMLHAAEKGEFDVILAWREDRLYRGMRSMLVVLEAIQDYRLSVMLARETFDPKIAPLRAWVAQMELDGMKERMTMGVKARLKAGKANTGQDRYGYRRNGDVIEVVEEEARWVRRIFAWYLADIPIMEIRRYLIEANAPQKGSSRIRKMQWARSSIQAILKSAKEYAYGIKVQSRKGDLFDIPVDPIIDIATYEKFVSIREQKKTHPVRNIKHDYLISGLLYCDCQLKWVARTNNKRRNRKGVLVERKTPIGMYICRQMHKEARSPKCPRSISAQRADEIVWEKICEAIENPEFLFGQAREYVAKLRENAENMNNDRERLQKEIDALPVARQWTIEQARLGRITSADMQLELSTFTMQEINLKRELASLAYTISLNALNNWEEKVTEYLLDLQAGIQGLKNVAPQKDEERREIFRLKKRIVNTLVERVNIDENRELTVRIRLNLLDVTEAGPDSGAVHLGEFGIYSRRQSSHAHRHHCAVCG

SEQ ID NO: 4809 - protein, 556 aa, unidentified
  source 1..556: note = uncultivated organism
MLDSFPSSQPARSGVYIGSPGELSPAGGYDRQSEAPRAYDSFSPENQRRLNHKAAARNGEYIQPEFEFSDYITARKDVRRPGFEKAIRALVDGRIKTLYVAKLDRLTRKGMGHVGLILDELERTGGRIVFVAEGLDTSKPGARQVIAILAEQARAESDAISWRIGEWHAHNRRMGLWKARRPFGYLVVEGKLKPHPIEAPIVRRVVEDFLGGATLRAIARSLNEEGIKPPRVAIWYEEARVKGHRVKKPQTETWSWNGVKKLLSQPVLAGLLSHKRKLVYDEHGDLVFAGEGIVTLAERARILAEMERRSTMVRNARKAERVGTRTGAGRPAKYLMTGFTRCGECGSSASIWTQLKRGNVYRYYRCSPKAHGQNCRGCNFSADRLDDEVVSRLRAKLTALEPGDPLLDEIAERWFAQRLPDQEADRRILEEARDAAKARIADLYAARYERGEFSTSDEVATYENLMERLKGQREAAEAALAKLPPRPEFDVATLVDGELSAGVWPTLPLARQRFLLSLAVHQMWIYSSDVPLDERVIVVWHGQEPPTPRRGGGNAD

SEQ ID NO: 4810 - protein, 559 aa, unidentified
  source 1..559: note = uncultivated organism
MPEKVPAGYIRVSSEEQAQHGISVDAQREVLKAWAVMRQAGDIALYEDPGFSGKNTDRPALQRLLADVRAGRISALVVWKLDRLSRSLRDTLAIIEDNLQPRGVALHSVTESIDTSTPSGRMMLNILASFAQLEREQDSDRVVMAHKHLAHECRYLGGHVALGYRVGEDRRFELDPATAPIVRRVFEMYLSRSGYAPILDYLNAEAARFARRRSPWGKSDLNYLLANEMYAGTYIRRLGTDKRSKVTAPEVIRVPGGVPAILTPEEWARVCALRAENLTAYHAYARRVYPLTGLVHCAVCGRLMPLDNAGHDRDGTVQRYYKCRSGCVSPVRLESLMTAVCGALEALADQPGPVADACAIANDYSAAATADRRAATAPIDRELQAIRRRQSRLLAVLTADASDAQAAAPQYVLAELRRPEAQETTLTARREALLRPCATYDPAATIAAFAACRGIQKKPADDQRTLIQRAIHAIQITSTEVRLVYNWHVCGGDDPPPHTCQSLIPLPFPPQKKKGPKPPLVLIVRPSSEPLSDALAHADPLLSCGLADAIRDVSREADV

SEQ ID NO: 4811 - protein, 551 aa, unidentified
  source 1..551: note = uncultivated organism
MNKIRCAVYTRKSTDEGLDQEFNSLDAQYEACTAYIASQRHEGWKLLSERYDDGGISGGTLERPRMQRLLSDIDAGRIDMIVVYKIDRLTRSLADFAKLVERMEAAGCSFVSVTQSFNTSSSMGRLTLNMLLSFAQFEREVTAERIRDKIAASKKKGLWMGGLAPLGYDPHPDKTRRELVVNDAEAETVQRVFELYLSAGCINATVRAAADSDLRSKRRTFADGRIQGGNAFGRGQLHGLLTNPVYRGLIKHKDKTWPSVHPAIIDEDLWDAVQTKLQSASAKRRGVTKINQGVTEAPLLGKLLDEAGERLTPTHTKRHNRIFRYYVSNGFVSGNPRPDGWRLPAKPLEDAVAQAISNHILQHANSLTVLRTGSADQLRAAGEAAQLFARQIQREGIASAAAIICNGTISKGLITIKLARDTLAAQLGCSPDEIAPELLAISTAFTLRRRGMETKIVVGDCKTDPDQTLIRALKNAHRWAEGLKSGKLVKQIAADHDCSDSYVRRIMPLATLSPDLQQSILDGTQSTDLTLETLIRTDIPLEWAAQEKQFG

SEQ ID NO: 4812 - protein, 533 aa, unidentified
  source 1..533: note = uncultivated organism
MEKERKTVGALALDQVPRVIAIPPVSQEQTRKLRIAAYARVSSNSEDQRHSFAAQTARYTELIRQNPEWELVDVYADKGITGTSAEKRDDFQRMLADCRRGRIDKILVKSSSRFARNTKESLEVVRELKALGIGVCFEEENIDTSELSGELLTAIFAMLSQKESEAISKRMRWSYQMRMKAGKFITCKAPLGYDLVNGKLQINESEAEVVQYIFKQYLSGQSLENIARQLTQYGIPTRDGGPCWQKTAVAYILSNEKYTGDALLQKTYATASFPSRKVKNKGSHPQFFIQDAQDAIIDRMTFDQAQRLLERRRKSIHPKSLFKHVFTGIMVCNVCGATFKRKSKTGVATYWVCQTHNHSPERCPITQISEQKVQAAFLHMYYKLRHQGMDILKQLLKDLQAAREARMLWSMDIVKLNDKIADIISQDRLLAQLKQQGLVDPDLFISRRDRLAEQLRTAKLEKERFLEAEEDQTIRHTLTIVNVLESGPDLLSEFDEELFSELVEKIIVDDAVRLRFRLINGLELKEQIERMAR

SEQ ID NO: 4813 - protein, 525 aa, unidentified
  source 1..525: note = uncultivated organism
MAEVLCIPKTIPERTGYQIRSIRVCAYCRVSTDADGQYHSYDAQMEYYRGLIQKNPAWKFCGIYADEGISGTSRWGREDFRRMLEECEKGRIDLILTKSITRFARNTVDTLSTVRHLKEIGVSVYFEKEGLNTMTEESEGILTIYGAVAQQESENISQNVHWSAVNRFRHGTFVISRRPYGYDKDEEKELAVKEDEAVWVRRMASMYMNGVSGVRIAEYLNGNQVPAPYGGLWSSEAVLRILFNEKTVGDCLHQKTYSTGMVPFRTEKNHGKKPQYFIRDDHEGILSRDEQMRLQQIKEYRLGRQARAKSCGSEGTYILSGKVVCGECGRAFIRKKEQRRKGVSIKWRCPGHRSEACQCFTNEIWEADIERMFVNTFNTLKEHADEILDPVIRGMRKMQETNGLHEALGTLNQKKLELKEQRHILRQIKANECIDSALYFEESRKIERELSRCRSEEKQLHSRGTHQDTITGLQATLHQLQGYDGKMQAFDGDQFILLVREVSVGKERELGFHLRCGLNLYEPVL

SEQ ID NO: 4814 - protein, 590 aa, unidentified
  source 1..590: note = uncultivated organism
MTSSNIERQGSFKRAAVLLLLTVRLLGFLVSILLTGVLPGKARRDRGAQIAPFEGRPYVRAAIYIRVSTAEQADPTHFSLPEQERVCRELAEGRGWTVVRVYADEGVSAAHDDPKRRPQFAAMLADAQTGLLDVVVVHKLDRYARTLRGALEWLHFLEKANTLLVSATEQFDFTTPDGRLHFQLLCAFAEYFLNNLRVNVSLGWDGRARDGRWRGDPPFGYCRGQCPECIEPNGRHCERYMQADPLGPARELYPHPWESPGLLLAFETMAERAAVYRDVANALNSAGYRTKCKLERGGPQLFTPDAIRLILHNEFYRGLVRVRDWSLPGKHYGTVPGRHPPLIPQELWDRVQGKLACNAARPPRSPKRIRSYRVSGVGRCARCGAPLVGQFSSGRRIYYCSRRCEHGRDPATGGCDMPGLYADECEAQVLALLEQIAIPAADRDRILADLAGQPRCNNGPSPASLQEKLDRLTWLYQEGDVTQEDYRRRKAALQAEMQRIRVPEPVEVVRAVDLLTNIGQAWRAATDDQTQRGLLQAMFEGICFDGPNNAPVLKSVRPQPAFLPYWDLLNREDGVEGIRTPDLSLDRAAC

SEQ ID NO: 4815 - protein, 507 aa, unidentified
  source 1..507: note = uncultivated organism
MAGNPKPLRCAIYTRKSTEHGLEQEFNSLDAQREACEAYIKSQASQGWKVLPQHYDDPAYSGGNLDRPALKKLLADIESGRIDVVVVYKIDRLTRSLADFAKLVEAFDARSISFVAVTQQFNTTTSMGRLTLNVLLSFAQFERELSSERVRDKIAASRRKGKWTGGTVPLGYDAKDKKLVVNKAEAETVRTIFRSYLELQSFSKLVAELDRRRIVTKRRNTKVAKFNGGIPFTYGPLAHFLKNRIYLGEVHHGGKWFQGEHEAIVDRPTFERVQRLLESKANGRKAKRSESGALLAGKLYDDKGNRMSPSFSTKNGVRYRFYVSSALLRGRKAAVGSIARIAAAEIETAVLAALKTHQQQNGSDSAPLEILERVVVARDQLLLTIANTDGDSREIRIAWATRPNESATTVECSGASEVVHNEVLIQSIVRAHAWVQCLQDDTYGSLEQLAEASRIHPKVVRLALRLAFLSPEITSAILEGRQPVGRSLARIPKLLPLPWAQHRPLLG

SEQ ID NO: 4816 - protein, 526 aa, unidentified
  source 1..526: note = uncultivated organism
MKPPVRRCAIYTRKSSEEGLDQAFNSLDAQREAGEAYGRSQASEGWQIIATPYDDGGYSGGSMERPALRQLLADIAAGLIDVVIVYKIDRLTRSLADFARMVELFDTHEVSFVSVTQAFNTTSSMGRLTLNVLLSFAQFEREVTGERIRDKIAASKARGMWMGGAVPLGYDLPTDADRALVVNEAEAHSVRLIFATYLDLGSVHALERWLGERGIRSKLRITRAGKTLGGQALSRGALFHMLRNRTYLGLILHRDQAYPGAHPAIVDQALFDKVGAMLDANARRQESRRDHVVRAPLVGRLFDCDGQPMTPTFSHGARGTVYRYMVSAPLQQGRRKAPADNAVRRVPAEAIERLARVTLERLLPAQDSPLDIPTRIELHRATVEMLLPVRHLNDIARNLRDGESAVRDPLDRASLRLTLPLVLPLRGGRRAIEAGEPARARRDPVLIKALRNAHRMLTRDAQGMPQLEASPTSPYQRSLLRLAFLAPQIQQAILAGTQPRNLTLERLMTSDVPPCWTQQISAFMGD

SEQ ID NO: 4817 - protein, 580 aa, unidentified
  source 1..580: note = uncultivated organism
MKADRPQRLRCAIYTRKSSEEGLQQAFNSLDAQREACEAYIKSQAGEGWHLIKTPYDDGGISGGTLERPALQRLLADIRAHKIDTIVVYKVDRLTRSLADFAKIVEVFDAHNVSFVSVTQQFNTTSSMGRLTLNMLLSFAQFEREVTGERIRDKIAASKKKGMWMGGFVPLGYEAMDRTLVINETEAETVRTVYRLYLDHGNVRRVKDEVDRLGLTTKVHKTVDGRMRGGRPLSRGHIYKLIGNPIYAGRIAHKGATFEGQHAAIIDVETWEAVQAKLAGNANDRRVGNGAAAPSLLAGILHDERGNRLSPSHAVKNGVRYRYYVSQAVLQHRNSEAGSIVRMPAREIEVVVAARIAAWLKDSGTVIDELGVSLSPRDQQHLIVAGRKQAERWPRMNASEQRTFVLRIVAGVTVAEREIRIDLRRNRLRHALLDECSSIDTASAPGPQAGAPASGDVLTLRVSTRLKLCSGEIRLVIPPGHAREMRPCINAALIKALTRAHAWKEKLFSGKAPSIQFIAKAEGVTPRYVGRILRLAFLAPDIVEAILDGYQPGDLELERLIKGIPTGWHEQRRVLGFSRS

SEQ ID NO: 4818 - protein, 526 aa, unidentified
  source 1..526: note = uncultivated organism
MARNSAPRATANGSNETPATKVLRCAIYTRKSTEEGLQQDFNSLDAQREAAEAFIASQKREGWQVVADHFDDGGYSGANMDRPALKRLLAAVDARSVDCVVVYKVDRLSRSLMDFARIVEVFDQNGVSFVSVTQQFNTTTSIGRLTLNILLSFAQFEREIISERTRDKMSAARRKGKWIGGHPVLGYDIDSKGGRLIVNPEEAEQVRTIFGLYLELRSLLPLLQEADRRGLRTKRWTTVDGKVRGGERIAKGTMHGILTNAIYTGMVEHKGCLYPGEHERIIDQITWDRVHENLRRNSGDNGASLKNKFGALLKGLLFCIPCGTPMIHTYTMRNSKRYRYYVCYNAQQKGWRSCETKSVPAQAIESAVLDSIRRIGTDPKLADAVAAEALAEVARKRREVDQQSETHRRGLRQLNQNLAREAADTSVDTGARFERMAALQREIESTERRLAELTTERTELDRDHINANDLHRTLAEFDAIWSSLTTKEQEQMVHLLVAKVGYEGRTGKVTVNFSNQGAKELCQGKS

SEQ ID NO: 4819 - protein, 538 aa, unidentified
  source 1..538: note = uncultivated organism
MSDKKIHCAIYTRKSTEEGLEQAFNSLQAQREACEAYIKSQKHENWQLVSTEYDDGGYSGGNLERPALKRLLSDVKNGLVDIIVVYKIDRLTRSLMDFSKIVEVLDKHNASFVSITQHFNTTTSMGRLTVNMLLSFAQFEREVTGERIRDKISASKKKGMWMGGRPPLGYYRKDKKIYPDKEKAELIKNIFVKYIELKSTTLVKDWLKEQGQKISVGNLNCILRNKAYIGLVGHKGTWYKGEHQGIISTELFEQVQAVMEDNRINRQHYDPKKSLLAGKLYDDNNNTMSPSWSTGSKGKKYRYYVSQAIIRKEPGKLGKVSKVSLPKLEQFIDNWFRQFFEDKTKVYPYLKDFEITKEKKVIKILSSYTINRNTEKYLIKRVQLKVNEIEISLHTEQVKELFNALYENREMQILKPEELKTGNTYTEPYHIGIIDNGAKVIVGQFIKPNRHQNAELIKILVKAFKWNREVVNGTNIKQIAEREKVSYQYVIRLLNLSFLSPKIVRDILSGNQPADCTLKKLLSIKTSAWKEQEKIFYK

SEQ ID NO: 4820 - protein, 565 aa, unidentified
  source 1..565: note = uncultivated organism
MTKRAAIYSRVSTKEQADHGTSQGTQEAAGREYAKRHGYEIVESLVLQEDFTGTTLDRPTIAQLVSAAETGQFDVLIPYTVDRMFRPKKAGDEWMLQQFAAQLRGLGVTIEYADDSIPESGDSAAIMGFIKTMEAGSDRRKILERTSRGTKARIAEGKFTSNPPFGYCKDSEGRLAIDEDEAKIVKMIFNMYERERLGVRKIQVRLTGSVPSPSGKTQWQQSVLSRMLGSEFYWSGRHHLGISMGITDGVPCPPIIDDEHGKRVQARLRTNKRIKKASKSKTILQSRVQCQCGGNWKFQTARKGKTNAEYFCRERYADGPRVLRGEDRCHVRRRGQNELELAIVIRLLEALKSPDNLAATLELSLKYAAERIETCGVEIAPLQQAVRDIDENLATVDRVRINGRLSEEELDAKEKELLRTKAELEGRLAKLDPERITELEEARAMLPAISHLLNWAETYNKPMPIIGMGTIKSFAPTSPPLIEQDVVEMLTLFSPEWFIGEPEKFDDDDWLVIALNEFLDRLHAKITMFDDHAELEGVLPLSIPLGPNDPPNNSIHATHLPRGLG

SEQ ID NO: 4821 - protein, 553 aa, unidentified
  source 1..553: note = uncultivated organism
MSQKPAIRCAIYSRKSTDEGLDQAFNSLDAQYEACAAYIASQRHEGWKLIPERFDDGGLSGGTLDRPALQRLLAEIDAGRIGMVVVYKIDRLTRSLVDFGRLVERLDAKGCSFVSVTQAFNTATSMGRLTLNVLLSFAQFEREVTAERIRDKIAASKKKGLWMGGALPLGYDRHPDPQRRELVVNPVEAEVVQELFRLYADLGNLRLVELEAERRGLRPKTLVSRTGRVRGGSPFARGQLHHLLTNPVYIGLIRHKDQSYPGQHPAIIDDGLWQEVQDKLIAASARPRGRSEAITDPRVLTRKLRDETGDLLTPTHSQKAGRRFAYYVSNRLIAGGKDPSGWRLPAEALETTLRQVVVGHLRSAAKGFALLAQPEASGATDLLRRATALADRVDREPGVLGSLIATGSLAPGRLQLELDANVIAAALEVPVATLSDQLTRIKCAFVLRRRGVETRIIAGETVPAPDEVLQRTLAEAHLWARALRRGTSLTEIARKTGRSEPYIRTRIPLAFLAPKLQAAILDGRQPAQLSVAQLIREDIPLDWAEQARLFEIA

SEQ ID NO: 4822 - protein, 541 aa, unidentified
  source 1..541: note = uncultivated organism
MKIFIYSRKSVYTGKGESVENQIEMCKEYISTKLPQADEAEISVYEDEGFSAKNTDRPQFQQMLRDIKLNKPEYIVCYRLDRISRNVGDFSSLIEDLNNHNISFICIKEEFDTSKPMGKAMMYIASVFAQLERETIAERVRDNMLMLARTGRWLGGTTPTGFTSEKVQEIIIDGKIKTSCKLKDKPEELKTVDCILEKFLELRSVSGVSKHLIKQGIKSRTGKMFSLLGIKEILQNPVYCIADEDAWSYFTEYHADVCFDKSECSSKYALLAYNKRDYRKKNAPRQEMDKWIVAIGKHKGRISGKKWVSIQNILKDNIPTGKKPAIMHNDYSLLSGLIFCDKCKSRMFAKQRSGKSGNHELYDYICNNKLRGGLDLCDCQNINGQQADDLVCEYLMQYTNENSGIYKLLEKLKHDLQGQTQKTPVAVIDDKIKKCNSEIDNLINTLSHGNLGAAFVERVNARITELDKELSSLKKEQAHMQKDVSIIADREIQVDMLSTALSSFKDNFNRLSIEEKRTLIKLMVKKIVWDGKDLHIFIDGE

SEQ ID NO: 4823 - protein, 537 aa, unidentified
  source 1..537: note = uncultivated organism
MRIIAAVRLSRMAEETTSVVTQTESLREYAARLGHTIIAETQDLDVSGGLPIRQRPDIGKWLTPEHLHEWDAIAGYSIDRMFRNLYDFITFYHDFLLPNGKSLVVTSENIDMSTPDGRTMAQVRVIFAENELNKITERNARAAKKLLEQGYWKGGAMRFGFMRKREGDHWILVPHPENAEIIRQIAVGVIAGLPVNAAAKELTTRGIPTGRKRKDPATGKRVPITTWHTAALMAMLKDPALAGYITWQHKFTRGKGKTYKLVRDSDGKPVRRMPSILDEDTFKQLQRALSRPTQKRGRILGTAKLVQIVFCGQCRQPLWSTKFMPRGKLYVYYKCAIQCGAKMIAQDALHAAVSDAVMVYGHLPEVKRELKRGEDYREALDENKARLQELDPDEADYEDDRQALLAERKRLQTLEAEAEPDEWVTGLTGRTIADVWEGLDETGQRKWLIDRGWRFYATRGPDGEPPLVTGDGGAGLLGDVAKVTGLTVDQVTALDWAPGLAMVRERGLSMDTDELVRLARNPDEVKRLAQQAASEGQ

SEQ ID NO: 4824 - protein, 503 aa, unidentified
  source 1..503: note = uncultivated organism
MKTAVIYCRYSSDSQTEQSIDGQLRVCTEYAKSRDILILNTYIDRAMTGTNDHRPDFQRMIKDSAKRAFNFVIVYKFDRFSRNKYETAMHKKTLKDNGVKVVSATEFVPDTPEGIIFESMLEGYAEYYSAELSQKIRRGNNESRRKGNLTGGRVPFGYKNVDKKAVIVPEEAEIVRHIYEQYSIGVYVKDIIAELNSKGLFHKGKPFAKNTVYSILGNERYSGIYRHGDEIFNNIYPQIVPNEIFSIVRDKINANKFGKRSERITYLLKDKIKCGYCSKSIIGENGTSQQGERKYYYKCRGRKAKLNDCHKQSIRKDVLENIVLECVIERIQKTNNLDFIVNGLMQEQERQAQSNIVLNLLRKEQRQTETAIHNIMSAIENGGTTNTVMKRMRELETRQSELEKQIVIEKSKTAVQLTETQIREFYVQALALEPKLLINYLVKQITLYDDKIEIQFNSPIKTSPDSDERRRGFSLCSKTVKVTYNVARRTNITKLEFEVEIYI

SEQ ID NO: 4825 - protein, 572 aa, unidentified
  source 1..572: note = uncultivated organism
MKPRNEQALRCAIYTRKSSEEGLEQEFNSLHAQREACEAYTRSQQGEGWRLRKTPYDDGGLSGATMERPALKQLLADIEEGLVDVVVVYKVDRLTRSLSDFARMVEIFDGHQVSFVAVTQQFNTTTSMGRLKLNVLLSFAQFEREVTGERIRDKIAASKRKGMWMGGMVSLGYEVRDRQLAVVESEAATVRHIFQRYGELGSVRLLKQDLDRDGVRSKLRVSSNGARSGEKSFARGALYTLLRNPIYIGEVRHKDARYPGQHQPIVERSVWDKAQELLRAHTVRSDGKPNASMPSPLIGKLFDDQGERLTPSHAVKGNRRYRYYVSRSLMKGTARESSQGWRVPALEIEHNLAAAIARILDEQTAIVADVDVAAVGAHGITSILATAAQWSARLRSETEASTALNTLVERAELHQDGIRLSLRLPLSTSGKPAANATNHLSITRQIPLRVRRRGNEMRLVIGGGSGSAPRIDSTILKATARARRWFDDLVSGRAASMVEIGQREGVGKRYVSRMIRLAFLAPTIVESIAEGRQPPELTAQFLSTARGDLRHWCSLNLRTDSKSAASHAILDA

SEQ ID NO: 4826 - protein, 554 aa, unidentified
  source 1..554: note = uncultivated organism
MKRCAIYTRKSTEEGLEQDFNSLHAQREACEAFITSQRHEGWKLVRTKFDDGGFSGGSMNRPALQELLTAIEHGKVDIIVVYKVDRLTRSLADFAKIVELLDSKGVSFVSVTQQFNTTSSMGRLTLNVLLSFAQFEREVTAERIRDKIAASKKKGIWMGGPLPLGYDVMDRKLIINQPESVTVQKLIQMYIELGTVRRVKEEADRQGIVTKRRIQKNGKETGGKPFSRGNLYQLLSNPLYVGKIPHKGEIYPGQHDGIIDQDTWGTVQDMLSGNATSRNHVTNTKGLFLLTGKVFDESGEPLYQSQAHKQGKRYCYYVSKHLMESADKNNEGWRLPARTLEQVITRSISELLLDPTRLIDTLDLHTLDISKLKNMASGLSEQISNGEPDEQRLNLQAIIQHIGLTTTEVTLTLNTDELAKALGVAEEIGEAPITIIVPIRLQRRGVESKIIIKGPGSDNPFLDQNLCHLIAQARLWFDQLASGEVLSVRELSTRHHVNENEITRTLPLAFLAPGIIEDILNGQQPENITAYRLKRLSPLPLDWSDQAEILKTLS

SEQ ID NO: 4827 - protein, 621 aa, unidentified
  source 1..621: note = uncultivated organism
MRVATYTRISTDEEHQPYSLEAQADRLEKYIGSQDGWELARRYSDQCSGATLERPELQRALGDAEMSRYDLLLVYRVDRLARSVRGLAHILESLDAAKVAFRSASEPFDTSTSAGRMMVQMLGVFAEFERATIVDRVIAGMERKAARGEWKGGPQPFGYASDTATGRLVPKEGEASLLPVIFELYAKQRLGARSLAAWLNERGHRTRLGRLWSTQAVLTVLRNHVYLGEVHFRGAQHPGRHAALVERDRFDAAQGVLTERGADYSVRRSNPSDYLLAGTVVCARCGSHYVGGAARGRSARYRYYTCLARLKFGTSECNADRLSAPALEEAILAALRRTYARRDLLAKAVERAQRKLHAARPQYEEQLHVVDAEIAKVEENIQRYLEAFESKTMPEADCGNRVRVVSERLRQLRMRRAELAASAEDDPQASDVDLDALIPEVANLLSADTEVPALKAVLRMLIQEVRVESRDAIYPTFRVPLHTPVRELSGVVPRIGFEPMISALRGRCPGPLDERGGACEVYGGRRRRPPLHALRRGHPHQPQRARQSHPHRAGQMKSRCAQRRRCCVDDAVVMVVAMPRRGDRVRVEGEPVRFQVARDAAHHVGKVEDQLDQRSLLGTEQ

SEQ ID NO: 4828 - protein, 645 aa, unidentified
  source 1..645: note = uncultivated organism
MSTKTIKQFVIYSRKSKFTGKGESIENQIELSRQYIAAHYSEEEAEAALVYEDEGFSGGNLERPKFKKMMSDSQEQQFAAIVVYRLDRISRNIGDFAKLIEDLGNRKIDFISIREQFDTSSPMGRAMMYIASVFSQLERETIAERIRDNMHELSKTGRWLGGTTPTGYESESISNVTVDGKIRKACKLKIIPDEISLVKLIFDKFLETGSLTKTDQFLLQGRYHTKRGKSFTRFAIKGILSNPVYMIADNDAYEYLVENEVDLFSEKVDFDGKHGIMAYNRTLQRPGKATQEKPMNEWIVSVGKHKGVIPGSTWVSVQKLLELNKSKSYRKPRSNVALLSGILFCGKCGDYMRPKLSDRLTAAGEPIYTYLCSTKERSRSHICDMKNANGNILDAKVIDTIKGFGKNSADMARIITQAKKRITGNREGYDAEVSKAKEQIEENERSIKSLVLTLGKSDGTHAEKYIMEQIDELHENGEVLKKRLAELEAVMQQHDLADIEFDLIRQLLSTMGENIDDYSVEQKRAAIRTFIRKIVWDGENAHLYLFNNDGDYEFPDPPTDGGNPSPDDGTGSNGDSQDGQEPLGEDSKRDTYVFPKQEEDRAGYFHFGADRFGQRRQLAYIYGRYGGRQLYLRGHRDKAAVRKAV

SEQ ID NO: 4829 - protein, 518 aa, unidentified
  source 1..518: note = uncultivated organism
MSAESSKQVRCAIYTRKSTEHGLELEFNSLDAQREACEAYIKSQASQGWKILPNRYDDPAFSGGNLDRPALQQLLKDIDAGRVDVVVVYKIDRLTRSLADFAKLVEAFDAKSISFVAVTQQFNTTTSMGRLTLNVLLSFAQFERELSSERVRDKIAASRRKGKWTGGTVPLGYKIIDKKLVVDPQEAETVRYIFKRYLELKSFGHLVEDLDNKKIFTKRRKTEVVKSRGGIPFTYGPLAYILKSRIYAGEIGHSGKWFDGEHEAIIDSATFEQVQAQLATNGVERKFRRSESGALLMGKLYDDRGNRMSPSYSVKNGVRYRFYVSAALLRGRKSDAGSLARVSATLIETAVLDTARQNAPADFKGINSDLIDRTIERIKVGHERLAITFKETASTECATTVELPWSAIPSRNLTSIEEGHNSDRQPDQKLVETLARGYLWAGSLSDGTYTSIEQLAKSVRLHPNIIRQGLRAAFLAPDITEAILSGEQPGGLASTRLLKIGELSWKKQREAFDAIRSD

SEQ ID NO: 4830 - protein, 521 aa, unidentified
  source 1..521: note = uncultivated organism
MTKRAEAKPKTQVRCAIYTRKSTEEGLEQEFNSLDAQRESAEAYIASQKGEGWVALPDRYDDGGFTGGNMERPAVKRLMADIEAGRVDCVVVYKVDRLSRSLIDFARMMEVFERKRISFVSVTQQFNTTQSMGRLTLNILLSFAQFEREIISERTRDKIAAARRKGKWSGGRSILGYDVDPVTKKLVVNRDEADQVREMFRMYLAKGSLLDVCREINRRGLRTKVVKTRKGHTYGGREWDKTAVLKILANVLYRGRVRYKAETYPGEHEAIVPDDLWTKVHQRLRANGRSGGMHVRNKYGALLKGLIHCGPCGLTMGHTTSIKGGSRVYRYYVCYKAQKQGWDTCPCRSLPAEQIEGFVVEQIKRIGKDPELLSLTLAKCREQMAAQRLAAEGELAGVERELVRLSADLGRTADDAARDAHAAARLADLHERVRGAEERAATLRRAVADADAGQITKAEVDAALGEFDGVWSSLSPREQARLMRMLVQRVDYDATKGSVSITFHPLGLRSIGQRGAEEEAA

SEQ ID NO: 4831 - protein, 553 aa, unidentified
  source 1..553: note = uncultivated organism
MIEKNVRVAIYARVSTEEQAEHGYSIDAQIETLRNYCKLNNKIVYKEYVDRGVSGKSIEGRFELQRLLKDVEDGHIDEIVVWKINRLARKMIDLLKMVDHFSKYKAVFRSFTENFETETAMGKFALQMLGAVGELERNTIVENVKMGMKQRARTGSHNGGVALGYRSVSKGDKRSRDTSLEIVPEEAALVRRIFDLYASGKGLRSIANQLNHDGYKTKKGNPFSTTAIKEIVTNPLYTGIIRYNRFENWNEHRRKGKSDNTIIAEGNHEAIIPRELWEKVQILHAEKSKVNPRVFDGQYLLTGLIRCPECGAPMVANRTKNKLKNGTVIIRRYYSCSNFRNKGTAVCHANSVGADYAEQHVLDRIRYVISNPQFLQNLVDAINNRKTNSIVPLQKEKCSIEASLAAIEDKRKKYFALYEEDAIDREMFVTRLDQLTTETEMLQRRQSEIEYELGTDSAEPIFADYILQILKQFDALVELATLEQKKTLLRLMINEIHINEKREIMSIELAFDEQMQTLFLKADPSARKAEGSLFLSKQQAAFTSKPKRFTLVL

SEQ ID NO: 4832 - protein, 524 aa, unidentified
  source 1..524: note = uncultivated organism
MNAVIYARYSSHSQTEQSIEGQLRDCHEYAMRYGLNVVGEYVDRAVSGMTDDRPSFQRMIDDAAKRQFQRIIVWKLDRFARNRYDSAMYKHRLKQYGVRVVSAMENVGEGDESILLEALLEASAEYYSLDLKKKIQRGQRENIAKGKYCGGTVPFGYKAVEGKLYADADKVPIVRFVFEQYAAGKSKKGIIEELRGRGVRGAKGGPLTYNTFAHMLKNPTYIGEYRYRGETVPGLAEPIVDREVFERVQMVISARAHAPAAGKATVEYLLQGKAFCGYCGGHLIGESGRGKTGGKYYYYTCANRKKSHTCRKKNEKKDFIEWYVVEQTVEYVLSPDRLDRIAEAVVAEYEKEFDRSKIDECEKLIRRLEVEASKLVDALLDAPKSAHGPIVAKLAATEEQKLAAENDLAKLRIACRAYPKVGEVRAWLNRFCQGDLFDMEFRRNIIDTFINAIYLYDDKVLIFYNIRGGKQVSYIDVLTAEEEGLLSGEVSDLNADAPPITIKLEPSIVFVNGTFGCIFQREEK

SEQ ID NO: 4833 - protein, 561 aa, unidentified
  source 1..561: note = uncultivated organism
MVSPTPRRCAIYTRKSSEEGLEQEFNSLQAQREACEAYIRSQAGEGWRLIKTGYDDGGFSGGSMERPALQQLLVDIRERRVDVVVVYKVDRLTRALADFARMVELFDAHGVSFVAVTQQFNTTTSMGRLTLNVLLSFAQFEREVIGERIRDKIAASKRKGIWVGGGIPIGYEVRNRKLVVNEAEAQTVRQIFQRYLELGSVRRLKSDLDARGIRSAVKISKAGKTRGGKPFSRGALYTLLANRIYLGEIRHKQEWHPGQHEPLVSRDLWERAHERLRNQAVREDSKTIAPPSPLAGKLFDQQGEPLYVQGAAKGARRYRYYVSRGLVRGEGGEQQDGWRLSAPELERAVVSAAKAMLADHAAIADAVDETGIETHALPALLKAVEAWIRCLENPAEAASAFAQLVERVDLLPQGLGVALRLPADNQGAAEDNRHATPQLTLSKLIAMHMKRRGVELRMVLKGENDIGRIDLPLLKAVARARRWAGDIVSGRIQSVGELAKENRIDRRSVRRVLRLGFLSPRLVEAIAEGRQPADLSVIGLTRRVELPLLWSAQERTLGASR

SEQ ID NO: 4834 - protein, 565 aa, unidentified
  source 1..565: note = uncultivated organism
MKKVAIYLRVSTDEQVQNGNWLESQKNALLNYVKLHNLDLDEKHIYTDEWKSWAQKEDRPALEKLFKAAQKQEFDILLVWKVDRFSRKILHLLEWVEALEAMWVWFISTTQPFDTTQPFGKMMLQMMWVIAELEREMIKERTQNGILASMKKWKWGRGNTPYGYRKDENGFLTIFEEEADIVNMVYNFLLKDGLSTAQIVKKLNEMNVETYASKGWLWKGRQDNIKHKNLWQKSAVSKMLHNELYFWKLIQNRYKSTKTGRTEKPESEWIIGTAPNIISEEDFKRAQKILTENQKFSKRNTKKWEVYMLGKLIKCDVTGYKYIGYKSSKGTRNYRLNVNKTKVADFENIGQRGISALQIEWAVWNILKKVLLHPNILESEIQKSWEMIGDKMEDIKKQIQLLDESLQKIEDNSKWLLKLISWTDESSLNYVQSQLTENTHKTKGIKAEKVELQNRLSGAWVVHSKVHDFSQISSIVKGNLDTLDYQTKATICQLLIKEVIFDGTNAKIELIVPMSTDTKSKLKTDHARNFFKEKQWFLNEKVQSFINDVGTGLKFVHNLRTHYYQ

SEQ ID NO: 4835 - protein, 507 aa, unidentified
  source 1..507: note = uncultivated organism
MSGHTNSLRCALYTRVSTEEQVERYSLDAQREVLERWASALGYEVVETYTDPGYSGALEDRPGLKRLLSDASEKRFAVVLVYRLDRLARKVRLAYDLIERLEDSGVGLMSYSEPNINTTTPIGKAVLGIMAVFAEWERDTFAERSRLGIRKAAQSGRFLGGIVPYGYTIQDGRLAPQPEEAAVVQQMFAWVVERGWSTERVARELNRLGIPPKYRRDGRGVRGKRTAGVWRGGGVLRILKNRTYIGEYTYGKRTTKTQPDLVKVAVPPIVEPTLFEAVQEQLARNILFAARNARRVYLLKGLIRCGVCGRAFIGTTDYYACLGRASRQASPIPEMKCTVPHVRRKDIEEMIWSDIRTFLANPGKALEGLLQPSGQSQSEAELLQKRLDALVQARARLLDLFLEGGVSKQDYYSRMEEMDRRIQEIQGSLEDAHRKAIAERQRKEALVTLEELGSRIRERMEQLSPEEKQAVIRELVEGVTVRPGTEGVEVEVRYRFGQIAPHTGRGS

SEQ ID NO: 4836 - protein, 525 aa, unidentified
  source 1..525: note = uncultivated organism
MRAVGYIRVSTDEQIDGYSLSAQEKAIRDFASLRGWQVKHIYIEAGVSAKDDKRPEFQKMIEDAKQKHFDVIIVHKLDRFSRSLVDMLSYMNMLNESEVGFVSVTEDFDFSTPMGKLMLAMLGAFSQWYLDNLAAEVSKSKKERARKGGWNGTLSYGYTTPQRLRDKLQSADPDDKRQIETTLDQYPDARATDAVPCPFDSPAVQLAFEAYATSAYSDHKIAQMLNIKGYRITSRKGDGLFRADTVKNILLNRFYIGETSYGVKVQGKDRQWMPGNHEPIISIDLFEAVQDIRAKRARKYNVKPHQAKRVYPLSSILYSVENGQKWKGNVKKGKRRYHRTKTEELSGKIVYAENIENQVGNFLKSIELIPSWRDKVIELEQPEIPQYELDNLKLQLSRLKDLFVMGDIEKREYMKSSNALKQQIRQIEDTQSIDIDRIIHMGELIENISNIWDLANLEEKQKLSTQLFSKIYLKDVTIIAVEPTNILWHLLQEGFRDGEDRERFSSWYPIVPYGISADYVLRIIA

SEQ ID NO: 4837 - protein, 555 aa, unidentified
  source 1..555: note = uncultivated organism
MKKHKKIGMFSNGANIKRAAIYCRVSTIMQGEAEYSSLNAQEDQLKAYCKGKGWEVVKVYKDIKSGKDLERDEIQQLLKDAEEKLFDIVVATKIDRFSRSIVDFYEFSEKLDDLDVALASATQPIDTSNSAGQLMLDIFLAFAQFERNIISERTKEGMNARAIKGLYTGGHLILGYDNVKGELKINETEAELVNRVFLYYLQEPSTTRVANRLNEDGFRTKSLTNRVGIRRGGNYYMKQDILRILRNKTYLGKIPWKGEVYEGIHEAIVEQKLFDAVQKRLGESKKDIQVIRRTKSPLSLLGITKCGLCGSYLTSQSAKSGKHYYYKCSKKIHGGAAQCPSKDLPADVLENCIYNLMESIISEDEWFDAIYNQVKFNNKEVIEKLDKDLKDARTNKTAEETKRTNLLNAIKAGDKLGAIKEVEDELERIEKQIGLQVFQINNFEKERELVANQKIEKEILREILLDYVKIYPTLAPEDKTRFNQLLFQEIISNFNQNEEDGTLIIKMRGDGKLEKSWNKIKNANQLTLVRTSDGLGSASRTRTCNPSVNSRMLHH

SEQ ID NO: 4838 - protein, 503 aa, unidentified
  source 1..503: note = uncultivated organism
MIKTAVIYARYSSDSQTEQSIDGQLRVCEEYAKSNDIVILDTYIDRAMTGTNDNRPDFQRMIRDSAKRTFGYVLVYKFDRFSRNKYETAIHKKALKDNGVKVVSATEFVPDTPEGIIFESMLEGYAEYYSAELSQKIRRGNNESRRKGNLTGGKIPYGYKNENKKAVIVPEEADIVRYIFERYSIGVYVKDIIAELNGKGLLHKGKPFVPNTVYGILGNERYSGIYRHNGEVFDNIYPQIVPKETFEKVRAKVNANKFGKRSEYITYLLKDKIKCGYCGKSIIGENGTAHNGERKYYYKCRGRKSKLNDCRKQAIRKDILEKIVLESVIEQIQKTNNLDYIVRSLMREQERQAQANIVLNLLLKEQRQTQNAIQNIMTAIENGGTSNTAMKRLRELENRQSELEKQILIEKSKTAVQLTEKQIREFYSQALALEPKLLINYLVKQVTLYDDKIEIQFSAPINISPDDESRRGFSLCSKTVKLSYKVPFRANLVKYEFEVEIYL

SEQ ID NO: 4839 - protein, 584 aa, unidentified
  source 1..584: note = uncultivated organism
MTIFKGDTQERYICAIYTRTSHQEKGEVSKYDTIAAQREHCEDFIRFKREFNWQAIKVHYNDRNYSGGTLNRPALKRLLSDAREGKFNMIVIRQLDRLTRSIKDFYDLWNTLQDYGIALCSTKENLDSSTPIGKLYINLLVGFAQFERELAGDRTRDKMRFRASKGLFHGGYPPLGYDFHPKEKGILRINKTESNIVRIAFKRYLQCQSANEVVKYLNKRGYRTKSWITKSGAKRGGTKFTKGVMLNLLKKRAYIGRTFDGKKEYKAKWKGIVTEKNFRQVQNILKENRVSKTSISQNKYNLLLPGLVWCGHCKSYMSPNYTIKKKTGKKYLYYQCTKVGHGDKTACKIGRVPARPLEKNIINRIKFLSENRTLIDKVIGKALKLSKSRLPELKKEQRRINGALRKLDTEISRVKSVIGNKNIEILQDEFIKLDEHKKILDQELRDINSQIEQERSTVISPNTIANYFKHFNKVFDTLSFENQRDLLRFLIKKITYHENKSKISISFWNLPEIKMPPNKQKSGLSGGSTTSRFDKRKTWLPDTTTHQTTFRDEFRFGIRRTKYGQKLLYPRYKKCPTSLKYHSG

SEQ ID NO: 4840 - protein, 555 aa, unidentified
  source 1..555: note = uncultivated organism
MKEARTVRCTGYVRVSTQKQADLEHGSLDAQADEIRQYLKFRQTPETKFDVTEVLREEGKSGKDIDRPELKKLMASIRRGQVDAVVVTKIDRLTRSVKDFYDLWGLFQEFNVQLISVRDQFDTTTPMGKAMVNMILTFAQLEREMTAERVRNKMLWHAEQGYWTGGRPPGYRLDPKEKGVLFPHPDERGFVELVFKKYIDLGSACELAKYLAKQGIKTPVYTSRRGRKMGGQPVYVSVILNMLRNPVYIGKIKHAGKVFPGKHEPIISEQLFNQVNEHLTTHAPKRKNPRAPREHVYVLQSLVFCGQCGSHMTPKACSGSKRMNFYYQCTKNNHSVGTVCTMRYAPAEALEKAILEQVREIALNATEVERIVRDANVHSNDSLRELSENRRRTEVALREVTEKARKLVDVLAQQGAAGLDIVGDELRKLESQRKALERQLAEIKQEQSLVERESMDAVVMVTSLKTFAEVVDKAIPEEMKNLLPMFVERVVFHEPDAKGQGEIQLSLYERPVRPEGGANPSVALSAQSSEWYALVRDFRTALQDSIRKPAVTNSK

SEQ ID NO: 4841 - protein, 634 aa, unidentified
  source 1..634: note = uncultivated organism
MTKKSRTSHRVRQIEEATSRRIAIYIRRSTDEDNQPYSLEAQESKLRAFVESQPGDWQIVKVYSDDGSGATTNRDELQKMLRAARAGMFDTVLVYRVDRFSRRLRDLVGLLDDLSEMGVVFRSATEPFDTSTPVGRMLVQMLGVFAEFEREVIIDRVINGMEKKAEKGLWNGGARPLGYVVDKATHKLAIKEPEATTVRLIFDSYTKDRLGTQSIATMLNNRGLRTRLGKPWSQHTVEHIITNKVYIGEKRFREIVVIDAHPALIQLDQFDLAQRILGKRSADIGQRAANPSEYELTGCIRCPQCGRGYIGSAANGRNSRYRYYVCWSRARYGTKAGCDNHRFNADELENAMRQAVLDFYSTGYDVIIRAVTEYQDSHAKSSSGYRDQLSAIVKQLKDNTAAVDRYLIAFENGALDDEDDSIKARLATLRDQSRQLRAHKAQLEAELEQPPVVPEPAALSKIRTRIREIFDHGNHIAKKALFEALIEEIVINSDDSITPIFKIPVLRDRQELDLEGPALDQICTADAVRALLPMVGDTGIEPVTSSVSKKRSAHPGPDLGRCSILGLVFVQLSAVVSQVRAVGCSCERGLAPHLLHAIGIVLPTESAGQGCASRPVRTFHPIWLLSVLCVSSIG

SEQ ID NO: 4842 - protein, 503 aa, unidentified
  source 1..503: note = uncultivated organism
MFDAIYTRQSVDKMDSISIESQLEYCKYETRGNPYKSYSDKGYSGKNTNRPAFEEMLEDIKQGKISRVIVYKLDRISRSILDFANMMEVFSEHNVEFVSSTERFDTSTPIGRAMLNICIVFAQLERETIQKRVADAYYSRSKRGFYMGGRIPYGFKKTKTEIDGISTSMYVPVPEEAEQIKMMYLMYANEANSLGDIITYFNNNGIKHLRGGKWSAGRISDMLRNPIYVMADADIYDFFKSQGADVINPVSDYTGYNACYLYRGTVSKTRKQLDLTDKEIVLAPHRGIVSSKDWIKCRIRCLNNRQSAKTCKATTSWLVGKVKCGKCGYGLTIVKANTKWHRYFVCATALSTKKANCKGTGGTIYADVLEEYMLNAIRNKLSEFRTLSKKKEKEVTPKINQNKIRMSEIEKEVNDLLSKVVGANAVLMQYINERVENLDVARKKLQEENISLTCNQDKQSFNTISSHVQEWDNISFEDKQSVVNALIKIIKIADGKIEILWNI

SEQ ID NO: 4843 - protein, 595 aa, unidentified
  source 1..595: note = uncultivated organism
MVKNAGIYCRVSTEDQAREGYSLPEQQDKLKELCKFRDYNVYKIYEDAGLSGKDMDHRPSFQEMLEDVRNGRINVIVAYKLDRITRSVRDLEILITELEKYDCSLECALDDINTSTANGRFFVRMLTVLSQLEIERVSERTKFGLVGAFKDGHIPGKRLLGYMRKNKKLVVNPVEKDVVERMYDLYSKGYTYSKIANIFNEEKVLNKKWKDTYIQKLISNPIYKGDFISGAKTDNPVLYEDVVEPIVSKKLWEECQEQAKKNTRNYTKRNDYIFFQKILCPNCHRVLACKAPGGKKKRYIYYQCRDCKTYFREDKLVDKMLDMIMVLIDYDINVRKYFAPVLRHKIENTTEVIEEKIIKINHKISKLKEAYVNDIIDLKEYKSDKKMYEEMLNDLNNKLEKEKELDQYNFTFEDIMLQRDLESIRNIVDLSHQNTFKTKWDMMSVRDKKDLIMSYIESIEVSKRNDTIEIKKVNFKSTFLEEYAYLFKNGGINRIIKVECNDTLIEIEECTPMLKKDVLKYIEKLDENYPIYSHEITPEEYNNNEISLKYQSVSSLNTPLKLIPIISRKGIDNVEKYILIEFPVVPLKLVLPSEK

SEQ ID NO: 4844 - protein, 527 aa, unidentified
  source 1..527: note = uncultivated organism
MKAAKNGTQKGAPETKRCAVYTRKSTSQGLEQEFNSLDAQRESCVGYIQRQPGWTLVGERYDDGGFTGANIERPAFQRLLADIEGDKIDVVVVYKVDRLSRSLLDFAKVMERFSKSDASFVSVTQNFSTADAMGRLTLNMLMSFAEFEREMIGERTRDKMAAARRKGKWTGGPVPLGYTVVEKRLVVDELEAVLVREIFALYLEQRSALAVVRLLKERQRSTKRHRAVNGNLREGRSWTKGDVLRVLKNPIYAGYMASGGELHEAEHARLVERETFTRAQAQLAAATRTTAANGRNPEYILRGVLRCSCCGSGFTPASTRRGRTEHRYYRCVKRDKEGKGACPSSPLPAGAIEAYVVERLREATADGKLAAEVADGVKVRVAERRKGLVTERQKLPLEIASLSAEARRIVDTMASLTGTARKLVDERLQQVGVQLARCEAQLAAAERELANLDALEVEVAWVARCLTDFDGVWDVLTPENRRRLLRAVVQRVEVNEPANQVSVFLADLGAEVPAEAASQPAQQEVSP

SEQ ID NO: 4845 - protein, 580 aa, unidentified
  source 1..580: note = uncultivated organism
MHTPIFSIDTPVRSPEAVKRVRVAFYMRVSTAEQNLSGYSPEFQLEQLNEHVKRKEYKGWQTESKWQFFDVGSGGKIEGRPNLRKLIELVKEQKVDLVLVWKIDRLSRNLSDLLELFEVMDSHGVGFASMKEDLDFTGTIGKLIFQIFGALAEFERENIRMRTEEGRKASAKSGNYVGGSVPYGYIDMPNIGGKGRKLQLVTEEAKIVKQIFEWFVYEDRNAKWITNELNKIGAPKGKASRRKKGTHWAENSVRVMLSYEEYRGVYITNRYKLIAKNPRRYEERPKEEWILVRIPAIIDDMLFYMSQEKLKRTAAKPGKGGGIEQYLLRGKLMETSSGRGFVGYLSAKNTKNYRRKQFKAEGKHYPSLSIAAKPLEDFVWKHIETAIFDPEGFLRLHQKNDLRKTREAELSKQLETYEDALTTANQKIERVKSDFYDGKIEEAERGEWLAKYEDQREGAFEGKNNAERELTRLASYSIACDHLREFSSKFEKGIKTFTFDQKRKIMDMLVERVEITEGDPRTANVLLRFDPKEIASRIPGVEPSLLKRKPKREDMKSVFKVGGGRQGIRTPDLRGVSSSL

SEQ ID NO: 4846 - protein, 570 aa, unidentified
  source 1..570: note = uncultivated organism
MGKSNSNKIAIYSRKSKFTGKGESIENQIELCRQYTLVHYSDVKDENILIYEDEGFSGGNMERPQFKRMMLDAKDKKFTAIVCYRLDRISRNIGDFANLIEELNVLEISFVSIKEQFDTSSPMGRAMMYIASVFSQLERETIAERIRDNMQELAKTGRWLGGITPTGYSSEGVEKITLDGKVRKSYKLKPVPDEENLVKLIFDTFMKTNSLTKTETYLIQNNYVTKNGKLFNRFTIKNILENPVYMIADIAAYNYFVEHEIDLFSEKTDFDEKHGIMAYNKTIQKRGKANQQRDFSEWIVAVGKHKGIICGADWILVQQFLDQNKSKSYHKPKSNTALLSGLLFCGNCGSYMRPKLSQRKNGHNEMIYSYLCELKERSRCHNCNMKNPNGNILDKAICEEIKKLSAENSEFIQQLESSQIELLGNRQEYDEQLEHLRKSYQENDKEISALVSSISKAAGTPAESYIIRQIDELHEKSIGIKNRIEELESITKKHVLSDIQFDILRELLTTFKNTFEDMNIEQKRLALRTFVKKILWDGDNVQIFMFGADSKEIDLTTYGNSFEPNGEHSK

SEQ ID NO: 4847 - protein, 501 aa, unidentified
  source 1..501: note = uncultivated organism
MVALYLRRSVEKKDSISLEFQEERCKARLKPGEEYEIFKDNGISGKTIENRPEFQRMMAGVRNGTVSRIIIYKFDRISRSLLDFVTMQSEFQQYNVELISCEENFDTSNPIGRVIVNILMMFAEMERETIEKRITDNYYARGEKGMYLGGYAPFGFNKVETVLKDRKTYTFEENKIESPVLRKMYADYASGKSLGEITRWLNDNKIPTRKKKPWSPTAVSRILKNPVYVKANADVYNYLAGLGAKMKNSIEEYNGKNGCYVYGNTEERKGTKFTDLKTDFVSLGLHEGLIEPSDWLDVQKIFQQKKGHSNLGTGSLTWLQGLVKCKCGYTYYVKRCKTTAKEHKYLYCRGRRNNTCTYPPTKLSVEALETIVEEELLCKLAALKGESQIIRDTPEINAVKITLSETDKKIQNLIKQLAESSQVTAGYINQHIEKLDEQKRELLDSIAKLELKAEKECGAGLDMKDILEGWQDYGIETKKKIAKETIKKIILEDTVVNIIFY

SEQ ID NO: 4848 - protein, 688 aa, unidentified
  source 1..688: note = uncultivated organism
MMRVVLYLRLSDEDRDKLTPIERSESIKNQEKMLRDYALRQNWRIVAIYDDEDWSGADITRPNFNRMIEACRKNEVDIVLVKSQARFARDMEVVEKYVHDKFLEWNIRFVSLMEKIDNTKKETKKMSQIIGLTDEWFLEDTSHNIRETLKIKRQNGEFTGSFAPYGYQKDPENKNHLIPDERVRKYIVRIFQEYSHGVGIGTIARRLTEEQIPSPLEHKLSNGSHLKLPALNTHFFFNKITDPGEYVIRISYTNWSREIIQSLCTLEYLSNFSKFRGEITFRTVKDRKSKVYYSCFPLEKVIFILKNRKTELFSFLETSDICQSLSLGETLPKNATCLIMYTPRVDRLHENNYEFHVHLNENKQHLDFEYIVHSLFPDEKLTENYHIQIRKQFKWSMTTIRKILQDEVYLGHLVQFKTTTVSYKNKKLIYHPKDKQIRVENTHEPIIDEQLWNQVQKRIASHKKVSHDGKVHLLAGKVFCRSCGRPFYKCGKKDGHQLRYLCCKDKVNKWVNCTNRKYISEFTLHEEVLKRFNELLNQYYRVEVQIELYHQNNISESLTKRIEYLTKSMFVLRQELEKKKEYLQVLYEDFKKNYVSQEEYFSFRERYRHSIEKGKAELQQLENELSALEWRQNKEKMDCSYLEKKFTKYCSLSQLNVEVVNDFIEKIEIGEYDSVTGKREIEIIWTLD

SEQ ID NO: 4849 - protein, 563 aa, unidentified
  source 1..563: note = uncultivated organism
MQRLNLEQEYRAAIYLRLSKDDGDFSVTGQKLESDSISNQRLLIKSFLKKHPEIVSAKEFCDDGYTGTNFERPDFQKMMSAISSGELNCIVVKDLSRFGREYIEVGKYIEKIFPRLGIRFIAINDSYDNAQPNSAANEIVLPFKNLINDSYCRDISIKVRSNLDAKRRNGEFVGSRVVYGYLRSPEDKNKLIIDEKVSPIIQDIFRWKTEGLSPAQIADRLNSIGILSPIEYKRSCGSKQRTCFQTKMQAAWSAVAIYRILKNEIYTGTLVQGKTTTPNYKVKKTILKKETEWARTANAHEAIITPAQFDLVQKIMLDDTRSPVGSDGVHPFSGKVFCADCNGAMVRKVSRNGNHEYAYFICGNNKQDKSKCSSHSIREDTVMATVLAVIQAQIAVALDMNEAMSRVQSLSWESRELEKLDAKISFQENIIEKSRHLKASLYEDYHNAIVTREEYEAYKKDFDARISDACTTIMRLRGERNSVMGGLTDQQGWLSQFRQYENITEITRRVVVNLIDRIYVHEDKGIDVLLMHKDQFDAIAEFLDAQREKEATNRVIHLTRGVV

SEQ ID NO: 4850 - protein, 532 aa, unidentified
  source 1..532: note = uncultivated organism
MKRNGNGNGKVRAGQQRVRCAIYTRKSTEEGLEQEFNSLDAQREAAEAYIASQKAEGWVCLPDRYDDGGYTGANMERPALKRLFEDLQAGRIDCVVVYKVDRLSRSLMDFARMMETFEKNQVSFVSVTQQFNTTHSMGRLTLNILLSFAQFEREIISERTRDKIAAARRKGKWAGGMPVLGYDVDPNGSKLVVNPEEAERVRAIFDLYFEKKSLIQTTGELNQRGWTTKGWMTHKGHQRGGQPFDKTILHRLLCNVVYRGKVRYKDEVHKGEHEAIVDEDVFQRVQAMLRSNGRTGGMHVRNKYGALLKGLLYCKPCARPMMHSYTSKGNRRYRYYTCYTAQKQGWQACPSKSVPAEEIERFVVDQIRAVGKDPSVKAMVLEQGRAQAMEEMASLESDARIAERELGRIHGEIAKVATAAATNGHAASRLAELHERLREAEQRQTELRNETKRAKEGLVSKPEVDSALEAFTPLWETLSPLEQARVLHLLVQRVDYDGAMGKISVTFHASGIKTLGQHGKISCGEANECVTV

SEQ ID NO: 4851 - protein, 543 aa, unidentified
  source 1..543: note = uncultivated organism
MSRLKFAIYSRKSKFTGRGESVENQIDACRIHIMNKYRDAKESDIFIYEDEGYSGKNTNRPQFRQMMAEEEREPFDLIVVYRLDRISRNMADFDRLMETLTNKGTSFYSTNEGFDTDTISGKLMMTISAAFAQFERQIIAERVRDNVYKLAKTGRWLGGTPPLGFHAEKVEFVDDSGEERRCCKLTENEEEIEIVRLIYAKYLETHSITKVETFMLNGGYKTRMDANFHVSTLRYILTNPTYCTADKESLKFFRSKDCDIADIDEKCNGERGFIGYKKTFTKNDDRRESANMSDWTIAIGKHRGIIPSKDWIEVQNIIEGNSEKKLGFRQSHNSVALLSGVLRCKCGSYMRPKYYKANKDGEKPFTYMCELKETSKRQQCDCQNVNGRVVDKMVCDALLDYENDSGVFAKYVGEITDMGSKNENISNLIKTQTATIAKKKKTISGLLRMAGDDDNLTAEYVRDEIAQLHKEIGEAENEIKRLERLKKSGETLSEAVNSTEEMLKAFKTGFDKMSVENKRAFIRKCVSKVEWDGENISVFLYDK

SEQ ID NO: 4852 - protein, 521 aa, unidentified
  source 1..521: note = uncultivated organism
MSRKKQQSTAKTIRCAVYTRKSCEEGLELEFNSLDAQRESAEAFIASQQHEGWTCLSDHYDDGGFSGGNMDRPALNRLLADIAAGKVDCVVVYKVDRLSRSLLDFARIMETFDKHGVSFVSVTQQFNTTHSMGRLTLNILLSFAQFEREIIGERIRDKIAAQRRKGKWAGGVPVLGYDVDRSSASPKLVVNAEEAVRARRIFSLYLELGSLLPVVEELGRRGWCNKSWKTKKGLARGGRPFDKCSVYALLTNPIYIGKIRHKTDIFAGEHEPIIDTAVFDKVQATLQSNGRGRGNHLINKYGALLKGLLFCEACGQTMVHTFTGRGSKRYRYYTCGKAIKNGWNSCPTKSLPAGEIEAAVVDQIRCIAHDAELRAEVLRQARSVADDELAELATQQQHLERQLARDHAEISRLAVSPDPSSATTARIADLHVRVSRAEQQLANVRNRTAEIQRQQIDAGDVAAAFADFDNVWNALSSREKSQVVSLLVARIEFDVTDSTISISFHPSAIKALAQGNIEDAA

SEQ ID NO: 4853 - protein, 579 aa, unidentified
  source 1..579: note = uncultivated organism
MANQTSNVTGRGQMRLRCAIYTRKSSEEGLEQNFNSLDAQREACEAFIASQKHEGWTILPEMYDDGGFSGGTIERPAFQRLLVDVGEGKIDVVVVYKVDRLTRSLSDFAKIVEIFDKRNVSFVSVTQQFNTTTSMGRLTLNILLSFAQFEREVTGERIRDKIAASKKKGMWMGGLPSLGYDIKDRRLVINEAEAKTVRYIFRRYTELKSVRLLKAELDARGIVSKGRNASDGTRYGEKPLARGALYLMLQNRIYRGETVHKDKSYPGEHAAIVDEALWSEVRSILTENRADRILGTAEKQVSLLSGILFDARGERMSPTHATKNNTRYRYYVSRPLLAGSTKDSGQRIPASGLEALVICRIHNWLGDRAAMLDIIQSHTSDATIQKRLMVGLEQCLATWAQLKADDVRKLMLSIVTRIQVHADRIDIFLNPISLVRWFGRTDSQAEPIAAIQSDTEGPFMTLTIPARLKRVGKEMKILIEDGSDSASPDTSLVRVLVRAHVIRDRFLADKSATLDEIAKSVDIVPSYVTRLFRLTLLAPDIVSAILAGKHPPELNARKLLDDTRLPLDWNEQRRSLGFP

SEQ ID NO: 4854 - protein, 548 aa, unidentified
  source 1..548: note = uncultivated organism
MAQSKKKNGPRANTTSSHNDGGTKRVAIYRRISTDEANQPHSLAAQETDCRRYIAGRPNWIEVANIADSASGGSIDRPGLLRVMRMAEAGEIDIVIFTKLDRLTRRSRDFYNLIEYFEELNVSIASLEGMIDTTTPAGRMMASLIVAVAQWERETIVERIFRGIRAKVDKGLSLHTRPPFGYDKDPETKRLVINAEEARIAKLIFRFYAAGAGAGQIALKLNNKGLRRRGKAWDKPTVLRVLACETLAGRIDYDGETLPAIHEAVIDTDLFDKVQKLRADRGDYRARALNRPNDYLLSGLLRCGLCGSAYVGKSGTSRSKEIHRYYTCSKQAKRVGDDRCENNTIKAETLEEMIIALVLDTYADLGIFEQAIDAAKKLAPDQMEELELRGKMLADEEVKVQRALSRWTVAFEEGELSPSAFQTRVIKLEARGVELASQRAAVAEEVLMLLDTTPALIDIANHAEMVEHVLRTDGNTGEKKRVLRGLIVRLDIQPGRSVEPTLRVPTISSLGKEAQGGEVRAVRTKNHLVEVMGFEPTTSSLRTTRSAN

SEQ ID NO: 4855 - protein, 581 aa, unidentified
  source 1..581: note = uncultivated organism
MSERSKQIRCAIYTRKSSEEGLEQNFNSLDAQREACSAYIQSQRHEGWREVTTAYDDGGYSGGNLERPALQQLLADIKARKVDLIVVYKIDRLTRSLTDFASLVGVFDAHQTSFVSVTQSFNTTTSMGRLTLNVLLSFAQFEREITGERIRDKIQASKRKGMWMGGTVPLGYNSIDKKLIAVPDEAAQVRRIFALYRESGSVQNLQEKLFKSNEISKVRITRSGKPRGGQSFSRGALYLILQNQVYRGQMPHRDAYYPGEHEAIIERGLWDDVQALLESNREARHLGQRVRTASLLAGLVFDDTGRRLTPSHTRKVGKRYRYYISRVASPSSSQLPQLPISVPAHDLERLVLEQVESLLKSSDLDRQLLNSEDRNAHEAASVLRAGERLGEQWKDLKPVEQRQWLVSIIQRIEVGSDSVTLGIRREHFRHSLLTHSPTKRKKGDERSVREDAVLRLTIPARLRRCGNEIRIIHNNTLHSTRISPHHATLLNAIARARGWYGQIESGGTGSMAAIARHEGLAARYVSRLLRCAFLAPDIIESLLAGSAPPEMTLAKVLEGVPLDRAEQRQRFGFSSIKNVAH

SEQ ID NO: 4856 - protein, 521 aa, unidentified
  source 1..521: note = uncultivated organism
MIIGIYARKSIFSDKSDSIGSQIKICTEYAHNNYNSKEIIEYEDEGYTGANTHRPGFTQLMKDILNKKIDIIICYKIDRISRNVLDFSTTFNTLQEHSVQFVSVKEQIDTSTPLGRAMMYICSVFAQMERETTAERVKDSMIELAKSGKWAGGKAPVGYKRERVLLNGKKHTMLVKNDTEIPFLNMLYDTFLEGYSLNGLETHFKNKNITSLKGNYLYSTQLYSILKNPHYVEATEDIYNYFESLGCIMATDKSKFDGQHGIIVYGRTKGGKKKIHTLNTSDNWIVSVGLHKPLISADKWLTVQRCFGKNIMDKTRKHEIGILKGIVKCRCGCTMKVQHKVDKTYNKIYDYYFCQNRNRRGTNFCDIKMVSVDVLDNKLVEFLQRMSIDKSLLEKYIKNTKPIVNYKDTNTIKKDILIVKKKIENLTITLQDNIKSSATKYLIIEIEKLDKQLVNLNFELREIEQQEREHNKKVDDINIIYLKICDYVKAFEKLSYLDKVKYLQEIITDCIWNGEKLLITI

SEQ ID NO: 4857 - protein, 608 aa, unidentified
  source 1..608: note = uncultivated organism
MRRKTRVGIDLRDVAIYTRKSKLTHMGDSTGVQMKQSADFARSQLNLPEDYNFLEYEDKGLSGYYADRPDFQRMLHDIEAGKIRAVVCYKLDRISRKTSDLLRLIDFFNKHDVALLVCSNNINTLISTSKIMISFLAIIAEFERDIIAERIADNLIELAKDGRWMGGCTPTGFKANRITIGSGKNKTSITHLESIMDEKKMVQQIFKVFRQCRSINKTATIIGKDYKTKFGKEHTSLSIKDILLNPIYCIADEISYDYFYQREGKICVDMEVFDGIHGIMAYNKTDQEKLEDEESTFIEPKFVQVCTDKPIPEWIIAVGKHEGFIASKEWIETQELLEAIADKYNRPHRATNALLGGLVYCPICGNRLNVFPESNRWTNGKPRFKYGCPKRRGKEKCGFKSIDGNRLDDFVMEQLGKIAEQDSEYYTRILDNKMQALIKNDSNERDLSEAKKRKEKIQSSIAAQVKNLREADEAIRRYIQDDITALSEELSQAENLIARLEQVHQGQQDMMKGLSEVKKTLLNFNSLVANMEYEDKLTLLTTLIDRIVVAPNSDEEICHIFIKGCSKENYDDFFRESEGEMCDLDRDSKYYSQHEWNPAPSDLRQDHE

SEQ ID NO: 4858 - protein, 512 aa, unidentified
  source 1..512: note = uncultivated organism
MAQVQIIQPYQPQSEELEKVAAYCRVSTDSKDQLNSYRTQIGYYTNFIAQHPGWELVDIYADEGITGTSLEKRDEFKRMLQDCRAGKIQRILVKSVSRFARNTLELIETTRELKDLGVVVVFEEQGIDTAQMLGEMQLTLLAMAAQEESTSISKNMRWSIQKRMESGAYKGSSAPFGYRLENGELILVPEEAKIVREIFALYLSGIGQYEITHLLNEKNIPFHDGKKWSCSAVKYILSNENYTGKLLLQKQYTTDALPYSRKRNHGERDQYYVHNNHVAIISQEQFDRVKLLKRQRQSEYVAQKQEHMKFTIICPDCGNRFRYVNIRGKAYWICPNRGNRLTPCRKVRYSEAWLKTAFLNMIGKVYTHQNGLLDFSANLLEEIATRQEQGNAKLYELNTALADLNEKAHTLQRLHNKGFIEDADFREQSDALASQRKKLSDQRTQAIHGSKALETLDKLRELQDTLAALPEIPWEFDIDLFDQLVEKIVPISKTELLFKLKCGLELKEAIPQ

SEQ ID NO: 4859 - protein, 516 aa, unidentified
  source 1..516: note = uncultivated organism
MAYCMYLRKSRQDLEAEAHGEGETLLRHEKMLLEMCARMQLDLAPEGVFREIVSGDTIAARPEIQRMLQNIQDGKYEGCVCTEISRLARGDSIDQGIVMQTFKYARAKIIVYPGQVYNPENDFDETALEMSLFLSRQEYKVMRRRMQAGRAASVREGHYVGGKRPFGYQVVKIKGNKGYTLQQIPDEARIVRQAFDWYLSGQAGASEIANRLNALGSRTYNGNIWDSGSVRHMLFSPVYAGFVQWYQREQRPAIIDGRKIKTRPVSERYIRAKGLHEPIVTEAEFSRVAEIADQNLTRPRGTSNAIQSPLAGLIKCALCGKAMIRRPHSRRVTFCACRTPGCPCSSAPYSAVVDLVLDALRGWVLAFGDSPAPAPAAPAPASDAAAIAQSTLDSARRQLAVAQSMLEREVYSIDEYLSRKHVIMQKISSAEAELQRLRASASPLTTEDAIRAILPRVRAVLDAWPHASTPQEQNALLRSVLFRIDYAKTHACKRNESATEHITLSLYPLVTPPSKQ

SEQ ID NO: 4860 - protein, 546 aa, unidentified
  source 1..546: note = uncultivated organism
MIEEKGKKLRCAIYTRKSSEEGLELEFNSLQAQREACEAYIKSQKHENWQLLPTEYNDGGYSGGNINRPALKQLLSDIEADKVDIIVVYKIDRLTRSLMDFSKIVEILDKHNASFVSITQHFNTTTSMGRLTLNMLLSFAQFEREVTGERIRDKITASKKKGMWMGGKPPLGYIRKEKKIYPDEENAYKIKIIFEKYIELRSTIKLKEYLLDNRISSQNNKALSIGNLDRILKNKAYIGLVGHKGVWYKGEHKGIISEELFNKAQEIMESNRNIHNKYEVQKSLLSGKIFDDNGNYMSPSWSTGSNGKKYRYYISQAVIRHEPKRIGKISKVSLKEIEKLTDKALADYIHNKQKIYEYIKDYAINKQEDILNKLEKYVLTRDIERLIIKRVEIRENEIRISLYSEQVKEVLNAIYENRQEKVLKAEELKNEDSFIIPYKIGIIDNGKKIIIGDIEKEERYRDKQLIKLIIKAYEWHNDILNGKTIKEISQKESVSVRYILRVLQISFINPKIIKQIIDGKQTRNLTRSKLESLTKLGIEEQEKAII

SEQ ID NO: 4861 - protein, 573 aa, unidentified
  source 1..573: note = uncultivated organism
MTAKTPVRCAIYTRKSTEEGLELSFNSLHAQREACEAYVKSQAGEGWVVLKQAYDDGGFSGGSMTRPALERLMSDVDQGLIDIIVVYKIDRLTRSLADFAKIVERLEARGASFVSVTQAFNTTTSMGRLTLNVLLSFAQFEREVAGERIRDKVAASRAKGLWMGGSVPTGYDLKDKKLYPSPVEAEAVRFIFKRYLELRSVRDLMNDLRARNIVSKERVSPSGKVTGGTPFGRGALACLLRNRVYVGEAVHKGTAHPGQHEAIVPSDLFADVQALMAQQTRTKQGMSKTALESPLTGLIFDDRGNRMSPGHSQKNGRTRYRYYVSAALHEGRRDRAGSIPRVPAQPIEDLVASRLHGLGVIPDGSLSQFVASVSGEPSSGTRLGDVMRRVEIGASTIRIDLSRDELQGIHARGSASLSDDELRERLRSHAVSVDQAASVDQFEVAGDAVVITIPIKAQFRGGSAEVASAVRTPFKQRSPRVDRAIAKAVVRAHTWLASLLAGDVSSVDELAAREGQDRRYVRRILRLAFLPPDLTEAFLEGTQSPHLTVSELIEADLPLDWAEQRRLLGAPSP

SEQ ID NO: 4862 - protein, 523 aa, unidentified
  source 1..523: note = uncultivated organism
MPKVGIYCRLSIEDRDKSSGNASQSIQNQKFMLRDYCRERDWEIYDIYADDGYSGIDRSRPEFNRLLHDCEKGNIDIVLCKDQSRFSRDTVVIEQYINDKFLEWGIRFIGVADNADSDSEMYGTMRLFTSAYNEMYVKDISSKIRRTLAYKRAQGQFIGSFAPYGYQIDPENKHHLVIDEETAPVVRQIFEMYVSGEGYRKIVQELNDQGTISPSEYKRQKGSKYVNANADSGNSKGLWTQSTVAAILRNEMYTGTLVQGKSHHISYKNKKRKKVEQADWVRIPDAHEAIIDMETWSRTQERLNSHTRVGKRSQELSPLSGKVRCAVCGRPMKRNVYYNKAKTIKYYGLQCATYKTGTMDCTNTKSISGKVLEQKILDELNRIIENYCQADNITIVDIKSEQMQNMERQIFFLNSQLSTAKNRLTKMYKDRLDDIISDADYLMFRETLSSEEHEISCRIAETEKQIKEYRIRCENTENQKALIEKYTHFSALDRSIVEEFIDFIEVDMIQENNEREINIHWKI

SEQ ID NO: 4863 - protein, 570 aa, unidentified
  source 1..570: note = uncultivated organism
MARKSRWSPKSGTDISIVSPTLSANCPEYSVAIYARLSVRDSGRDKNDTIENQLGLLKHYVMQRPDLTLRDLYIDNGWTGTNFARPDFQRLLRDIYAGKINCVIVKDLSRLGRNHLETAYYLQEVFAKQHIRFIAVNDGYDSLTSPPDSIEIMAKNIINSYYSKDISRKVSASVDLKRSQGVYSWGKAPYGYIRTADSPDRLQIDPETAAYVRLIFHWGMEGVPQAQIAARLTEMQAPTYLQLSCRRRKKETQPSPGPWSSSTVKQILLNQTYAGDFVYQNSYFRKYDAAHGRKIPKEEWLVIPDAHPAYIDREDFFTLKEQILAVRQDRAQQLKDLQPIREQYPALFKGIIYCGVCGRRMSFRRCTTGSVYTAYKCQGHENRNHKKHRSITINAVVLDEIVLTQINMQIQCAIDAKKLLAKFSAQDSDVRFKEKQQQRISALRRSLVEIKVSRTRAFEALACGEIDEDEYRQRMDVLGGEQLKLTKDLSTAEAMCEMVDTHLSSKNQWLRTFAETGVVDELTTELISCMIQRIDVLEDKRVHITFNYADCMRAFMTGLEAICDDDTGVS

SEQ ID NO: 4864 - protein, 536 aa, unidentified
  source 1..536: note = uncultivated organism
MKTSQNMTDGTLAKKLQPKAPQVIVIDPTIQVKSGKLRTAAYARVSSDSDDQLNSFTAQVDYYTTLIEENEDWELVDIYADEGITGLRMDKRDDFQRLLRDCRRGKIDRILTKSISRFSRNTRECLQTIRELKSIGVTIYFEKENIDTGKISNEMLLTFFSGSAQQESVAISDSMRWSYQKRMKKGEFITCKAPFGYRLTEGTLQICEQEAEIVRYVFRSYLNGKSKEELADELTAQGIPTRDGKDRWQYGTIDYMLKNERYMGDALIQKRYTTDTVPFRKKHNKGERDKYYLKYSHHPIVSPHIYERVQELNRSRSIPAMLQRSAYPLSKKIRCGECGSLFKRKVCGGKTYWVCRNHNRGKDNCPVVQIPESEIYEASLRLYHKLKQNYERILSPMLNQLRELKRHRNLSNLQVAELNRQIAELTERNHVLNGLKSKGIIDSALFISQTGELNRKIRTLKAEKNKLMENDEDDSVITETKSLMEILEDGPEQLAAFDESLFDSILEIITAESGERLKFKLANGLELTEPIERMVR

SEQ ID NO: 4865 - protein, 529 aa, unidentified
  source 1..529: note = uncultivated organism
MGNDKEIKQSIRCAIYTRKSTNEGLDQEFSSLDAQRESGENYIRSQQSQGWVTLPDKYDDGGFTGATIDRPALQKLLEDIKAKKVDCVVVYKVDRLSRSLLDFVKLLQFFEEQQIAFVSVTQHFNTNTSMGRLTLNILLSFAQFEREMISERTKDKMAAARMKGRWIGGRAGLGYDIDSECKKLVINPKGAELVQMIFKLYIEKKSLLEVARIMNERGHRTKAHKDKHKVFGGVEFKNTNIQWVLNNVVYAGKVKYDGKIYPGLHEAIVSEETFNQAKAILKQNGRVRGTSKNRKFPGLLSGLFRCTPCGTSMTHSYARKGNYKYRYYICLNAIKLNRKACPTKTISATAIEEKCLELLTRITKDKRFEDSNWKTLPFEKQMAVINELVREIDYDGAKGKLRIYLKGDVRKYEYDLPLTELKNKVPASGLPDFKSEPIIRQQLFLAHQIHGMLADGRAKDLKQIAGWTGMNLYRLYQIVNLLYLCPSVQENILTAENASLAKITERNTRHISNELDWRKQASLWQQSVA

SEQ ID NO: 4866 - protein, 575 aa, unidentified
  source 1..575: note = uncultivated organism
MKKKVQIGRSRMAEEMARPTWSAPAGKEPRTEKKPERPSQKVETISSAPASKRKLRAAAYARVSTDLDSQETSIENQCDHYKSLIEANPAWELAGIYAESGVSGTKADTRPELQRLMQDCEAGAVDVIVTKSTRRFARNPSECLSMVRELTSLGIRLIFEKENIDTETMESEFLLTLLAAFAESESASISTNQKWAIRKRFQAGTYKGGKVPYGYRRTKKGYIIHPAEAATVRRIFYALAGGKGTLVIARELNEERIPTWTESYKGLEAQGKWRSNSIIAIARNEFYTGDSLYQKTFMENYKKCVNTGQLDQYLNEADHPAIIDHATFEQANAMIRSHGERLGREKAVKDTKRYVFSGRLICGFCGGHMRRGKDARAFYACGNHLHKRTVMVEGTEAPCPMLPVFEQDVKNAFATVLNRLAADPSILGVSDDGEAERERLEAQLQSVKRRQSVLHDRALADRYTAQLREKKAALDSKEKTILDALAKLEKKNPADDLKRAVVKRGVRESFTESDEKLFTSFVDHAVLWSKEKAQFHFTCGLVAEEDMRIEKVGRSYTEVPVRTEFDEQKGAFTWQ

SEQ ID NO: 4867 - protein, 525 aa, unidentified
  source 1..525: note = uncultivated organism
MYTTQISNPMDYKVALYIRLSKEDGDKKESESVTNQRAILEEFAKDQRLDVKGIYVDDGFTGANFDRPDFERLTNDIEGGKINMVVVKDLSRFGRNRVRQEYFVCQYSEKYGVRFIAVNDDFDTDDENNELVFMMKNWSNEQFIRDTSKKIKTTKRYKQRQGQFIGGKASYGYKISPDEKNKIIIDNEVADVVKRIFALALDGKSCREIAVILNDEKIPTPSQYAKINVTVNGPYSGKWSSERVTFMLRNEVYIGNMVQGRVQKPSYKTKKCKKLPPDEWTVVEGTHEPIIDTETFYKVQQLIDSRKHTRSRTYEYPLKGLIHCHECGYPLAVLNPKNAKGEDRLYFVCRTYQRFTKEKKCTTHCIGEELVTNAVIGKIREICNKFVNSDELHVACETAIENVEQKYTLEQKIAEYETKTTVLTANLDRMYDDKLSGVLDESDYVRRSEHIRAERQGLQEKIRNLKIQPIDPIPIKQQAHELAKCFFRSPEHNRELLVSLIERIELTENREILIYFKFKPLHDLA

SEQ ID NO: 4868 - protein, 521 aa, unidentified
  source 1..521: note = uncultivated organism
MAAKKNVQIIHATAPLPDIVRVAPYVRVSSLSDDQLHSFHLQYSHYHSLVTNTKGWALVDVYADEGLTGTRADKREDFRRLMRDCRAGKIDRVIVKSVSRFARNVEDCLDNIRQLKALGVSVYFEEEDIDTVHMTDEMILSIRSIQAQQESMVNSRNANWSYQERMRQGKFITYHAPIGYVRVDGKLVVDEKTAPVVRRIFDEYLSGKGIETIASSLNQEGIPATEGGLWNSIVIRYILKNEKYIGDALLQKKYTTDTLPFTKKVNYGEKTQYYVEGSHEPIISKAKFYKVQELFQWRNNNKAENNEHIHYPLSGKLKCAECGSTFRRKKSLNERIAWECKKHNLNSDNCPVLNVKENTVYIAFIALYNRLRKRKGEFLHPMLKYIEQAYTMGEDIPQEAALLNGRIAEAAKKLARLNGLAEKGVLSEALLAKNRAPLERELHELRQEKKRLRERDDPEEVKELRSLIRIIEAGPEIMTEFNPILFNNIVRSISVAKEDFLAFHLMGGLILKETIQRRTGR

SEQ ID NO: 4869 - protein, 535 aa, unidentified
  source 1..535: note = uncultivated organism
MMVAFYARVSTDEQAERGNIESQVDFAKKYFDLYGEANGITGCEYYLDDGVSGVLPLKDRPAALRMLADAKAGKYAAVFVYRLDRLARSVKHVLDTYEFLEEEKIALKSMTEAFDTGTPTGKFFMTLLASIAALERDTILERTQMGKERAAKENRWTSGQPPFGYRVGPDKRLVIHEPETEIVVLIFNLYLEGMRTVPIAEYLNARGIPTPTMSKGTRNNSTGKWHAGHISIILRNRTYIGEYSTMQRSKKQKEGRIIQVPPIIDKEIYEKANQLLIENADIGRGARGREYLLRGLIYCGNCGRAFVGSSGNSKEGRVYYRCTGTVNYGQGKTCDAKMIRATDIENAVWTDIQHFLNNPGKVVEAINNSLKIEAEQLEPVQNEIDEIEKSLLEKQVARQKIVSFVSKRIITDTEAENELLTLAGQIETLNRRKDQLLLRLEQSQELSNRAVNVSLILDKLNNAARGDYAEDKAELIKAIVSRVTVNTEYEGKRKESRVLIEYYFDLSRCMILGVSGDAQMRRKVSLESSFIIPGR

SEQ ID NO: 4870 - protein, 547 aa, unidentified
  source 1..547: note = uncultivated organism
MSEPAAQVWNTCGYVRLSREDGDKEESNSVTGQRELIRDYFRCHPELRECGMKVDDGYTGSNFDRPAFQKMMAEVKAGKINCIVVKDLSRFGREHLDAGEYIEKIFPFLGVRFIAINDHYDSLHSNVESDELMIPFKNLVNEAYCRDTSVKIRSQLEIKRRRGDFIGSFAVFGYRKDPADRHRLLVDDYAADVVRDIFQWKLEGVSAEDIADRLNASGILTPMDYKKSQGLRVYTPFRTKAESAWSAGMILRILKNPTYIGVLEQGRVTTPSYKVKKLVHKPREEWAVVPDHHEAIIDHFDFETVQLVLAQDTRTSVGGKAVELFSGMVFCGECGAPMIRKTVPSGRKKYVYYVCAAHKNEKTCTSHSIRDSALEKLVLDVVKQFIQDVIDLSNLIETTGMLQLQKANIRKLQGRLDRKREDIERCQVLLRSLYESLTDGIIDREEYQKLKKTYTHRRAEAEAQAEALQQEMNLELDASTDLSWMEQFCKHQGITCLDRCIVVSFIERILISRERRVEVIFRWHDEYKYLFDLALQAKELHPGREVV

SEQ ID NO: 4871 - protein, 562 aa, unidentified
  source 1..562: note = uncultivated organism
MENDNRKYAVYSRKSKYTGKGESIGNQIELCKNYLITRYNANADDIIVYEDEGYTGANTKRPEFQKMIKDIRNKKIKTVICYRLDRISRNVLDFCNLKDELSDYNVAFISIREDFDTSTPMGSAMLLITSVFAQLERDTIAERIRDNMLELAKTGRWLGGNTPLGFKSEEVEKLTLDGKKRKLFKLSPVINEENTVKLIFEKFLELKSLTQLETYFIQHDIKTRNEIYFSRSTLKSILTNPVYAMADKDTLNYFTDKEAEIFQEENFNGKHGLMVYNKTIQKTGKSTKQRSVTDWIVAVGKHKGFISGNTWVQTQNLLDMNAERRYRKPGINTSLLSGVIYCNNCGSFMRPKLNSKIHEDGTRSFSYMCELKEKSRCKKCNSKNIMGIEFDKQMLEIVKTITSANGETYKKIKTMANGEFQSANINEDEMQTLQNTKKQNEKTIAKLIQKIALVDGDIVEELTEEIKRLKSANLEIEKSLSKLTDTKNNNQQQIEYAKLVLDIFDTYFQSFDKLDLVTKRSLIRLIIDTVEVDGENIYINLAGSDKNNPNQKILSLPELHSK

SEQ ID NO: 4872 - protein, 538 aa, unidentified
  source 1..538: note = uncultivated organism
MSGTRFFIYSRKSVYTGKGESIENQIAMCRQYIQSKFPEAGHSDITVYEDEGFSAKNTERPQFQQMLRDIQHKKPDFVVCYRLDRISRSVSDFSSLIEELNDRRISFACVKEEFDTSKPMGKAMMYIASVFAQLERETIAERVRDNMLLLARTGRWLGGTTPTGYTSEKQQEILLDGRRKTSCKLKDNPEELQTVNTMFEKFLELRSITGVSKFLIKQGITARGGGWYSLPGIKEILQNPVYCVADKDAWEYFTAQNADVCFEEKDCSDQYGLLAYNKRDYSKKHAPRQPIGKWIIAIGRHKGRIPGRKWAAVQRLLADNIPTGKKPAKMHNGYSLLSGLIFCKECGSRLFAKPRSGQGAGLFDYVCGSKLKGGTGLCGCQNIGGRQADDLVYRSLLPYLEESPRIDALLKEQKRTLRGQAHEGEQNSAEARIRRCSSEMGHLVEALSQGALDPALIPRINARVRELEEEIARLSKERRPLPAAGQEEAMAAKLADSLADIKSCAAALSVQEKRTLIRLLVQKIVWNGKELHLYMNGR

SEQ ID NO: 4873 - protein, 548 aa, unidentified
  source 1..548: note = uncultivated organism
MIKVASYCRVSTDKEDQASSFAAQQRYFTEYIARQADWELYAVYADEGITGTSTRKRTQFNRMINDARMGKFHLIITKEVSRFSRNILDTIAYTRELRSLGVGVLFMNDGISTLEPDAELRLSIMGSIAQEESRKTSSRVKWGQTRQMERGVVFGRSMLGYDVKDGKMSVNPEGAEVVKLIFHLYGVEKKGTSVIAHELRNRGIRTFSGNTNWSGSHLVKILRNEKYTGDLLQKKTYTPDYLTHAKKYNHGAEPAVEIKNHHEPIIDRDLWNIVQAELKRRNPRGEQSSGHSNRYIFSGKIKCGECGASFVSRKKKRKDGSVCKRWGCYHAAVDGRRHTDAQGNAVGCDIGKMLRDELAMDILKKTIAALELDRERIADSLTALAAESIQAVEQGSADTAVNLEQEMAQLIKKKEAVLDAFFSRSITEEEMRIIKDRYDGQLSALNTRLENVRAERVSSHDPELLAEQVHRLVNSILSGERGSESFYQSILKQMVVYRDATVTVRLNSLPMKWVFELVARPRNGWTDVPECKGDASVPISVSSAFSSG

SEQ ID NO: 4874 - protein, 569 aa, unidentified
  source 1..569: note = uncultivated organism
MKTIAIYTRKSKATNKGESIENQINLCKNYISKIFFEDEVKIEIYNEGEGFSGGDSTRKKFNELIQDAKKGKYDVLICYRLDRVARSVADFSDLIEELNRNNISFISVKEQFDTTTPMGRAMMYIASVFAQLEREIGAERIRDNMRELAKTGRWLGGTTPTGYESVGFELMNVKEYNENNEVVTKVKKAFMLKKIDEEIYIVKTLFQKFLNLKSLTALETYALNNNIKTKNNIYFSRFALKTILTNPVYAKNDFDMYNYFKENNVDVFSNKEDFDGLHGIMAYNKTLQVKHKAIRKKDIHQWIVACGKHKGIIDGRDWIYVQNILNINKQKSYRKPKKNTAILTGMIFCKECGSPMRPRIQTGRLYKDGTEKYVYSCTLKEKSRRKKCTGKNINGNEIDALLLEKIKKIIVPNQKICDELKKIANTKADIVDENDEFISLKSKYDKNQKDLENLIQKIRYVDIDLIDDINKEVKKIKKKNEEISIKLNKYNEEKQINKLEVDVAQIVLEIIENHFNKFNKLDTMEQKALLRLIINKVSGNGDTVEVNLLTDNSSAFFNSILLPSGENSK

SEQ ID NO: 4875 - protein, 766 aa, unidentified
  source 1..766: note = uncultivated organism
MGQTERVALYARVSTEMQAEEGFSIEAQLNEMRAYAAQRGWKVVAEFVDAGISGSTMERPGLRALLEAAQAHQFDVVLVHELSRLSRSVFDTFEIFEQLGQAQVGFASVREPQFNLLDPHGRFFLTMIASINQYYLDMLRLHTQKSKRERARQGLYNASVAPYGYRHVGDARTPPEVVEEEAKVVRRVFEMYATGRYTCRQIAEVLNGEGYRTRSGRRFSKDSITEMLRNPFYIGKVTYREGRRGEVEVYDGLHEPIVSEALWEAAARVRNQQTVRRVLRGEKRPYLLGGIARCHTCGRRLRAQGAQAGDYYRDTTVLTGYDDCPYGQSGVRAEVVHEQVGRILRGLRLPEEWREEMAALVGEDEEAGTLRSRRERLIAERRRLKRAYLAGDFDEDEDIYREHLERIREELARLPTEDDLKRIGEAARVLETVGEVWDEAEEADRRDLVQLILREVEVDVGQGRLVALKPHAPFIPLFRTMAGVEEREFGVFVPVWPVEEGGVVGHRLEAVREVGEEAVALPFVVKWPWEMEAEARVSPTVSALLKERRGGGKEGGRVVVVPRAGVPEVRVDGRKWPEVRVEEMGLEEALGQKEGTVAVLVTPLALQEGADRGEIVRRAWEVLEEWGYWLLVDILPASMAGHWVFRVFPGAWKRVEKEYWSGQQVYRRLREVGFAVEMEEWTFWEGVSVGAALEVVRRRPGILGRLSEEEIGVGVERLERMKEERGEGEMLSSEVTLMAVVGRKGGRAAQKFRLRRLVLDKIRGVM

SEQ ID NO: 4876 - protein, 592 aa, unidentified
  source 1..592: note = uncultivated organism
MILVASYCRVSTDKDDQANSFEAQRRYFKDYITRQPDWELYKVYADEGITGTSTKKRVQFNQMIHDARKGKFKLIITKEVSRFSRNILDTIAFTRELKALGVGVLFMTDGINTMDPDAELRLSIMGSIAQEESRKTSARVKWGQTRQMEKGVVFGKSLLGYDVKDGKLYLEPVGAEIVKLIFYKYGIEKKGTSIIARELREAGYLTFRGHSNWSNTHIIKILKNEKYVGDLCQKKTVTLDYLTHEKKINRGEEEMVYIKNHHEPIISRELWDLVQIEIERRNRHGDPAIGHSNRYLFSGKIKCGVCGATFVSRTKKRKSGSSYKRWGCFNATIDGLRHTDDKGNEVGCNVGCLLRDELAHDLLQYSIRLIQAKPMWFAKRVIEQAKSYMESSEVTFTETQEEVEQEIKKLEEKKREVLDAFFSKDISKDDFRLMNASYDEKIKSLQEKLEALRSLNTLEYDIRDLEDDIEAHLKMIAKQDPDDELFCKNLLDKIVVHPDKKIEMKLNLLPPSWAYVLARLEELKLLKEKHSGGCHNDSSVSVLFDNNSQILPAEKPLQRNDFSGGCQNVADVPMSVSRPFSSSKGMEYRWDR

SEQ ID NO: 4877 - protein, 540 aa, unidentified
  source 1..540: note = uncultivated organism
MARSATNRRITKAATTVLGDDVRVGIYVRRSTDEEHQPYSIDAQDTRLKAYIQSQPGWRLTARFTDDASGSSTARPGLAKAMAAARAGIIDVLLVYRVDRFSRNLRDMVTLLDELDQAQVVFRSATEPFDTSTPMGRMLVQMLGMFAQFERDTIIDRVIAGMERKAATGKWKGGRRPFGYQVDKTTHTLVPDPHEAVTVRMIFDLYTKDRLGSHAVARILNQRGHRTTTGSRWSAHQVLRALCNRVYLGELTFRDNTVTNTHTPIINTETWAQAAAILAERGESHAHRAASNSDYILTGKLRCPQCGKAMIGTRATGRNKTYRYYTCFNLARYDSSVCDFTRLNADDVDTAILDAFATFYRTQHNLIHDAITAAQAQHRAAHADRHAELAAIDTKLAATGQAIDRYLAAFERGTMDEDLISQRLKQHRATTKQLRNRHDELTLALDDEPATPATATLHTVADHITKIITSGNHNQTKALVATVTITAPDRLTPVFRIPQPNDNEAAPAQPAETTPKTAVRTMTNLVELRGLEPLTLTLPV

SEQ ID NO: 4878 - protein, 526 aa, unidentified
  source 1..526: note = uncultivated organism
MIAMPNVGIYCRLSIEDRDKSLNDPSASIQNQMAMLRDFCHEREWDIFDFYVDDGYSGVDPNRPDFRRLIKDCEDGNIDIVLCKDQSRFSRDTIIIEQYINDRFLEWGIRFIGVADNADTESETYSTMRLFTSAYNEMYVKDISAKIRRTLAYKRENGQFIGSFAPYGYLIDPTDKHHLIVDPQTAPVIKMIFDMYINGEGYRSIVMKLNSDGVVSPTEYKHRSGSKYVNCNAETSYSHGLWTQSTVSRILSNEVYTGTLVQGKSHSISYKNKKRKKVDPSDWIRTPNAHTAIIDNDTWIRSQERLNSHARVGKRSDELSPLSGKVRCAVCGRPMKRNVYYNKARTIRYYNLQCASYKTGAMNCQNTKSISGITLENAVLTELNSIIHLYCQFDKIRFNDMYALKVRQLESELAMLSERRVTAQNRLLSMYKDKLDGTISDEDFALFRQSLSDEEKVISAKADDVSRQISEYKKCICNAGIQQSVLDSFSHFDSLDRSVSDEFIDFIEVGECSEKCVREVHIHWKL

SEQ ID NO: 4879 - protein, 564 aa, unidentified
  source 1..564: note = uncultivated organism
MTEIKKLRCAIYTRKSTEEGLDQDYNSLDAQRDAAEAYIKSQQHEGWQLVPAHYDDGGFSGGSLERPGLKQLLDDIKANKIDIIVVYKVDRLTRSLHDFAKLVEVFDTHDISFVSVTQSFNTTNSMGRLTLNMLLSFAQFEREVTSERIRDKFASSLKKGIWMGGPLPLGYDLDHRKLIINETEAEQVRFVFENYMTASSTNELLRLMKKMNIKTKSWVTQKGKVTQANHYNKSSLYVMLKNATYNGKMRHKDKIYDGEHEAIIDDGLWGRVQNKLSSRNAKKQPRGSYGAKPFILRHKLFDDAGQKLTTSYSIKKRGEEKLHIRYYNNHHANVFGYKDKVKYLNADDIEAVIDTVVREAFRSNEELYQAWFNIAEGQKADLLINAVKKVEMSLDELKITLNTNSVNHIEDLHRTRKINFSSVELNPYPTKDMIEFKTQGDVMVCTFPYRHQKYKGRKIITDENGHQINIPKTDKNTGLITAIITAAQCHKNLSNGTCKTIVDLAKLFGRDRSYISKIMKLHYLSPKIKGSILDGLQPRTATIQNLLEIVDQYDWRKQESSFGM

SEQ ID NO: 4880 - protein, 550 aa, unidentified
  source 1..550: note = uncultivated organism
MTSKIIRCAIYTRKSSEEGLEQDFNSLHAQREASEAYIKSQKHEGWQLVKTAYDDGGYSGGTMNRPALQLLMLDIEAGKIDVIVVYKVDRLSRSLHDFAKMVEVFDKRGVSFVSVTQQFNTTSSMGRLTLNVLLSFAQFEREVTGERIRDKIAASKKKGMWMGGYAPLGYDIVEKKLVINSAEAETIHHIFTRYLELGSVRQLYDDLRANGIYSKLRDSDSRPGGMAFSRGALYHMLANPLYVGQVRYKDTCHAGQHEGIIDHQLWDQVQQKLANNRAGIVDRSRKTEAGSLSGKLFYATTGEALVIVHANKKGRRYRYYISQSLKTGSKSDAPNGWRLPGKAIETTIYGIAQAMLNDRDTMVDALQAANIPSHHIPALLAKAHEAAQYQHHVFDRFMRRIELRHDGMQVQLSLASLVSEEDGGEDISITRDTPMQIKRRGHEMRLVIEGGMVAAATIDSTLVNAIARAHTWSEALLSGSVATMAEIASRHNVSDSYVKKIMPLAFLAPDIVEAITVGKQPVHLTTQMLIRQIDIPLDWQEQRRALGFSA

SEQ ID NO: 4881 - protein, 549 aa, unidentified
  source 1..549: note = uncultivated organism
MSKLIRCAVYTRKSTEEGLEQDFNSLQAQREACEAYIKSQKHEGWQLIKTHYDDGGFSGGSMDRPALQQLMRDIEAGKVDVIVVYKVDRLSRSLHDFAKMVEVFDRHKVSFVSVTQQFNTTTSMGRLTLNVLLSFAQFEREVTGERIRDKIAASKKKGMWMGGVVPLGYDVKDRKLVINPAEAETVRFIYQRYLELGCVRILCNDLKQKKIVTKIIPSRPGTGGRPFSRGGLYHFLNNPIFIGQIRFREAIYDGQHEPIIDLKTWDAVQMTLAGNRAGLMGKCNKDELAPLRGKLYDAVTGEQLVANFSTKKGRRYRYYITRSLYKETRANAPAGWRLSGPTVEKTVDSIARSMLADRNAIISALAAADAPAAIVSPILERAKMALGQTDSILEDYLQRVNIGSDRIELKLTLAKLMPEGIEPPDIIMSQTRPMSMQRRSNEMRLVLDADSSSAAIDSVLVKGIAQAHVWAEELFSGKADSLVELVEQHKVSEGYLKKLMPLAFLAPDIVTSILAGKQPDGLSKEKLVSKALSPIWKEQHLLLTYVALK

SEQ ID NO: 4882 - protein, 553 aa, unidentified
  source 1..553: note = uncultivated organism
MQSIKQKYCAGSYERISREDVLEAGNGKNESNSISNQRDLIRNFVKFHEEIEIVKEYADDGFSGVNFERPGFCRMMEDIRAGIINCVIVKDLSRFGRNYIEVGKYLEQIFPVLGVRFIAISENYDTANIAGGNDQLVIPFMNLVNDAYCRDISVKIRTSIEMKQRKGDYVGSFAPYGYKKSPEDIHRFMIDEKAAATVKRIFDLTIAGVSNRNIAAILNQEGVPSPAAHKKLQGEKYVSAFQKKHRAEWSALAVRRILTNRVYIGTLEQGKTYSINYKLKERLARDRAFWFSVENAHEPIVEAKTFELVQKVLEMNCRTSPQRKNMREETAFLFSGFVHCGICGRTLLRRKKTVKGKEYVYYGCYDRNKKLCCKTVCIREDRLERIVLDIIQQHVKAVINLAKMLEEMREIPNQKREVKRLDFLIADREAAVERYRNLKRKVYEDYKEGLIGLEEYQEFETVYKRREQEENIQKEALIQKQKQYLQGEGKGQEWMQRFMECGEIQQLDRALLLTLVEEIIVRSSNEIEIKFRYRNEFDLVQETVRDYEKREKE

SEQ ID NO: 4883 - protein, 615 aa, unidentified
  source 1..615: note = uncultivated organism
MEDNKEEAPLRVALYLRVSTEEQTEKYGLDAQRAAIQGMIKSRGKLKDGRDALELLGKPYEYVDDISGTTETDERPAFRRLKEDTLNAPDGQKPFDMVAVYKIDRFARKLRILMGVLKFFEDFKIKFISATESIDTSSPFGRAMLGIMGVIAELELETIRERTQRGREQAMIQGVFMGKHPPYGYKKDKEGKLEILEPEAKMVKAIYYMFASDKQSPQIIADILTKDNVLSPDASAVKYKKKKGASQKLNSAYFWRQERIRKILSDEVYIGILYYNKTHKQKPLPKSEWKMSPHRHNYIIPKQFFELVQSRLEQLSERKAITKKKEQGHLYLLSGLLKCDHCKSFGEPKSKEMMSWTGIHKELKDTEGRHSYYYGCNRKNKAKFSVTCPVVPIPAKPLEDYVIGFLGELLKDPKATYEYQQQLKSNELNRLYIQQKKDIRKHLLGLLNALPLMRQRLLEQHKILAIDMSTLERELKELKSKEGEYKEKIDEIDSFLSQSDLSEAYYTSLNLYSQKYGKALNTILDDKKELYDLIHKLIYQIVVYSRPTGKRDRIAGRKKEGQMIPNKIDIHLNLPQNLLQELYTQKFSVKSDNLWRRRESNPRPKILRTTLLQAC

SEQ ID NO: 4884 - protein, 533 aa, unidentified
  source 1..533: note = uncultivated organism
MQAEKEFSSCESQEEKIKSFIQSQNNWQTFKVYSDAGYSGANTNRPALQELLEDVKQKKIDIILTYKIDRLTRSPKDFYQLIEFFEQNNVSFISVTERFDTSTPAGRLLRNIMLTFAQFERELTSERTKDKMLERAKKGFYNGGYAPYGYKRENKKLIINKREAEIVRLIFETYVETGSVVKVYSLLKEKSIKNRQGKPFYKTVLGFLLRNPVYAGNVKHNDKIYQGIHQSIISEEIFEMAQKIHRKKLKKFRVYRDFLFGGLVNCKECNFKMSPCFTNKYAKGKLERYYYYRCNSTHHKDWQSCPIKQVSADRLENYILENLERISLDKDYIENLVFRLNHGQNTPRRAGYELTQPCSKFSPDGVSSTLKTFLSTLQDKKGMERNLLAKKFIEKIIYSIENIKISLFYSEILKNFAAQKSPVPPKRDGASRQRRDWGNIVFSENSQFETDNDAAGLGLAPRLMASKATVLLLDDPAMTSIFYLIFSSFSRASIIANSRGNWGIEEYFILFSASRKSFKMRLSSASSKPATCA

SEQ ID NO: 4885 - protein, 550 aa, unidentified
  source 1..550: note = uncultivated organism
MNNNTSNYLVYAIYSRKSKFTGKGESIENQIELCKNQLINKYNIKEENIKIYQDEGFTGYNTNRPQFQEMIKDIRNKKIKCVIVYRLDRISRNVTDFCNLKNEFIKYNTDFISVTENFDTSTPMGRAMLMISSVFAQLERDTIAERIRDNMYELAKTGRWLGGNTPLGYKSEKVETLSVDGKRKNLYKLDIVFEEAEIIKLIWNKMCELKSLSKLEVYLLQKGIKTRNGNNFTRFSLITILKNPVYVVADNKIKDFFEKMNVTIYETGIEKCNGINGLLAYNKREELMGKTKSYKDITEWIIAVGKHQGIIPSQQFIKVWNLIVNNKDKRCRVPRQNTSILSGIIRCKHCGNYMRPRLRNTVTIDNKRNFSYLCVLKEKSRKRLCKCKNINGIETDMIVIEKISELKLPTNMLINKIKLLINNKEKKSDKRINELQTLNTILSRNKRKVEALIDKMAIIDGELIADITAQIKSIKSKNLEIEKRIIELSKETEKEIDKDEVTVLALNIINKYMSSFDSLNIVDKRLMIKSLVNTIESDGENIYINYMSCP

SEQ ID NO: 4886 - protein, 545 aa, unidentified
  source 1..545: note = uncultivated organism
MADFLCQNEGTVYEAVAYYRLSKYAKSNDSESIANQRKLVREYLSRHPEILLVDEQEDDGFTGTNYERPGFQAVMRAIREKRANCVIVKDLSRLGREYIETGKYLERVFPAMGVRFISINDDVDSERERAGDDIIIPVKNIMNEAYCRELSRKLRRQFEVQRSRGEYVGSFVSYGYLKDPRDKHKLIPDEYAAEVVRGIFQLKIKGYSAQTIADHLNENGVLSPSQYKKQMGSRYKSGFQNGSISEWGPMTIRRILTNEIYMGTLIQGKRGTPNYKIKQMRLRDESKWSVVPHNHEPIVDEMMFELVQRMLQRDTRKSPEEETVQPLSGIVFCADCMRAMCRRVVKRGEHAFYYYVCSSNKRTKECSSHSFSQSALERIVCHAIQKQIEIVVEMDKLLTETEHGNLMAIKLKRLDTMVAEKEREIENYQDFRMKLLEAFHEKLIDRDEYDGMRKKYTGMIEKTKASLEKIMEERAGVAGERPGNRTWVEQFAQYRAEKSLTREMAVTLVDKIYVYEDKRLKIEFNYRDEIAYDQELLKQLEQAVG

SEQ ID NO: 4887 - protein, 575 aa, unidentified
  source 1..575: note = uncultivated organism
MSIKETITTKKAALYIRVSTVMQVDKDSLPLQKNDLINYAKYALDIPAYEIFEVAGYSAKNTDRPRYQQMMSRLRTGEFSHLIVWKIDRISRNLLDFAAMYEELKQLGVVFVSKNEQFDTSTAIGEAMLKIILIFAELERKMTSERVTAVMVSRANNGQWNGGRVPFGYNYDKQTKQFSINEQEASIVRMIYDKYEETHSLIQTCKYMNTNGYKPRSGYAWNPVTTRTMLTNPFYIGNYLYNKYSLGKVNYRLKSNRRPESEWILVEDHHVPIIEKSRWLAVNEVLRSNRRSNKDGPRTYTRVNTHIFAGLLVCGSCGHQFVSSIDRPRDNGYRPSVYLCSRHRRYNDCPNKYISDIVLGPFVLNYIANIIKAQNNFGVTTNLETFERKLLRGEVFQDVTGIEKAGLQEMYDMLKSGKFNTEIYEPRYAEVSDPNQEEKDLLISEKRKKERALTRLKNLFLYSESDIPETEYFIERKSLTDELEKIDKRLEEIELGSSSAFSISDADFMSKASFFVMSQQLLTKRYINFESMIQKIDPKIVKDFINSIVKKIVISDGKITSILFKNGIEHKFLYN

SEQ ID NO: 4888 - protein, 545 aa, unidentified
  source 1..545: note = uncultivated organism
MTNRAIRCAIYTRKSTEEGLEQDFNSLQAQREACEAYIKSQKHEGWQLVKTHYDDGGFSGGNMERPALKQLIMDIETGIIDIIVVYKVDRLSRSLHDFAKMVEVFDRHKVSFVSVTQQFNTTTSMGRLTLNVLLSFAQFEREVTGERIRDKIAASKKKGMWMGGVVPIGYDAKDRKLIINPAEAETVRFIFKRYLELKNVRHLCAELKQKGIVTKILPNRPNPGGKPFSRPGIYKLLSNPLYIGQVRFKDVFYEGQHERIIDQDTWERVQLQLADNRPGVVKNYRKDDACLLKGKLFDAATGDELIIDNARKGDRRYRYYASRSMKRNSKAEAKSGWRLPAPTIEKTIRAIVDDALSDHNALTSALTEAGIPIRYMSQVLDATQDSRRADSIRLLKAARLKQESIQIELVLNSFLPEGATDKPIKLEKTTPMQMRRRGCEMRLVIGGTSAANVHYDSTLVKSIARAHAWFEELLAGEAGSLLELAKQHNVSESYVKKIMPFAFLGPSIVSEILTGNLAQYKSKQWLIRKVIIPARWEDQRAFFLM

SEQ ID NO: 4889 - protein, 622 aa, unidentified
  source 1..622: note = uncultivated organism
MIKWRNICKGYPKFIFEKFIFGLKNPLIYANLISGQISVTPDFMEWKSHRLPPNKKVRSDNMKEQSKFFAAMYLRLSRDDNVKAEHDGNAMINGVSKAESNSIGSQRELIRSFLNEQEDIELYDIYVDDGFSGSNFDRPEFNRMMKDIEAGRVNCVVVKDLSRFGRDYIEAGRYLEKIFPALGVRFIALTDHYDSISADTGERQIVLPVKNFINDSYCRDISTKVKSQLAVKRKAGECLSPFAVYGYRKSPENKNKLVVDDYAAEIVRRIFRWRIEGMAVSAIAKKLNELHILSPKEYKKSTGLNYRGGFTGGSGSQWSSSSVKRILTNEVYLGHLLQGRTEKVNYKVKKSVEKPKEEWVRVENTHEAIISDSDFEAVQNLLQTDGRVSPESKSLSPFMGLLFCGDCGEQMVRRRVRYKESNKVYYICSTKNRGEGCSRHSIEENTLKELVSIAVRRYANDFLAQSKLFEQAKEKETNLEAVAGCQKELARLKQEQDKYYGLCAGLYDDLRQNVVTKEEFERLHKEFQSKAQELEKAQEQQQDLIRRMLQKGVVSASRLAKFQDSLKLAEIDRHTLTSLVKRIYVYEDKRLEIEFYFQDEYQIMQEYVTALSGQESGRERSA

SEQ ID NO: 4890 - protein, 533 aa, unidentified
  source 1..533: note = uncultivated organism
MDEKRLVDGTTALAEKQPRVIKIEPAERPQNVRLRVAAYTRVSSDSEDQLNSFAAQNRYYTELISGKAEWRMVDIYADEGITGTSVAKRDDFQRMMTDCRRGLIDQILVKSISRFARNTKDCLQNIRELKELGVNVRFEREGIDTVNVSSELITAIYAAFAQKESESISGNMRWSYQRRMESGTFLPPSTPYGYRTVNKKIEIDPERAVIICKIFQWYLDGISKEQIAHKLNEAGVLSNQNKAWRAGGIHYILTNERYIGDSLWQKTYTTEAIPTVRHRNTGAREQYYVEGTHPPIISKEVFAKVQTLIQMRKENYGKLPSETIHPLSRKVICGCCETVLRRKPQRGKYYWCCMRHDTNREECPLMPISETNLYESFCRLYYKLKHQSIPILEQMLTNLQMIRNRRMLWSPDIVALNKRISDLSSQNQTLAFLKQQGLVDPDIFIAKTNELTKQLRQAKLEKEKLMDAESDMTVLQTRDLIDLLEGGPEFLDSFDAELFGELVEKIIIESNDSVRFCLKNGLELRESIERTVR

SEQ ID NO: 4891 - protein, 518 aa, unidentified
  source 1..518: note = uncultivated organism
MNPNVTVINPTITEDKESKIRVAAYCRVSTNSEDQQNSLMTQMRYYENFLADSETERLVSVYADEGITGTRMDKREEFQRMLKDCRRGKIDRIIVKSISRFARNTKDCLSVLRELKELGISVMFEKENIDTANITDEIMVTIMGGLAQEESSSISKNVRWSIRSKMKNGTVKFHSAPLGYDLYEGNLIINKREAEIVKSIYKMFLSGMGYDSICRELNESKVIKNDKGTKWLSASVRYILTNEKYIGESLWQKNYNTSMPYRKVRNKGALEKYYINNTHEAIITKEEFEKVQELIEQRKHPNMNLINNYPLSKKIYCGKCGSLFKRRFKNEKSYWICREHYYNAENCQIKQIPEQVFYTAFTAMYNKLKANYSVIFTPMLTQLQELKNKKYGGNKQYIEINKEIAQLKEQTHVLARLKTKGFLDENKYIEQVTEINAKIEKLNREVRKIVRCDDEDEMIEQIKEIASIIENGTDLMMGFDDVMFESLIEKIIVKNQTEFEFNLIGGLKFTENSIDNCT

SEQ ID NO: 4892 - protein, 675 aa, unidentified
  source 1..675: note = uncultivated organism
MPVGVYVRVSTEEQRERQSIETQRDFAAKYCDLHGVQVYQTYADDGVSGTVPIEHRPGTIRLFADARSGKFDQLLVYKLDRLGRETLLILKAVDELKKLGVRVRSMTEEFDSATAAGNLMLTLLSGFAAHEREVIRERSVAGTNRLAEAGAWMGGIVPYGYRKDGDKTERRINPSDDPIPGFDMSEADVVRTIYRMSAVEKKSCQKIADFLNRGHIPCGSADAGKRNRRIAPIWRPSHVRNMIVSRTYMGEHLFGKRARNRNRKVIVREVPAIVSEQTWQAAQQVLQANRIEASRNTRQPYLLRGLIKCGLCGLTFSGMRIKRQNDHYYRCNGRQQARGLYGIDGKKCPARTLNGDYVERLVWADIESFLRNPSEILERLRERVVMQDGERQRRQKELDEPRDRLQQKTVERDRVLTLFRRGRIDDATLDQQLDQINTETADLATDIETSTRALSAGDRTAQLQSAEALLAMLRSRLARPVPPELKRRIVEILVETIGANTVERWGVQQSEIVITYRFSQPDEPAALVLPRSHRLNNRKQPPEELNTLGDHLLRRRLVLKLLQRQVAEQIGVDKTSIANWEGNRSKPGLSYMPAIIRFLGYNPLPPSEGWADRLVQCRTLMGLSQRESAERLAVDQGTLARWERGEREPTGALKVRALHFVASVEAAFSRASRTA

SEQ ID NO: 4893 - protein, 570 aa, unidentified
  source 1..570: note = uncultivated organism
MARIRKSETSKTTSIIWYIALYIRLSREDGNDVSVSVDNQLKELNTYLENFDGMYEVVDTYIDDGYTGTDSERENFQRMLGDVKSKRVNCVIVRDPSRLSRNYLEAGMYMEQLFVQLNVRFISLSLPALDSYKNPEAMNSIAVPIQNVINDDFCRQTSQKIRGVFNMKRSRGEFIGAFAPYGYSKSPEDKNSLIVDDEATDIVKKIFQWFVYEGMSKNGIVKQLNALGILNPTAYKNSKGLKYHCRTGNNNDGMWSSRTITSILCNEVYIGNMVQGRQRIKSYKVHEAIQVPQEEWFIVENTHEAIIDKETFEKAQELQKRDTRTAPKSKTLTLFAGFLKCADCGKAMSRTGAKGKNYYVCRTNRDKSKTACTKHSIREDVLQEAVLIAIQKQIDLVENMSQIIEEINTLPDLNNKSDRLEKALRTKQTELSKNNTVLDSLYVDWKTGDITQEQFRRMKAKFETDAERIRASIQTIQEEIKLMEKGVTNDNPLFKNFLDYKNVKELDRNLLVCLIDTIYVHEDKHITIKFNFADTYMRVIEFIETNKEQMETNPKRKAIIHEIPIDKPVA

SEQ ID NO: 4894 - protein, 536 aa, unidentified
  source 1..536: note = uncultivated organism
MGQSNKSKTNDTVEKTAAIYVRISLDQGYGEMALDRQETECRQRAARDGVEVPADRVYADLSISAADAKKNRPAYNRLLEDVKAGVIGRVYVWDLDRLTRQPGQLDEWVKLAEAGRCHVVEAQGMDIDLSQSGGLLMARIRVAVAENESKHKGERQRAAMRQRAQLGIVPIGNRPTGYSRKGEVIEHEAEAVRAVFDAFLAGASLKSIARALSGEKEGLTGNIPTLPRPSWTAAVEWNERHPDRPPHELPAEQPWCSSAVLKMLRNPRYAGFATYIPTEVGKNGDKSAPWHSQRVRDEGTGEWVRGQWEPIVDDETWERAQRTLDDPARKIKVANPGTRISLGSGLFRCPVCHGRVHRQGRSYTCTGHANRIAAPVDEFVENVIVAVLSRPDFRELVCVSSSDQRVQTSNLEAEIVRLRGRIERAEKDYADDLIRADDLKRVRDTAEARILEVEMEISQIKNTQASSPVFREVSPAEAYRSADLETRRAVIDLLCDVYITKTDRTETARRNGRRIPFDPTEAVRFEWKTAATPPAE

SEQ ID NO: 4895 - protein, 561 aa, unidentified
  source 1..561: note = uncultivated organism
MQKSIDKIYYAAIYLRLSKEDGDLSSGEKKESNSIANQRKLIEDYLSRNPEITLVQEFCDDGYTGANFDRPDFQRMMEQVKTGKINCIIVKDLSRFGRDYIDSGRYIEKIFPSLGIRFIAINDNYDSAQSQQVGNEIILPFKNLINDSYSRDISIKIRSNLETKRRNGEFVGSHVVYGYRRSDDDKNKLVIDQTVAPVIQSIFSMKMDGFSPAQIADKLNKDGVPSPYEYKRQSGSKYQSGFKKQIQTDWGAKAIYRILKNEMYTGTLVQGKTTTPNHKIKSRTTKDEADWMRTENAHDAIISPSIFDMVQKLMLEDTRSPSGDNSVHLFSGKVFCADCQSTMTRKKTKSAGKEYVYFVCNANKVDRKVCDAHTVKEQVVYDAALAVIQAQVSLALNLEIALGKLNGISWERREMERIASKIARQEEVIEHNKQMKAHVYEDFKTEMITREEYFIFKAEFDKNIQEAKEAIARLVGNKNQISSGLTEQQSWLAQFREYENIQELNRRVVVNFIDRIEITEDKQVHVVLNNADQFQAIMEFLEEEKAKADAKKVISFIREVS

SEQ ID NO: 4896 - protein, 539 aa, unidentified
  source 1..539: note = uncultivated organism
MKLPAVKAVRCAIYTRVSTDHGLDQEFNSLDAQYDAASAYIKSQAHAGWTLIRSRYDDGGYSGGSTDRPDLQKLLDDIRARKLDVIVVYKVDRLTRSLADFAKLVELFDAHGVSFVSVTQQFNTTTSMGRLTLNVLLSFAQFEREVTSERIRDKIAASKRKGLWVGGTLPLGYHIKDDKIAVIDDEAERVRQIYRRYLELGGVNALVRDLRERNIRTKSRLLATGSTRGGILFGRGSLFYLLRNRFYIGEVKYKDEILPGEQPAIMDRALFDAVQQKLTDQWTTQSTVRNASDHLLTGLLFDDAGHRMVPTHATKSGVRYRYYVSLPHLHGESKTASVGSVSRIPATDIEDVIVKSLYKHFIAQKEKPSSSGTQVGDRKVLQDSIARIDVHENHLAIRLKSADDEEKSDSADDHLLSIPWQKPPSKRSRQILLPQGIPRNEVRLTRIERRARLVSAIARGRRWLDEVVSGSVTDIQQIATRQKCSVRQVNMTISLAFLAPDLVRAAVEGRLPRGVGVERLRDAPAEWSRQFEALGLNPQ

SEQ ID NO: 4897 - protein, 527 aa, unidentified
  source 1..527: note = uncultivated organism
MARKSRKQRDVASNLGIKNLYHVGAYIRLSVTDRKQKGDSIETQQAIIESFIAEHPDMELREIYIDNGKSGQTFERPSFQRMIEDIESDKINCCVVKDLSRLGRNAIDTGYYVEKYFPSKNIRFAAVTDNYDSNNGDSGGIMLSLKNMINEAYALDVSRKVRATFQMNIKNGYFVGGQAPYGYLKHPDDCHKLIVDEYAAGIVRQIFDMAADGQRINAILEWLNGDEILPPNRYLCSIGKRSPKARGADNIYWSYRGVRSILDNRIYCGDMVQGRKTTINGACKRLPETEWTITENTHEAVVSREIFAVVQELLKQPDKSPRFSTAKTDNIFQGKLFCGCCERPMPRKRDGEKFYRFKCSTPKQYSSYACTGMKIGEKLLKEKIFNLLKNHEVVLSRVATTEPVNDYNAELTAVKTELCKNRMFLKGLYESLIVGDITDFEYKEMKSGYETKIAELTAREKQLRDNAHARIQQEKALSKVQESVQRIESVSDLTAEVIDKVVEKIVVHENNRITVKFRFMEEVVEHE

SEQ ID NO: 4898 - protein, 526 aa, unidentified
  source 1..526: note = uncultivated organism
MSRRRSDGNGKAESRPVRCAIYTRKSSEEGLDQEFNSLDAQRESAEAFIASQKAEGWICLPERYDDGGFSGGSMERPALARLLRDIEAGGIDCVVVYKVDRLSRSLLDFSRIMETFENHGVSFVSVTQQFNTTHSMGRLTLNILLSFAQFEREIIGERIRDKVAAQKRKGKWAGGVPVLGYDVDRNGPSPRLVINAREAARVREIFALYLEKGSLQPVVTELTRRGWVNKRRLTKKGQKLGGRPFDKATLHVLLTNPILTGKIVHRGEAYEGEHEAIISQDVFDKVQSQLKLNGRTGGAEVRNKYGALLRGLLKCKGCGHAMTHTFSSGRKGRFYRYYRCVRAIKSGAHVCDSGTLPAAEIERVVVDEVRALATDKALLAEVLAGAQASVAGARSTLTTERDDLKAELRRQHQELRRLVKDGRTDREVTTRVADLNEHIRGGDEQLRELDARIADLEHETITRGEAEAAFADFDGLWANMSPREQARVLNLLIAAVEYDAKAGSVSVTFRPTSIGALARRRKERAA

SEQ ID NO: 4899 - protein, 562 aa, unidentified
  source 1..562: note = uncultivated organism
MTKRASSNDARPAGGPIRCAIYTRKSTEEGLEQEFNSLDAQREACAAYIASQRHEGWTPVKESYDDGGFSGGNMERPGLKRLLADVAAGKVQVIVLYKIDRLTRSLSDFSRIVDVLDKAGASFVSVTQSFNTTTSMGRLMLNVLLSFAQFEREVTGERIRDKIAASKKKGMWMGGPAPLGYEVRDRKLVVNDAEAEIVRHIFQRYVVLGSGQALLDELRAQGYRTKRRPQANGGVKGGIPFARGMLFHLLGNRVYIGETVHKGTAHPGEHRAIIDLELWEAVQQRVAVNSVERKTGCNSREASLLAGIIADGHGRRMSPSHAVKSGRRYRYYITHASAIADDRPAWRMPARDVEASVVSRLTGIFKDQLVLRELVHADDAVMLANAFSRAGAAADRLDSSTYHRRTIVTSIVRRVQLLEDQITLTLDGAALATMLGVSIDDARPLVLTAPIARVRRGKEVKLVMTDGVATARDGQLIALLAEARVAREGVLTAPELTIKDIASASGQCRKRLARLLGIAYLAPDIVAAILQGRQPPAFSTRTLLTAKLPLAWDQQKTMLGFA

SEQ ID NO: 4900 - protein, 526 aa, unidentified
  source 1..526: note = uncultivated organism
MYQPNSTSAEAPKITLIQARKPETAKLRVAAYARVSSDSEDQQNSYIAQVDYYTRHIAAQESWELADIYADEGISGLVASKRDEFNRMIQDCRDGKIDRVLVKSISRFARNTKEYIQYVRELLRLGISIHFEKENIDTGKMTSEQIATIYGAFSQMESQNHSNNMRISVRIRMEKGDYLSPSEPYGYRLEGRTLMIIPEQAEVVRRIYAAYLSGQGKDDIADELNKAGVPRTKGRTVWHPSTVAYILTNIAYTGDMIWQKSFATNEIPFRQVRNKGEKPKYFVENCHEAIISKEDFQRVQALMDSRRRQTNGTVSSALLAKKIRCEGCGTLFRRKIVNEKIYWTCRRHDRDKDLCPTSQIPEEQIVTAILRMYHKLKRHRAQILSPVLTQLTELREKELRSNRRINDIDKEIAQLTEQNLVLVRLKSKGYVDSALYLSQTGEIDFKLRELRRQRRRIMEANGEDSQIKATQAMLDYLEDSPEYLEALTEEVFETLVESVFISSETEMNLNLYNGLMLKETMERTVR

SEQ ID NO: 4901 - protein, 581 aa, unidentified
  source 1..581: note = uncultivated organism
MSRTLGSTRSNGAAVVRCAIYTRKSSEEGLEQEFNSLDAQREACEAYIQSQKAAGWIALPATYNDGGLSGGTMDRPALRRLLTDIAAGRIDTVVVYKVDRLTRALNDFAKIVEAFDAKGVSFVSVTQQFNTTTSMGRLTLNMLLSFAQFEREVTSERIRDKIAASKQKGMWMGGNPPLGYDVIDRKLVVNTPEAERVRDIFRRYTSLKSVRALKEELDNAGIVSKARVDRSGTSRGGRPFARGALYLLLQNRIYRGEIVHKDKVYPGLHEAIVDDALWDTVQAVLAENRVERVTRSAATDPSLLAGLVYDATGERMSPTHANKKGTRYRYYVNQSLIKRGRPQTSVDACRVPASDLETIVDDEIIRLMRDERIVHEVAGHLSVAQRKALITQAAAFAERWRCRSPSDRRAISSALIERVVVHPKQVALTVRLGAIPHVTAPDIDIRRLPQRLDGPTRVLSLPARLKRTGMTTKLLVQGPASSVRRSVDRSLIRLIGQAHRCRRILDCASHDQTMAALAAKAGVGATYFTRVVRLSFLAPEITKMILQGRQPPELTANTLVTLGPPPLSWEEQKRRWVSPQA

SEQ ID NO: 4902 - protein, 544 aa, unidentified
  source 1..544: note = uncultivated organism
MPDKVYRTAIYCRLSREDGDKIESNSIASQRAICEDYIAGHDDLELVCAPFIDDGYSGVSFNRPNFRKLEDALRKGAIDCIVVKDLSRFSRNYIDGGRYLEKIFPQLGIRFIAVNDAYDSLTGDPQSDSFVIPFKNLINDSYCKDISMKIRSSLEVKQKSGEFVGAFAPYGYRKSPENKNQLIVDEAVNEYVQMIFTMYKDGISIGRIAARLNQMGVLSPMEYKHSAGVRFDTVFKTGKTAQWTYNAIQRILSNEVYIGVLAQGKRGTPNYKVRVVRRKDEAEWVKVENAHEPLVSYEDFMAVKAMMKRDMRCSSEQEEAHLFSGFLFCGDCQQSMVRKTVPSKKKKYVYYVCGANKHSHSCSPHSISAAELEEKVFRAIHDQVELVINLEKTLELIDRLPAQNRKAFNYEAQITKIEEEIERYQKLKLRLYEDLSDGVIDKAEYFEFRNTYTKIIEEKQEALLRVKKEMKQTVSTGTTERNWVTLFKQYENIEELNRRVLMTLVDRILIYEDHAIEIVFKYRDEYQQTLEYVHGFCEELAIAG

SEQ ID NO: 4903 - protein, 519 aa, unidentified
  source 1..519: note = uncultivated organism
MSSQQENSPTIRCAIYTRKSTEEGLDQEFNSLDAQRESAETYIASQRYEGWTVLPDRYDDGGFTGGNMERPALRRLLQDVATGGIDCIVVYKVDRLSRSLLDFARIMEVLEQNRVKFVSVTQQFNTTHSMGRLTLNILLSFAQFEREIIAERTRDKMSAARRKGKWVGGVPVLGYDVHPKGGKILVNETEASRVRGIFELYLQERALIPTVKELAKRGWTGKRWTTKKGRERGGRSFDKTSLYKLLTNIIYIGKVSYKNEVYEGEHDAIVSQDIFDRVQTLLRDNRLNGGRNVRNRYGAILKGLLYCGACDAAMVHAYTVRGDKRYRYYVCSKAQKNGWHTCPTKSLPAAEVERFVVDTIRNIGKDDMLAAEVIRQAREQSQGRVTSLQNERLFLESELANLDKEIRRLIKSMGPNADEGITTLRLAELQDRMRETEQNATCVRQELLELERLHIDEEHLATALSLFDPVWDNLLPQEKIRAMQLLVEQVRYEPKSQKVSVTFRPSGIRTLCAEAGIGE

SEQ ID NO: 4904 - protein, 531 aa, unidentified
  source 1..531: note = uncultivated organism
MLEKVGVYCRLSDEDRDKLNKNDDSDSIVNQRSMCLKFANQNGWNVVDIYSDDDFSGAGVDRPDFNRLLKDCESGKINLVLCKSQSRFSRDMEVIERYLHNKFIEWGVRFVSIVDNADTSIESNKKSRQINGLINEWYLDDLSTNIKKSLKNKREDGLFMGSFAPYGYDRSEDGHKLIIDPVAAEVVKKIFDMYASGNGYHKICEYLNNNNIPPRSVYKKQKGSKFVCSNCDLKSVRWNTDTIAQILRNEVYIGNLVQGKKTSLGYKVHKFKKVDEKDWCRIENTHEPIIDVETWNKVQNILRTHASPTKNGEIHYLSKKIYCMNCGKSFMRNVYNVKTESTGKRAYMQCKGAKKYHSCDNNKAIRMDELEQILLNAINDLLDNYYDETNLQYLYNQTNKQNTNDETINILKKEKNNLEKKINDNKNYYRNLYEDKVKGNVNEEMFSLMTNDYLKEIETMTNRIETIENEINNLNNIKENKKQANDILKKYKHIDSLNKIIVDEFIDKVYIRNYNKENKTRDIEIEWNFEF

SEQ ID NO: 4905 - protein, 549 aa, unidentified
  source 1..549: note = uncultivated organism
MFSGSRDSYPEPVVVVFGVTKKMSAKHKKEAMKMPAVQIIPAIAPQVTRKRVAAYCRVSSDSDDQLNSFAVQVEHYTHTIQENTEWEFAGIYADEAVTGTRMDKRSEFQRMIADCRAGKIDRILVKSVSRFARNTVDCIQTAREMSQLGISILFEEEHIDTGVLGSEMLLGMLSAVAQEESLSISKNLKWGIRKRMQTGEFITCHAPFGYSLRHRDLIVNEKEQPVIEAIFSKYLSGQSCEQIADWMNFQQIPTKAAGKKWRKTNIVKILRNEKYQGDALLQKTYTPDCLPLKNQLNNGEMSQFYIRNAQQPIITQGDFQKTQALLTKKYMLQRTKAPVQTFPLSQKIVCGLCGQSFCRTVTAKGTVIWTCRTHYHCAEKCLMMPVKETDVYQAFLMLWNKLVKHREQIFKMMLDKLVLLESRQQKKHPDYLKMMQEISVLLKQNHALTRLRTQGVIDEALWLQQSAGINNKIVDLRQRSRQYQKPDQLHNTIVETASIYESLKESTPLSEFDAQIFRKVIQKIEKTETAYLFYLTNGLILQEGEKPDA

SEQ ID NO: 4906 - protein, 559 aa, unidentified
  source 1..559: note = uncultivated organism
MNKTMIYDTAAYIRLSKDDLDIDGVLKSESNSVSNQREILRDYIRSQSDLELYDIYVDDGFSGKDFERPEFQRMMKDIEAGKVNCVICKDLSRFSRDSMDAGEYQKRIFPKMKVRFIAIGDHFDSLTATSVEKNLVLPVKNMVNEEYLTGTSEKIRMSQEAKMKAGAFIGSFAAYGYKKSEADNNLLVVDEYPAGIVREIYDSKICGMSMEGIAKMLNDRGVLSPMAYKLENGEKYTTGFAVGDRPQWSAQAVRRILMNEVYTGTLVQGKSVTVGFKSKKHKKNEDGSDYCIRVENTHEAIISKSDFDTVQRLLKFEGRWKDGGDVSIFNGVLICGDCNTPMIRRTYKNKGGEKRIYMCKTKNVGKGCTRHAIEEDKLCEIVLQALKVYVSGCIDYSKLVDKVRKYQLSFDHITDYDDNMKRLREEYDCVTADLVGFQADLAAGLIDQKQYETYTKKFQKKAAEISQAMEENERLVKSILTDGVAAGTRLEELKRSMKIKELDRRTLLKFVECIWVYEDSEVRLQIDFKFRNEIPVLESMKKCYEDAEFKRRCEEWEVV

SEQ ID NO: 4907 - protein, 541 aa, unidentified
  source 1..541: note = uncultivated organism
MMSEKMRVYCLYRVSTDKQVDYGDNHAADIPMQRKACHRFAAEKGWEIIHEEQEEGVSGHKVRAEHRDKLQIIKEHALQGKFDILLVFMFDRIGRIADETPFVVEWFVRNGIQVWSTQEGEQRFDNHTDKLLNYIRFWQADGESEKTSIRTKTSLHQLVEAGGFKGGIAPYGYDLVKSGRVNKRKHEVSMLQVNEAEAAVVKIIFDKYVKEGFGPQRTATFLNNNGYRARTGKMWHSASIRGILGNLTYTGVLRCGDARSETIPELQIVSPEQYEAAQRIREARSNENRKTPIVPLNTKGESLLAGNVYCGHCGARLTLTTNGRYRKLSCGLVDTTQRVRYVCYGKTRKQTQCDGPTGYTMHLLDAQVEKVIRNVFARMKGVSKSELVAKRYEEERNQRKAHYAAVNAAYTKAAGELADLKAEIIRSIRGESALPKDVLAELIRENETKCLQLEAASEQAKKAMVETEAITKELQRQHDEILSFADLYDSAGIEAKKMVVSAMIRRVEVSRDYKLTIYFNFNLDQFLHGLDCGGTIQAEGV

SEQ ID NO: 4908 - protein, 560 aa, unidentified
  source 1..560: note = uncultivated organism
MARVSRKQKVWSDVPNIPTKREKEYIVGAYTRLSKEEERDDHKLDNQEQVIQEFVRNNPQFFLYKIYRDNGCTGTNFQRPAFEQLMKDVKQGVVNCIIVKDLSRLGRNHIETEQYIQVLFPVLDIRFIAINDNFDTLNPDNDITVSLKNIVNEAYAKDISRKIFSAKQTQRLRGDFVGNIPPFGYEKAKENPRRLVINEETGPVIKRIFLLKLEGKTNTEIAKTLNAMGEIAPMTYWYRRGKVHHEKYANRIWESTTVKVILRNQMYVGDMVQGKKQKCLAEGRTQVKAQRKEDYVIVKNMHEPIIDRATFDRVQQICDEELQRNREKRNQHHDIPSTEGLLDGIIFSIEGQKMYRVRKVYENQRITYNYVTHKIRKHDGRYSTFFYISEIQVFRGLKQAVFTHIKLLFTLERLLKNEKYKKKAVEEQRCKESKIVQLKGDLNKCTEKIASLYKDMCDGILTFTEYEELKAQYVENREYAKAKLQEIETGHLGAQLLSDYHNKNRTIYEAFLERGELTRELLQLLIKKVVVVEKNKITVTFRFEDEIGRLYTELGIEGVK

SEQ ID NO: 4909 - protein, 518 aa, unidentified
  source 1..518: note = uncultivated organism
MEKAAIYCRLSEEDHSKKHKTEDSGSIRNQKAMLLEYSIRQGWEVYDIYSDDNYTGSDRNRPEFTRLLNDAKAHRFDIILCKSQSRFTRELELVEKYINGLFPLWRIRFVSLVDNADTANRGNKKSRQINGLVNEWYLEDMSENIRSVLTNRRKSGFHIGAFALYGYKKDPEQKGHLLVDAEAAATVREIFTLFSQGYGKTAIARMLNDRGIPNPTEYKRLHGLRYQQPKRKNSTLWKYSAISDMLTNEMYIGNMVQGKYGSVSYKTKQNKPRPQEEWYRVEHTHEAIIDRDLWERVQALITSRAKPFTVGTVGLFARKVRCANCGYTMRSSKNRGKHYLQCSSRHVAKDACIGSFIAVDQLEKIVVQELNALSQRYLDQDELERSVALNQNLEQQRAYWLNVKAKLTKQLADNRAYLRILYTDKVKGLVTETDYLSMSADFSAERERMELQIRDTERHIEDLESRTLSGDQRKEIVQRYTHVEHLTREMVEILIDYITVGKRIPGTQDVPIEIHWNF

SEQ ID NO: 4910 - protein, 512 aa, unidentified
  source 1..512: note = uncultivated organism
MASNSPKTLRCAIYTRKSTEHGLELEFNSLDAQREACEAYIKSQASQGWKALPQLYDDPAFSGGNLERPALKRLLADIDAGRIDVVLVYKIDRLTRSLADFAKLVEAFDARSISFVAVTQQFNTTTSMGRLTLNVLLSFAQFERELSSERVRDKIAASRAKGKWTGGNIPFGYRTENKKLVIDDQEAKIVRYIFKRYLELGGFGPLVLDLDAKGFRSRMKKAKKSDARVASRFTYGPLAYLLNSRIYIGEVPHKDKWHPGEHPPIIAQAMFEAVQAKLASNSVTRKNRRAESGALLMGKLFDDRDNRMSPSYSTKSGVRYRFYVSTALLRGRKSEAGSLSRMSAIELEASVLRAVRDNRHEDDQLSNAELIETCVERVTVSKRRIVVTMRQLSADDAQELIIPWALRPTNTASIEHHGAENRKPDPKLVHALARARARMQNLIDGRFASLEALAQSESAHPKMLGQELRLAFLAPDLVEAILNGDQAPGLTLTKMMPTLPLSWMEQRRALRS

SEQ ID NO: 4911 - protein, 510 aa, unidentified
  source 1..510: note = uncultivated organism
MRVCLYQRISTDEDHQPTSLKTQRERLERYCEAMEDWRIVAAHEDQATGTSLDRPGLQQALDLAREKRIDLLLVYRVDRLSRKVRQLAGLCEELDQFDVVLKSATEPFDTGSPAGRMMLQMLGVFAEFEHATIVDRVTAGLERRVREGKWMSGRTPYGYTRDKDTRLLIPDPVKAPVVRRIFHLYAEGKLGTTAIARTLDAEGAPPPRKQGWSPNALQLILANPAYKGLVRWNGETHPGLHEPLVDEETFEAAHAILRRRGEDASLRRGNPTDFLLSGLVRCHHCGRAYVGTSAHGRNGRYTYYACSTRYKYGPAKCNGDRLPKDRLEEAVLTQLADLYRDGHVIEKALADSAEHVESERPRAEEQLTSTRAEIARLEAKLERYFEAFEDGTLTPGDCQDRVRGHRARLEVLREQEADLAHSLGAQAHTPPDTATLAGLADQLEEILASESPEQAKELLRLLVKEIRVHDRRRIIPTYRIPAAVRAIPRKVELAGLEPATSWVRSRRSPS

SEQ ID NO: 4912 - protein, 510 aa, unidentified
  source 1..510: note = uncultivated organism
MSSIVRVATYTRISTDEVNQPYSLGAQHDRLDQFVASQPDWQIVARYTDQASGKSLERPALTDLQAAAVAGRFDLLLVYRVDRLSRNLGQLVSLIEELAGHGVGFRSATEPFDTANPAGRMLVQLLGSFAEFERASMMDRIGAGMERKAARGEWAGGTPPYGYLKPRATTVLQPNPATAPVVVAIFGRYVESRESAAKIAAWLDGQGYRTRLGGRWSSTSVLLVLRNRAYIGEISFRRVWGPGAHEPIVERALFDAAGAILDARASDPALRRTNSSDYLLATLPFVCDHCGHPMVGTSARGRGGVRYDYYTCASRAKQGRAACDQARLPKDEMEAAILAQMTEVYADTGLVGAALDDAASAAQAAQAEAEQAREGLKREATELRRKIARYFAAFEAGELDARQCQTRITELQAQLAAIEARAAATPAASPPPAGGPIEAALVSWALSQALGSVLHQGPQARTKALLRLLIGEIRVVSPADIRPTYRVPAGVRIPEDLVGDTGFEPVTSRM

SEQ ID NO: 4913 - protein, 528 aa, unidentified
  source 1..528: note = uncultivated organism
MSGSRRKQAADAAGAKRRVRCAIYTRKSSDEGLDQEFNSLDAQRESAEAFVASQKAEGWVCLHDRYDDGGFSGGSMERPALDRLLRDVDAGKVDCVVVYKVDRLSRSLMDFSRIMEAFDRKGVSFVSVTQQFNTTSSMGRLTLNILLSFAQFEREIIGERIRDKVAAQKRKGKWAGGVPVLGYDVDRSGPSPRLVVNAKEAARVREIFKLYLAKESLLHVANELRHRGWPNKKRVTKKGKTLGGRPFDKATLYVLLTNPIFVGKISHKGVLYDGEHEPIVEQDVFDRVQSILKYNGRTGGVEVRNKYGATLRGLLRCKCCGHSMTHTFARGRNGQYYRYYRCVRAIKSGAGECPSGTLPAMEIERVVVDEVRGLGTDRSLLERVLADAQSTIGAELAAAVTERDGLRKEVTRHHRELRRLTTEGAATAEMSARIADLHERLADAERRLPEVEARLAALERETISREEAEAAFADFDTLWQNLIPREQARLLNLLISTVEYDAHAQSVSVTFRPTSIRAMIDRRLEEAA

SEQ ID NO: 4914 - protein, 549 aa, unidentified
  source 1..549: note = uncultivated organism
MNNTGVQVRTKTVTKIAANPALSKRNDPNRILRVAAYCRVSTDDEDQLNSYRTQKSYYTELIKKNPKWRFAGIYADEGITGTMVKKRDDFLRMIEDCEKGKIDLILIKSVSRYARNIVDCISYVRKLKALGIGIYFEEQNINSLTEDSEVYIGIYGVMAQSESENISANVKWGINKRMQNGTYACRFTLLGYRRNKDTKEIYIVPEEAETVKKIFQMYLQGRSLDQIKRYLEENNILTVRGNPIWDKGVIKSMLTNEKYVGDIMFQKTYREDCISKRTKINRGEMDRYLVTDNHPAIIDRETFRMAKKEMVKRSSKRRTSSNAVTELGKYSGKYALSELLFCDICGSPFRRKTWTRKGVKRVYWRCLNHVENGDKACPQSRGIEESVLHEAICRGMSKCIPETGDVKNLVRTMLAYATSEDQGLLECQTLENAIRELQEKANEAEEMCIRTEGNKEPYMEQIKKYYSSIAELRARITEITKQLEESDEFQTEMQQIDSWLENEEILFAEYDDDIVRYLIDSIRVTDDLKLIINVKGGVSVTEELYQKED

SEQ ID NO: 4915 - protein, 534 aa, unidentified
  source 1..534: note = uncultivated organism
MRIAIYSRKSKFTGKGDSVENQVEICREYINSHFPKPHNIAVFEDEGFSGKNLDRPQFTKLLEEQSAKPFDIIIVYRLDRISRKVGDFTNLIEKFSAVGTDFISVKENFDTSNPTGRAMMNISAVFAQLERETIAERIKDNMYLMAKDGHWTGGTTPLGYKSEQVMSDCGGRTKSHYKLTVDETEAALVQLIYDLYLQEQSCKAVEAYLVNKGYRTRKNCYFDDTGIKRILTNPVYCAVDENSVSYFRERKCEVCIENIREGVGFVAYNRTDQSRNLQPYDKWLITQGMHEPLIDSYKWLKVQNTLRANSEQYEQYVPKVSRTSNPISLLTGVMFCSCGATMYPRRHRKGEAPFSYVCSNRDRSRNKLCNVKNCNGLKADGVVRNLILESETDENIIAKNLRKIKASAETVTSHKDKLSDNIQRQIAEKQRAVDNFIATISSGKVSGSALDYINEKLNTALAELDELRQKLSENDKETSNQNALRSVKDISEALRTLRERFDDIPIGQRRNLVKRVVEKVVWNGENLDIFDFGT

SEQ ID NO: 4916 - protein, 543 aa, unidentified
  source 1..543: note = uncultivated organism
MKKVPETRGNLALEPQKVIVIDAAEHPKSAKLRVAAYCRVSSDSNDQINSFLAQLNYYTNLVSSRDSWTLVDLYADEGITGTSAEKRPDFQRLLTDCRMGRVDKILVKSISRFARNTMDCLETIRELKSIGVGICFEEQNIDTASMSGELLTAVFAGIAQKESESISGNMRWSYKRRMESGTYVPTTLPYGYVRKDGKIEVDPEKAEIIRGIFASYLAGRSSNDIAADLSAARVPCRYGGTEWNSTAVRYILTNEKYTGNSVWQKYYTTDTLPYKHPRNRGQRVSYYAEGTHEGIVSVEDFAAAQTLMARRREQLTPEQNIPYPFRRKLYCGSCGTVFRRKTINGIVYWACMGHERKGQEYCPMIQVPECEVQDAFLRLYHKLKCHGETILKQMVSDLQAIRDRRMLWSSDIVSLNKEISDINDQERMLAAMHREGLVDPDIFISQSNELACQLQAAKREKNRLIEMRDDDTASQTAAILEELESMPDFLPEFDGEVFKALVERLTVESGERLRFRLKNGLQLTETIKRGYSNGRQSETALRL

SEQ ID NO: 4917 - protein, 537 aa, unidentified
  source 1..537: note = uncultivated organism
MPTARGYVRVSTEEQAVNGVSIDAQKEILQAYAVVKGYTDFKIYTDEGFSGKNLNRPDVQRLLEECRSEKVEAVIVWRLDRLSRSLRDTLETIEDIFMPAGVSLISVTENIDTSTPAGRLMLNILASFAQNEREAIAERVRMAKNSMAKDCKHLGGYVPFGYKVNQDGYYEIDEKTAPIVREIFRMYNARMGYTAILRYLHDQGVKSPQGNDFKKNSLNYILRNEKYTGTYIHNRLAPQSVSGKRSSKANPIENQIRIPGGMPAIIDQATWEKTCAIREENKKCGGAHKPRVEFLLTGLCYCAVCGARMVVDVGGKDRNGTTQRYYVCKKKCVPPARKEELENAVFAILHEILTHEQILAQACDLANQFAAAEIEDATEQLRTLEHQRIAAHKRLHAITDYIAASGAQAPATLLKEIQSLESSIRSLDMAILKARRPRLVYDFAALRGVLLGVQLAQQKPPEQVKPLLQAALRGVYVSAGSYDLALHGIDNVEMSTMVVNATGQRRNKKTKLYYSCMISVIDVISKKTTYSMPILIK

SEQ ID NO: 4918 - protein, 528 aa, unidentified
  source 1..528: note = uncultivated organism
MKIAIYSRKSRFSESGESVENQIQLCKEYIEKHFDNIEKFYIYEDEGFSGGNTDRPQFQLMLKDAKNKKFDVLVCYRLDRVSRNIADFSNLIEELQRHDISFISIKEQFDTSTPLGRAMMYIASVFAQLERETIAERIRDNMHQLAKTGRWLGGTTPLGFDSEPITYIDHEGKQKKMYKLSPIKGELEIVKLIFDKYLEFQSLSQLEVFCLQNNIKTRKGKDFGKITLRRILTNPVYCKADIDAYNYFYENKALICDDKSKYNGKYGLIGYNKNFKKGAMVIQKDISEWIIAIGKHKGIIDGKGWVEVQNILNRRKDLSPRQATSHYALLSGLIRCKKCNGSMIVKYGPIKSGTNKRIAYYVCRMKVNSRQARCQNTNLRVDETDKYVIDELKKLIETGVLKDLDKAQKQLENKNLMRKNIKDKISENEKAIDNLLKQLAKTENEIITKYIFAEIEKLDKENKELKEKLENYNIENQIVNISVFKNACIKFYEMIDNVPIEQKRNLLQSIVNKVWWDGENLEIDLFDI

SEQ ID NO: 4919 - protein, 568 aa, unidentified
  source 1..568: note = uncultivated organism
MAEIRGRTETRPSALKCAIYTRKSSEEGLDQEFNSLDAQREACEAFIKSQRHEGWQALEAYYDDGGISGGTMERPALKRLLVDIQEGRVNIVVVYKVDRLTRSLADFAKIVEIFDKAGASFVSVTQQFNTTSSMGRLTLNVLLSFAQFEREVTGERIRDKIAASKKKGMWMGGNLPLGYDSADRKLIVNSDEAELVRHIYQRYTELASVDELCEELKQQGVVSKVRQGQQGRMLGGIPFARGTLYHLLQNRVYLGEIQHKEAYYPGNHDAIVSAELWEQVRTLTAQNRTARKTSSNALAPSLLAGLLYDDKGERLTASHSQKGGKRYRYYVTNKNTQRDATSRNLRIPAGDLESLVLERLDQFLSDREHVAQAVSAHYPDAIEQQSLLDKASLLAKKLTMAASGETRTILLALISQIEIGDSEIAIFIDSSNLAHALRHHDGSMIDLAKAKSKDNIKITITAQLKRAGLGMRLIVEGASKQQGQPNASILKLLAKAQRYQSLLINGNGQSLAKIAGQEGVSATHFTHVLRVSLLPPAATTQLLEGKHSRTITSKALLSNLMTVPCYSE

SEQ ID NO: 4920 - protein, 564 aa, unidentified
  source 1..564: note = uncultivated organism
MNRRTHAPAERQVIRCAIYTRKSTEEGLEQEFNSLDAQREACAAYILSQRHEGWLQLDEFYDDGGYSGGNMDRPALKRLLAEVEAGKVDVIVLYKVDRLTRSLADFARIVEVLDRAGASFVSVTQSFNTTTSMGRLTLNVLLSFAQFEREVTGERIRDKIAASKAKGMWMGGVVPLGYDVRERRLVANDTEAAVVRTIYERYVELGSMGDLADELARRGVVSKSRQYRDGRAVGGQAFTRGALAHLIKNHVYVGEVAHRGNIYPGEHSAIIDRDLWERAQARIAANRRERRTTTRATETSILAGMIFDGLGRPMSPTHATKGSRRYRYYVSRSADANDQHRVWRLPARSIERLVIERMSEMLIEGTELTNRLVQPSGETLEMIRLRSAELGTHLKTAPAHLARETLSQLRLSVRVEDEKIEVEAEPQALLAQILGRDAAWLDVGLQDQAKVRVTVAVQLKRRGQELRLVFRTRDNVGLVQRDETLLELIARAHEARDTLLSREAISAEQRPHLTRLARLTYLAPDMLAAIVEGRHPADLSARTLLRAARLPSAWDAQREALSFL

SEQ ID NO: 4921 - protein, 543 aa, unidentified
  source 1..543: note = uncultivated organism
MISQNDCNVGIYCRLSRDDSNGKHESMSIANQRDFLVDYVKKEGLQLRGTYIDDGISGTTFDRPDFKRMLADAEHGKINCIVTKDLSRLGRNYVQSGYYTEEYFVERGIRFIAVNDNVDTGQNTNDIMAFHHVVNEFYPKQVSQKVRQVKRQGAEQGKFMGSQSPYGYIKSPEDKHKLIVDEAAAVTVRRVFREFYSGVSGREIAHRLTQEGVDSPQFFSYNYRNGQKPRTNSTNHWSSSTICQMLDNPVYVGDMAQQKRQNFSHKSKKRMTVDRADWIVVRDTHEPIIDRELWEEVRERRTTTKKRVRKTKGNGSGDFALLSGCLFCADCGARLAYQSSPKSGAYRCSRYNNAGASVCSTHYILEETLADLVLRDLRQYAKLAVEDRQRLEKELLHTLVREQNIELRKLEEQERSIERRQTEINRTVKSLYEDKCKGTLTETLFQSLASDYTREQSDLSKQLEAVCELLTAQQDAQDKTGQFLERVQGCFEIETLTREVVMALVDRITIGESYNQNGQRTQPIQIQYKFIGNALTNAKEDIA

SEQ ID NO: 4922 - protein, 514 aa, unidentified
  source 1..514: note = uncultivated organism
MTDFDFKKKKRSGTTNEKKKTGVYLRVSTEEQAKEGFSIAAQREKLTHYAFANDWDIVDFYIDDGISGKNIKDRPDMVRLLQDVENGKVNNVLVYKIDRLTRSTKNLIELVEFFNDLGCDFNSIMESIDTSSATGRMFIKIVGIFAEFERENLAERVTFGYEQKTREGNYTNTHGVYGYDYVVGDGDLLINEQEAELVRRIYNLYLQGNSMNTITKMLIQEQVPTKRGGQWNPSTIHSILTNPLYIGSIRYGVDGRSTGFQVDNTRYPTILDEDTFLRAQAIMKRRKKYTPRSYPTENSYFLTFLVCDNCGSRLGAIQHMQKTKNGEVLRVNYYCNNHKTGQCNCMNMVQTKVEKAFIEYISQYDDFEVDFNLAEKLKSPSNTDDKNKKTELEISKLHKHLETLRTLFANAEITFDEYRSMADTLNNKIALLQSQITYIDEEEKNISMEEAVEVIGNLKENWIYLTNKEKIEFLTRFIDSIKIFNDKGNVKVSEIKFLTKQAEKKPPQYTKLLK

SEQ ID NO: 4923 - protein, 545 aa, unidentified
  source 1..545: note = uncultivated organism
MPIAIYARVSTEEQRERQSIETQYELGQSFCKVQNLPVYRVYGDNGVSGTIPLDRRPEGSQIFRDARLGKFDELLVYKLDRLARDARLTLNAVAELEKMGVRVRSMTESFDTSTATGKLMMTMLAGFAAHEHSVIKERSLDGTNRVAHAGAWLGGIVPFGYRKTGEKATARLVVSEDPIPDMDISEADVIRMIYRMAAVERRSCFQIAAKLNDLRVPCAYQRDDRLVLRGKRREHTTGLWRPGRVRNLIVSTTYKGVHEYGKRSHTKGRQTIVRAVPAIVDEKTWDRAQANLTAHQLFSKRGAKNNYLLRGLMKCSLCNLTYIGTSTLRPNGKKQFVYKCNGKHGARGLYGANGERCPSKSVRGEELEEMVWGDLLEFLRKPSVVIERLQARMRDDANDSGKDRDRLRRLQDRLEAKADERNKMVTLHRRGRLSEAELDGQLEEIDKEAAGLSVQIEELEAKLSGTESNPAVLESAEALLMRLRKRLDQPLTFERKRQLVELLVGGIRIETIRDGAKNENVVTVTYRFPSAVDICTDRGSSPPPA

SEQ ID NO: 4924 - protein, 550 aa, unidentified
  source 1..550: note = uncultivated organism
MDTTASKRYNAAIYVRLSKEDALSSNGVKAESNSISNQKQLILDFVKDKADIAVVSIREDDGYTGTDYDRPDFQRMMDDIKAGIVNCVIVKDLSRFGREYINAGKYIHRLFPYYGVRLIAINDGIDTVTQDSSDNFNIMVKNLMNDNYCRDISIKIRSQLQVKRKSGEFIGAFAPYGYEKADDDKNKLVIDIYAAEVVRDIFRYKLDGLNNQAIANELNNQGVLSPLEYKKSKGSSYSTTFKTSKKALWGPIAVLRILSNPVYKGTLVQGIRTRPNYKIKAVQVKSPEDWCIVENAHEAIIPEKSYLLVQRLLELDTRTSPKEAGLSPLAGMVYCGDCGSPMTRKTQSSGGKKFYYYLCSNHKRTGQCSTHTISKKLLEDTVFQLLKQHISVLMELDCCLSAIQEGSMTRLNIQKAHERLLAVDDEMARYRKLKFLAYEDLKDGILSQEDYIDITTQYDERIHAEQAAADQIQKELNLYLSGDKDPKSWIKDFIHYQNISELSRRVAVDCIERIDIYEGKRIEVEFTHMQDYNELISQLQEFNLSQKGVS

SEQ ID NO: 4925 - protein, 544 aa, unidentified
  source 1..544: note = uncultivated organism
MKKLIYSRKSLFTGKGESVENQIQLCLEYAAVHFGTTAEECDIFEDEGFSAKDTERPQFQAMLRAARTRQYDCLICYRLDRVSRSVSDFSIFIEELQKLGVAFVSIREQFDTSTPMGRAMMYIASVFAQLERETLAERVRDNLYQLAKTGRWLGGITPLGFRSEEKRYVEKGRERTQKMLVPVPQEMDIVKTIFEQYLALRSLTQLDAYLLQQGIKTRNGKPFSRFALRNILENPVYAIADQDMFTWLLDNEYEVFVPKEAFDGTAGVMAYCKTIQEKHKPNQRRPPSEWIVSMGGHKGVIEGQRWVQVQNILQGNKEKSQRMPLKTDALLSGILRCGCCGSYMRPKGGRVLLDGTKSFSYVCELRERSKGALCKGENAPGPQSDAVVIQKINSIASQRGELLEKLQADVNITEKEQKDIQDSIEQNQAIIKEAKDQLKNLARAIAQNSNAELDSVLIQESEAQSERIRTAQRAIDELEKQQSGSADALDQYSAMAASLGVFTDSFDQMGTPLKRSLLQSIIEQAEWDGKYIAINIWGNKALEP

SEQ ID NO: 4926 - protein, 500 aa, unidentified
  source 1..500: note = uncultivated organism
MAGDPKLLRCAIYTRKSTEHGLELEFNSLDAQRDACEAYIKSQASQGWKALPQHYDDPAFSGGNLDRPALKKLLADIEAGRIDVVVVYKIDRLTRSLADFAKLVEAFDARSISFVAVTQQFNTTSSMGRLTLNVLLSFAQFERELSSERVRDKIAASRKKAKWTGGTVPLGYDVKDKKLVINKAEAETVRTIFRLYPELKSFNNLVAELDRRKIVTKRRDTKVAKYQGGIPFTYGPLAYFLKNRIYLGEMHHGGKWFKGEHEAILDHQTFQRVQDLLKSKEIKRRIKRSESGALLRGKLFDDKGNRMSPSFSSKNGVRYRFYVSTALNGRKHRAGSVTRISAPELERLVEGALSEQIQAPREEMFDRVERVMVTTSRIGLTFKCPEAERVSIEIPWSPRPKATAQVQTVDLEAPLDQKLLKSIVRAHAWLNDLSSGRHSSIENLAAAADLHPKVIRQGLRLAFLAPDLTRTALDGRPFVKLNQVPKLLPLSWSGQHRSLG

SEQ ID NO: 4927 - protein, 547 aa, unidentified
  source 1..547: note = uncultivated organism
MKAAIYSRKSLFTGKGESIDVQINICKEYANQKGWETVIYEDEGFSGANINRPAFEQMIKDINVGKISNVIFYKLDRISRRVIDIVEFIERLNNKGVGFISVTESFDTTTPLGRAMLNIAATFAQLEREMLAERVRDNMINLAKTGRWLGGIPPTGFKSKEITFLNEQGKTKRMYALYEVSKEQELVNSIYSKYLEMKSLSQVEKFFLINNVKTKNGVDFQKQTIKTILTNPVYAVADELFYNYLIKENIQVASPYSDFDGKHGVLCYNKNAENKGVSNKLRDKSEWIVAVGKHKGIIESCKWIEVQNIINKNKDKAPRAGSSNRALLSGLLKCSKCGSPLIVRYGQRQKESGERLFYYTCLLKNLSSGNRCNNKIVRGDFIDNMVIEKVLELTLNKENIIEHLINAEDENKGDVKSYENKVNELRKQIKDIEDKIFKFVDLIGEGTDNPKYLMQRIGELDKEKVALEKQIDELSKEEVRIETNKINLEVVRNSISNFQQIVRTSDIEKKKALLRNIIDIIYWNDGEFEVNLFGTNKRKSGVSGSLG

SEQ ID NO: 4928 - protein, 596 aa, unidentified
  source 1..596: note = uncultivated organism
MTERGRRGGNGSINHRSATGGLSHGVGRSQSVRSAIYTRKSTEEGLEQAFNSLDAQREACAAYIRSQQHEGWTELPTRYDDGGFSGGSMDRPALAALLDDIRAGRIDTVVVYKVDRLTRSLADFAKIVELFEGHGVSFVSVTQQFNTTTSMGRLTLNVLLSFAQFEREVTAERIRDKIAASKKKGMWMGGAVPIGYRAEDRKLVIDPDAAVTVRRIFELYRELGSVREVKTVCDQQGIVTTTRTSRTGRTTGGRSFSRGHLYWLLRNPVYIGRVKHHGETFDGQHEPIIDDAIWVAVQEMLDGRANHRQVPVNVPSSSHLLKGRLFDEVGQPLYATQASKQGQRYSYYTSKHLVVRKADSTSGWRLPAPELDQLIIDQLVALLRDPLQVMDLLAHDQDASNAVTRTIDAASRAADILKGTDIDQCRCMLDTLLECVQLRESGIVLRLRPSAIDGGCHPGGPGTGLPGDGDWTETVVVELSVQLSRRANGSRIVLGGGEQATGGPDPKLVQLVANAYRWNRMLAEGTVASLRELSDREQLDRSDIGRILNLAYLAPDIVEAILDGRQPPALTVYGLGRMSSLPLDWSEQRRVLGFNA

SEQ ID NO: 4929 - protein, 516 aa, unidentified
  source 1..516: note = uncultivated organism
MRLPIKRCAIYTRKSSEEGLEQEFNSLDAQYESCLAYITSQKAEGWIPIKGRYDDGGFSGGNLERPGLKQLMADIEAGRVDTVVVYKIDRLTRSLMDFAKLVEVFDRHGVTFVSITQSFNTTTSMGRLTLNVLLSFAQFEREVTGERIRDKIAASKKKGMWMGGYAPVGYNIADKKLVVDPESAPLVQMLFERYHALGCVSALKWELDREGITSRVWSSSTGLQHGGASFSRGILYKILRNPVYIGQISHKGIIYEGQHDAIINGELWEKVQAQLMSHGGRSRGRPSVQMAELLKGKIFDPDGRPYSPTYTSKGNRRYRYYISQNLLQCRDHPKGIIARLPAQELEDTVLNGIMSIFSENHLAAMFGLEGHNSHIRYVIANKTQIDAQKLVELCLSQVTLQSSSLELQLKAEALKSQIDEALALDLPHPIAALHQIELPFVVGRAKTGSLILAAPKSAAEANNPFNRPEEEIRRWVQGIIWRDEHFRGMPMEQIAKREGVSATHIYRLINLSLEIA

SEQ ID NO: 4930 - protein, 600 aa, unidentified
  source 1..600: note = uncultivated organism
MKKEQDNRVIAIYSRKSKFTGKGESIGNQVELCREYIRLHFGEEDAKKAIVFEDEGFSGGNINRPAFKRMMAQLERREIKALVVYRLDRVSRNVSDFAGMVESLNRRDVTFVSISEHFDTSTPMGRAMMYISSVFAQLERETIAERIRDNMHELAKTGRWLGGNTPTGYSSESVKSVTVDGKTKKACKLKLIPEEAETVKTIFDLFTQTGSLTMTEAELLKRRLLTKNENQFTRFAIKAILQNPVYMIADEDAWEYFALKKSDVFSSREQFDGVHGILAYNRTDQEKGKATVFNPVNEWIVSVGKHPGLIPGKVWVAVQDNLERNKTKSYRRPRKNEALLTGMLFCACGNRMYPRLSKRTTADGDVIYTYVCKMKERSKKELCKRRNANGNILDVAVIEQLKLLADEKSDFVSQLEKSKMFYTGNREQYEQRLAGMRKEKADLEKKVSSLVDTLADLEDGAAKRSIINRMGEMNLEIDRLSQSIDELVSIAAEHALSDIEFDVLRDLLTMIKNGIDGMTYEQRRAAIRTVVRRVIWDGENAHIVLFGDPEGDMEYPDISHLLKNPIAETDEDEELVPYGEGDEEEDFGPETKTHWGEDSK

SEQ ID NO: 4931 - protein, 581 aa, unidentified
  source 1..581: note = uncultivated organism
MHLEWTSQAQRCAIYTRKSVDQGLDLEFNSLETQRAICSAFVTSQQHKGWREIPVHYDDGGRSGATLDRPELHSLLTDIENGLVDVVVVYKLDRITRTLLDFVRLMDFFERYGVSFVSITQNFDTSDSMGRLILNVLLTFAQFEREIMADRIRDKQHLLRRSGRWAGGPSPLGYDSRKHILQINPPEAETIRFLFRRFIELGTYEAVFKECKKLNVLGKRWKARRGHWVGGKPITKASIYHIIANPVYIGMIRTGDELFQGLHKAIIDTVTWERAQVLREQRAAESRRGIPNFNLLTSILFDCYGRSMSLYNRRQPSGRMYAYYRSNQTVEGRRQGIRFVRARADALEQLVFATLKALLVDKPRVRAGLLRLGHYGDALDKLAARSDSAALRLDRLKRPELRDVLHALIARIEVSTDMVRIVLRWTELARYVEWHGVGSFKADEAGWKRGERAETIEVAAGAARCGRKLYLPITPRRNSNSLPSPGLQRLIQEARRAQALVDGNRESALDELAGRMRLRGDRFARILRLNYLAPDIVTAILDGEHPEGLTRARLIQANLPLDWALQRQVLGFPARASSDGY

SEQ ID NO: 4932 - protein, 528 aa, unidentified
  source 1..528: note = uncultivated organism
MANNIYGIDNAFVYGRKSREDEETLESQMNANRGWATANKIEILREFIEEGSSSSEDWDREELQRMIAQIENDPPDAIIVTEQARICRSDDFPKFREILQDLNVLFVETDYNQVYDYNNANDEFTSDILTAVNKKDLKSIKAKLKRGTRESAKKGNYVGKKPPVGFDYDRKTKRLVQNEYAPIIREIFERYMSGMSTNDIAYKMTHDNIIIPYIEKGITKNMIWTSSTLSRLLNNVHYAGHSLYGKTSQKKNRKTKKRETKKTETSDQILEKNTHPEAAIVTPEEWDLIQKIKLKRNSRPPSLKIAKHTFSGFIRCKRCGSVHSFQTNNKNGKKRISSCQTRTYSDDFTSYEVCKNSGANLEAFEILFFAAFSQKIQKLGDHIDLIKSKVVPNDQRSEQKENQIKSKNQIIQQLSTTIKNIQTGFELGMYEGQEAQKAKEVKKYKNDIKILEDEIEAIKAEKETDQGDHFEEIFNNMKKFFSGKDNPNISGKESNEILRDFIEAIFYNKEGREITIDIVWKKELKEIN

SEQ ID NO: 4933 - protein, 589 aa, unidentified
  source 1..589: note = uncultivated organism
MFNNDLQKFREDKRKYLIYSRKSKFTGKGESVENQIEICKKYIRDLFEADVKEEDIIIKQDEGFSGKDVKRPQYKEMMKLIENKQIKMVICYRLDRISRNTLDFGEFYEILTNNDIRFVSCSERFDDTTPTGRLMLNMSISFAQFERETIAERIRDNMMELAKTGRWLGGNTPMGFESEKIEKLNINDKKVSLYKLSPINDELEIIKLIYDKYLELKSLTTLETFLLNNNLKTRRECDFARWGLKKILTNPVYATADEDTLKYFKSLNMEIYNEDSDWDGTHGVMSYNKTMKTKTGSVKEKDKELWVNAIGKHKGIIKGKDWVEVQELLNNNTNKSYRKPVKNNSILAGILRCEHCGNLMRPKLKDTTLPNGDRKFNYICDLKMRSRGKLCTCPNVNGNEADKLVIEGIKQLAQPTSEFYNELLKVIKDNDYGKTSQTNEIEVLERKKNETSTSIKNLISRLEVVDDELFDDLQNKIKDLKRKEKDIITKLQELKASRPDSYTDQETAKTLLYILDNYMNKFESLDLLSQRNFLKLFIGSCTTDGTDIHMDLIGSRNHTTTYQPCFEDSENSETGTHGGQIVLSSESCE

SEQ ID NO: 4934 - protein, 517 aa, unidentified
  source 1..517: note = uncultivated organism
MSREKQKPSANPTIRCAIYTRKSTEEGLEQEFNSLDAQREAGEAYIKSQQHEGWVCLPSHYDDGGFTGANMDRPALRRLLADIETGKVDCVVVYKVDRLSRSLLDFGRIIESFERHKVSFVSVTQAFNTATSMGRLILNVLLSFAQFEREMISERTRDKIAAARRKGKWSGGMPILGYNIAQTKLVVDEAEAHRVRQIFDLYLEHQSLLSVAKELESRGWRTKRWTTRKKTARGGRPFDKNALYQLLTNVAYIGNIKYKDEVHAGEHQSIVDVETFGHVQSLLQRNSSSGGRAVRNKHGALLRGLLRCTACDCGMSHSFTTKGSRNYRYYVCHRAQKRGWQACPSPSIPAGEIERFVVNEIKAIGRDPLVFRETLAQARRQAEELTNLLQTERSHLWDRLRSDHAELGRLATARPGDPRLSDLHDQIRDAERRVTETDNELATLDGNLVNDGEITAALADFDAVWASLAPREQARVIELLVERVAYDGNGGHLAITFRPSGIKTLASEMTKQKDETT

SEQ ID NO: 4935 - protein, 552 aa, unidentified
  source 1..552: note = uncultivated organism
MARKSRKEPTAVLMPEADADCHAAIYVRLSVEDTHTHSASIETQQMIIARFLEQNPEISVYDTYIDNGATGTNFHRPGFQQMLSDIEAGHINCVIVKDLSRLGRNTIDTGYYIEQYFRLRNIRFIAVNENFDTAAPEDAHAGIIIPLRNMINEAYALDIGRKIRAQQRQAMKDGKFIGARTPYGYLKAEDDCHQLVIDPVAAVVVQKMFQWAYEGAGLNTIAVRLNEAGVLPPSHYKKTQGTITHENLLGNGKWQTRTVGVILRSEVYTGDLVQGQTKIVDHRQVKADVDEWTIVRGTHEAIISREQFDAVQKILDQTAQRAKAREVKAYTPNILKGKVFCSHCGGSLHRQRNIRKKSDDVYLYHCLSRSRISKDSCPGATIREDVLLYMLADLLQEALNTALDKYTLSLAEQPQQAAERAELRDKITSRKQEIRRLRGIVRSLYENLIQDVLTKDEYFDYKEKYENKIADIALEVEQLEDGLRTMDEQIEQYRVLARDAESIKADRELTAALIDRLIDRIEVSHDKQITVCYRFQSEFENYVEVLEQCRNM

SEQ ID NO: 4936 - protein, 558 aa, unidentified
  source 1..558: note = uncultivated organism
MNKTKAYMYLRLSRDDGDEGESNSITNQRELIKSYADKAGFKIVKEFIDDGYTGSNFDRPDFKRLLNDLEKKDCKTIIVKDLSRFGRDYIESGKFLQKTFPQMGVRFISVNDNYDSENADVSDTHLILPIKNFINDSYCRDISMKVKSSQKTKRQRGEFIGAFAPYGYKKNKKQKNHLIIDRKVSHIIRKIFEMKIEGYSSKAIADELNKLGVQTPQAYKESQGSNFTTGFATNKSKWQAKMINRIIENRVYIGVLEQGKRTKLNYKSNKEIKVLEEDWIRVEGTHESIVTETMFNVANKMMGRDILNRKSKPDFLTGLLYCADCGNQLVRRRQKTKDGHRIYYICGLYNRGKGCSRHSIIEEDILSSLDFILRQHIKYQEELFARIRETDLSKTEYELDLDDLLADKKKYETLRRSLYIDLEEELIDEDEFQSFRKSYQLKIKEIDQQIISRKKAYEDLGDILASKENWLTDLEKYKNIESIDRQTLALFVDRILVEEKDQEGRPRIAVFFNDMEKLDILKKIINGVKKSNTSNLISFNTMAIKNLSAQREGVAVNG

SEQ ID NO: 4937 - protein, 862 aa, unidentified
  source 1..862: note = uncultivated organism
MTEGLNGDWVTTDSLVEPADWPAPAHAGAGLRYRLTDPHPDGVGTDGQRGQLTEAESPTIEIPDQDAARPASPSSTEIAPVPADWRGHALPGLDAVATLPSGELKALMVRLHGSDGDGRLSRELMCRAIAWKIQFIRAGKSSHEDAGSAAVISIRQAEQIVLAAEGKGRRNPSVRMSAALSPGSRLVREWRGTIHEVIVQSDGRFLWQGKAWGSLSMIASAITGTKWSGPASSASRDLPDRVPGHLAMADIHHRPSTSDGRLGGKAAIRCAIYTRKSSEEGLAQEFNSLHAQREACEAYVASQRHEGWIALATAYDDGGFSGGSMERPALARLLQDIEAGRIDVVVVYKIDRLTRSLFDFARIVGILDGAQASFVSVTQSFNTTTSMGRLTLNVLLSFAQFEREVTGERIRDKIAASRAKGMFMGGAVPLGYDLVEHHLVIHDGEANTVRMIFEAYSNGMAVTDIREALDRRGLRTKPRGRSGGKRFTNSHLYWILSNPTYAGHARHKQTIHPGRHDAIIDEELWQAVQARLAENRRSRTIGRTPDGASASSLLAGLLFTGTGQRYGAVHTAKGKSRHRYYELPRANRTASSDRTASQQPDKTPIPKRIPAGELEVTVTARIAEALSDPGSLAGQLLDQGVPPGQLEAMIDKAHHLARSLKEQGWQPHKDWLRSMIAKVILHGERIAIHIRPDVLASVLVNTPTTSDKPVLSASAMANAPDGQQRDAPSTHVDKHWIIEAPFTLMQSRRHGRTIIRSTSHESKPDPDPTLVHAILRARRWYAALLEGKAGSISALAKTEQTNRAWISAQLPLAFLAPDIAAAIIEGRQAPALTLRQLSAIATAHSDWADQRKAIVAITNAAA

SEQ ID NO: 4938 - protein, 573 aa, unidentified
  source 1..573: note = uncultivated organism
MARVSRNIKKEYKKIQVLYLVGLYLRLSSEDESENFIEYQSKLCLDYLVHEENIQIIDVYIDNGATGTNFHRPGFERMMSDLKAGRINCIIVKDLSRFGRNHLETSEYLEKIFPANGTRFIAVNNNYDSHKAGNEKEGIVIPFSNIVNEMYAKDISGKIRSSIHTLMDKGEFLPASGSIPYGYLRDKDSNSYLVDRETEDIVRMIFEMKIAGMSSCRIAAELNRKGIASPGKLRYLRGISHDKRHETSVWTHKTIQRMLEDEVYLGHRIHGKIKKDAIGEPKKKRSKDSWQYIYNAHTAIISEEVFLQVRNILEEERTVRKGYSHHKPTTREQQEILKDKVFCGDCGALMGPMKRNQRITSDLEPEIYYQCNNFVKSERVICSNHYISQRVLLEKIDNAVRVQIQLALDLEKFLQDVGKNNVLNGNNGKNQFKGIQQKQASYAARLEQLLIDYNSGVIDKEEYIYIKNKYNQAMEQLNIQHEQVRKEQDAKNKIVSQANQWIDMIKEYQSKGKLDRYLVECLIDRVNVYADRSVEIIFTFRDEAKEILTDLREQGEELPDEKTINGIFEAVVS

SEQ ID NO: 4939 - protein, 690 aa, unidentified
  source 1..690: note = uncultivated organism
MNNGNGKVKNGNGAQVESGSKPVLRCAIYTRKSTDENLDSDFNSLDAQREAGENYIRSQAQEGWITLPDRYDDGAYSGATMERPALQRLIADIEKGRIDILVVYKLDRLSRSLLDFAKFIEFLEQHKVTLVSVTQSINTKDSSGRLLLNILLSYAQFEREVITERIRDKVAAAKRRGKWMGGTPPLGYDIDRPNKRLVINNEELPLVRHIFRRFLQLGSATALIQELNGKGLRTKAWITVKGDKRNGVPWNKSHVYRLLNNPVYVGRVQHRDKTFPGEHEAIIEKSLWDEVQQKLEEGARAKGNRGRRKTEALLSGLLRCGHCGTSMGVTFTKKNGRIYRYYLCLKANKSGYDACPVKAVAAGEIENAVLQPLRAVFRSPDMAAQTHRCIERAERENRERLAGEREKLEGELTVIKTSAARLLQNETSFAREELERLEGQRGEMETNLRAVAAELDDLANHPATLTDVSHELSTLDNIWEHLFPAERERIMKLLVEGVTVFEDRIEVAVKTEGLRAVADEMHIQAESERPVERTHSVRQTEKANPGLLKSQTTRIDLAVPRMVERDNKPVLVIPMQLKRRGGRKEIILPQCFAEKPGLHDSPVQKPLVLALARAHQWKEHLESGRFATLGALADAVRLDRAYVGRVLNLTLLAPDIVVAILDGRESSGLSLEKIVRPMPGEWAEQRALLG

SEQ ID NO: 4940 - protein, 530 aa, unidentified
  source 1..530: note = uncultivated organism
MSSQSKTDGSNALKERRIIVIEATQKQEQKKLRVAGYARVSSDSGDQLNSFAAQNTYFTKLIENNDQWEMVDVYADEGISGRSAEKRGDFQRMIADCERGKIDRIITKSISRFARNAKECLTIIRHLKSIGVSIYFEEQNIDTSIVTGEMLTAVFAGLAQAESESIGKNMRWSYEKRMASGEFNTCKSPLGYRMVKGQLEIDEDEAAIVRMIFRDYLSGKSCEAIGAKLREMGVQSRDGKNAWRPTAISYILSNERYIGNALLQKRYTTESFPPKRKQNRGEMPQYYVEGSNPPIVDEQTFAAANALLTSRSEKVSRKRNESPFTQRIRCSQCGALARRKNESGKAIWVCYTHSRNAALCPIGAVPEREIKNAFLRLYFKLKLDNMCLLRELEKDLTQLRNRKMLWSVDVIELNKRISDIAEQDQQLSELNSLGLADPDIYISQKNELAEQMRQAKLEKERLMSAKDDDTLKETKRIIEALEDNPKHLAEFDDGIFKEMVANIIIEDNTHLRFQLRNGLELQETIERAVR

SEQ ID NO: 4941 - protein, 532 aa, unidentified
  source 1..532: note = uncultivated organism
MTRVCLYTRISTDEENQPTSLASQHERLEAFCEVQEDWRIIAHHEDRATGTKLDRPGLQAALDLARQGRIDQLLVYRIDRLSRKVRQLASIAEELAKLDVTLRSATEPFDTGSAAGRMMLQMLGVFAEFEHATIVDRVTSGIERRAREGRWPNGRIPFGYARNEQKQLIPDERTAPIIRRIFKLYAAGRLGAAAIAWRLDAEQAPAPPRGWQPAVVLWILANEAYVGRVHWRDQSFPGLHEPLIDGDIFERAQALLKERGGDWTHRAARAEFLLSGLLRCGRCRRAYVGMSAKGNGGTYHYYACSGRQKLGRKGCDGQRLSKEKLEAAILSQLTEIYRDGGLIREAIEQAAASRDSDHATLEERRASLAKEIGRAERAIERYQEAFETGNLDPTRFNERLGALDVRLDALRGQDQALARELSADVPATPDKAALRAAADHLGRVIGAGDPDKAKALLRILVAELRVNSRSEVLPTYRVGAPVVCAQTSSVELAGIEPRRQGRRSGRSPRRRAIAAATSSERSRAECTGVDPS

SEQ ID NO: 4942 - protein, 753 aa, unidentified
  source 1..753: note = uncultivated organism
MKNERKIAIYARKSKLTETGKSIDNQITKCKNSAYDKFKVTDDDIIIYHDDGKSGFYSDRPEYMRMLKDIEQGRIKAVICYKFDRISRKTIDLLNLVERLKAKKIALVSCSDEIDTSNPMGKILMSMLAVIAEFERDIIAERISDNLYELAKEGRWLGGTTPTGFYSKKEVIQLHGRKSTVNHLEIIPKELIIVKKLFGVFLEKRSIQGVVRYTRQSNILTKTGKKHTRVSIKNILANPVYAIADEDIYNYYTQNNIKLYAEKDDFNGINGLMVYNKTEQLKELKDDSYALNPKYVHKKTLKKCEEWVISVGKHKGIIQGRDWIMVQEILTENKSSYSRPNTKTESLLSGLIACPVCGKNLYTHKESNRFEENGEPRFLYKCSSRKEESTACTYKPIRGNLLDKFILDTLCKIGNTNSDEYYKALENEIKRSSFDVLKEETENLKTSIKRLKTDIEVQTQNLRFATDTTRSFILSDIEKMLQDLKTAENQLKVLEENKSSNVTTIDGLNKARELINSFESLIDVMTYEEKLELVRLVIAKIYVVNKDYITDTDGNPIANDEVHIFLKGSPDEDYTKFFKKNNPIKQNIENAEAQSLNGVEFLFCRNSDNMLIPLIHITVPTKELSENPTVGEKIRFYRFKQNLTQEKLANMLKINKSTMLRYETDDFTLSLEMVNNIAQILNIPANFLYDDYYLFLAYPASKKIKEYREKNNLTQKALADKLDVHFKTIQYWENNKHIIDRQYYEIIKKIGLK

SEQ ID NO: 4943 - protein, 573 aa, unidentified
  source 1..573: note = uncultivated organism
MAAMRDSARRTIRCAIYTRKSSEEGLDQEFNSLDAQFEACAAYIASQKAEGWKLLPQRYDDGGISGGTLDRPAIQRLVTDVEAGKVDMIVVYKIDRLTRSLADFSRLIDRLDAVDCSFVSVTQAFNTSTSMGRLTLNVLLSFAQFEREVTSERIRDKIAASKKKGMWMGGMVPTGYDTDPNPGSRGLVINPREAENVRALFELYDEYECLSTVAARARAQGIRSKDRTFASGKAYGGAVLSHGSIHNMLTNPIYVGRIRHKLEVYDGLHEAIIDEGLWTRVQEKLREHAARPRVRDRVTRALKQPDQKSPLAGKLMDETGDRLTPSHSTRKTEGGHKRIRYYVSRRLMRGAADDPSGWRLPALKLERAVCGAIINHLDEAGEKLFRDPDPVAVYKAQHALGDLRTRLETHDGETLRDIVGLVRVAPTRLRIELDPGRIADALDLSPDGLADDQLAIETGFELRRRGVEVKIVTGQFERAPDQTLINAIARAHQWLAEARRGVSLAAIGRRHGWTDSPVRQRIRLAFLSPDITRAILEGRQPPELTLQFLLTNPVPLDWDAQAQALGFADQKFP

SEQ ID NO: 4944 - protein, 574 aa, unidentified
  source 1..574: note = uncultivated organism
MQPSNAKVAIYCRVSTLHQVDKDSLPMQRKDLTAYAQLILHTTDYTIFEDAGYSGKNTERPEFQRMMRMIRAGAFTHLLVWKIDRISRNLLDFATMYAELKKLGVTFVSRNEQFDTSTAMGEAMLKIILVFAELERNMTSERVTATMISRANAGKWNGGRIPFGYDYDFETMQFSINDQEAELVRRIHDDYERKKSLLIVARQLNHEGYTTRAGGLWNPVSLRIILVNKFYVGDYVYNRLKGGTGNRADQKDESEWVTIPDHHSAIISRDQKERIITLLHQNNRFDVQRRKSNVHGTVHIFAGLLFCGNCGEMFLAHSSTPRKAGYRYSNYSCPMKRKSTDVCNSRGTSDPVVGDVVINYILNMLNAQKRISTITSTQQLERILLRGDTFSYIDHIAPAGLEDLFSVLQSGEISEDVYGAKLKLTPSSAKTSEITKLRREIDKIRKSLDRLRNLYLIDETMSEKNFILEKQKYTDKMSSLQAQLDALSDDHSVPGVSDEEFLEKASQFILSQQLANRNYISFNRLLLELDHSVLRNFFLSVIDRITITNGKVSNITFRNGLSHSFILKESEMTK

SEQ ID NO: 4945 - protein, 522 aa, unidentified
  source 1..522: note = uncultivated organism
MTEPRKTARCAIYTRKSTEHNLDLEFNSLDAQREACEAYIKSQAHEGWRLVPGEFNDGAYSGASLERPALQALISEIASGKIDVVVVYKVDRLTRSLSDFAKLVDLFDRHGVSFVSITQSFNTTTSMGRLTLNVLLSFAQFEREVSGERIRDKIAASKRRGLWMGGPVPLGFASVAKKLVIVEEDAETIRTIFRRYLELGSILDLASDLESQGLRTKKRAWSNDRTIGGVRFRTGPLAYLLKNRVYIGEVVHQGKIFQGDHAAIIDRDQFDAVQEKLKSGAVKRRLKLKGSPSQLFGKIYDDRGNRMTHSHTVKKGVRYRYYVSTAALKKQPEKAGSVTRVPAAEIEKLVAEAIQNRHDAIAGVGQLDRVVVTADAIELYLATSIDDDGEATNMVLSVPWLRPAFVAHKGIAHQPPTEASSEPCSELLAAIAKSRYWLEDLIADRTTIAEVAKREGRGERHIRLLLPLASVAPAIVQALVIGRVPSGITITGLAQSLSNSWTEQMQIAGPTLLEKPGKTRKR

SEQ ID NO: 4946 - protein, 527 aa, unidentified
  source 1..527: note = uncultivated organism
MIATRTRRTTTQTERKPLKTIRCAIYTRKSTEDGLEQEFNSLDAQRDSAELYIESQKSEGWVCLPDRYDDGGYTGGNMDRPAVQRLMADVEAGKLDCIVVYKVDRLSRSLLDFAKLMETLERCKVSFVSVTQQFNTTHSMGRLTLNILLSFAQFEREISGERTRDKMAAAKRKGKWVGGRPILGYDVDPKGGRLLVNPVEAQRVQAVFDLYLKHGALLATVRELNARGWTTKHWTTRKGKESGGQPFTKNRLYRLLGSVLYLGKVTYRDEVHQGEHPAIVNAETWQQTQELLRRNGSEGGRRQRNKYGALLRGLLVCEPCRSAMVHTYTAKGNRRYRYYVCTNAQQKGWAACPTKSVPAAEMERFVIEHLRRVGADDDLVARTVQEVSRQVREATDSLDAERRSLERELRGLHEEVKSVVGQGASDGARLASLEERIQHVERRATTVREEMAACQSKLVTEKEMIDALRRFDPVWDYLKPSERARLVELLVERVGYDGADGTVAITFRAAGIRTFAQEAANESHGSK

SEQ ID NO: 4947 - protein, 507 aa, unidentified
  source 1..507: note = uncultivated organism
MAEITVIPAKERTAETVRTAAYARVSSDSQDQLNSFAAQIRYYTELLQNSTDTVFVDIYADQGITGTSTTKRPEFKRLMNDCRKGKIDRVLTKSISRFGRNTPECLEAVRELKALGISVYFEKEDIDTAEVSTEMMLAIYSQFAQEESMSISRNCRMGVHKRMMDGTYKTASTPFGYDYVDGKLQINPGKAKIVKQIFTWYVSGIGMNEIAARLNMLKVRDETWRHGTIRCILTNEKYIGDTLLQKHFSTDTLPFRSVRNRGEKEQYYVSGTHKPIIEKSVFDSARKMLAERDKPSGFEKERSPFSRRIVCGNCGSTFKRKKKNSCVRWVCRKHDETADNCKIRQIRETEFQAAFVKLWNKLQAHYKAILTPMLRQIEALYEREKSGNTQLAALRKEIAEIKQQIHMMTVLNSQGTLDGAYFKERTQELDRKLLTAQKQLRASLNDEQSERLDELRKLIGIFEKSDSITEFNDIKFGQIVNKITVISETEIRFDLIGGIGFTERIAR

SEQ ID NO: 4948 - protein, 541 aa, unidentified
  source 1..541: note = uncultivated organism
MSSSRRRSGPANGRQAEPKRRCAVYTRKSTSIGLDQEFNSLDAQREACEQYIAARAHEGWQLLPERYDDGGFTGANLERPAFQRLLADMEAGKVDVVVVYKVDRLSRSLLDFAKVMDRFNRSNTAFVSVTQNFSTADAMGRLTLNMLMSFAEFERSMIAERTRDKIVAARRKGLWTGGPVPLGYDVVEKRLVINELEAVVVRELFDLYEQHRSALVVARLLDQAGRTTKRHRAAKSGNLREGKRWTKDAVLRVLRNPVYAGLMPCHGELHEGEQTSIIERERWQRAVDLLDGKTGPRRPGARNPAYLLRGILRCARCGMAMTPASTRKKDGTEYRYYRCVTKDKKGRGACTARPLPAPAIEGFVVERLREATASGELAKEVRDKLAAKLEARRGSLLTERRDLPTRIASLSAEGRRLVETLGQAKGTAHRLLEERIEELGAKLAASELRLAEVERALTNLDRTELEIRWVAETLARFDAVWDVMTPENQVRLVQAVVERVEVDEPSGRVSAVLADLGAEGDDEPDDAPPQAPEQPAMEATP

SEQ ID NO: 4949 - protein, 512 aa, unidentified
  source 1..512: note = uncultivated organism
MNVAIYSRKSKITDKGESIENQIELCTKYIESHYNNVDNVYKYEDEGFSGKNIDRPQFQSMMFAAKHKKFSVIICYRLDRISRNITDFSKLVDELKKLGIDFVSIKEQFDTTSPMGRAMMFISSVFAQLERETTAERIRDNMLELSKTGRWLGGMTPLGFNVRKTVENGKIVSYLEINNGEMETVKLIYDKYLEYESLFGVNKYMLQNNVQGRKWTTSKISFILKSPYYVKSDGLLFKYLKNKDINVSGAPNGNGMLPYNTHYQDRKFKPIDEWIYVVGQHKGIIDSITWIKIQEKLSKNKSIRNLGKTNKCLLTGLLRCGNCGALMVMLYGSKRKDGTRPIYYKCGAKQASGSQNCNIENIKADVIDNMVIEQLKLLELDKENISIYNNPSNSKMQLEALHGQLKKNEKMVNNLVEKLAHIEGVAADFLINKINDLAKENKETKNMIAAVEIEEDKESVQNINKDIIISTYKKFIDTLDASSMEDKQKLLKGFVKEIRWYGKDKDIDIELL

SEQ ID NO: 4950 - protein, 586 aa, unidentified
  source 1..586: note = uncultivated organism
MTIRCAIYTRKSSEEGLDMAFNSLEAQREAGVDYVKSQRHEGWTAIDTRYDAGGYSGGTTDRPGLKKLMSDIEHGRVDVVLVYKVDRLSRSLADFARLMQAFDDHKVSFVSVTQQFNTTTSMGRLTLNMLLSFAQFEREVAGERIRDKIAATKRKGVWVCGQPPIGYRLEGTGDARGLRVVPEEAAIVREIFAGYLELGSPVAISAKLRERGCTTKRWTSSKGVTHGGRLIDAAYVYKVLNNPIYLGQITHTRTGKTELYPGLHEAIIDRATWDLVQTKMVTVKRELLHRWPSEHLLKGKIRTFEDHAMSPSAVTRKAPSPNDKAAKPARRNIPYYISQKAMKLGYKTCPVRLVNAAAMDHLARTVLMHHLAAAHGVTLDYLEDPERDAWLRRVLTVLIVAPDILTFKLDDAAVSECTVTVAGPHRAGNRRTSPTPPVTEPDPFSSCPYPFKVETREGRTALVVATALASLSRKPQCVLPNGDLSTPALGPTTMAAQARTIRAIGLAFSWRRELIDKGVSVESIAARANISVAHAHRLLSLTHLGPQILKMILSPATRTPTRLADALTLSKTLSWQRQTQDHVQKR

SEQ ID NO: 4951 - protein, 523 aa, unidentified
  source 1..523: note = uncultivated organism
MSRRDRLKADAQVAALRQLRCAIYTRVSSDERLNQEFSSLDNQRESCEAYVASQRQEGWVTIAGRYDDGGFSGGTMERPGLKRLLEDINAGKIDVVVVYKVDRLSRSLPDFVRFIECCEAHGVAFVSVTQHFKTDTPMGRLTLNVLLSFAQFEREVISERIRDKVAASKRRGIWMGGCPPLGYLVKDRKLIVIPEEADLVRHVFRRFVSLGSCTVLVQELAAQGHKSKSWVTQEGKHRVGRTFSKGTLYKLLNNRTYLGEVAHKGQIYAGEHEAIVPRDLWDKAHAILAENYRTRANRTRAKTPALLRGVIRCAAHDCAMAPTFTRKRGRLYRYYLCTHASKHGYSSCTNPTVAAGEIERAVIDRLRGIFSSPRVLARSFRAIQVQQQAAIEHSKAEHERLTRHVKQLRDAARRALAAEVAPDGAVVRHLGEELSAAEEQLAKATSELTALTSISVTERDVCEAFQSIDPIWAELFPAEQERVIRMLVEAILVGPDGLELHLRTDGLAEFMAEVGTGIERRVA

SEQ ID NO: 4952 - protein, 536 aa, unidentified
  source 1..536: note = uncultivated organism
MTQAKTRFRCAIYTRKSTEEGLDQQFNSLDAQRAACEAYVLSQAGEGWEALPDLYDDGGWSGGNMERPAIKRLLEDIRQGRIDIVVVYKVDRLTRSLMDFARIVETFDAHEVSFVSVTQSFNTTNSMGRLTLNVLLSFAQFEREVTGERIRDKIAASKARGIFMGGNIALGYDLGDRVLLINEAEAQTVRHIYTRYLELRSVVTLAEELDRAGIRSKRWTSRKGTQLGGLRFTCGALAHILNNRLYLGEVTHQGKVYDGEHKAIIERELFDKVQAQLQAHRIRRASRKDRAAACPLTGKLFDQDGNAMRPTFGYGRGRKIYRYYVSEVLLPNGRIGHAHNAAGERISAERLERLIVDRLQSLLPNGAASADIVSAIERVEYNPQRLTIDLDARGLGTGDIDLLEAQATMIDPKATLDGDRLTLKIDARAVKVGKTLKAKGHLVDQSHRKSVFADIVRAAHRKLNELNASPLNLEVHSQMTVPNNEWSRQRIAVGLLAPDIQKALLLGHVPKSLEPELLLSGGLPLDWEAQRALFGL

SEQ ID NO: 4953 - protein, 611 aa, unidentified
  source 1..611: note = uncultivated organism
MDLLAGLRLSKHGGELDPSTSPQSQRDDIKAYAAKIPARITIWAEDLDVSAISLDPFERPGIGPWLTPERQHHYQGIIWAHADRGVRSMKDLAALSNFAIKHRKIIYFVNGISGAPFILDYRNGPEDPMVQFMAYMFAFFGEMEANRILSRNRKTKKYLVKNGFWTGGKHLFYLIPTKADGENNQRLIRNPELAPYAEEMIRKAMNKVSAEDIAVWLNSEGIPAPKEAEMEKSKARDKSQARPVSTAPVSGIVTAIEKDHLVITDPTGEAHSVEKSPRGGRWAVDHGEPVAQGERLIHKMVWTGGTVKRTLRSRTLFGETPYDDKTVRDANAAPVLRADPIITREQWERLQHALDGVNRRKYRGRQDSLLLDVGYCAHCNSPLYAFRTTRVKTGGEYGYYRCAKTTIPKARKVIEGTCIAKYIRINKLDLKVEDLLLDIIGPHDRLARMFVPGVSFEAELLETKSQLRDTIKMSAGKSPAVQEVYTEEIEALEARIEELSSAPTRDAGYETRSVGTTYAEDWTKQGTLDQRMMLIEAGIKVYAATSEEQPDWTKVSMSPETDIIRFSYDRGMWMAMAIPKDIAPRALGRNVDLGFTDVPLGGLSQDLSVPA

SEQ ID NO: 4954 - protein, 562 aa, unidentified
  source 1..562: note = uncultivated organism
MERPKSPIRRRAIYTRKSSEEGLEQDFNSLHAQREACEAFVKSQAGEGWRLVKTAYDDGGLSGGTMERPALQRLLADISRGLIDVVVVYKVDRLTRSLADFAKMVEVFDARGVSFVAVTQQFNTTTSMGRLTLNVLLSFAQFEREVTGERIRDKIAASKQKGMWMGGLVPLGYDVHERRLIVNIAEAETVREIFRRYLELGSVRLLMEDLNRRCIRSKVRIAKNGKRSGGNSFFRGALYALLSNPIYLGQIRHKGIRHPGLHEAIVDRELWDKTELLLRSRAMRRVPRAMKSAASPLTGKLFDESGLSLTPSHAVKGERRYRYYMSRSLNKGTANSTGPGWRLPAPEIERTVAAAVCNILNDQGAIATAAHAIELPDHRLPSIFLEAEAWSKRLRSEVDAEAALYALVDRVDLIDTGIRVSLKLPNSITEEQHGANATELTITRVFPMQIRRRGFEMRLIIEGSGALAPRADLALLKAVARAHQWSDDLLAGRAQSVAEIAERQGAGARYVRRLLRLAFLAPQIVDAIAAGRQPPELTAEALAERIELPLLWTAQEQAVGIS

SEQ ID NO: 4955 - protein, 603 aa, unidentified
  source 1..603: note = uncultivated organism
MDNERKTAGVYIRVSTEDQAREGFSLGEQKEKLLALCKFKELEVYKVYEDAGVSAKDMEHRPQFQQMLQDMKDGKINYIVAYKLDRITRSVRDLEELITLLEQYGCYLLCDRDDVNTSTANGKFFVRMLTVLSQLEIEIVSERTKFGLNGAIKSGHIPGQRPFGYTKSEDKKMIVDNATRPYVEKIFDMYLEGKSFQQIANYFKENNIYPNKCWKDTTIQKIIDNKIYMGDYEQYKRIGKKANLEPIIYMNVVEPIISRAKWEECQRQKERNQRSYTRDRIYTFFQRLKCPKCGRIMKCKGSGGKKRNYMYYTCEKCHINFNEAHVEQLLENFIYDLLEYDMAVKKFFLPILEDKNSNINTKKLDKEIQELENQRARIKDAYIKGIVKLNDFEADYKLIEDKLANLETQKLQLINLETFNYSPHELLAERDLEREKMIRLDTLNGLLKSKWNGMSKEEKQEFIAKFIDTIELKKDNKGNLLLEKINFRSGLIKQLLKFYNAGIFDVAIPVDIGGKEEYITGGVMNDEQLDKYLTKMNSYFETSFYEMYQSEDSTTDNIVYEYQPKKNEKIIRFVALRNTPSFPIQKEDVMDKYGIISYKTNQF

SEQ ID NO: 4956 - protein, 576 aa, unidentified
  source 1..576: note = uncultivated organism
MRKNEDCIAIYSRKSKFTGKGESIGNQVELCREYIRIHYGEGALENIAVYEDEGFSGGNLNRPDFKRMMDDAKNHRFKAIIVYRLDRISRNISDFAGLIESLSRMDIAFVSIKEQFDTASPMGRAMMYITSVFSQLERETIAERIRDNMRELAKTGRWLGGITPTGYKSAAVETVTVDGKTKKCCKLELVPEEAEIIKTIFDLYIENDSQTITEAELIKRGIRTKNGNYFTRFSIKGILQNPVYMIADEDAYNYFVKAESDLFAGKEDFDGVHGIMAYNRTNQEKGKAVEHLPTEEWIVAVGKHHGLIPGKVWVKVQKSLERNKSKAYRKPRNNEALLTGLLFCSCGSRMYPKMGKRKNADGETVFTYVCKLKERSQRAACNLKNANGNALDAAIIEQIKMLAEDDSTFIRQLEQGRKFYTGSRSDYEEQLCDLHREKADLEKKITVLIDSLADVSDSIARNQVAKRIEQLGKEINTTENKINELEGLTSQQELTDMEFDIFRQLLTNFRNGIDGMTVEQKRTAIRTLVRKVVWDGANAHVILFGVQDDEIDFPFEIDGADDLAEDSKTSLCENSK

SEQ ID NO: 4957 - protein, 586 aa, unidentified
  source 1..586: note = uncultivated organism
MQEIKKRAAIYIRVSSDEAKKEGYSPETQEEKLREFVIANNYELNEKYVYNVDLGCSGSTDKRPGLQKLLKDAKNKEFDIILVYRQDRFFRNLRLLLNTVADLRELGIEFKSLTEPFDTTTPTGRAMFANAGVFAEWMREVGLESRDEGMKKAMRDGKWLGGTPPYGYRFNRETQKLERDEEESKIVKMIFEWVVLEKLSKYKVQQRLNERKIPTKWARLKRDKPVNSPEWWNARTVERILKYETYTGTFYYRKYKCLQGMRKELRPREEWITIETPAIISKELFEKAQEQLKTNQMLSPRRTKRIYTFQHKIYCGLDGFPYHSMFRYPAHPHWNGAKVYFCGGKIKHCHEKLCSSKYITESRLLPTVWQNLKDLLANPEIVMENFQEYHDRDSKSKSIEEELERANKVLLDCQRQKKKAFKIHLEGYVDEESYKTEFEELKKKELGYKKEIERLSQFLLSEQEKENRALSVRELYKRLKDSIDNATYEIQCWILQKLVEKIIITGDSLGIEYGLPFKENLQEMWKITPALEFYDDKRRMDRAQKYLGDSCQIKRLAASRQRQANKNSFWRRRYYSRQRLLPPRTY

SEQ ID NO: 4958 - protein, 529 aa, unidentified
  source 1..529: note = uncultivated organism
MEENKEVKPLRCAIYTRKSTTEGLDSDFTTLDNQRESAESYIKSQHNQGWVLLKDLYNDGGFTGANTDRPALQKLLQDIREKKIDCVVVYKVDRLSRSLSDFVKLLQFFEEQQVTFVSITQHFNTNTSMGRLTLNILLSFAQFEREMISERVKDKMGAARKKGRWVGGLPGLGYEIDKPTKKLVINPKEATLVRRIFQLYLEGNSLLKIAQKLNAEGLRTKVYPGRKNNSGGVLFRNTNIQLILRNPTYMGKIQYEGKLYQGLHEPIVSEEIFKKVQEALKANFRARGISTNRKFPGLLTGLLRCACCNTSLGHTYARGRNKNFNYRYYVCLYSIKQNRAECPSKSLIASVTEDKFIGFLIRLTKDKRLMDESWATLPLEKQSVILKELVKGIEYDGNKGKIYIELAGTFEKHEFDLPLDELKKRSPDFTKIAFNHEPLIRKQLLLAHQIQGMLADGRAKDLKQIAGWTGISLFRLYQILNLLYLCPKIQEDILTAPNSRLSEITERNIRHISNEIDWQKQAALWNQPH

SEQ ID NO: 4959 - protein, 559 aa, unidentified
  source 1..559: note = uncultivated organism
MPRVSKRTKKAKTQPQIKYYRTYIYLRLSEKDGGHGRRDSIYIQKQICVDFAKKHPEMLIMKVYTDNGVTGTTFERKAFEELMTDVRAGKVDCIIVKDFSRFGRDALDAVDLIDVIFPTLDVRFISVLDEYDSENPACVQDRVTNILKHFMNDYYAREVSSKLIQAHKISREKGEYWGGRPPYGYERAEDNNKKLVPEKTERKIVQKIFYWYVFEDMSSYDMARELNGGGIPSPTESYEIRRFGKVKRKKRIYWGADTIQRILQNPLYIGAAVSGKTKQMLCENLPFQIIPKEQWEIQENVWEPLIERTVFEQAQQILKERWKDNLEIWAASIAGKGSANGPLLGRIYCGCCGKRMKRSRTGRNGKQERMSYRCSTAEITDETECLKYINEKCVFQAVRGALQYQMKLASDYHTKYGMDFYRKLEKETSLIIKKSKGDYEKYEGKLEQLFEHYATGLIDREEYLEFKETYLSEQEQAHKKLKEKQIYYQNILERLMAKIDWADELIKYQGVTEITREIVERFIEKVVVKSATEITVYFWFGDIFEQEVPDMERGLLDAV

SEQ ID NO: 4960 - protein, 594 aa, unidentified
  source 1..594: note = uncultivated organism
MDKVFAIYSRKSKFTGKGESVENQIEMCRDYLKMHFGEEEAEMAIVFEDEGFSGKNLDRPQFKEMMKAIKDKKICAVVCYRLDRISRNIGDFATLITELNAIEVGFISIREQFDTNSPMGRAMMYIASVFSQLERETIAERIRDNLHELAKTGRWLGGTTPTGYVSQGEETVNIDGKKKKAFHLAEKEDEKELVKLIFSKFKETDSLTATEAYLLEHNFKTKNGKDFTRFSVKSILVNPVYMIADNDAFKYLTDCGVELYSDESEFDGVHGIMAYNRTHQEQGKATKIKPMDEWIVSVGKHPGFISGADFVAVQNMLQRNQSKAYRKERSHTALLSGILKCGNCGEFMRPHMTQRVNKDNELTYYYSCNLKLRSKKSRCDGKNANGNEIDKKVIEAIKALDLNGDDYFTSLKKTLSQNEIEKNDSESEASKLQEEIEQAEKDIQKLVDSLTGSGGAEKYILQRIDELGKKANNYKARLETLQSDNRELFDRINAVDLMKDLIKHFANNVDSLSIEQKRLAIRTFVKEVIWDGEYAHIVFFGGEYDDSLSKIVKTPENPDDNEDFYPSGTHRKRAFNALPSNEKTRGRRFPRRHY

SEQ ID NO: 4961 - protein, 507 aa, unidentified
  source 1..507: note = uncultivated organism
MATYTRISTDEEHQPFSLEAQAQRLGSYVQSQDSWQLVHRFTDQMSGSKLERPGLQQALAFGRAKRYDMLLVYRVDRLSRSVRGLAQILEELDHAGVNFRSATEPFDTGTAAGRMMVQMLGVFAEFERATLIDRVVAGMERKAARGEWLGGPPPYGYSLNREAFLLEPNEIEAPVIRLIFDLYTRKRLGARGVASYLSRHGYRSRPGQFWSHVSVLKVLRSPTYVGKIAFRGSQYDAPHAALVETDTFAKAQVLLQERGEDASRRRSNTTDFLLSGLVVCATCGRRYIGTAAHGRNARYRYYTCFSRNRHGKEGCRADVLRADLLDQAVLDSLLTTYADTELVGAAIERWRSRASQEVPERAAEIRRLESEISGTESALSRYFTAFESGRLPETRFASRIQALETRLTELRANLVEQQDFARPVEVPSAASVRDAEQVVRHAMLNGTPGQRKALLKELIVEVRVESRDSIIPTFRLPTQPVRVTEAVVGRRGLEPRTSALSARRSAS

SEQ ID NO: 4962 - protein, 531 aa, unidentified
  source 1..531: note = uncultivated organism
MKAGSAKAVHCAIYTRVSTDQGLEQDFNSLDAQYDASQAYIRSQAHAGWTLLRAKYDDGGFSGGNTERPALQRLLEDVGAGKIDVIVVYKVDRLTRSLADFAKLVELFDKQNVSFVSVTQQFNTTTSMGRLTLNVLLSFAQFEREVTSERIRDKISASKRKGLWVGGMTPLGYDAKDRKITVNAAEAGRVRDIFRSYLKLGSLNLVMADLRKRSIVTKVRKLKSGENLGGIPFTRGSLAQLLRNRFYIGEVDFRGEVLKGEHPAILDRALFDAVQARLNEQVNNHKAKWMKSEALLTGRIFDDRGNRMTPSYARRGNVKYRYYLSSALLQGTAERAGSVRRVGATDVEALVIKSVREHLKPSQPTDDRSLINTWLARVEVQPKQLVIRLTEEPKATTNRKKTRANNALHVPWQRTPSTRRREILLPAGMPPQHARPIRSETRAILVAAIARGRRWLDELTTDPSVTTEGIAKRENCSIRKVNMTISLAFLAPDLVKAAINGRLPRGMGVARLTDLPPEWSRQHEMLRLPSH

SEQ ID NO: 4963 - protein, 520 aa, unidentified
  source 1..520: note = uncultivated organism
MKPPVKYCAIYTRKSTEEGLEQEFNTLDAQREACQAYIISQKAEGWSAVKTHYDDGGFSGGNMERPALKKLMDDIQAGKVHIVVVYKIDRLTRSLMDFAKLVEVFDRHGVTFVSITQSFNTTTSMGRLTLNVLLSFAQFEREVTGERIRDKISASKKKGMWMGGMIPFGYDCLEKKLLINQDDSKVVRLIFEKYLALGSVRHLKEYLDNSGILSKLRTSDKGKTWGGAKFSRGLLYKLLINPVYIRRIKHKDVVYDGQHEAILSLELWDQVQALMAQQAATARGTQKSRPIGNLLRGLLFDVAGNKYSPSFTNKGKRQYRYYVSQALLQDRPPPVGIVTRLSAHETETAVEAALKKELQTPDSVKILFALDSDEADSFFEKIIENHERLQMRHLVTKSFNKVVIDTDSVKILIDRRKLLAEVCHVLKLAMPQAAEDGTATITIPVEMIKPKTGCFIVEPKIRNNTNDPFDRTPQELKNWVRGVIWRDSHFKGMTIRQIAQEAGCSDSRVASLIAESFAAA

SEQ ID NO: 4964 - protein, 602 aa, unidentified
  source 1..602: note = uncultivated organism
MENLEIGQNKKRMLLLLRNSTKKQAEKKVAEDGKVEYDIPLQRSILRPWGEKLGYDIIGELVEGGVSGYKVSTDKRDKVTELKAKADRGEFDVLGIYMSDRLGRIADETPLIVSFLNARGIKVLSYTEGEISAQTHNDKLMTYIRFWQAEGESLKTSMRIKDANEKAVEQGKWRGGNPPYGYRTASRGTLNFKGRPIFDVEIDPQAADIVKKVFKMYQDHYSFKGIAKYLNDHNVPTKTGALWSARQVEDILKNKIYLGIYELGRRAKNIRTVSPIIEYLRFLPEQDFYAAQEIMKKNRKTIVGKRPTIRGSKLLTGLLYCECGKKFTSQTHTMVKQRENGTTWNYERTTYRCGAYRTPKEGICNRLPIKAEKLETAVIHDATNFLQSDDIEKLLRSYDDVMREKEYENNEQLSRLTREKNQKEKELQKLKDEVYKAIIGESQFSQSLLSELIQTKEQELAEFRKRYEDAQCRAEEIATILSAQRAVSSELEDWAVRFDMQDTMEKKTMLINLIDKIVVFDDFTEITYNLQFDNLADRVYNSGDYFGNPHTENSNVISADFFSSQFVQRERQTELTAPYLHFDVQNEMQARTWGLRTPTRLQ

SEQ ID NO: 4965 - protein, 510 aa, unidentified
  source 1..510: note = uncultivated organism
MINNKLRNAGLYIRVSTERQAQEGYSVAAQKENLTNFVKDQGWNIFDIYADEGISGKNIQDRPDVKRLIQDIKDKKVDVVVLYKFDRLTRDMSDTEDIIKLIQECGIEVYTISGGTVDVSTATGRFMIRINGAVAQLEREQTVERVKTAFVQKVKEGKSLCSSTPSYGYNRPKYQEIQTINKDEAIVVKRIFKMYVEGTTFTEIANILNAEGIPTKKKGKIQKRRFKNETYVINSVWQAKTIRLILSNVNYIGGVRYGINYKNGFVELNGLHKPIISKKLWDKAQERLSKIKSVSRTNHPKDDVYYCGKLVCGICGQKLTTGRTVKAKKDGSTITHFGYRCVNREKGVCTALGMSHKKVEEVFLNYIDNIENLSEIEHIEPLEQESDDFINIEQLKKRLVEISNKKKEVLHLFMTNDIDHTGMKYMISELDKTNTVLSNELAALEKQYQPPSQIDKNLIASTIKEHWEYLSKRERLEFLNQFVESITIVNRSTDKVNGRPEIIEVKFYDE

SEQ ID NO: 4966 - protein, 558 aa, unidentified
  source 1..558: note = uncultivated organism
MTVRCAIYTRKSSEEGLEQDFNSLDAQREACEAFIQSQKGLGWVVQKKRYDDGGISGGTMERPALKSLLADIEMGKADLVVVYKVDRLTRSLMDFSKIIETFDARNVSFVSVTQQFNTANSMGRLTLNVLLSFAQFEREVTAERIRDKIAASKKKGIWMGGPLPLGYDVKDRKLLINQTEAKTVRQIFRLYTELGTVRRVKEKLDRLGIVTKCRVQKNGKRTGGKLFSRGNLYQFLSNPIYVGRIPHKGETYLGEHDAIIDQQVWETTQSQLAGNATPRTQPRNFNGLFLLTGKIYDENGEPLYQSQAHKRGKRYCYYISKHLMHGAHENSDGWRVPAKAMEDTVMVPLLDLLRNQSRLMDMMCLKDPSVSLLTKLKTQAVSLADQLEESKPEDKRDILQSVIQHIELGPKSITLTLDKSRLADSLHIPYPDDLSSVSINVPVRMQRRGVETKLIIDSPNATTRNVDIDLCYLIAQAHNWFEQLITGEASTVREIAAREQVNEHEITRVLHLAFLSPKIVEDILEGRQADGVSVYPLRRLSSIPFDWAKQLELLENLQ

SEQ ID NO: 4967 - protein, 563 aa, unidentified
  source 1..563: note = uncultivated organism
MSNKIKKIYHAAIYVRLSKEDGDVSNAVKAESNSISNQKNLIRDFLKDKEDIEVVSERVDDGYSGSNFERPAFKLMLEDIKKSIVDCVIVKDLSRFGREYIDSGRYIERLFPALGVRFIAINDNYDSLNGKEQADEIIIPFKNLINDAYCRDISVKIRSHLEVKRKNGEFIGSFAPYGYQKSENDRNSLIIDPIAAGIVKDIFRMKLHGLSQDAIANRLNDIGVLSPAEYKSATGSNYQTSFKTSDKAVWSSVTVRRILENELYIGNLVQGRQTTPNHKVKKTVLKPEKDWVRIEKNHEAIISDRDFSIVQRLLGMDTRISPKQSEVYPLAGLIVCADCGAAMVRKNAYAGGKKYQYYVCSRNKETKECSNHRIAVDRLEETVLQLLRVQISNILDLKQVMEKVSTIPFQELDIRELEKRIEQKETEIGRCMELRNMLYEDMKDGIVSKEDYMELHEAYTQKRNLAEDAVRKMKQEIKDILASNTDKYKWLDYFAEHQDIDRLTRNVAVELIDRVKVIDKGSIEVVFSFGDCYKEIIDNLQKAGCETVRDEQGRVRFEWKEAV

SEQ ID NO: 4968 - protein, 564 aa, unidentified
  source 1..564: note = uncultivated organism
MNKPRIRCAIYTRKSSDEGLDQDFNSLDAQAEACAAYIASQRHEGWVAGKTRYDDGGISGGTLERPGRQRLLADIDAGLVQMVVVYKIDRLTRSLADFAKLVERFDAAGCSFVSVTQAFNTASSMGRLTLNVLLSFAQFEREVTAERIRDKIAASKKKGLWMGGLPPLGYDPHPDPKTRGLVVNAEEAETVRTIFALYDDLGCLNAVMRKASDLSLRSKLHFFKSGRVQGGNPLSRGQIYALLRNPIYIGKIRHKTRVWDGLHAPIVDEALWDRVQSKLQSASARPRGQRGTGDHPGATRVAPLTGKLHDDTGDRLTPTHTPRHGRQIRYYVSNRLISGGTDPGGWRLPAQALEQAVADVISRHLVALARDHRICAEADLQQGDAVRDRVRHLASQLAAGTLGLITGLLAEGHVGKNRIVLSLQAKALAKALDLHPDALDPSALSIEAPFALRRRGVEGKIIVGDRAPQPDRTLLRALSQAHAWVADLRGGKPLGEIAAATRHSESYIRTRAQVAFLAPAIQSAILEGRQPADLTLERIIRKPVPLDWDAQARMYGFTQDPRHP

SEQ ID NO: 4969 - protein, 516 aa, unidentified
  source 1..516: note = uncultivated organism
MNIAAIYCRLSDEDRNKSSKTEDSESIQNQKKLLLEFARENKWEVYRIYCDDDYSGLDSERPEFNQLISDAKAGKFNIILCKSQSRFTRDMEMVEKYLHNKFVEWGIRFVGLTDNADTLEKGNKKSRQINGLVNEWYCEDISENIKAVFEVKRKRGEFIGSFAPYGYKKDPQNKNKFLLDLEAAQIVKMIFSWYLEGYGVQHIAFMLNQKGIPNPTKYKELSGLKYKNTFKTDEYGLWNKTTIRRILRNEIYIGHMIQGKRKKVSYKSKKIIANSSDKWVKVENTHQPIVDNDTFLAVQRRINGKVKSTGNGKTHLFASKVKCKDCGSTMLKVTTGKYSYLRCKLYSVSAGNQMCTSHLIRLDELTDLIKDKIKEYFNRYIDVHRVVERLEKEQQTSQSHSIHNNELEKIKNNILEKKRIIKSLYVDKIKGIIDEGQFIEFNKDFSEEIGRLLERQKIVKKEMESHKNDKDNYEERVKNYLNFDKLEQNVVNSMIDHIEIGEKTSKGQKVKIYWQF

SEQ ID NO: 4970 - protein, 516 aa, unidentified
  source 1..516: note = uncultivated organism
MNRAVIYARYSAGSGQTDQSIEGQVRECKAYIKKNSLQLAGIYADRHITGRTDRRPEFQRMINDAEAGAFDVLVVYTTDRFSRDKYDSAIYKRKLKDYGVQIRYAAENIPEGPEGILLEALMEGWAQYYSEELSRKILRGMHDTALKKKSTGSKAPIGYRVGQDQQYEIDPDVAPHVVHAFEMFLEGATFADISRYFGEHDIRTGRGNLINGNAVRKLLTSKRYIGEYKWSDVVIEGGMPAIVPEDLFYMVQKKIEKNHKPHAKSAEYHLSGKLFCGVCGSNYKGVSGTSKTGQKHYYYKCTGKDCSVPNLPAREFEAYIASEVSNALRDPESLDMIAEKLCAYQKKTEQPNPATEDPQKRLAKVEKQLDALVYNLSQRPGSDALLNRLDELEAEREDLRAEIAISNGDYKQDPLQDPAALRDGILAFLNGFSFDDKEMTTERIIKGFVRKVVISNEAISIELNISGVEPLELSDIREFDLNSNWWSSLTSGRTLICGPAAVLVVPQMTTRKKPGA

SEQ ID NO: 4971 - protein, 540 aa, unidentified
  source 1..540: note = uncultivated organism
MSDKKIRCAIYTRKSTEEGLEQEFNSLQAQREACEAYIKSQKHEHWQLLPTEYDDGGYSGGNMERPALKRLLADVQNGLIDIIVVYKIDRLTRSLMDFSKIVEILDKHNASFVSITQHFNTTTSMGRLTLNMLLSFAQFEREVTGERIRDKISASKKKGMWMGGKPPLGYYRKDKKIYPDEEKSILINNIFKKYVELKSTTLLKEWLEEQGTKLSAGNLNCILRNKAYIGLVGHKGTWYPGEHQGIIPTELFEQAQAVMADNRINRQHYDPSKSLLSGKLYDDKDNAMSPSWSTGSSGKKYRYYVSQALIRKEPGKVGKVSKVSLPKLEQFIDNWFSEFLKDKNKIYPYIQKFGVSKQKEIIKRLPSYPITRDVEKELIKRVKLNPNKIEVTLYQEQVTELLNAIYENREMRQLKSEELKTENIYTEPYHIGTIANGEKIIIGQFVEPKKRPHIELIKILNQAYTWHQDVISGISTQDIAKRDKVCVQYVRRILNLSFLSPKIVRVILNGTQPADCTLQKLLSIKSSNWQEQTKFLLNNP

SEQ ID NO: 4972 - protein, 518 aa, unidentified
  source 1..518: note = uncultivated organism
MNALQPPQGKPALRDACARPGAKRVAIYTRQSVDRTSDSDFGSLEAQREAIEAYVKSQRHEGWVALPEIYADGGFSGASTDRPAFRRLMEDVEAGRVDVVAVYKIDRLSRSLMDFAGIMRTFEEHGVDFASITQQFSTGSSMGKLTLNILMSFAEFEREVISERTRDKIAASRRKGLWVGGHVPLGFQSRGGKLEIVPEEAERVREIFGLYLKLGTLAEVCRELNRRGWTTKKGAMWRKSTLSNHLKQKLYIGMVPYKEELHQGQHEAIVDSELFDAVQRQLKCHRQRGGARAKNKWAMLLKGLLVCGRCGARMMHTYSKKGERLYHYYLCPTHHTPGSARCEGYRVAARKIEAFVVARIREIGTHPGLVTATLEAAQTEAERAKPGLLAEHRKLQAEHRRIVTEREALLDALPNAGKAASTITHRIAETDERIRCVNARLVEVRGELAAMEAAQVEEEDVARAMTEFEGIWGELLPRERQRLLALVVEEIRYDADEGEVEIRYRPGGLRTLAQRRGA

SEQ ID NO: 4973 - protein, 526 aa, unidentified
  source 1..526: note = uncultivated organism
MYEEIKTAALYVRYSSSNQTEQSIEGQTRVCKDFCKNHNISIVETYADRATSASKDIEKRVEFLRMISDASKHNFDAVVVYKLDRFSRSRYDMATYKYKLKKAGVQLISATENISSDPEGIILESVLEGMAEFYSAELGQKINRGMRESAMKSQYIGGTPPLGYKIVNKRYEIDDTTAPIIREAFQLFLEGTTIAEICRIFNAKGYRTSLGKRFGRSSFAKIFRNEKYIGIYEHRDIRTEDAIPPIIDKETWEKTQMKLKDLKPAGTYKASQIYLLSGKLICGECGSTMTASKNSNRDGSCYSYYTCRGKKTARTDCHMKNLRKDWIEQIILKDALSMLTDENIDILAEKAVQLNQHELQTTTDIPAYKTRLQEINTSLENLMRAIETGNSPEILVKRISDLEHEKRVLEAELKQQSREVFDIDKPHIIHWLTSLKSGDIQDQSYQKTLIDLFIHKITVTLIPTANPNTPNFQLTITYTLTPLKPKTVAFEPPTSRLEVKSDCFIHVITVPYWHRDFKLPVTRQAL

SEQ ID NO: 4974 - protein, 729 aa, unidentified
  source 1..729: note = uncultivated organism
MPQPTSSGPLRAALYIRVSSEEQAKEGYSLIAQQEKLEEYARKNGCALEGDYLYIDDGYTGKNEHRPQLTRLFQDAERKTFEVVLVYRLDRFFRNVRLLLESVERLGQGGVGLKSITEPFDTSTPIGRYVLTNLGAVAELERAIILERKELGTAKAAQAGKWMGGTPPYGYTINRETKKLEIVPEEAEVVRMVYEWLIEEKQTLSQIQKRINAQKVPTKNDLLHRKKPTESRGWWRKATLGRFFTNEIYAGTFWFRKWKNPSRARVPANLRPKEDWVAIPTPAILTPERQEAARRRLKENRRNSPRRMALTYLFSKRLRCGLCGASMTAQSRQYKNRRERYYSCHKSWRQHAPVRCPQRLIAERRIEGPVWDTLARLLLQPEATLKELDDRRKEADPRPALREKQAQTERELERLEAKREKLLELYLEEAISKSAFVSRSREVDRDRATLVQRRQELAQRLAGEEDRSRLAQSIRERYDELGASVENADYETKRRMIQLLVERIVAREDRLEITCHLPHSSLEDAQAIPVALRPDRRVDCDAKQHFAFSVEPLPRRPVLLLSRDELSSVRRKQNLKFRLKRNLFHRDGRLKARLGGKPKGTYTLERHLARFRCPVARERFLTVRGMLLESGLYREECRKRYLIYVDPARFNRFHLFAQRRDFWIAVKGDVLRISGLRRGRCDGIQTFFKATAETPLERLREVIETYGYRKDPLPSPVAATSSVGVSESP

SEQ ID NO: 4975 - protein, 526 aa, unidentified
  source 1..526: note = uncultivated organism
MARNRVALAPGNASKGSANGKTIRCAIYTRKSTEEGLQQEFNSLDAQREASEAFIDSQRHEGWQVITDHFDDGGYTGGNMDRPALKRLLAAVEARSVDCVVVYKVDRLSRSLLDFARIVEIFDRNGVNFAAVTQQFNTTNSIGRLTLNILLSFAQFEREIISERTRDKMSAARRKGKWIGGHPVLGYDIDTKGGRIIVNRAEAEQVRTIFELYLEHGSLLPVLREIPRRGLVTKRWTTEDGNIRGGKPFTKGSLHAILTNVLYTGMVDHKGVLYAGEHDRIIDQKTWDKVHETLQHNGCDKGATVRNKLGALLRGVLFCVPCGTPMMHSYTMRRSKRYRYYVCYNAQQQGWQKCETKSVPAQAVESAVLASIRRIGTDPKLAEAVAAEALDQVARRRRDLDQQLDTERRSLRQLNQNLAREAADTSADSGARFERIVGLQREIETTEQGLAELVAERKDLDSERINAEDLRRTLADFAAIWSSLTTQEQEQMIHLLVAKVGYDGRTGKVTVNFRSAGAKELCQAKS

SEQ ID NO: 4976 - protein, 546 aa, unidentified
  source 1..546: note = uncultivated organism
MKKIRCAIYTRKSSEEGLEQEFNSLDAQREACEAYILSQKHEGWVLLPAAYDDGGLSGGSLERPALQRLLADMRDGNVDQVVVYKIDRLTRSLADFSKIVDVLDAAGASFVSVTQSFNTATSMGRLTLNMLLSFAQFEREVTAERIRDKIAASKRKGLWMGGLVPIGYDADGRTLKINAFEATTIRTLYDLYEQHGNVRAVKEHADSLCLKTKTRVTKDANSSGGGTFTRGHIHQILTNPLYAGRIRHRKMVHEGQHPAIIDPDRWEQIQQSLQEGAARNRSATAAKQSSQLCGKLFDEIGDRLTPSHSKTKAGKRLRYYVSHRLIAKSGEANQGGWRLPAPELEEQIVVLIRKVLSMPAAVSHLVPNLSADAIGRIRSALSDWLQEAKPSDTLKLVETMTVAPGQLKLRLDASEVAALLGVEPASINDDACPITAPFQMRKRGVETKLIFSEAPTGQDETLIRNIAKAHHWFAQIKSGKTFTEIAASEGASKRRIQQMIDLAFLAPDIVRDVLDGKQPIGFTSDWFKQHGLPSDWISQRQLLATL

SEQ ID NO: 4977 - protein, 540 aa, unidentified
  source 1..540: note = uncultivated organism
MKGPSVKPVRCAIYTRVSTEHGLDQEFNSLDAQYDAASAYIKSQAHAGWTPVRSRYDDGGYSGGSTDRPDLQKLLEDIRARKIDVIVVYKVDRLTRSLADFAKLVELFDAHGVSFVSVTQQFNTTTSMGRLTLNVLLSFAQFEREVTSERIRDKIAASKRKGLWVGGNLPLGYKMNDGKIAIVEEEAELVRSIFRSYLKLGSVNELVRDLKGRNIRTKNRLLSTGGTRGGIPFGRGALYYLLGNHFYIGEVKYKNEILPGEQPPIMDRALFEAVRQKSLAQWSHRTVTRSKADHLLSGLLFDDAGHRMVPTHATKAGIRYRYYVSKPFLHGEAKTASAGSVSRVPAADIEDTVVKFLKEHLAAEQERATAGVVPLWGRGDLALLVAGIVVHRERLIIRLKSDNTNEGSDSPDDDLSLSIPWQKPPSRRSRKILLPHNASRSDARPAQFERRSRLVIAIARGRRWLDDVVSGRVTTIAELCDREKCSVRQVNMTISLAFLAPNLVKAAVEGRLSRGIGIERLRDPPTEWSRQFKALGLNPE

SEQ ID NO: 4978 - protein, 528 aa, unidentified
  source 1..528: note = uncultivated organism
MACFYLYGDVNMKVAIYCRLSEEDRNKQFETDDSNSIQNQKAMLLQYAMEQGWEVYNIYSDDDYTGSDRRRPEFNRLLADAEARRFNIVLCKTQSRFTRELELVEKYIHGLFPIWGIRFVSIVDNADTANKGNKKSRQINGLVNEWYLEDMSDNIRSVLTNRRQNGFHIGAFALYGYKKDPEQKGHLIIDEEAAAIVREVFTLFSQGYGKTAIARMLNDRGIPNPTEYKRLHGLRYQQPKRKNSTLWKYFAISDMLINEIYIGNMVQGKYGSVSYKTKQNKPRPKSEWYVVEGTHEPIIDRELWDKVQAMIAERAKPFDTGTIGLFARKARCANCGYTMRSSKNRGKHYLQCSNRHVAKDACIGSFISVDKLEQMVIAELNRLAAEYLDKDELEQNIEFCDNLQGQKKRLLADMSAYEKKITEYSKGIRELYMDKVKGLISESDFVELSKDFTTEKERLERVMIDGQKQLAEIEERIAVGDNRRELIEQYTNLEHLTREIVEILIDYIVIGKRIPGTKDVPIEIHWNF

SEQ ID NO: 4979 - protein, 545 aa, unidentified
  source 1..545: note = uncultivated organism
MDNEVKQIKKRIYCAAYCRKSVEERADETFGSIENQHEAILNFIASHKHEGWVALSERYDDNGFTGSNTNRPSLQKLINDIKKSKVNMVVVYKLDRLSRSLVDFVQILKFFEEHGVAFASITQPIDTSTSTGKLMLHILSSFAEFERQLISERTKDKMSAARKRGQWTGGWAALGYDLDKESKKLVINKTEAKLIKEIFDLYLKGNSLLKVAQILNDRGDRSKVTTLKGGKTFGGKKFGITHIQSMIKNPLYIGKIKYEGQIYEGEQEAIIDEETFKKAQEIRKENRVERRATKNTDCTGLLSHLLHCKACRTFMIHTYTLKHKTHRYRYYLCSNAQKRGYASCPTKSINAQAIEDTTVDCLKKVFSDNHEKSAHKNKEEIEALLSPIWDSLYPQEKRRILKALVKEIDYNAANKKLGIMLNGSDLRLEYDVEFKQVRFFNKWHKEIEIEKEPKIRKNLILAHQLQKLIDEGKITSLKQASDWLNMSQSRLDHILTLLLLSPAIQTEILTGENQTIDIIPEYKIRSLASQFDWNKQAAIWQNIKA

SEQ ID NO: 4980 - protein, 551 aa, unidentified
  source 1..551: note = uncultivated organism
MKKLKEENQIRRAALYCRVSTTMQGEAEYSSLNAQEDKLRNYCNGRDWEIVRVYSDMKSGKDLERPEMQQLLKDAEDDIFDVVVATKIDRFSRSIVDFHNLFKILNALGIDIVASTQDNLDTTTSGGKFMLNIILAFAEFERNMISERTKEGMTARALKGLYTGGHLILGYDNVEGKLIVNETEKELVNRIFNYYLNEPSTRTVALRLNKEGYRTKAHVTKKGISKGGKSFTKDDLLRTLKNRTYLGLMPWKDQDYPGIHEAIIDENLFNEVQAKLGDSKTNTQITRKIKSNLTLLGITKCGLCGSNLTSSSSKSGKHYYYKCSKKMHATSDHCPAKDLSAILLEDAAKSLMYSMATNEGFFEAIYNQIRFNNQAEIKKYDSELNKLRSNKTRLVTEKQNILNKMKAAAALQDSKSIIDELNKLDNDIAMNLSRINFLEKERERAANQVITREQLKKIINDYLFIYEELSHEDKVRFNKLIFVEIISYFDKNSDDGDIEFRLRGDGQITKKWSEIKNANLLTGQIRTSGGFGSASKTRTCNPSVNSRMLHH

SEQ ID NO: 4981 - protein, 509 aa, unidentified
  source 1..509: note = uncultivated organism
MMTDNRRAGIWIRVSTDEQAQGESPENHLKRAQMYCELHHWQPVEVYDLSGVSGKTVIDHPEAQRMLADVARGHITGLIFSRLARLARNTRELLDIADRFKEHGAALISIAENLDTSTPAGQLMYTLFGALAEWERAEISARVAASVPIRAAQGKPTGGRGPWGYKWVDNGKGKRLTVDESAADKIKTIFSVCIESAGNIKRTCSRLNAMGLRTRLGAEFSVMILKRIIDDPVYIGRRRANYTKSTGDGKHWVMKPEKDWIFHEVDPIIDRQDWESIRELRLMRRSQSGVARQAPPKTSKYMFGGILYCQCGTKMYSYYQKQDGSTIYRCRNCCRKTDEPVISAAMKEALAKIIINPKDLIPLEEHIGEHPDDLRERGKKLIEESERLKHRKTILFEMCSLDPLVKNNVMTELRELIERSDALQKEALRLGDLADRIMLFKKGYAPLIKKASKLSEIWEILEYNEKRQIVNELFERINCRDGEFHFVAYWLPSLCKGSHTVTDSSRRPA

SEQ ID NO: 4982 - protein, 530 aa, unidentified
  source 1..530: note = uncultivated organism
MKDLSVKGMLRCAIYIRVSTDQGLEQDFNSLDAQREASEAYIKSQAHEGWRLIRDQCNDGGYSGGSMDRPALQKLLADVQARRIDVIVVYKVDRLTRSLADFAKLVEMFDTHEVFFVSVTQSFNTTTSMGRLTLNVLLSFAQFEREVTGERIRDKIAASKKKGMWMGGVVPLGYRVEYRSLHIVEDHAEIVRSLFRRYLDAGSVPSLKQCLDVEGFRLPVRIDGAGRSTGGGPLSRGHIYKILSNPIYVGRIAHKGQVHEGQHKPIASQELWDQVQQRLSDRHGALTTKRTRQASEALLAGKLFDDRGNRMSPSWARKGSKRWRYYVSQAALQGDNSKAGSIVRVPAANVEAVVVEAIRKLPLEGSTASQADFRNLIDRITISRTKIQAQLAEAAESKAGERILTLPWTPPSPHRKREIIQGVADEKTTARPMRANARAILVDALGDAHRWLDELLSEPLQTLESLALRECKTERSIRMTLSLAFLAPDIVKAAVEGRLPRGFGLKRLVDLPMAWSDQWRALGLAAPAQA

SEQ ID NO: 4983 - protein, 518 aa, unidentified
  source 1..518: note = uncultivated organism
MEKAAIYCRLSEEDRGKLHASDDSASIQNQKTMLAQYAMERGWEVYRIYSDDDYAGADRSRPAFQKLLADAEAHRFDIILCKTQSRFTRELELVERYIHGLFPLWGIRFVSIVDNADTANKGNKKSRQINGLVNEWYLEDMSENIRSVLTSRRQNGFHIGAFAPYGYRKDPEQKGRLIPDPEAASVVREVFTLFSQGYGKGAIARMLNDRGIPNPAEYKRLHGLNYRSPKSKSGTLWQYNTISSMLANEMYLGNLVQGRYGSVSYKTKQNRPRPKEQWYIVQGTHEAIVDRALWDQVQALRMQRAKPFQSGTIGLFAGKARCMYCGSAMRSTKSKGRRYLKCACRSISRDACTGAFISVDRLERMVLEELNRLAQVYLDKEKLKKRISIPDTRRRQKECVQESLSRHQKKRQEYTAALRALYLDKVRGVVTEQDFAALSQSFAEDKRRLEERIAEDEAQMAALEKRAADGEGRRMPVEQYTHLEHLTREMVELLMDSIAVGRRIPGTKDVPIEIHWKF

SEQ ID NO: 4984 - protein, 522 aa, unidentified
  source 1..522: note = uncultivated organism
MSQPTAAVTGQPPLAIRCAIYTRKSTEEGLDQDFNSLDAQRESAEAFIQSQQQEGWLCLPDRYDDGGYSGGSMDRPALKRLLADIGAGRIDCVVVYKVDRLSRSLLDFARILETFEEHHVSFVSVTQQFNTATSMGRLILNVLLSFAQFEREMISERTRDKMAAARRKGKYVGGRPILGYDVVDRKLVVNPSEAEQVRQIFQLYLEHRSLMPVVKELNRRGWRTKRWTTKKGRTMGGQLFTKNRLYQLLTNHAYVGKVRYKGEIHEGQHQAIVDGDLFQQVQATLQQNGRGGAERNKYGALLRGLLRCAACHCTMVPTYTSKGGRRYRYYLCRQAQQRGWQSCPVPSVPAGQIEEFVVEQIKGIGRDPALVAATLAEVRRQAEESLQRLESERATLNRQRRDDEAELRRLACSHESNGERLARLADLQERLRLVERRLTEIDEKLVTLSGNLVNEQEVAKALAEFDVVWGALSQQEQARVLRLLIERIDYDGREGNLSITFRPAGIKMLPAEMTTSEGEEAP

SEQ ID NO: 4985 - protein, 540 aa, unidentified
  source 1..540: note = uncultivated organism
MKKAAIYSRKSLFTGKGESIENQIELCRNYLERYYPEVTDFSIYEDEGFTGGNTNRPKFQQLLKDIKSDSIDVLICYRLDRISRSVADFATTYNMLEEHNVAFVSLKEQFDTSTPMGKAMLYISSVFAQLERETIAERVRDNMLLLSKTGRWLGGQEPFGFTSEKVSYIDENYNERSLMKLSPIEEELNIVKLIYTKYNETNSITQVTNYLQDNMYKGKNGGEWQTMQVRRILSSPLYVKSSEISHEYLRSLGINVYGEANGNGYLTYNKTKKMTIDRDIKEWIYAVANHKGIIDSTEWILIQKLLNKNSNKKVKRLGTGANNSALLTGILKCSSCGANMIIKQGHTSKTAPGVRYDYYVCGSKDNSRGKKCTNKNIRVDRLDKIVTDQLFAYNRDTLNKYLLDLYSDATKLDIKNNKVDSIKSDIKEKEAAINTLIKQLSQATNETVSNYIMQEVNKLSDEVNNLKESLETESEEKKTVAYDIENLKIVLDQFDKLESTFELTEDINTRRLLLQTILTKVTWDGENYEAELTILEDKKK

SEQ ID NO: 4986 - protein, 558 aa, unidentified
  source 1..558: note = uncultivated organism
MRETKYAPAVSRETLPDKIWSAALYIRLSREDELVGESNSVSAQREILREFVAQQPDIEIYDFYVDDGWTGTNFDRPDFQRMMEDIRAGRVDCVIVKDHSRFGRNSSKAMELMTDHFVTLGVRFIVCNGMYDSLKSTPSSAAADMITLGVTSVINESVSATTSANVRGTLNLRRRQGKFIGSFACYGYRKDPADHHRLLVDEEAADVVRLIYRKYLDGEGILRIAKDLNESGIPNPTAYKQLQGQNYRHNTGEKNDGLWGDHTIRRILSNEMYLGNMVQGKMRNISYKVQKARPCPPEEWYVVEGTHEAIIDPETFHQVQARLGKGTHSSRASGKVELLAGLVRCADCGRIMSKKTNTHAYGTYSYYRCTTRRKMDHGACTNHTIRIDKLEAALLETLNTMIAAAGEMDQILLQIREQESRREGSHLTNTLEKLKQEREKVKQIQLALYPDWKAGTLTKEEYMTFKAEYQEKLDTMDRQIDRLKESSSELEEVRRDNEFLQHFAQTGRLEQLTRPLLTELVREIRVHEGGRIEVELNFADAFEELIEALDTHKDTAVA

SEQ ID NO: 4987 - protein, 564 aa, unidentified
  source 1..564: note = uncultivated organism
MGTEIAAIYCRLSQDDGDLGESGSIQTQKAILTRYCKEKHITIGKYYWDDGWTGLNFNRPDFKRMMADIDAGKINTVIVNDLSRFGREYAEMGLIIEHYFEEKGVRFISLHENVDTKKSMDNLIMAVTNVMNSFYARQASAKTKAAHRSRAKDGMYLGGHAPFGYLKDPNDRHRLIIDPPAADIVREIFQLFADGIGYVRMTKILRERKILNPIAYFNQNNPDYYKSDYWRKPFDWHATSIRAILLNQAYIGRVVFGRTKTKGFFDKTRIHAPEEEWIVVENTHEPIISQELWDTVHQLMKSRRRENSKGEVQMFAGLVKCSKCGSSLNVGFDRKKGKYTGFSCWVYKNYGKERCTSHAIGWKTMNQLVLEDIHRNAKPAKLATQKYKDMIIAAKTEKKRQETEKCKRELKTVEKRIAELDKILSKLYEDLALEKLSKERYQVMSKRYEEEQAGLKERRNQLTELITRAESVYENIEKFLPIIQKYTDITELNTQILNELIQKIVVYEKTDNPDGSKSQRVDMYYKFIGCVEMKEMFGLPMVIPVAKETEIDEGLVAEAREQAG

SEQ ID NO: 4988 - protein, 626 aa, unidentified
  source 1..626: note = uncultivated organism
MRKHDGQIAVYSRKSKFTGKGESIGNQVELCREYVRNLYGDEAAQGCVVFEDEGFSGGNLKRPSFQKMLEGVRKKQFKAIVVYRLDRISRNISDFTGLIDELTKLDVSFVSIREQFDTSTPMGRAMMYIISVFSQLERETIAERIRDNMHELAKTGRWLGGNTPTGYESQSITNVTIDGKARKACHLTLIPEEGEIVKTIFDLYTQTDSLTAVETELLRRRVKTKRGNDFTRFSIKNILQNPVYMIADEDARNYLLEHEVYIFSEAEDFDGVRGMMVYNRTDQEKGKAAVILPMNEWIVAVGKHPGLIPGRQWVAVQNSLERNKSKSYRKPRNNEALLTGLLFCACGERMYPKLSKRVTASGELVYTYVCSLKERSHKERCDRRNANGNALDAAIIQHIKSLTEQDSLFLTQLERSRKFYTGSREQYEGQLIQLRAEFAENEKKLLGLIDSMSVLEGSPVKARVVERMEQLSDANRQIENRIRELEGLTSERTMCDSEFDVLRQMLTMFRTSIDEMTVEEKRAAIRTVVRKVIWDGENAHVVLFGADEKEIEYPDLSGAFAEPSEDTESPWGEDSKRDPDALSGGAEAGPGCIIVRAHRNGHRRGGTGIAGCGGGGGGPAGGAEHP

SEQ ID NO: 4989 - protein, 565 aa, unidentified
  source 1..565: note = uncultivated organism
MVSIMSKTAPEMKGPVHVALYVRVSSDKQAKKEDGSLDTQLDRLKSFVSYKRTSGQEWNIAEKVVEGEKDGMRHGRSAKNTDRPGLQRLMELARAGLIDVVVITKIDRISRSVIDFLLLVAELDRHGVRVVSLYESIDLTTPAGRLQTTIMIALAQHEREVVAARVKEKVAWRAEKGLPLGRPPIGYVLKDKMFVIDDAHAEHVRAADALYLERESADIIVREFRERGYRTPNGKLYTKPMICRMLRNPVYAAKVEYGEHLYDAQWKPIRSWEIHERIGRQMDRNNRRNRSSKRQPKDYVYLLQGLLRCGRCGFKMSPKPGTGRSGDSYHYYHCGNADKSAGLNCAKRYVPADSLDRAVLEFMKRLHVKPELVRAFAEKANESTSGTVQKLREDHERVRSQLQAVKAKLDHLADAVADGGKTAMRTLKDRIEALELERSELEETEARLQFELEAEQNQEIAAKDHVQTLAAFNDLVRASEDHPERIKALLPRFVDYVVFHEGAKCEGQLEVALFPNSVETAPDLDFEEAINGSGPRFAGGSQMVEGEGFEPSVARRPHQFSRLAL

SEQ ID NO: 4990 - protein, 637 aa, unidentified
  source 1..637: note = uncultivated organism
MTVLLRAALYLRVSTPRQAEHDVSIPDQRKQGEAYCAARGYELVETYVEPGSSATNDRRPAFQKMIEAGTARPSAFDVVVVHSFSRFFRDHFELEFYVRKLAKNGIRLVSITQEMGDDPMHVMMRQIMALFDEYQSKENAKHVLRALKENARQGFWNGSLPPIGYRVVAAEQRGAKVKKKLEIDPLHADTVRLAFRLALAGDGTSGLMGVKAIAKHLNERKFYTRAGGRWGVGAVHRMLTRPTYIGRHEFNKRTKAKSLNPVDQVIAVPVPPLIDQATFDAVQAHLKSRNPKVSPPQVVGGPTMLTGICFCADCGGAMTIRTGKSGRYRYYTCSTAARQGETGCKGRSIPMERLDDLVAQHLETRLLDPERLEAVLASVLDRRQERAERRAAHAAELRKKAAEAEARLKRLYDAIEAGVVDLGDDSLKERIAELRALKAQAQADAERAAIALEGIGDEITPAKLHSFAGVARERLRGPDGGYRRDHLRALAQRVEVAEGEVRIMGSRSNLLRTLAAAGGVAPDGAVPSFVPRWRTGRDSNPRYRCRYIGFRDRRLQPLGHLSSARGQHVRPARVGLSSACRATPQPGLLCAISWGSWQSHGGISLTGRSPWIICAAPNGPASFDTIFRYRSLTPCSQ

SEQ ID NO: 4991 - protein, 589 aa, unidentified
  source 1..589: note = uncultivated organism
MHEVEVIKANRRISDRTAGKVADILRVAPYARVSTDSEEQLNSYKSQVMYYTDLVKKRKDWVLVDIYADEAITGTQVTKRENFQRMINDCMDGKIDMIITKSISRFARNTLDTLKYVRMLKERNIAVFFEDENINTLTMDGELLLVILSSVAQQEVENISANVKKGLKMKMKRGELVGFQSCLGYDYNPNDKSISINEAEADIVRYIFNRYIDGAGAYVIAKELTSLGYKTKNGNTEWHDTAVLGIIKNEKYKGDVLQVKTFTVDPISKRRLDNYGEEDQFYIKNHHEPIISEEIFEKAQAILDRRGAKRRGVEKGKREKYSRQYAFSSKLECAFCGSNLSRRNWHSGSDHEKVIWQCVTATKKGKKYCPPSKAIEEKILEGAFVESYKLLCHNNSDVLDELIERMESVLSKNDFQKQLVRVENEIHAIEQKRNRLIDMRLEETIDKATYEKKYSELESILEGLLTEREQLEQSSKEEINLEKRIAHFRKVLENNEILKDFDRCVFESIVEKVIIGEIDENGNANPYKLTFVYKTGYSNAVQSKMHKQIKKKKNDKGNLHSYSSPNTRGNYGFDVEKVRITALEIPGYK

SEQ ID NO: 4992 - protein, 535 aa, unidentified
  source 1..535: note = uncultivated organism
MSKRAAIYARKSRISEKGDSIENQIDKCKNYLSNIEVTEYEVFKDDGFSGKNTDRPAFTKLISMIKEKKFDILICYKLDRISRNVSDFSSLVKELEELNISFISVIENFDTGTAMGKAMLYITSVFSQLERETISQRICDNMYALAQKGYWLGGRPPTGFKNKRITYIDQSNKHRSLSVLHPIDNEIALIQLLFDKYLELKSLSKLNKYLLQNMIKTPTGKDFTKSTLGNILRNVAYVKCDNEVLKYLHSQGFNTYGTPNNINGMLIYKRHKGKNSGYHDKNQWIYAISSHAGIITSEKWLAVQNLLNNNYNKAPRTNSSTKALLTPLLRCSECNSKMRLVSGTPAGPNKIRPLYYKCCLKANSGNSRCNSKNIRVDILDTVIVEKIKTILLDKNELLSELILAKNNLESSPKIGSQKSLLKKRSKINSMIDNLMNNIASTTNTDLVQIYNDKIVSLKVDLVKVEKELIEIDEQLSYQEEIINNTESFIQSLKNISDTIDTASIEDKKNFINSIIQTIIVNSNTGKVIVKFKALT

SEQ ID NO: 4993 - protein, 547 aa, unidentified
  source 1..547: note = uncultivated organism
MTQIPLRRCAVYTRKSSDEGLEQEFNSLHAQREACEAYIVSQRHEGWRLTPKAYDDGGFTGGNMERPALKALLADVKAGLVDVVVVYKIDRLTRSLVDFTRIVEVLDSRQACFVSITQAFNTTSSMGRLTLNVLLSFAQFEREVTGERIRDKIAQSKAKGMWMGGYRPLGYAIEGRGLVPHPTEAPVIVELFERYLACRSVDLLRDEALDGGLFDRMERRSAEPMSRGALYHLLQNPLYAGEVRHKEKRYPGLHAAIVERSLFDAVQTDLAKRRQVRASGERSRIPALLTGLVFDGQGRPYTPTHTLKGERRYTYYCVQARDASSELRRLPARDLEQSLISGLQRVLTSPTTLAPILAQAGVVDFSSGLAQAGEIAKSLANANAAARRALVRKLLTKMVIDAGGLMLSLRGHEVFGATSDPAVSVSLPLMLARRGADLKLAVGADGAPPRTPDPHLVSAIAKGSHWLGELMSGSAATREEIAIRDDVSAAYVGQLIELAFLAPDLKAEILEGRQPRECTISSLKRLCPLPLSWQQQRQWLRQLRLHS

SEQ ID NO: 4994 - protein, 561 aa, unidentified
  source 1..561: note = uncultivated organism
MTDRVRCAIYTRKSTEEGLDQDFNSLDAQREACDAYIQSQRSLGWMVVPKQYDDGGISGGTLERPALKMLLADIEAGRVDLIVVYKVDRLTRSLMDFSKIIETFDAKDVSFVSVTQQFNTANSMGRLTLNMLLSFAQFEREVTAERIRDKIAASKRKGMWMGGLPPLGYDVRDKKLIVNQDEATIVRQLFGHYLELKSVRRLKIEADRLKFKTKRRVRKDRETGCKSFTRGHLYYLLHNPIYVGETAHKGEVFPGQHEAIIDRYIWDEVQRLMKEQAPERASKVNINRRCLLTGLVFDETGDRLCPSYAKKDGRIHAYYISKRLMSGSGKCGSGWRLPAKSLEGAIFSAVTAVLEDEKEWVNLLDTRDLSTIDYKEARVQVSRFKSELSSGQVIEMRGAIRKLVYKIAIQPGSASIIFVKDVLNTQAGRTESLPGYEHHFSFQTRRCGIETRIVLGGIASPEAHLDQNLIAAVNRSFRWWKLLTEEDGWSIQKLAKLDHMDASDVTRFLPLAFISPHIVEAILNGQQPVDLTLERFKKMGPMPMSWKAQAMTLGFGKIAQT

SEQ ID NO: 4995 - protein, 551 aa, unidentified
  source 1..551: note = uncultivated organism
MKQSKYKAAVYVRLSKEDGDLDGAKAESNSISNQKSLIMNFLKDKKDIEVVSIHEDDGYSGSSFDRPAFQDMMDEVKDGRVNCIVVKDLSRFGREYIDSGRYIERLFPALGVRFIAINDGYDSADSNDQSSEIVIPFKNLMNDAYCRDISIKIRSHLEVKRQNGDFVGSFCPYGYRKEEDNRSVIVPDDFAAHVVRDIFAWIKEGKSLDTISRKLNEQGVPSPMEYKNSSGQRFRTSFKTHEQTKWYPVAVRRIATNPVYMGVLIQGRYTTPNHKIKQTVLKDSDKWAIVPNNHKPIVSERDFMVVQKALSMDTRTDPKHDGVYMLSGFAVCADCGNSMTRRVIKANGRCYSYYVCSANKKKKGCCSPHRIREDVLLERVTSVLKEMIDTLLDADEIVKSAGEEQNHRYDTDICMERIKENENEINRYNKLLVEVFEDYREGVVDRDDFRIIKESFEEKKKLAEKAILVLQDEIQSISERINRDDSWLDAFRENKNISELSRAILVELVQRVKVHEDGSIEVVLDCEDRYQEIIDRADKIISAPIEERSVV

SEQ ID NO: 4996 - protein, 536 aa, unidentified
  source 1..536: note = uncultivated organism
MITINLRDFYPWYRVSTDKQVTYNENHEADIPMQRRECRRFWEQQGWVLVHEELEDGISGHKVRAEKRDSIQRIKELGFAKKFDILLVFMFDRIGRIADETPFVVEWLIKHGIRVWSAKEGEQRLDTHTDKLTNYIRFWQADGESEKTSIRTKAGMGLLVESGHYKGGNAPYGYMLVKSGRLDKKGNEKKNLAVCEEEAVIVRKIFDLYVQHGKGVHKIANALIEEGIKNRSGKNWYHASIKGMIRNLTYTGVLRSGETRSPMIEALQIIPPHVFEKAQDIMDKRRTEGEEKRTYPMNTESRCLLNGKLYCAHCGSRLHVATGKFIKGEQQRQLFYHCYGKAKKRTDCDGKSMYAHKRIDDMVDRVIRYIFEGMRSIPKSEVITSSLMTLRTEKESLYKTAQHCFTKKASELVELKAEVIKTIRGESKFTPELLNEIITETETSLAEAEVIRNNAKYELDSCKYHISEMQAKYDEVISWTELYDAADLPAKKMIVANMIDRIEVGESFKLHIDFNIDLSHFNIQLDELTSGQNKTA

SEQ ID NO: 4997 - protein, 515 aa, unidentified
  source 1..515: note = uncultivated organism
MITAVKQQITTKIRLAAYCRVSSDSTDQLHSFAAQIRYYSEYTKANPEYELVGIYADEGLTGTEMKKRDELNRLLKDCQKGKIDRIIVKSVSRFARNTEELLVTLRLLKDFNVCVYFEEQGIDTDKLNMEMIVTFPGMAAQQESVNISGNMRWSYQKRMQSGEFNCTCPAYGYRLVKGEMTIEEAEAIVVRRIFNLYLQGLGTQAIANILNDEVVPRRYGHSKWHSATIKYILTNERYMGDVLLQKKFTTETLPFRQVRNKGQMPQYYVENSNPPIVSRETYEAVQELLNSRKPVRTSTRGSYPLTGKLRCPECGRSFRRIVTRGTAYWTCSGRAAGATNCKCRRVREDMVYDTFNTMVLKLKDHQDELLGTLIRQIITMQNRTSMIQDRIREIDREIADLGAKNLVITRLHTSGILNAADYATQSSEISGRITELRSERKKRLADDENAEWLDTIKTLDGILTDHTPTSEFDQELFDGIVERVIVDDNTRLTIRLMGEIELTEYIDEKGRCGSI

SEQ ID NO: 4998 - protein, 546 aa, unidentified
  source 1..546: note = uncultivated organism
MVLCVAEQGGERGMSGKEKAKGSLALAAPRVITIPANVPEIGRKLRVAAYARVSSNSEDQAHSFAAQNAYFSKLIAGNPNWELADIYADKGITGTSIDKREDFLRMMEDCRKGRVDRILVKSISRFGRNTKESLEAVRELAGLGVSVLFEEQKIDTAESTGEMLTAIFATLAQKESESISEKMRWSIRTRMTQGRYLTPSIPFGYRKGESGELVIDEIKAKYVRDIFDTFLTGKNSGEIAAQLKFQQRAAPELADYRWTYKAVVRILRNEKYIGDSLWQKTFQTDDLPRHKKDNKGQKPQYYVAESHPAVIEREKFEKVQKLLQSRKGKFYDTQDERSLFHRKIRCGCCGANCRRKRVHGIAYQVCRTHTNNKDLCPSRQIQERFIQDAFLRLYFKLKRHGESVLTQLIADLRTARNGSLLWSEGVVELNKQITDIAGQERLLILLKQQGAVDPDLFLSRSDQLAEQRRTAKLKKERLLRSEEDHTIQRTQALLDYLRSGPDTLSFFDEALFSELVEKIIVTDNETLRFRLINGLELTETIERTKR

SEQ ID NO: 4999 - protein, 574 aa, unidentified
  source 1..574: note = uncultivated organism
MYYIYSRKSKYTGKGESIENQVEMCKEYLYKHIGSIDEKDIVVYEDEGFSAKNLERPMFKKMMSDSKNQKVDYIVCYRLDRISRNVSDFSSLITDLNDRNISFVSIKEQFDTSSPMGRAMMYIASVFAQLERETIAERIRDNMLMLAKTGRWLGGTAPTGYKSEKIQQILIDGKSKQMFKLKLIPDEAKLIEFIFKKFIETGSLTKVETYLIQNNIKTKNGKFFTRFAIKNILENPVYMVADENAFQYFLDNGVEFTDEDDIKQKFDGKYGVMSYNKTLQRDGKATRIRDIKNWIVSVGKHEAIVSSEDWIKIQEKLAQNSSKSFRKPKSNVALLSGLLFCGNCGHFMRPKLTKRKNSAGQYIYGYLCELKEKSKSHNCQIKNPNGNTLDKAVCEEIKKLAIDNSEFLKEISKAKKAISMHSENYEEEISKINKSLSKIENEISSLIKALANASNTPAQKYITENINNLDTEKNKLLQRKAEIEGLLKNQDLSQIDFDNLKNTALSFSKGFDTMDTEQKREALRTLVNKIVWDGEKVHIYLFGSKSDKPPVEVCDLIEPKGEYSERNINAFQKH

SEQ ID NO: 5000 - protein, 555 aa, unidentified
  source 1..555: note = uncultivated organism
MENLTGNKIFNAAIYVRLSKEDGDKVESDSIVNQKDLIRDYLKGMPDICVCSERVDDGYSGVNFERPDFHKMMEEVRAGKINCIIVKDLSRFGRNFVEAGRYIDQIFPFLGVRFIAINDGYDSFCGKSSSDKILIPFKNLVNDAYCRDISVKIRSQLEIKRKKGDFIGSFAVYGYLKAPDDRHRLMVDEYASTVVQDIFKWKLQGISQLRIADRLNEMGILSPMEYKRSCGMNYKSGFQTNPKAKWTAVSVGRILRNEFYIGTLVQGKRSTPNHKIRTQILKPQEDWIRVENSHEAIIAPEDFRAVNRLLLRDTRVAPAEETVYLFSGLIFCGDCRRNMVRNGVCQNGKTYTYYMCGSNRTSKECTAHRIREKTVEQAVFQSLKTHIENIINVERILHYINTLPFQQNEVKKIDAQLVKNREEIERCNLLKASLYESMISGIHSKAEYLEMKEMYEGRRKDALAAEARLQKEIDAILGFQSDKCQWIERFKQYRDITELTRVIVVTLIDKILVHEGMRVDIHFKYQYDFDRMVETIGNVNRIQPIPMLLPTREAM

SEQ ID NO: 5001 - protein, 554 aa, unidentified
  source 1..554: note = uncultivated organism
MSKPSIRCAIYTRKSSEEGLEQAFNSLDAQHEACASYIASQRHEGWKLIQTRYDDGGVSGGTLERPAVQRLLADIDAGRIQMVVVYKIDRLTRSLTDFAKLVDRLDAANCSFVSVTQAFNTSSSMGRLTLNVLLSFAQFEREVTAERIRDKISASKKKGLWMGGVCPLGYDNHPDPQERTLVVNEAEAQTVINLFELYGHLACLRAVEKEANHRGLLSKKHEYSTGRRAGGKSFSCGQIYYILRNPLYIGQMRHKEKTYPGRQAAIISDDLWNRVQQKLSAASRRTRGNVKTDVPTQSILVGKLFDETGDRLTPSTTTKNNRRHRYYVSNRLITGAKDPAAWRLSAPMLEKQIARIVAAHLEVHAKQMTLCRDIELSRMEQVAVKAGDLISEIRDHKPTRVNGFITEAHLHVSEIDIVLNSEEIATALGVQVEQLHPELTRFRAPWQIKRRGVEKKIVIGDEKAVPDQTLIKLLDQAHGWVEKLKDGVSLKVIADQKRVTPAYIRTRSKLAFLSPKVQEAILDGALDPAYTANRLVRMKIPLDWREQESLFLNS

SEQ ID NO: 5002 - protein, 522 aa, unidentified
  source 1..522: note = uncultivated organism
MSRAPKKIERKTSRCAIYTRKSSEEGLDQEYNSLDAQRESAEAYIASQKAEGWTALPDRYDDGGYSGGSMDRPALDRLLRDIDAGKIDCVVVYKVDRLSRSLMDFARIMQVFEAKQVSFVSVTQQFNTTHSMGRLTLNILLSFAQFEREIIGERIRDKLAAQARKGKWTGGAPVLGYDVDRSGPSPRLVVNATEAARVREIFRMYIQEASLLPVVKELVRRGWVTKKTITCTGRERGNRPFDKVTLYALLTNPTYTGKRRFKGELFPAEHEPIIDQALFDKVQAQLKFNGRTGGVEVRNKYGALLRGLLRCKCCGAAMSHTFNSGRGRTFYRYYRCTHAIKNGSDVCSSGMLPAGEIERVVIDEVRGLAKDEALLARVISDAHAAIEGELAAARRDRDDVRQERARHHKELQQLTTSGQTTPDATRRIADLHTRLSAADQRLPELDARIAGLEGQIVTQAEARTVFADFEGLWQALVPREQARLLKLLISTVEYDGNAGTVSVTFRPTSIRSLINRKMEEAA

SEQ ID NO: 5003 - protein, 514 aa, unidentified
  source 1..514: note = uncultivated organism
MSRRTPTASPMPQVKRCAIYTRKSTTAGLEQAFNSLDAQYEACLAYIQRQLGWSLIEERYDDGGFTGANIERPAFTRLLADVDARKVDIIVVYKVDRLSRSLLDFVKVLERLNTAGASFVAVTQNFSTADAMGRLTMNMLMSFAEFERSMIAERTRDKIAASRRKGMWTGGPVPFGYTKEEKKLVVNEVEAHTVREAFSLILVHRQVATVARLLTKQGLLPREPKRPSKLGQRWSKDAVGRMLRSPLYAGYMVLGDEVHQGQHPALVAESTFREVEALLDGAGRKQLHTGTNPDYLLRGLLRCGHCGQPMCPGSTKKGPKCWRYYRCTTRDKLGPTACPTKALPAKAIEDFVVQRISKATEDGTLAAAVADSLDRRIAAKRQAVEAMLKQLPSRVASASAAVSKLTEELSRLEGRAREMAEEKLVAESDKLVTSERLLAQAELDRKQLARAADEAQWMAGALRDFGRVWKWMTPENRLRLMRALVAQVRVAEATGEVEVELINFAIEAGAQEAA

SEQ ID NO: 5004 - protein, 551 aa, unidentified
  source 1..551: note = uncultivated organism
MEYIAPEYKPMNDISFQNISLREIIVAIYVRLSKEDLDKGESESESIQNQKAMLLNYAISRGWQVYNIYCDEDYSGAYAGNDNDRPEFNRMINDASKNKFGIVLCKSQSRFSRNMEVIEQYIHGRFVEWNIRFVSLVDNADTEVKGNKKARQINSLMNEWYLEDLSENIKSVFRYKMEQGEFLASFPPYGYSKDKDNKNHLVVNPNTSPIVKQIFEWHGEGYGAAKISRMLNDRGIPNPRKQQELDGLRKTYMYSPDDMGRWSTTTIGDILNNQVYCGDVVQHRVEKVSYKSKVIRKVKDDNRIIIKDMHEPIISREVFDETQARLSKRRKATGTGKVHILSGKVFCHYCGKPMQKNHGVSSKAGHIGYLRCRDKYAYAEKDRCPTPNIRIDYILDALQMQLIKKFKDVAVDSLDEEFITKLLDSNNDESSLLETELKNLKKEQTKISNNQKNLYNDRLNDIITVTEYLNYNKGFIERLNEIEKRLLEIEQQFTKKDDSHKHENVRKSLLHFLETRCIDRDIIDHLVERIEFGEINKETGNPTLKIYWAWD

SEQ ID NO: 5005 - protein, 563 aa, unidentified
  source 1..563: note = uncultivated organism
MNKPFSKSSNGGTPILVGERACAYLRVSTGRQAESDLSIPDQRSQVEAFCRTRRLDLVMEFVEPGASATDDQRPEFQRMIERACDGDRPFDVIVVHSYSRFMRDSFQLELYIRKLAKAGVRLVSITQELGDDPAQVMMRQVIALFDEYQSRENGKHVLRAMKENARQGFYNGSRVPLGYKTEEVEKRGIRVKKRLVKDDVEAETVQLIFTLYLVGDGKSGPLGIKKLVCWLNEKGYRSRMGGRFSVNTVHGILTNPIYVGEWSFNRRNAKTQALKPDSDLIRIEVPAIVTREEFDAVQATMKLNAPANTPPRIVTGPVLLTGLTTCLTCTGAMTLRTGTSKSGKVHRYYSCSTANRQGETGCKGRSIPVDKLDALVTERLVERLFEPERLTELLASVCADRADKQASVNARATRLQTEVTDAQEKLRRLYKLVEDGLAELDDILKERIATLKLSHNAAKAALDRIRSTMPETAIDPEVVEKFSRLMRESITTGDIPFRKTYIRSVIDRIEIGDDVIRIIGDKTKLEKAVTARGSFVPGVRSFAPEWRSLGDSNPCFRRERATS

SEQ ID NO: 5006 - protein, 557 aa, unidentified
  source 1..557: note = uncultivated organism
MITSTDIKKVAIYSRVSTVEQAEEGFSLDEQERLIREYCINHHMEVVEVYQDAGISGKDIEHRPAIQQLLKDAAEKKFNLVMSWKINRLSRKLLDAIKIVDTLEKYGIGYQSYSEPFESSTPAGKMQFQMMALVGEFERNTIAQNVKMGMRAKAMSGEWCGGAAPLGYDWVAVEGTENLSRKKSRLEVVDTEAETVRLIFELYASGKGYKAIVGYLNKAGHKTKRDNQFSVAQIKTILTNPVYIGKVRYDVRRNWNEKRRNNINPNPIIADRKHEAIISNELWEKVQFMLSQKQGKPSRIYDGEYPLTGILKCPECGAGMVISRVIDTRKDGSKNKITYYACGNWKNKGTAACHSNMVRVEKANDFVYHQLERLLSDDKFFHEVVERVNREHRVLKENALKEKEGQNKEMKKINNRQQRNHELYEDGEITRDEFLKRREKLNQQLSALWQRQSETSVFIMEEEKKEIPIEAIRNILQNFSKVLSSSIDRTIRKRLLHLLISEITIDKHRNIDSIKLKLSDELIRFLQNSGGTPPDGAPSVFMFRELGIKTMDLELVL

SEQ ID NO: 5007 - protein, 533 aa, unidentified
  source 1..533: note = uncultivated organism
MIKRVGGYVRLSEEDRNKINKTDESESVQNQKNMLITYCEEKNWELVDIYCDEDYSGAGTYRPDFERLIKDCENGLVDIVLCKSQSRFSRDMEVIEKYLHNKFLEWEIRFIGIVDNVDTDNKGNKKSRQINGLVNEWYLEDLSENIKRTIRNKKESGQFTGSFAPYGYIRNPENKHELIVDKVASEIVKQIFDLYKSGKGYGAIVRYLNEKEIPSPYEYKKQNGSKFKIPQVKGKTHWYTDTIAKILKDETYIGNLVQGKKRHISYKNKKSVPVPKEEWIIVKNTHEPIIDMETWTTVQSRFLGREKPQKSGEIHMFSRKVYCDVCGKVFTRNVGYTKAGKIYYLGCKSRRQSHVICDNQKAMRIDTLEELVLNEINHQLELYYNQETLDNLNVNQNKLNMSATYDSKIDTLKNEKSSLESSLEKKSGYYQQIYEDKIDKVISESEFKILRGRYNVEIEKINTRLKCIDEEIMLTKQKLTRVESKGNVFEKYKQIDNLNKVIIDEFIDVIKIGKVNEATNERDITIEWDFLKR

SEQ ID NO: 5008 - protein, 550 aa, unidentified
  source 1..550: note = uncultivated organism
MHCAIYIRVSTEDQAKEGYSLEVQREYLEAFAMREGYGIFKVYCDDGVSAYSTRRPALQALLADAKEKRFELVLVHKIDRFSRNLKDLLMLVDELSSYGVAFKSATEPFDTSTSAGKLMFQQLGSFAEFERNRIAERVFPGMIKGVQQGNWQGARFAPFGYTYNKAKKLLEVEEREAGIVKLIYTMYLSGKSTHDIAAYLDKKGYKTRTGKQFYNKFICDILKNQIYTGKIVWNKKHYDKNQKTKKHYKYIRNDPSKILVAQGRHKPIIAEEDFAEVQKLLANKTRTWRPRVKNQEYLLTGLITCAKCSHRYTGVSSISNHRLNRKKRWYRCSGPHSSHINCTNRAIKAEDIEPEATKIVALLTQNARLKQSRWTTGTGLEIASPPSAARNDVGLLKDKLKINQEKQSKLTDAYLENLLSEDVYREKNSSLRNEEESLKKLLAGYEVREMERERSEGYINRVKDFLDGHDDSKEKIDFADKKQLAELLFKNIKIAPAVGGALPPKRISFSLFAPFNFLFSETEKKLQCQKNQKVIKICLKKSTSVPSAAK

SEQ ID NO: 5009 - protein, 560 aa, unidentified
  source 1..560: note = uncultivated organism
MADRLRMGAGAPLRCAIYTRKSTEEGLDQDFNSLDAQREACAAYILSQRHEGWALVPSGYDDGGYSGGSMDRPGLKMLLADISACKVDVVVVYKVDRLTRSLADFAKIVEVLDAKGASFVSVTQSFNTTTSMGRLTLNVLLSFAQFEREVTGERIRDKIAASKAKGMWMGGVVPLGYRVEDRKLVVEPTEAELVRHMFARYLELGSGRELATELARQGVVGKVRVNRHGRETGGEPMTRGAIYHILKNCIYVGEISFRGQIYAGQHDAIVDRDLFDRVQAQIEVGRVDRAFQTNADEPSMLAGLVWDSHGRRMSPSHGGKRTKRYRYYVSQTDDPERASAPVFRVSASDLEARVIEQLNAVVRSVVSGAVQEGRLDAGQITELQKTRDTMLTDLASPASVEARKALRQYVIRVEVGPDAIAITVQLTALGLINSSDEPTVAEVPIGSVKVGKQLKLILSPGTGTSAHRPDPGLVKLLAQATALRQKVAEIEASTFRDLASELGYSREYAADLLRVSFLAPDIQTRILDGSQPESLTRSALMKAASLPLDWSLQREALGFS

SEQ ID NO: 5010 - protein, 561 aa, unidentified
  source 1..561: note = uncultivated organism
MRCGIYTRVSTDEQAKSAYSSLERQREVCQSYIEIHREDGWRTVAVYEDPGYSGKDLNRPGIQELLEDVRQGKLDIVVAYKLDRVTRSLKDFYQLWEVFESHRVSFATASEQFDTSTSTGKLMLNMLLSFAQFERELTRERTMSKMAGRAERGLWNGGWVPLGYDYDKARQLLAPNPHEAEVVQFIYRRIIETGSPCAVANEANRLGYRTKQRTIVRADAKARVIGGKRLDEDTVIRIVRNPIYRGYLRYNEGLFKGGHEPIIDEGTWAQANAAIGRGSVGEGMRFKDDHVHLLKGLLVCGHCGNHMTPYPSGKKDRDGRPYLYYACTSVTRDGRESPCAVRSLPARTFEDLVTKAVADLGNSPAILEECVRQANGDATRAVAHLEARRQSFMARLGEVNKGIRRIVEYIKTHDGVPAEIDAEMQELDRERQELHRAIEKADLEIALRKKKVLDADLMRQQLQHFEHLVKVLPPEDQKELFQLLIKEVRVHPFDPRDVADGEAVVARVRGRLYRVQISLHQLPGADSLRSPDGASSDFRQLGSAGRIRTYDQSVNSRPLYP

SEQ ID NO: 5011 - protein, 540 aa, unidentified
  source 1..540: note = uncultivated organism
MEAKSNTTAAIYSRKSIFTGKGESIENQIQLCKEYGDRLGIKKYLIYEDEGFSGGNTNRPKFQQLIKDAENKKFDVLICYRLDRISRNVADFSSTLELLEKNNISFISISEQFDTATPMGRAMVYIASVFAQLERETIAERVRDNMLQLAKTGRWLGGQEPFGYTSQKVTYLDENLRERSLMKLIPIDKELRTIELIYSKYLEFHSISQVVKYLNFSGIKSKNGGDWAAMQVKRVLSNPLYVKSSKEVSDYLRESGMNVFGEATGSGYLTYNKTRNITRDRDISEWIAAIGKHPGVIESSIWLNVQHIQEKNKAKKLPRLGTGESPALLTGILKCEKCGANMIIKHGHKSSSDAGERYDYYVCSRKNSSYGKKCNNKNIRVDKLDKYVVDELKAYNKELLMDELSKAIKNETDNNPYINHIKEKKQKIFEKETGIDNLIKQLTFNSNEQVAKRVFSEIGKLNNEVANLKTELRHMENSNDNFAESANNTNIALDSLKCFGKEYDMIKGVQHKRNLLRTVVDYITWNGDEKKFKIKPFYKQ

SEQ ID NO: 5012 - protein, 514 aa, unidentified
  source 1..514: note = uncultivated organism
MKRCAIYTRKSSDEGLEQGFNSLDAQREACEAYVLSQAGEGWSALPKAYDDGGYSGGSMDRPGLHALLADIRAGKIDVVVVYKIDRLTRSLADFARIVETFDAHGVSFVSVTQAFNTTSSMGRLTLNVLLSFAQFEREVTGERIRDKIAASKAKGMWMGGLAPLGYDLPTDGTRTLAVNPVEAETVRHLFRRYLELGSVYQLIAELDQQDVRSKQRVTAKGRILGGQPFSRGAMFHLLQNRVYIGDIMHKGTRFDGQHDAIVETSLFDKVQAMLAAHRRHRTGVQRAASPLLGKLVDATGRRMTPTHSRGARGGVYRYYVSSSAAGQRLERVSAQEIEAFLVARLARLLQAADDPLSSVTRVQLGDGEVVVSIPASLARTIKRHLQDGESVAPGRADSQIVELRLPGSFGSRRSQVSIRPTAIAAGRRDPVLIRALRAAHSLVEITKNGTPIIAAVPGPRYQRRLIRLAFLSPDIQRAILAGRQPVGVRLEDLVRNPMPTDWAEQQRWIESLSG

SEQ ID NO: 5013 - protein, 568 aa, unidentified
  source 1..568: note = uncultivated organism
MPERQIKIIPALSKAERTKKTVNRPIRVVPQADLRAELAQGKTKTTVIPQTQAPVKIAATTPVEVKKLRVAGYCRVSTGTTQQETSIVAQREHYEAYIKSHPDWEFAGIYWEAAVSGTKKENRPELQRLIAACKAGTVDLILTKSISRFSRNTTDCLEMVRTLTALGVNILFEKENIHTGTMESEFLLTLFSTFAEEESKSISANELWTKHKQFENGTFRYSTAPFGYNLVDGTFEVNPERAPIVREIFDAVLAGKGTPTIAKELNARGIPTGTKRNDGSPGVWTAYMIGGMIKNVAYIGDVLNQKTFFDHFHLKYNYGERKQYYNEGHHEAIVDKETFERANAALRQRGAEKGNNPCEDKQLRNNPHSNRYAFSGRLKCACCGGPMKRVTQKTAAGKVYHWVCSQHVVDKTVCSMKREREENIKNAFTTMLNKLLYAKDIIFDAYLGGLSFKEARRAAGVELSEACLRVYMRNGTFTGTEYYPPIVPEGMWERVTEEMARRTHPGFSILPDALPVHTKFQTAKPKGPLHGSAAEVAAEVYNLITPAEYGRTFMNTAEQAMIRAWVGI

SEQ ID NO: 5014 - protein, 509 aa, unidentified
  source 1..509: note = uncultivated organism
MKISKIESKSTEKKKLRVAAYCRVSTESDEQLDSFEAQKAHYDAWIKIHDNWEFAGLFYDFGVTGTKTEHRDGLQNLLLECKAGRIDYILTKSISRFSRNTTDCISLVRELLDMNIPIYFEKENIDTGSMESELVLSILSGMAQDESRSISENNKWAVHQRFEKGTYKFSYVSFGYMRDKEGFMVIDPKEADTVRFIFQSALNGFGCNKIAKILEERQIPTRKGGKWTSSTVRDILTNEKYYGAAIFQKTYTDENFHRKKNYGEVDSYFIEEHHEPIISKAVFERVKELMKQRALEKRIQSGSDKYQQRYAFSGLIFCGECGDKFRRKTHDSGKEIAWSCRTHIMDKEKCSMKYIRDDMLKAAFVTTMNKLIYSRKQLLLPLYENISIQGSNESSSRIHFIQNELQKLSEKKDTLRKLRAQDIIDSVVFNQEINFIDAQASEYRAELSDLSGKTKDFSELNKLIHFTDREMMTAFNEEVFCMFVSKIVIVNRNCAEFHLKCGLKVKEAL

SEQ ID NO: 5015 - protein, 529 aa, unidentified
  source 1..529: note = uncultivated organism
MTIRCAIYTRKSTEHGLEQEFNSLQNQEESCKAYIASQSFNGWQYYKTYSDAAISGGTMERPALKRMLDDMAHGLVNTVVVYKVDRLSRSILDFHNMMQYFNKYNANFVSITQSFDTSTSMGKLTLNMLLSFAQFEREVSSERVRDKIRASKAKGIWMGGNPPLGYDVINKKLIPNEAEATTVRTLFEKYLELQSVNALTEYAAAHSIFAKQWTTAKGVTKGGRPIAKMSMHRLLRDRIYIGQIVNKTNNTIAPGEHQAILPTELFNRVQAALQNNANNKSETHGSPNLLTGKLFNHNGVRFTNQRTCGKGKTNTHYYATRGFYLPAPQVDDVVIKTITDFLNSDMSNLPPNLATILKRIDITNMNFAEKRNLIQSLVEKIVYSQEQFIYTLTTDTTKLQPFMTENYVNQNSDKMEYIIGDNNITVTEKVFLRKYVNTVYDRGKNGVLNVTDNNHLILKAFATAWKYRELYERDGNVDNIIHNLHTSPRQFYRHLDIAYMNPDKANQILSGKQNININDLFQISKENHL

SEQ ID NO: 5016 - protein, 557 aa, unidentified
  source 1..557: note = uncultivated organism
MQVQFWRKGVGNIQNNTETKVWNATLYLRLSRDDGDKEESNSITGQRELLRDFIQTRPELREYAVRIDDGFTGSNFERPSFKKMLEDVKAGRTNCIIVKDLSRFGRNYLDAGEYIEKIFPFLGVRFIAVNDNYDSLGGKNASDELIIPFKNLINEAYCRDISVKVRTQLEIKRKSGQYIGAFAVYGYLKDEADKNHLIVDEYAADIVRDIFSWKLEGMSPQDIATRLNHNGVLSPMEYKKSLGMKFATSFKANPQAVWSANAVLRILKNPVYTGVLIQGKETTPSYKVRKRVTKPENEWAVIPDTHEAIIERRDFDSVQKTLLLDTRRSPGGSAVQLFSGMVFCGECGASMVRKTVPSGNKKYVYYVCAAHKQDKSCSPHRMRDEALADIVLETLRQYIRDVVDLDDILAMTDTAPLRTAEAQKVQRQLDKKRSEYERLQKLLMSLYENLADGIIDRDEYARLKQNYAGRCAECEKQMETLQEVITQIKEHGGEHREWMAQFREHLNITELERSVVVALIDRILIYKDNRVEVRFRFADEFAWQTDILRRSQIREVV

SEQ ID NO: 5017 - protein, 595 aa, unidentified
  source 1..595: note = uncultivated organism
MKNNDDYIAIYSRKSKYTGKGESIGNQVELCKEYIRTHYGEDALNQIIIFEDEGFSGGNLNRPDFKKMMQMAKEHKFKTIIVYRLDRISRNISDFSGLIEELSRLDIAFISIREQFDTGSPMGRAMMYIASVFSQLERETIAERIRDNMHELAKTGRWLGGITPTGYASECVEKITIDGKTKKSCKLKLVPKEAEIIKLIFQLFKESYSLTNTEAELMQRGIKTKNGNHFTRFALKGILQNPVYLIADEDAYEYFTRKGAELYADKEGFDGTHGMLAYNRSDQEKGRAAIYNPVSEWIVTIGEHPGLIHGKDWIKVQNALEFNKSKSFRRPRKNEALLTGILYCRCGSRMYPKLSRRKTADGKQLYPYVCHLKEHSQRHLCNIKNATGNTLDMAIIEQIKILSDDHSIFLKQMESRRKLCAGTHIPYEEQIADLKIEKSESEKKMESLIDSLIDVDENIVKKQITKRIEILSKDMELLSAKIQEVEELSARFALYDDQFDALQQLLSSFKTNIDEMTIEQKRAAIRTIVRKIIWDGENVHIILFGEPDNEIEYPDISGLYGKDFTDTDDSESLSSFTDVDYDDEDSKALLCEDSK

SEQ ID NO: 5018 - protein, 632 aa, unidentified
  source 1..632: note = uncultivated organism
MENAVIYARYSSQGQNEQSIEGQVRICTAYAESKGLTIVKTYMDKAKTGTNDNRPNFQKMISDAESGAFQYIIVYKFDRFARNRVDSIMYKAQLKKQYGIRVVSATEPVSDDEGGEIYEMFLEWNDEKYSQRLSKRVHDGLDTSVKNGTYCGGYLIYGYKLIDTDKRGNKGIIHKVAINEDEAEIVRYIFNEYANGTDKKEIANALNKRHILYRGKQFTFRTFENWLSNAKYTGEFMHGKRLCDHTYPAIIDKITFERVQQRLKKNKILAGANSAVEPYLLTGKLFCGHCGTAMIADGGTSRLGKKHYYYACKQKKKALCEKKREDKNTLEYIVAQYVYDFLTEPHNVEIAAQDTINYHERRTGDDGLKSVEARILHTQKEAEELTNAFILARNDLLRANIEKKMQELEILLKDLNAYKSQIQLERGKRITKQQIIDFVGMLIKGDPHDKEYQKRLIDNLVYKVFVYDDKIITYLVFGNDKEIKEISLAENDKTFSALRVQPLSLMVPLVGLEPTRYRYHWILSPARLPISPQRHKYRTFSVGKGRTVFRYFRYKKRKRWRPHRESNPELALRRGLLYPFNYGDLKLPIYNTTLRKKKQQIFSYKCKFCEKSVDTKANIIALKNCFFAKNTV

SEQ ID NO: 5019 - protein, 571 aa, unidentified
  source 1..571: note = uncultivated organism
MNTKIINQSKKDNETYYAIYSRKSKFTGKGESIENQIELCKNQLINKYNIDENDIKVYQDEGFTGYNTNRPQFQEMMKDIRNKKIKCIIVYRLDRISRNVADFCNLKNEFLKYNVDFISVTENFDTSTPMGSAMLMISSVFAQLERDTIAERIRDNMYGLAKTGRWLGGNTPFGYKSQKIENLSIDGKKRSLYKLEVIPEEAEIIKLIWNKMSELKGLGKLESYLLQQGIKTRNGNNFTRFSLVTILKNPVYAIADEKIKHFFEKMNVTIYESEKIKCDGKHGLIAYNKREEMIGRTKTYKDVSEWIIAVGKHDGIISSKQFIQVWILIENNKDKRCRPPQQNTSILSGIIKCKYCGSYMRPRLRSSVAPNGERNFSYLCELKDNSRKQLCKCKNINGIETDKLVIKKIKELALPTSDFMKKLKLIADGKEKETTKKQNELQTLNATLTRNKMKIESLIDRMAIIDTELISDVALQVKDLKSKNIEMEKRVTELTKEGNREMDQKEITSLALDMINKYMNAFDTLDIVDKRIMIKLLVSSVEADGEHVYINYIGSSNTAMCPRGVGSRGYS

SEQ ID NO: 5020 - protein, 531 aa, unidentified
  source 1..531: note = uncultivated organism
MARTKRNIPASHLSHTVWRAALYTRLSREDGDKPESDSIANQRMLLENFAAQQPDLQVIGHYSDDGFTGTNFQRPDFQRMISDIEAGKVNCIIVKDLSRFGRDYISVGQYLERWFPAHGLRFLAVNDHIDSERGPYDMLLPLKNVFNEQYARDISRKVRGAIQSKQQQGQFIGAFASYGYRKDPENRNKLQIDPCAASVVQRVFDLYEQGNGKIKIAKLLNAEGIPCPSEYKKLNGEHYHNGQKLGKTTYWTYATIHRMLKNQMYIGNMEQGRASRQTMHGRAKQLDRSQWTVVEGTHEAIISRPQWNRVQALLTKDTRTTSFEKNISPFAGFLHCGDCGRAMSKTNHPGGVYYCCGSYKRYGSNICTRHGISHRELEKIVLDDLNKIIQVVGDLKTLVEQAVPKKKLRNLQAERERVQSSLDRVHRLKKCAYEDYRSELLTKEEYLSYREDYARQETALSSQLAQLEQKDPEDVLERPWITALLKHGKLTQLDRTTVAETVKDILIFEDGHIEITYLFSDELGILTAPDG

SEQ ID NO: 5021 - protein, 590 aa, unidentified
  source 1..590: note = uncultivated organism
MKNTKQDNRKIAIYSRKSKFTGKGESTHNQIETCKRKIELTFDNVDLENNIIIYEDEGYTGYNTNRPAFQKMLKDIRDKKIKAIAFYKLDRISRNVSDFSSLVIELDNYDVSFLSATESIENVTPSGRAMMFMISVFAQLERDTIAERIRDNMLELAKTGRWLGGMTPTGYKSEQIENITVDGKKRKLYKLSTIDNEVRIVKILFDKMRELKSQTKLETYTIQHDIKTKNDKAYTRWGLKNILINPVYAIADQDTLDYFRNLGVEIYADEKEFDGIHGLMVYNKTEKKKNQVVRKDVNDWIVAVGKHKGIISGKEWVEVQELLDRNSDMKYRKPSTSNALLSGILRCSHCGSFMRAKLKNKMVSADGRRVFDYMCELKDKSRKQKCQCKNINGLEADDLVLEEIKKLATPTSKFYKALKGLSSSTFNKEDKNNEEVKTLKSLIYKNENDINSLLDKIKYVDVSLLDDISNEIKKLKETNIELEKQIKSLTNTNYNEISDKETADLLLNILDTYFTSFDTLDLNTKRNMIKLLVSSITTDGEDITINFLGARNMKDETFPTGANCKWNTNAFKGYKENRCRSFIGRSNRKR

SEQ ID NO: 5022 - protein, 536 aa, unidentified
  source 1..536: note = uncultivated organism
MTAKVRKPVRCAIYTRVSTDQRLEQEFNSLDAQYDASQAFIRSQAHAGWTLTKTKYDDGGFSGGNTDRPALQRLLADIRAGKIDVIVVYKIDRLTRSLADFAKLIELFDQHGVSFVSVTQQFNTTTSMGRLTLNVLLSFAQFEREVTSERIRDKIAASKRKGLWVGGMVPLGYETKDRNITVNKAEAQTVRTIFRGYLKLGSLNLLMIDLRERGIVTKRRVVKSGKVVGGLPFTRGPLAYLLRNRFYIGEVSFKGEILRGEQPAILDRKLFNAVQTKLDAQINGHRRRRSSSEALLAGRLFDDRGERMTPSHSRKNGRKYRYYISSVLLQGQSEKAGHINRVPAEEIETLVAKSVRDRLKLSDKLDIKTLIETHVARVDLRTDRLIVDLTPAVTKATGKGRPLKQLTIPWRKTASTRRREILLPEGSNTDQARPLCSEARGFLISSIAQGRLWLNELIKDSATSVEEIAKRERCSRRKVNMAISLAFLAPSLIRAAIEGRLPRGIGATRLSDLPAEWSQQYRALGLTPRDSIAPTG

SEQ ID NO: 5023 - protein, 572 aa, unidentified
  source 1..572: note = uncultivated organism
MTAVIYARYSSSSQREASIEEQVRICKQFADRNGYMVAHVYKDSAITGKTDKRPEFQLLLKECTKKPFDAVIVYSIDRFGRNLLQSLGNASKIEDCGICLLSATEVFTNTPSGKLHRNMMMCYAQYYSDELAQKIKRGMDFNGERCLSTGGNIALGFKVNEHKQFEIDPEKAPLVRMIFEMYADGRKVTEIVERMNSMGYRTAHGARFNKNSLHTILKNKRYIGTYTYKGTEIPNSMPRIISDELFNKVADRMSANKKAPARARAKVEYLLTTKLFCGRCKEMMTGFSATGKQGKVYNYYICNGRKAKKCEKGMVKKDYIEDIVVSQCRKFLTPANIAKIAQKVSALCEEERDTSNLRFLKKNLADNKKKQENAINAVTETDNPTIRKGLYDRIAQLEAAQKEIEAAIAQEVIPFPSLTEPKIRFFLTALRDGSVKDIKYRKMLIRLFVNRIYLYDDHLTTTFNTGEDTVEINDRLLAELEENRDKERLLFKGKDGPPDEKSELIPHRECVRIFHFYQGYFLLMFIPGGFFILRVFLLFAHSISAIFPAIMIAERNRRLYKWRDLSQMNAQG

SEQ ID NO: 5024 - protein, 569 aa, unidentified
  source 1..569: note = uncultivated organism
MTAPGPPPAARGRKRRRPVPGFGGASAGPRRVAIYLRRSTDDEHQPFSIGAQETALTSYVTTQPGWTLTATYSDASGATTSRPGLHQALRAARAGLFDVLLVYRVDRFSRRLSDLLGLLAELDEAGVAFASATEPFDTSTSIGRMLVQLLGVFAEFERETIIDRVTKGMHAKAAKGKWPGGHRPYGYDVNRETQKLVPHPDEAPHLREIFRLYTDERLGTRAVAGVLNRRGVPNRSGMPWSGYTISRIIANPAYAGDLCYGEVYVENAHEPLISRQMWQMALAIAAARASEHTQRAASPADYHLTGLITCPHCGHSYVGTSATGRTRTYRYYTCFSRARNGPHGCPAPRLPADETDAAVLQALCDFYAHSTSLIHDAVTQAQQRHRDGHASQRAQHTAILAQIKQKKAAIDRYHAAFENGTMDDATAGQRLKTLHDQITQLTTRADELTQALSDEPAPPPPGVIKDLQAYLADAIASGTPAERKAAIEALVAEVRITDHGLIPVFRIPSPNQLVRRNNQRHHDRPSGSHNAEVSGAKGTRTPDPLLAKQVLFQLSYSPRQPPVTRPTGF

SEQ ID NO: 5025 - protein, 609 aa, unidentified
  source 1..609: note = uncultivated organism
MKRNEKMVAIYTRKSKFTGKGESIGNQVEMCKAYVLSKFGKEYVDRCVIFEDEGFSGGNLHRPAFQQMMKEVREHKFEKIIVYRLDRISRNINDFTGLINELDRLDVSFVSIREDFDTKTSMGRAMMLIISVFSQLERETIAERIRDNMHELAKTGRWLGGNTPTGFKSGAVSKITIDGKERKSYMLLPIPEEIEIPKMIFDLYTETDSLTAVEAELLRRRVKTKRGKEFTRFAIKAILQNPVYMVADEDAYNYFAGKEAQVCFPKEAFDGSCSIMAYNRTDQKKGRTTQLLPVNEWIIAIGQHSGVVPSKQWIKVQESLDRNKSKSYRKPRNNEALLTGLLYCSCGERMYPKLSKRTTATGETIYTYVCKMKERSKRERCNRRNANGNILDAAIIEQIKSLTDHDSSFVSQLAKSRAFYTGKREQYEKQLEELRAEYAQNEQTINGLIDSLGMVGDSIVKPRVLKRIEELSEGNRDIENCIRELEGLVNANELNDAEFDLLRQLLVHFRTSIDDMSVEEKRAAIRTVVRKVIWDGVNAHVVLFGADEGEIEFPDMDDRLCHMDDQNGEEEPLEAFADVDYDDFEEEDSGLGNIEPMGGSKTHWGEDSK

SEQ ID NO: 5026 - protein, 501 aa, unidentified
  source 1..501: note = uncultivated organism
MSESSIKRAAIYLRISQDRHKKGDAIRRQREDCEYTCRWHKWEVAAEYVDQSKSAYSGIDRPEFDRMVNDFRAGKFDVIVAWKLDRLVRRVGTLADMVSEVQGERPEDGLRICTSDCGLLDLTTSDGRYLATMFANNAEFESARKGERERRANLQHALDGKPRRGSQRCFGYTVDREIIPEEAALVRACYRAYLSGHAMNAILRALNGDSGSVAYPALQEALAGLKGPQKPWTRTRLKYLLINPKYCGFVAYVSEPARPGMKRRQRSCIVAERIVRDDDGQPVHGDWEPIITEAEWYAAREKALARQRGQQPNWRKHIGSGIYRCGVCGGPMYAGSGSYRCKVPGHACRLQKPIDDLVLRTVRERLARGDLAQLLPHDDSGRLAEIETELADCEAKLKRYQEDYRAGFIGGAHFKEWSDEETERRDRLIAERDGLTTDPTGGILTADDPVAAFDAIAEDPVRVGNIIDYLMTVTIDKKPVATKGRGRKFNYTGIHIKWKEH

SEQ ID NO: 5027 - protein, 576 aa, unidentified
  source 1..576: note = uncultivated organism
MSKPPPSRGGCRWRCAIYTRKSSEEGLEQEFNSLHAQREACEAYIQSQRHEGWTCLRETYDDGGLSGATIDRPALQQLLADIQAGRVDIVVCYKVDRLTRSLADFAKIVEVFDAKGVSFVSVTQQFNTTTSMGRLTLNVLLSFAQFEREVTGERIRDKIAASKKKGMWMGGVPPLGYQCRDHKLIVIPSEAEMVRHIFRRYAALGSVRLLQQALDAAGTRSKSWVSTAGRCWGGKPLARGALYTMLRNRIYRGQIVHKDQHYPGEHEPIIDEVLWQEVQTKLTANAVERATGERMLSPSLLAGLLYDGQGHRMTPSHAVKKAMRYRYYVSQPLISKTREAAPEGLRVAAAEIERIVLSGIGELFSNPGRLAEALGPSIETAGEQQQILRRAGEVAATWSELPAPQFRSAVAMLCRRITARSERIDIEISGRGLYAFLRGERAESRAAEQPDHQLLLSFPTRLCRIGQGKRLVIDAAVRPGMPGKPDPKLIKLLVRAHRLKEKLREIPGTRIANLAMREKLSPSYAALLLRLTFLAPDITRAILEGSQPGGFTAQKLVTHYALPLAWPEQRQALGFA

SEQ ID NO: 5028 - protein, 561 aa, unidentified
  source 1..561: note = uncultivated organism
MERPKLQRCAIYTRKSSEEGLEQDFNSLHAQREACEAFIRSQAGEGWRLHPTAYDDGGFSGGTMERPALQRLLTDIQEKLIDTVVVYKVDRLTRSLADFAKMVERFDAHGVSFVAVTQQFNTTTSMGRLTLNVLLSFAQFEREVTGERIRDKIAASKRKGMWIGGMPPLGYDLRERRLVVNPAEAETVRGIFQRYLEIGYVRGLKDDLDRTGMVSKVRITRGGIRAGGQPFSRGALYTVLSNPIYIGEIRHKRDRYPGQHEAIVDRALWEQVHQRLRHQAAFRGRRSSPNQASSSPLAGKLFDENGEPLYVQGATKGARRYRYYVSRDLVRGAADTAQQGWRIPAPELERTVRAAAQEMLADRIGIAEAAEQAGIDASSLPSVLTTAHKWKDDLSAGSHTAPALAQVTNRVDLTRDGIQIALTVPLAPEMARTAASTDPLLLTRFVPIRIKRRGIEMRLVVEGASPPWRVDQPLLKVLARAYQWSDDLLAGRVPSVAALARREGVTANYVRRVIRLGFLSPTIVEAIVEGRHPAELTALALTMRTDIPTLWSAQEQALGLG

SEQ ID NO: 5029 - protein, 543 aa, unidentified
  source 1..543: note = uncultivated organism
MRPAGKSIRCAIYTRVSTDAGLDQEFNSLDAQYDASEAYIRSQAHAGWTLIKMRYDDGGFSGGSTDRPALQKLLDDVRARKINVIVVYKVDRLTRSLADFAKLVEQFDAHGVSFVSVTQQFNTTTSMGRLTLNVLLSFAQFEREVTAERIRDKIAASKRKGLWVGGMVPLGYALSDGKLSIHPDEARTVRLIFERYLELGSVNRLVTDLRAKGLTSKVRKLSSGAVRGGVPFTQGPLFYMLRNRFYIGEVTFKGEILPGPQPPLLERSLFEAVQAKLTEQWSHRTRARQKSKALLTGLLFDDAGNRMIPTHATRNRVRYRYYISQPLQRGRSDDPVGSISRVPADQIEALIINAVGDRLTKSGEQWSGSLGEQNAVAARIAKVEVRTKHLAVTLKTIEPMLTHDHELARHDDAGTTQGEVVLIPWTKPPMRRFRDVIQPASASLRRTRPIRAERRAGLIRAIARGRQWLDEIVFGRATIQEIAVGQKCSVRQINLTLSMAFLAPSLVKAAVEGRLPRGIGIAELRDAPPEWSKQYVKLGLPTF

SEQ ID NO: 5030 - protein, 630 aa, unidentified
  source 1..630: note = uncultivated organism
MIEEKKVAGIYIRVSTEDQAREGFSLSEQKERLEAMCKFKGYKIYDVYEDAGISAKTGNKRPEFDRLLKDIRFKKINTIVTLKLDRLTRSVYDWEDIMKFLEENNAYLDCANDEINTTNANGKLVSRLLMSVSQNEIERTSERTKVGLAGAIKDGHIPHIAPLGYKHKDKKLVIDLTTKDIVIRIFDLYHSGLSYQKISTLFNNEKVLNKTNWRDSTIVTILQNEIYKGDFVHGKRQKHPTYYSNVVEPIISKEYWEECQLQKKKNSRSYQRTLTYLFLQKLKCPTCGRILGGKATKKKNGNVYFYYYCTDCKHNIKENIIETYINNFINDILEYNSVVNQFFLPMLKQKIENPKEDIEKELKECNLKLDRLKKAYLNGTFNLKEFDKEKIVIESNIELLESKLKDNNVCEELKFTPEDILVKRDIDFINRIKYPEKYKEVNKLWKDLSREEQSNLIMNYIDEITLKIKDNKTYEVDEVNFRESICKPCNELYDLGYIDKNDYAIYGNIVGHLRYSEYLPEQKVVEHILRLRQFYDVGYYEAIYNTREKIFYFNYDNERTIVRVFPLEDYLKIDPNMKLDKYKLGVIYIKKDDGTLLEDSNGVFNSIPEKCKYNTIYSKEQIYVDVKPIE

SEQ ID NO: 5031 - protein, 552 aa, unidentified
  source 1..552: note = uncultivated organism
MKHVRCAIYTRKSSDEGLEQSFNSLDAQREACGAYILSQASEGWTALPEVYDDGGLSGGTLERPALKRLLAEVAAGRADIIVVYKVDRLTRSLFDFAKLVETFDAAGTSFVSVTQSFNTTTSMGRLTLNMLLSFAQFEREVTAERIRDKIAASKARGMWMGGTPPLGYAPNDRTLVIVEEHATLIRHLFARYRALGSVRQLQDELVCDGVRVPARTRLSGASIGGGAFTRGQLYQILKNVIYTGKIGHKDKLYDGLHPAIIEQSLFDAVQSMLADHCQGHRSRAAAAEPSLLAGRVVDAAGGPLVAAHACKGRVRHRYYVSRALHHGSSDTGLRLPARELESLVTERLTEFLIDPLELAAAMSLVVTPQLLTTLPDRCTTLTGELGQRRPPLVRAIVTAVEIRAAEIVITVNLTALAAALGVEQPGGGPAILALTCTARLTRSGRALRLVQDNGVLTRQTADKSLVRLLVQARRWWTLLRSSEISIAELAAREGVTSSYATRVVRLAFLAPAVTEAILAGRQRAGVTAASLTLESIIPANWHTQKAAFLPAS

SEQ ID NO: 5032 - protein, 560 aa, unidentified
  source 1..560: note = uncultivated organism
MLNTVMEYHVAMYLRLSKDDGDISHSEKKMESDSIQNQRELLRAFLKKHPELILFDEYKDDGWTGTNFDRPDFQRMMGDIQAGKVNCVLVKDLSRFGRDYIQCGKYIEKVFPQQGVRFIAVNDGFDTLSATSSDSLVVPFKNLINDSYSRDISVKVRTNLEVKRRQGDCIANFAVYGYAKDPENKNHLVPDPYAASVVKDIFAKAVEGLSPGSIAARLNETGVLSPMEYKKSQGSRYQTHFKTAGKAQWSHVAVRRILQNEVYTGVLVQGKRTTPNHKTKKVLYKAEEQWARVENTHEAIVTKGQFDMVQQLLKEDTRAGKLTQAVSPFCGKIFCGSCGAPMVRKTVSWKGKRYVYYVCGANKADASMCSKNSFREDVLEQAVLATIQRHIESVLDMDKALSKLESQSWERAEIQSIEATMERQRAEMEKNQQLSLSLYEDLQEGILTREEFSSLKQEFLHRVEEAKEAIRRLENSKAEIQQGLSSHQSWLSQFRQFAGVTTISRPLVVNLVERVRRFPSGDMEVVFRQQDQFIHILEFLKSQKGKRQKQPLPFPGREVG

SEQ ID NO: 5033 - protein, 528 aa, unidentified
  source 1..528: note = uncultivated organism
MPEPVRCAIYTRKSSDEGLEQEFNSLHAQREACEAYVLSQKHEGWQLLPDAYDDGGVSGGTLDRPGLKALLAQVEAGRVDTIVVYKVDRLTRSLADFAKLVELFDKKSVSFVSVTQAFNTTTSMGRLTLNVLLSFAQFEREVTGERIRDKIAASKAKGMWMGGRPPLGYDPKDRSLVVNEAEAAQVRTLFSAYLELKTVDALVSFADKRGIVSKRWTGGNGQELGGMMLLRGALYHILANPVYIGEISHRGKRHPGLHQPIVDAKLFAKVQALLAENRRRRKLGKQAAETSLLAGLVFDRAGERLTPTHTSRNGRRYRYYASNALRLRIPATLLEQVVIGTLTKQVSSPEIMAPLLVPDGGSLHDLLALHGERAAQLLGDKPRAALLDLVERVVIGVDQVAITLKPLANEGAIKLSTAANFTRRNRHLSVVGVSTIQKTSPSVLAMFAKGRIWFEELAAGTYPSIDALAKAEGVTGSYVGRLMNLAFADAAIVDDVFEGRLLLSDTAPELKDKLPLPCAWEAQRAAIS

SEQ ID NO: 5034 - protein, 558 aa, unidentified
  source 1..558: note = uncultivated organism
MKTVRCAIYTRKSSEEGLEQAFNSLDAQREACAAYVLSQASEGWSALPDVYDDGGLSGGSLERPALQRLLADVAAGRVDIIVVYKVDRLTRSLLDFAKLVEAFDKAGTSFVSVTQSFNTTTSMGRLTLNMLLSFAQFEREVTAERIRDKIAASKAKGMWMGGTPPLGYRPDGRSLAIVEDHAAIVRDIFQRYLEVGNVRLVADQLARDGIGAPRRQTAGGRIFGGCAFTRGQLYAILKNPIYVGDIRHQGKLHKGQHQRIIDRDTWEATQAKLADHLQGERRATPVASPSLLAGLIVDEAGEPLVATHACKGRVRYRYYVSRALQHDGSAADAQGTRLPAQEIEAAVTERVAEALRDPLALAAKAWLTIPAGEVSQVVARSTAVATAVANRDQEMVRNLVQQVRVLRGRIEINVAVQALADMLHVPVAPDAPAAVTLISEVRLTRTGRAVRLIQSDGSGVGETSPDPTLVKLLVKARRWWSALKTGEVDVATLAKQEGLTGSYIARVVRLAFLSPAVVDAILVGAQCAKIDGETLTASGAIPVNWAEQQALFLPRSDS

SEQ ID NO: 5035 - protein, 572 aa, unidentified
  source 1..572: note = uncultivated organism
MINRAAGYVRVSTPIQAKEGESLSTQRQAIEKYCKSKEGLELVEIYADEGISGAATEKRHGLLRLLEGARAKRFNCLIIHRLSRFGRNARELLNNVEELNNNGVKLISLKENIDFANSFGGAILGMLAIIAQLERDIINEQMNENKIARWKRGDTFIGKPPYGYTWNKDKKVLEINPEESAIYKRIVNMYIYEGMSYRDITIKLKEEGIICKRAPFSNVTIQYILNNPAYYGNYIVNQYQYEGNRRKKVYNKEGKKKTMLMKPFSEHIVFNNPPLISKSEWDKVQEKRKFNIVKGKRISIARDYWLRDLLVCAECGATIKPHHGSTRKNGTFPRYYSCSWASTSKKGLKAASKAKCKLPTIKADEIESKVWSSLIIKLSFGGFELGGEYCPSYLERSLDCENYEKTIKELDIAIENLIKEIKRKERVKQNIHTIIQDERFDINDFYNKLRSNDNEMVELESRINDFNIKRDALQSAKANNLALLEFVENNSEWLENMQIELANLRPDDKKIFTESLIEKITVYKEVEAGAPPWGFENLSINFNRAIFERFASEGKISRLDKNGPFDPAASQF

SEQ ID NO: 5036 - protein, 686 aa, unidentified
  source 1..686: note = uncultivated organism
MTRVALYLRLSDEDRDKLTKEERSESIKNQEKMLRNYAYQHQWEIVAIYDDEDWSGADITRPNFKKMIDACRMRQIDVVLVKSQARFARDMEIVEKYVHNKFHEWNVRFVSLMEKIDNTRKETKKMSQIIGLTDEWFLEDTSHNIRQTLKSKRENGEYTGSFAPYGYQKDPENKNHLLQDLKVKPYIIRIFQEYNYGYGMGKIAKRLNQDGIPSPLEYKLMMGSHLKLPCLNSSILTTFSLTGSYLLRIYYYNHTGHIIRNLITLEYLTNYTHFYRQGGGSITLTKVKNEKIKFYYSCCSLSEINSSFSETGSLDFDNHLFWQPLVIGESLPEKATCIAVYTKELDRMNDIFYEFTITLLKNHDHIQYRYHIDSLFPYSQLASEYQIQLRKQYLWSITTIRKILQDEVYLGNLVQFKTTTVSYKNKTKIYLSEKERIRVENTHDAIIDSLLFQQVQTKLKQRKKCSKDGVVHLFAGKVFCSCCGRVFYKCGKKDTEGFRYLCCKDKVNHFHDCTNQKYIHEKELYDAVLNQFNLLLQKYYQVDYQLNLYQSLGNLSQDCQVEKELIALQQEKVKLCQELEQKHNTFSNLYEDFTKTYLSQKEFFLLRDKYRLDQEYLNKQLQLLEGKIQLLSKKRKAVQVQSVFEKYTQLASLSREIVQDFVEKILIDGYDPITNTRKIEITWNFD

SEQ ID NO: 5037 - protein, 511 aa, unidentified
  source 1..511: note = uncultivated organism
MGKEVKLRTAAYCRVSTDSAEQASSLSSQRIFFLEYINKREDMELAGIYYDEGASGTTTRHRKGFNEMIKAAKEGKIDLILTKEVSRFARNTVDTLSITRMLRDCGVGVVFITDNIDTRDSDGELRLSIMATIAQEESRKISERVRWGQKRRMEQGVVFGRELMGYNVSKGRLSINEAEAEIVRRIFTQYAILCKGADTIAAELQRDGVPTKNGGRWSAAYIRRMLKNEKYAGDLVQKKTYTADHLTHKRKVNKNGEKITAVMHHEPIIDRALWEKTQQELLRRSPKDSTRHSDRYSYSGKVFCGICGCVMVSRVKHPANGGEYHALRCSGRIKGNGCNNETLNVKAMNAVIEKITSVVCNRQRIIDSVCKRAVLSDERQSSDTVKKRIELLLKKKARAVDLMIDEVITKEEYLIRKAAYDRELSELSEQEQLSEKVRGEADIRQSAEEILVAGNDEVWRIIERAVFDRGTLTVYFEGIEDGFCASFCSKGRGEEYHTIVGGITRVKRGSF

SEQ ID NO: 5038 - protein, 558 aa, unidentified
  source 1..558: note = uncultivated organism
MKKIRCAIYTRKSSEEGLEQEFNSLDAQYEACAAYIASQKAEGWVLLPERYDDGGISGGTMERPGLQRLLADIDRGIVDQILVYKIDRLTRSLADFAKMVDRLDAAGTSFVSVTQSFNTATSMGRLTLNMLLSFAQFEREVTAERIRDKIAASKKKGLWMGATVPLGYAADGRSLKITEPDAGVIRTIYDLYLRHCNVRLVKEAVDAQGLKTPVRTLISGKVKGGTAFSYGHIHYILTNPVYAGRIRHHANVYPGQHPPLIAPDVWDGIQEQLRSDSAKGRTFTRRNRDGAKPSVSQLAGKIFDQTGDRLTPSHSKTSKGRRLRYYVSHRLVRGSAPRDPSGWRLPAPELEKKIAVLIMRHMSSPEFCTGILQNATTEETAEIGQKLTSMGKTELCADDDALKSHLAFAERIDIAPGEIRVLISVKRLADRMGVDQAHIVEDFLTLTSPFQHRKRGVETKLIIGNEPAEIDETLLRNIGRGHRFFELVASGKTLDEVATIEGVSKHRIKQVIELAFLAPDVIRSVREGRQPVGLTSDWLMRHAFSPVWSKQREMFAAL

SEQ ID NO: 5039 - protein, 525 aa, unidentified
  source 1..525: note = uncultivated organism
MTTTTIKKRLYCAIYTRKSTNEGLDQDFTTLDNQRESAESYINSQKNEGWIILPEKYDDGGYTGANTERPALQKLIADIKEGKINCVVVYKVDRLSRSLLDFVQLLELFEKNNVVFVSVTQAFNTNNSMGRLTLNILLSFAQFEREIISERVKDKMGAARKRGKYIGGKTILGYDVDRANRKLVINEEEAKLVHVIFDLYLELKSFLKVAVVLNDKGHRTKRYVTKSGKVMGNTKFKNTNIQLILQYVLYTGKVKYNGELYPGLHEAIISEETFNKVQQIIANNRVRRDNPKNTRNTGLLNRILRCKACNSVMFHTYTSKKDNRKYRYYVCMNAQKRGYKNCPTRSVNAQQIENAVVVSLIKIASDSEFRKEALRDVNKKAREEIDAFEQERKALCKDARDLSERIDNLKESLKGSSDNNEALERDLKTLEAKYEEYQRLVTDARVKEMTLGQKLISDHELEQALIVNSPIWETFFPQEKHKALKLMLKEVDYNGTDGKIELTLNHGGIKFLYLLLHPELQKNIK

SEQ ID NO: 5040 - protein, 521 aa, unidentified
  source 1..521: note = uncultivated organism
MATVRMIPATPRGGGRKNESESHKIRVAAYCRVSTDTDEQATSYEAQIEHYTDYIGKHPGWELAGIYVDDGISGTNTKKREEFNRLIEDCMAGKVDMVVTKSISRFARNTLDCLKYIRQLKDKNIAVFFEKEAINTLDAKGEVLLTIMASLAQQESQSLSQNVRLGLQYRYQQGKVQVCANRFLGYDKDEDGNLVINPEEAEVVKRIYREYLGGKSYYQIGKELSEDGIRTAAGNDYWLASTLKKILTNEKYIGDALLQKTVTTDFLNKKRVVNKGIVPQYYVEGSHEAIIPRELFMQVQEEMVRRARLKTGSGNRRVYSGKYALSSTIYCAHCGDIFQRTQWFIRDERLPVWRCACRLNRKKSKIDCPSRTLYESDLHAAVVQAINQVIAQKDDLLPGLKIAIEKALGSGNGTRVAEIDAQLEDLEKELLKRANSKQDYSDILEQLDAMRDAKQELLLEDANTAGVQRHLHEIEAFLETQQTDIEEYDEDLVRRLLERVTVCDDHLTFELKSGIEIDITM

SEQ ID NO: 5041 - protein, 507 aa, unidentified
  source 1..507: note = uncultivated organism
MSFVGHASPPPHPHTMKKGGQNPPERGASDHEPTAENPNHRHPRHRAADPRNGRMGRAVRGACAMRVALYCRKSCFTGRGESVENQAAMCRAYAQLHYPDAEICCYTDEGYSAKPTDRPAFREMLAENARSAFAAIICYRLDRFSRSVRDFAQLAEALAAGGTALICVREQFDTSSPAGRAMMYMTSVFAQLERETLAERVRDNMHQLARSGRWLGGTPPLGYAVQVQTATGADGRVRTQYGLRPDAEKLRIAAAVYQTFRQTEQTSEAIAQIARTTGRTFSPTGLREVLRNPVYCAADAAARDYFASHGAAVCFDGTHGECGLMRYNHRDYTRPGAPRRPMTEWIIAAGIHPPIVSGAEWVRVQQMFDRAVPRPRHTAALGAGALTCARCGAPLRVKARPDGTFDYICAMHLRAAADCPTGNLNGAAADRALAAALDDAIDGWSRGTDSPLRAWRTRLTLPEQRKLLRDARVTAMWDGAVLTVTRADFAADSFSGGTEGDFPSSLQ

SEQ ID NO: 5042 - protein, 507 aa, unidentified
  source 1..507: note = uncultivated organism
MGDIDFGIWIRVSTDEQAQGESPKTHLERATYYCKAKGWNIAETYDLSGVSGKSVLEHPEAQRMLADIKAGKIRGLVFSKLARLARNTKDLLEISDIFQKYDASLVSIEESIDTSTPAGRLLYTVIGALAQWEREEISARVAASVPIRAQRGLPTGGIGPFGYHWVDKNLVPNPAEAPTVKRAFEVFLATKKVLSTANILNSEGLRARKSAWGTTTLKRLLVDPVYRGERRANYTKSKGAGRSWQMKDEKHWVLTEVEPLVTPEKWSAVQAVFRDRVGKVSEGIPKETAYMFGGLLRCHCGTKMYVLPYKGMKIPRYICRKCRNKINEDAILDQLLKAIETIVVSPDQVLFSKAADEETISQRKELLQSHKRDLAALRRKIDLTFDLLHDGTISKSVFAERFKQMNDRKEQLEADLSRLEAENAIAQETVNNRGFILQQAKNLVSMWDIFTTDEKAEIVKEIVGAVVVGPETLTFSISYLSNITPLCKDDHTGRDSWRQPALSWTGR

SEQ ID NO: 5043 - protein, 548 aa, unidentified
  source 1..548: note = uncultivated organism
MKNEPVKKKHLVCAIYTRKSTSEGLDQDFTSLDNQRESAENYIKSQQHEGWTVSDEHYDDGGFTGANTERPALQKLLNDIKNKRINCVVVYKVDRLSRSLLDFSQLLEFFDQNNVTFVSITQQFNTNTSMGRLTLNILLSFAQFEREIISERTKDKMGAARRRGQWLGGRPPLGYKRDGAQKKLIVEPEEAKLVKRMFDLYIEGHPSVEIAQILHNDGITSRPWQQKDGTQRGNKNLGNTQILHVLKNPPYIGKINFGGQVYTGQQPAIIDEDRFNKVQDIIKNNRHDRKNIKNKSFTGMLSHILKCKHCGAHMINTYSTKNKKLQYRYYVCTGAQKHGYASCPTRSIPAQIIEEEVIDRLKACLPEIAKDLPRCKTEVEALLSTVWDSLLVIEKRRLLRTLLKKIDYDVTALKLGFTFNDLPNRLEFDALIRKSAPRSRWRREVAIDKEPRIRKALILAHHLDQLMREGRIKNTNQASEWLGLSLSEINHTQELLLLSPAVQEDILTGDGRQFEQIPEYKIRRISADPDWDKQAKLWEEAKAEFPQN

SEQ ID NO: 5044 - protein, 527 aa, unidentified
  source 1..527: note = uncultivated organism
MNKTTKTAPAQPSVRCAIYTRKSTEEGLEQAFNTLHAQRESAEAYIKSQAHEGWTCLPSQYDDGGFTGGNMDRPALRRLLADIEAGHVDCVLVYKVDRLSRSLLDFAKILETFDKNHVSFVSVTQQINSATSMGRLMLNVLLSFAQFEREIISERTRDKIAASRRKGKWNGGHPVLGYDVDPVQFKLLVNEDEALRVRAIFALYLEHGSLLPVVVELERRGWTTKRWTTRKGNERGGRPFTKASLHYHLTNVAYLGKVKYKDEIHDGEQEAIVDADTWQRVQAMLLRNGRSGGAMVRNQFGALLKGLLRCVPCGCAMTPAHSKKGAAKRYRYYTCSSAQKRGWHTCPSKSIPAGEIERFVVDQIRCIGKDPALWHETFTQASAQTEARETELEAERRVLERDVGKWTTELRALALEVSHSQGGAAIARLSDLQERIRTAEERARTIDEEAQGLGRGQLHEDEIGQALMDFEPVWDALAPREQVRIVELLVERVDYDGAANTVTITFHPSGIKALADEIAGRQKGKSA

SEQ ID NO: 5045 - protein, 548 aa, unidentified
  source 1..548: note = uncultivated organism
MVIYTRKSSEEGLEQTFNSLDAQREAREAFVRSPRHEGWQLIATHYDDGGFSGGNMDRPALKQLMADIHAGKISVVVVYKVDRLTRSLAEFVKLVEQFDKFGVSFVSVTQQFNTTTSMGRLTLNLLHLVAHFEREVTGERIRDKIADSKKKGIWMGGTVPLGYAAQDRKLIVNEPEAATVRTIFNEFLRLGSVHSLQDWLRENDIRSRTRNHFFRGPLYTVLRNPHYLGLIKHKKESYPGEHPAIIDQATWDKVQALLDANIRGKRRKVRATKESLFTGILFDATGTLYTPTHANKYGRRYRYYTSQAVIKKTEKSNAPARIPAPDAEKAVVDRILNWLQTSADLLAALRDETIVAPEGFFDRIIAQAAATAQSGRERIAADRTQFLKAVIERVVIHPTHVEIRLRLPALVNEILGGDQPGRGFPPFASVECQFRHVQQGRALRLIVGNTSITAHASREAILKAIARARQWYEQITTGKATNIAQLAAIDGVSPRFIRMQMKLVQLRPKSIERLITRSESLPLSLNDLLAAIPMDWREQSLGLPAKSV

SEQ ID NO: 5046 - protein, 569 aa, unidentified
  source 1..569: note = uncultivated organism
MKTSPRVNGAVAANSNPVGAKRACCYLRVSTGRQVESDLSIPDQRNQIAAFCLNNGLSLVDEFLEAGASATDDNRPAFLEMILRATAKDHPFDVVVIHSYSRFFRDLVGSEMYIRKLEKARVKVMSITQPMGDDPSQIMMRQMIGLFDEHQSRETGKHVKRSMIENAKQGFHNGSPITLGYKAQEVELRGTRVKKKLVIDPVEAETVKLIFQLYQWGDGQSGPLGTKRLVSYLNEHGYRTRRGARFGIGTIHNILTNTTYIGELIYNRNDSKTQQLKDPSEWVTVEVPPIIDRAQFEAVQAALKSRAPKNTPPRVITSPILLSGLAHCATCQGAMTLGSGTSKNKTVYNYYKCSTCAKQGKTACKGRSIRMDKLDTLVTQHLIQRLLTTERLTDTVASIVAQRATKVAEVDGRLQKLQAEVSDAESKLKRLYQMVEEGLTEVDEILKGRIDALKQNRERAQTALDRIRVNAVPPADIPAEIIETFGRMMRENITSGEIPFRKAYLRSVVDRIEVDDEVIRVIGSKATLLKAIAGGNPGLPGVQSFERKWCARRDLNSQPSGSKPDALSS

SEQ ID NO: 5047 - protein, 522 aa, unidentified
  source 1..522: note = uncultivated organism
MVAQSRNTYTVAAYSRLSREDGDRVESDSIINQQRVIEDYCASRGELHIAEHYADDGYTGTNFDRPAFQRMLADLKAGKVDCIIVKDLSRFGRDYIDMGYYLERVFPALGVRFIAVNDAVDSEKGPYDMLLPLKNVFNAQYAKDISGKVRSAFAVKQKRGEFVGAFASYGYLKDPENHNHLIIDPAAAPVVRRIFELTARGIGQVKVAQMLNDERLPCPSEYKRLMGEKYSNSKRLSTTCYWTYSTIHKIVRNEIYIGNMVQRRAVRASMHGKAKAADKSEWIVVESTHEAIISRELWDAVQAQIGRNSRTMDFESNVGLLAGFIRCGDCGRAMVKTVWSGRIHYSCGSYRRYGFTACTKHYIPQKDIEDILLNDLNRIIAQAGDLKRLAEESCSVSDPHIRRENEERRLTAALERIRRLKQSSYEDYQDKLLSRDEFLRYKADYDRQEETLAAQLKQAHSTVKDNEAANPWLEKLLKLGHLTELDRTTLAQTVKEICVFEGKHLEIVYLFSDELRGVLETN

SEQ ID NO: 5048 - protein, 567 aa, unidentified
  source 1..567: note = uncultivated organism
MSTVNSVQVESRGRSGKKKIWQAALYVRLSREDGDKEESDSVVNQKDLLQQFVNLEPDIAVHDIYMDDGWSGTNFERPDFIRMMKDIKEKKVDCVIVKDLSRFGRNYIDVGQYIEKIFPLMDIRFISITDSLDSVKNPQTMNNIMVPFKNLINDEYCRDISNKVRSSLDMKRKQGKHIGSFACYGYKKDPDDHNHLVIDEEAAEIVREIFRWYISGMSILSITQKLNEMGIPNPSNYKKQNGLRYKNRYEQISDGRWPDSSVRRILGNQMYIGDLVQGVLKNISHKVQKAQRQVKDDWIIVENTHEPIVSREDFEVVQELLKRNTRKAPAKKEVYLFSGFVRCGDCGRSMSRKHHHHDYGDYTYFVCTTYAKIDKTACTKHTTRADKLESIVLASIQAQIALAVDMEKAVKVINASDKANKEAVRLRKMLEQAKYDVEKADMMMLDLYPDWKSGVITKDEYMRLKERFEGQKFNALEKVQELQAKMEEAENGQDSTNQFLENFVKYKNIDKLTREVIVALIDMIYIYEGNKIKISFKYQYPFKAAMEYIENNRELLDASQAKALLGA

SEQ ID NO: 5049 - protein, 600 aa, unidentified
  source 1..600: note = uncultivated organism
MSGKGRLRCAIYTRKSTEEGLEQEFNSLDAQREACAAFIASQIGLGWKLVPEQYDDGGISGGTMERPALQRLLTDITGGKVDVVVVYKIDRLTRSLMDFARIVEIFDRYDVSFVSVTQQFNTTTSMGRLTLNVLLSFAQFEREVTAERIRDKIAASKKKGMWMGGTIPLGYRVENRKLVIDEIPASAVRNLFRRYLELGSVPALVRELNDCGSADGNIASLLRADSGQGRRRPASIIGKGKLYYMLSNPIYAGRIRHGDAIYAGEHQPIIDNATFEAVQMRLAELAPRPRGVPVQRDIHLLNGRLFDETGDRLSPIHATKAGKRYRYYISSRLKEAGSEHRDGWRVPAAEIEAVVLQQLAQLLVNKVRLAGWIEQAGQSARIEVGLDEAVRMSARLKASSSATSVSPKLREIICAMVHRIDLDAHRIRMTIDIASLVRWLMENSTVGDDNAAGSPHAGRSSCVSRRENAKSTGAMNEANRHVIDLPLSICRRGVERRLVIDGQATSPRRPDRPLIETLARTHAYLDALTDGHGLTRQDVAHRFGVHPEDVSRMLPLAFLSPRIVEAILLGEQPADLSVRHLARDIDLPIGWTDQVKLLGF

SEQ ID NO: 5050 - protein, 530 aa, unidentified
  source 1..530: note = uncultivated organism
MIRTMTKIDKIPAQTRKQKVAVYCRVSTDRDTQLISLDNQKSHYERLTAAIGNWELTDYYYEKGISGTKKETRPELQRMLHDCESGRIDLILTKSISRFARNTTDCLELVRRLNALGISIYFEKENLNTGDSDSELILSILASLAEEESHSISENCKWAVQKRFQNGSFKLSRPPYGYELQDGKLTVNQEEAQIVRYIYDCVLKGMGTCLIAADLNARQIPTKRGGSWQPGTIQHMISNEIFIGDLRMQKTWRDSNYKSHTNCGEQPQYYIKNHHEAIVSREVFASANASNRQRGLEKNNDPGIDGNSQDDPHLNRYCFTGKIICGCCGSVMKRQVVQTAGGRRAFWVCRKHLTDSSLCAQRKIREDDLQNAYITMLNKLSYSRNLLLLPYISAVTAEDGRQMNDRLNTIQTRLQDIRKDHDDLVYRYSCGSLEAAVFFEKSVACRREEKELLREKRITERFFGHTSYAQALDDFISDWEVGTGNFPQDSFRALTDHIQVGDRNQVTFVMKCGLRLSEVIGSAKKSGSGR

SEQ ID NO: 5051 - protein, 570 aa, unidentified
  source 1..570: note = uncultivated organism
MTAGIRCAIYTRKSSEEGLEQSFNSLDAQREACEAYIQSQRHEGWHALASHYDDGGFSGGNMERPAMKRLMADIQEGKINTVVVYKVDRLTRSLADFAKIIENFDAHKVSFVSVTQQFNTTTSMGRLTLNVLLSFAQFEREVTGERIRDKIAASKKRGMWMGGIVPLGYELRDRKLHIHQEEAAIIRTIYSNYLRLGCVMALKDYLDQNGIRSKPRSRWIGTKPVETNFSRGGLYLILRSHIYVGEIFHKGATYPGKHEAIIDRVQWNQVQELLRGNRQGKRRKTRVTKSSLFMGILFDTAGNLYTPTHAKKASRRYRYYTSQAVIHKAVETDVPARIPAHDFEVAVIDRILEFLKSPKQVLGALAQSSKHSRGGRYVDLLRQASEKVSSWARASSDTKERFIRAILERAVIHQNDVEILIRTDALIHQLAGKTPPPSAAAHEVLRLQCPFRHSVQGKAVRLIVGDQQAPPAASTLAILKAIARARIWRDQIIAGEASGIRDLARIHKLNHSYVKRIYSFGSFSPASIAAILNGDVPQDLSLDSLVGKMPLVWAEQGSALATARGVPPQH

SEQ ID NO: 5052 - protein, 540 aa, unidentified
  source 1..540: note = uncultivated organism
MAVTARRTVREIPRAAILHIDTTEIMKLVVVAYARVSTEKEEQEDSFERQVSHYTTLITSKPEWSFGGIYADPGITGTRAEKRPDFMRMIADCRAGKINKILVKSISRFARNTVDALNYIRELKELGISIYFENENIDTLTPGGEVLITILAAMAEQESRTMSTNIKWTYQKKFKNGEVILNTGLMLGYTKTGQKDADGRDIYEINEAEAAIVRRIYREYLAGTTITRICRGLEEDGIPTKLGKKRWQYSVVNSILTNEKYTGDAVLGKTFKPDVLSKYRQKNNGQAPMYYAEGTHPAIIDKEMFEMVRVEMQRRKDEKVTAVGNSRYTSKYPFSGLLICGECGHKLRRHVRRVGSGLMVPAWGCSNRISNGRAQCDSHHVNEDTLQNTYTAAIRDMIEDAEEIMAAVKESAGLVMEPENRAALDRIEQEIIDLQNAVLELHKAKQQRSVTAADYAAQIKEYSQRMQELEARQAELQTTENRYGEVKMWLDSFVEHIQSGAIMNADDSMIMKQLVEQIIVGDDGIEVHFKCGIVASHEYM

SEQ ID NO: 5053 - protein, 530 aa, unidentified
  source 1..530: note = uncultivated organism
MRTSMETKPAKNAGVATVRCAIYTRKSSEQGLEQEFNSLHAQRESAEAYIASMKHEGWVALPDQYNDGGFTGGNTDRPGCLRLMADIEAGKVDCVVVYKVDRLSRSLLDFARMMAVFEKHRGSFVSVTQQCNTTQSMGRLTLTILLSFAQFEREIISERTRDKIAASKRKGKWFGGKPILGYDLAPQPAGGSKLVVNAAEAELVREVYHLYLEHRSLTKVAQILNTRGCTSKRWTTRKGTAVGGRVWDKHLLINLLTNPAYVGKVKHKKELFAGEHAAIVDERLWQQVFQTIKHNGRTGGMHVRNQHGALLKGLIHCGPCGYAMGHTYSVKDGKAAYRYYVCYVAQKQGWHACPSGSLPAEQIERLVVDRIKHIGGDAALVAATFRQLQNGIRSRSAKIDKDHTASTREIQKLEGDIRKAAMTAGTDTNAAARLADLHERLATANERARVLRAEADQVDGESITQADVAASLCEFAATWDVLYPREQAAVLANLVKRVDYDGAKKTVSITFHPAGLRALGQAPVEHEEVA

SEQ ID NO: 5054 - protein, 569 aa, unidentified
  source 1..569: note = uncultivated organism
MGVKSRSQPTAKAGGAYASGGTLPLACAIYTRKSSEEGLEQDFNSLHAQREACEAFVLSQKSLGWALVPTAYDDGGFSGGNVERPALKRLIADIEAGKVNVIVVYKVDRLTRSLADFAKLVELFDAKGVSFVSVTQQFNTTTSMGRLTLNVLLSFAQFEREVTGERIRDKIAASKRKGMWMGGVPPVGYRAHHRTLQPEEPYASRVAEIYRLYLQLNCVRKVAQELQARGWLTPERENKRPGFGGNKPFSRGHLYRILANPIYVGLLPHQGEQHPGQHPAIVDKALWEEVQQRMTSNRQGHKTRGSKAGPSLLVGRLFDEMGRRLSPTHTTKGHKRYRYYVTSADEPGEPIRLPAPDLERLVVSAITDWSADHKRVLDAVGWKDAKRADEALKAAKQFGHAIQQASNPKISNCVRRVEVGPDKVRIGLDLVACGIQPDKGGGGRREVAIEVPAKRRRCGMAVRLVIEDQKALSAKREPDPTLVAILDKGKSWLQQFTREGRAIEEIAENEKFSTRYVNRVINIALLAPDIVATLERGEQPEGVNATRLLTSVPFPERWEEQREALRLES

SEQ ID NO: 5055 - protein, 517 aa, unidentified
  source 1..517: note = uncultivated organism
MKTVTRITPVAEPVGQTIKVAAYCRVSTGNDDQLESLTAQKQHYEQMISSRNNWCLAGIYYDEGITGTNIYQRPSLLRLISDCEAHKIDMVLTKSISRLSRNVTDCLYIVRRLKELSIPILFEKERINTGTLDSELLLSVMSAIAENESEMISQNITWGINNRFRNGTFKLSYPPFGYKWNGTEMIIDKNEATIVKEIFDKYLHGHTITSIVNSLNERGLHPKRSPKWSNNTIIRMLKNEKYTGDVIFQKTYRGAHFKQRTNNHGERDQFYYANHHEAIITKDDFALAQELMKQHRKEKNITSYTTNKRYALSGKIICGECGAYFIRRTHASKTNPYIAWCCKNHISNKSVCSMLFIRNDAIETAFTTMLNKLIFAKDIILKPLVHKIISNSTNDNITRIKELEKMLISLTDKKHQLQDLLGKGFIDLVIFTREQNVLMKNRDDCLTELEALNRDTSSETTALASLKELLYFCNHSNMQIEYNEDLLSRFVSKITVHSRNEIAIELKCGLILREVLK

SEQ ID NO: 5056 - protein, 533 aa, unidentified
  source 1..533: note = uncultivated organism
METMNLLKDTALYGRQSIDKKDSVSIETQFEKGHALCNLNNWNIYKEYYDKGYSGKDINRPSFQNLLKDIEQGYIKRVIVYRLDRISRSITDFANLLNFFNKYDVTFISATENFDTSSPLGRAMIYIIMVFAQLERETIAERITDNYYFRAKQGLFMGGNAPYGFKSARIIGSDGKKKSVLEINENEINVVKNVYDWYLNGKGSVRSVVEKLITLGIKSRNNRLWSSNQISRMLTRPIYTSNSLDVYNYYLKTGINIVDSIDDFDGKKSLTIIGKENGKGQYRKYIDITDQFLVIVDIPPIIDSNTWLCVQNKMKNNKQFAPRLGQSKVCFLSGLLTCGCCGYSMSVKNQNKNGKMYSYICCNTKKHRGYNVCGSKLHSVAELEEAVLLHLIKHIEENNIYEKLSKIKEIKKVDASLINKKHLLEANITKSNNEIQNLLKIVSAGGSVANKYIQKNIEEIDSKIQNYKLELNKIDSEIYNTYSQYDKLKDIKEYLKVPEQIIDCDFDTKKSICKAFIRKITVNSDSIDIDYII

SEQ ID NO: 5057 - protein, 651 aa, unidentified
  source 1..651: note = uncultivated organism
MASRPKPAAVEPVAVGPIRCAIYTRKSTDENLDTDFNSLDAQREAAEAYIRSQQREGWIALPDRYDDGAFSGATMERPALQRLMVDVRAGRVNTIVVYKIDRLSRSLLDFAKLVEELERHGVSLVAVTQQFNTTTSMGRLTLNVLLSFAQYEREVIAERIRDKMSASRKKGKYLGGVPPLGYDVDRVHKRLIVSAQEALLVRHVFRRYLELGCAVKLIRELNEAGHLTKGWTTKKGKTQPGKPWHKNYVYRLLRNPVYIGKVEYQGETYEGEHDPIVEKSLWDQVQKAIAVPGKVRSNMNRATTPGLLKGILRCGHCGAAMAVTFTQRHGRQYRYYVCHRASSTAYENCTVRSVSAGIIEELVKNRLRALFRSPEVVSQTIEAIRRLQAEERHQIEVERSKVVEDLTGVKSFGDQLVQSLQGADTTFVRSELERLDGRRADLEAKLGELDEQLAALTGQEAVPESVNKELTILDNIWANLFPGEQQRLVRMVIDRATIYTDRLDLTLSGEGVQAVVDLLVAEHSGQDVVPASGSGGQAHTISLPIQFKKRAGRREIILPADGKQASAPPNRIFLLTLARAFRWKDLLESGKFKTVKALAAAVGLERSYIAKLLNLALLSPKIVEALVAGDEPDGLAVGSLRQGVTVRWDKR

SEQ ID NO: 5058 - protein, 602 aa, unidentified
  source 1..602: note = uncultivated organism
MNSSYDDQLKRRTAIYIRVSTQEQKIEGYGLESQKRRLVSYIEDNKALNLITKPEWIFVDVHTGSELQREGLQKLLNLVEQKKFDSVIVWKIDRLSRSLKHLLCIFEKFQKHQVSFISIQENIDFNGPIGNLIFQIFGSIAQFERELIKTRTMAGKITSAEMGNYTGTQIPYGYEPIKNEGGKGKKLKIIPDEKKVIKDIFNWYVYEEMGYIQIANRLNDLKIPKGKHSNKRNKNSRWSHKHIESIIPNTLYRGEFLANRKDEYGNLLQEDQWTVVAIPACVGEFLFSLAQQKRTSRAGRVQEGNHIYLLSNKLIDVTVPERKKFYGIPRSKGGHSYRRKQYTSTEKKYYSVFEVPAEAIEEAVWEKLKFALGNSEEFIERHLKLEKFSKTHIDTLQEELTALREKFVNTELETTRIEKAYENGIYSIEKMEVKMLEATKKEGQIQNRIQKIEDELQILSFKEIEIEGLRKASKQVKYNLNNLSRKQKKMILDICIARVEVNRKELPSNGIQKKWLRELEVHFRFNPGLLSQGLEQGRTRKSHDKAVDSELNRINGVSGEQGVSGYTFFTCRFHIEKIVEKKDNKAIYKAYLEEVSNDSIPS

SEQ ID NO: 5059 - protein, 539 aa, unidentified
  source 1..539: note = uncultivated organism
MRGDKKPKDKGNGFRTPAGVRCGIYTRKSTDEGLDQTFNTLDAQREAAESFINSQRQEGWLALAQKYDDGGYTGANMERPALKRLLADVQSGTVNCVVVYKVDRLSRSLLDFARIMEILDKHGATFVSVTQQFNTTSSMGRLTLNILLSFAQFEREMISERTRDKMGAARRRGKWVGGNPVIGYDVAPKGGSLVVNQEEAQRVREIFALYLELGSLIPVVEELDRRGWCMKAWTTREGREAGGKPIAKNGLYNLLTNMIYVGKVDYGGQVYEGEHDRIVDDETWNKVQSALNRNGRRGGRNIGNKYAALLKGLVRCASCDVGMIHTYVNKKDRLYRYYVCVKAHQRGWSQCETRSVSAPALENAVVEQLRGIGNNPTMLREVLRQLAENRHKESAEIDIEKTDIDKELQNIAQEMKETIAAAGSRGSTGDIATSRLAELQDRVSRLSSRWADLRQQLAAIEAEGVDAQDVEVALHGFDPLWEQLSTWEQERFIRSLVEHVRYDGKTGTVTLGFRSRGIKELCGCAPALTEKHEYAKQHR

SEQ ID NO: 5060 - protein, 550 aa, unidentified
  source 1..550: note = uncultivated organism
MANISKSFQAAVYLRLSREDGDVAEGGKQVSNSIANQKELVMDYLKSHPEITVVSTYVDDGFSGVNFERPEFQRMLSDIREDKINCVIVKDLSRFGRNYIESGRYIEKIFPMLGIRFIAVTDGYDSINEDMGSDMIIPFKNLINDAYCRDISIKIRSHMDIKRRNGEYIGPFAAYGYLKDKDNKNHLVVDEYAADVVRDIFAMKLCGMSQKTIADKLNEQGILSPLQYKKSIGVPLESSFRKSIKPKWTYNTVLRILKNEVYTGMVIQGKCTTPNYKIKKRIYKDESDWIRVEDMHEAIISREDFDLVQDLLLRDTRVSPGQAELFPLSGLVYCADCGEPMVRKTVPAGDKRYVYYVCSGNKKDKTKCGMHSISEKKLTDGVLEIVKTWVGRMIALSDAVEIINSSQDMKPEVVKYERRIRKLQEEAESNNNRKKNLYEDYKDGILSKEEYSGLRDQFQGRITEIEKNISALQRERESVIANGSGRQEWVKKIRGYEDVQTLDRELVSFLIERIEVFDDSAVRVTYRFQKEIEEMERIVELYSERTKEAV

SEQ ID NO: 5061 - protein, 539 aa, unidentified
  source 1..539: note = uncultivated organism
MPIVAIYSRKSKLTDKGESIENQIELCKNYAKQHFNVDEFLIYEDEGYSGGNAERPMFKKMLGDIHKKKFNVLICYRLDRISRNISDFSSLVNLLQDNDIDFVSIREQFDTSSPMGRAMMYIASVFAQLERETIAERIKDNMQQLARSGRWLGGKTPMGFESKPIQYKSKDKINKKMYILSPIEKELNIVIKIYDKYIELKSLTQLESWTLMNNIKTKTNKNFDISILKVILTNPVYAKADELLYKYFEDKGADIASPKEEFDGIHGLMVFNKHDETKNKVIKRDESHWIIAVGKHKGIIPSHEWIKVQELLEINRKKAPRTGTGKVGLITIFLRCGLCGSKMRVSIYRRKSGTYHYYKCLLKDKSKGLKCNVNNLNGKIADELVIKEISKISYEKGRIYGNLKKIRDELTSKSTNITTKSSELQSQIKKYEESIKNLTIQLSENKDSIASKYIIKQIEEYDAKIIHLKNEMDKIISNEDYEKDYRENIDFALALANDFSNNIDKLNFDEKKILLNKIIDNIVWDGEVLEINIQKRNLC

SEQ ID NO: 5062 - protein, 576 aa, unidentified
  source 1..576: note = uncultivated organism
MINLHNKTYRAAIYLRLSQEDGDISVSDKNESNSISTQRDLIHAYLQKQPDIEYVTEFCDDGYTGTNFNRPGFENMMTAVREKRVDCIVVKDLSRFGRDYIESGKYIQKIFPMLGIRFIAINDGYDSADTENRSNDFVLPFKNLINDSYCRDISIKSRTNLEVKRRNGEFVSNFAVYGYMRSPEDKHKLIVDEEAAMVVRNIFNWKQEGWNAQQIANHLNDLHIPSPMEYKKKCGQNYCTSFKTKTTAQWSAVAVLRILKNAVYTGVLEQGKTTTPNYKVKTRVLKDESKWARVENAHEAIITIAQFELVQAVLGMDTCRAESNEEIYPFSGMIYCADCHSPMVHRAATSNGKKYNYYVCSGNKHDKSSCTTHNIKCDLVEGVILATVQAHISMAINIDDAMSQLESLDWEQREVRKINGQLAALELDIEKFSRVKLGLYEDLKEGLISKEEYHSFKDDYDSRIESIKRQISNLISQRNAIEGGLTSVQGWFAQFRQYENINKLTRNTIVSLIERIEINDNKDIHVKFRHADQFATALEYLDMRKSPQRKVITMKEAGWNGKNIPQTANIAQSVSI

SEQ ID NO: 5063 - protein, 553 aa, unidentified
  source 1..553: note = uncultivated organism
MSQKPVIRCAIYTRKSSDEGLDQAFNSLDAQHEACAAYVSSQRHEGWKLVPDRFDDGGLSGGTLERPALQRLLAEIDAGRIGMVVVYKIDRLTRSLVDFGRLVERLDARGCSFVSVTQAFNTATSMGRLTLNVLLSFAQFEREVTAERIRDKIAASKKKGLWMGGALPLGYDRHPDPLRRELVVNPTEAEVVQELFRLYADLGNLRLVEVDAERRGLRPKTLVSRTGRVRGGAPFARGQLHHLLTNPVYIGRIRHKDQTYPGQHPAIIEDALWQEVQDKLIAASARPRGRSEAIIDPRVLTGKLRDETGDLLTPTHTLKAGRRFAYYVSNRLIAGGRDPSGWRLPAEALETKLRQIIVGHLRRAAAGHALLQHPEANGAAELMRRATVLADRVESDPALLAKMISSGTLNPGNLQLELDPGVIAAVLEVPVESLSDRLRRVSCAFVLRRRGVETRIIAGETVPAPDEVLQRTLAEAHLWTRALRRGTSLTAIARETGRSEPYIRTRIPLAFLAPKLQAAILDGRQPTHLSVAQLIRDDIPLDWTEQTRLFESA

SEQ ID NO: 5064 - protein, 505 aa, unidentified
  source 1..505: note = uncultivated organism
MAKNDRYEAIYARQSVDKKDSVSIEAQIDDCKTLCSGKPRVYSDKGYSGKNTERPNIQKLVKDIEAGLIKKVVVYKLDRISRNITDFYRLYEVMKANNCEFVSCTEGFDTSNSMGRAMMGILAVFAQMERENIQTRIKDNYAYRIKDGRWASGKAPFGFKNGKENGKATLIPIPEEIEIVKWMFKTYAESPNISLGMIQSRLIEKGITGHQSGKGFSRTTIGHILTNPVYCEADQTLCQYYQRKLIEFANPAEQWNGEYSAAIVGKNNRSLRNENKEGIIVYITNVKGVIPSRTFLIVQNRMEQNSAIASDNRPNNNLKELSGMLKCAECGSAIKMQTYPSLTCTGRSQKKICSVSFKGTKMETVQSNVAVKVQDYLEHMNETVSQKHRKRARIRKEIEELEKQLNNLIEMAKFSDNIAEKLKLDMENLIVRIKDKQLKLKQEMPEDIISLRLGKECVRGIYDGNGVLKIQYEDLDTEKKHMILKALVEKILVHADGSVEIEWKD

SEQ ID NO: 5065 - protein, 523 aa, unidentified
  source 1..523: note = uncultivated organism
MPKVGIYCRLSIEDRDKSGGDDSVSIQNQKSMLRDYCRERNWEIYDIYVDDGYSGIDRSRPDFNRLLLDCENGNVDIVLCKDQSRFSRDTVVIEQFINDKFLEWGVRFIGIADNADTDSESYSTMRLFTSAYNEMYVKDISSKIRRTLAYKREQGQFIGSFAPYGYLIDPEDKHHLVLDEETAPVVRQMFNMYVRGDGYRKIVQNLNDRGVISPSEYKRQQGSKYVNRNADASNSQGKWTQSTIARILANEVYTGTLVQGKSHHISYKNKKRKKVEQADWVRVPHAHEAIIDQETWSRTQERLNSHVRVGKRSQELSPLSGKVKCAVCGRPMKRNVYYNKAKTIRYYNLQCATYKTGAMNCPNRTSISGLVLEQHILNELNTIVEQYCQSDEIHLTDIHSEQIKMLERRLSSIHERHRSAKERLVKMYKDKLDGVISDEDFCLFRQSLSDEENRLTEQITEVSQQINECRMRQENAKGQKALVEKYTHFDKLDRNIVDEFIELVEIGMPNENGEREIHIHWKL

SEQ ID NO: 5066 - protein, 533 aa, unidentified
  source 1..533: note = uncultivated organism
MAKVRVIPSTINPLTQMPIGEIRKRKVAAYARVSTDSDEQYTSYESQCKKYTEYIKNNPQWNFVEVYADEGISGTSRKNRVNFNRMIEDAKSGKINLIVTKSISRFARNTVDTISLTRELKRLGVEIFFEKENIWSLEEKSEFILTILASAAQEESRSISENVKMGKRWAMQEGHTQWGYSSFLGFEKGQNGIQIVEEEAKIVRSIYRMFLIEGKTCACIATALNKAGIPTPSGKEGCTWKVVNIRSILTNEKYKGDSRMQKTFIEDFLDHKPKKNNGEIPQYYAENTHPYIIEKEDWEMVQHELARRKEIGATYSGRDIFSSKIICADCGSFYGSKVWHSNDKYRKVVYRCNNKYTKKNGKCQTPHLTEEEIKTMFVTAYNTALVDRDALIEDAEQIKNLLTNTEAENKDIAKYEAELAIITETANKMVKENSVKVQDQDEYQKRYDELTKRYESTKSKLDRVLLEKSRKRSQLLRLDCFISRLKDSPYIIEEWSEELWNVLLERATVQRNKSITFQFKNGTEINVMNLTKK

SEQ ID NO: 5067 - protein, 572 aa, unidentified
  source 1..572: note = uncultivated organism
MNKPTPSLKRCAIYTRKSSEEGLEQSFNSLDAQREACESYIKSQQHEGWTTLATQYNDGGFSGGNTERPALKTLINDVKLGKIDVVIVYKVDRLSRSLADFVKIIDLFDQHDVSFVSVTQQFNTSSSMGRLTLNVLLSFAQFEREVTSERIRDKIAASKKRGMWMGGVVPLGYDVIDKKLVVNNVEAKIVKHIYERYIKLGTVRKLKEELDAEGYLSKQRKKDQCRGGGKPFGRGALYALLKNPLYIGKVAHQGNLFEGQHAAIVDTSLWDTAQTLLNENKQNNQTRNSVKDPSFFSGIIFDDNNNSMSPAHTRKGNRRYRYYVSQAVLQYREADAGSVIRISANKIEGPVIKRLMQCLRTPNELLNAFSHLKLSAKQQSTLILNSKNAATNWDVLSPANKISCLKIITRKIMVGCKSIDITLSRAGMTEYLINSNSDNKTSNENVDDEFLLSIPTRLKHCNSESKLIIGDKYASDNNPTTICAIQNALKKALSWNQALTTGEVSNMAQLAKQENVTQRYIAHLIKLAFLAPDIIEAIIKGDIPKKLTLGRLKEGFAYDWDEQRKELEFNHQ

SEQ ID NO: 5068 - protein, 704 aa, unidentified
  source 1..704: note = uncultivated organism
MNIAIYARQSKFSESGESIENQVKLCKEYANKLGYTNIKIYKDEGFSGGNINRPEFKQLLEDAKNKEFNCLICYKLDRISRNISDFSKLIDNLNNLNISFISIKEQFDTSTPMGRAMMFISSVFAQLERETIAERIKDNMYELARNGYWLGGNAPLGFKSCKILNTDNNNSKSKYVYKLEPITSNIDTVILIFTKYIEFRSLYKLHKFLLKENIKGPRGGIFDKRTISIILRNPAYVKADNNVLKYLSINGFNTFGSPNNKNGVLTYGKNTTTAIAAIASHQGCIDANLWLKVQYLLDNNKDNPSRLNTSKVALLSGLLKCNTCGKNMGITYSSSKPTYYVCNTKKKLGFTYCDCKNLNSQTLENIIISQIKSIDIEKVISSYSNSKEIIELEKSNINSTISKINNEISEKEKIINSLIIELTKSSGASYYQYIVNQLDSLNKEVLNFKNQIDILELTKKNLSNSHTELDTILNNLNRFNEKFDNSDINLKKELLNDIISKILWDSHTKQIYIHYIGIPTTQQFDYKKSSQFSEQSRCSVHQTANFLGKNIVGLSNSKVVKIDYNKTTNNYLNESTFGERLRKSRIDLNMTMEEVASLCGVTKSVINGYELNRCYPSIQVLELLSKKFNLCYLCKDGYTKTILNHKTFIENINTWIDTNNLTQQEAADKLGVSRSILKFWFNGSVIRSSTYYKILENLNKYNLI

SEQ ID NO: 5069 - protein, 663 aa, unidentified
  source 1..663: note = uncultivated organism
MKKEESESLQQKPCAIYVRVSTQKQAEEGMSIESQIETLKHEAARRGKPVFEVYNDAGVSGGASNRPEFMRMLKDSQQKPPPFDLVLTWSISRFGRNTMESYIATEKMRERGITIFYHKEPFNDEDPVGAMVIQILRAVAEFSRLEYVKDVERSKGLLARNGYSTGGPPPFGLRRLEVVDNGKRHVRWEPDPDTAPIARKIFEMYADGYGYKTICRWLNDQGLLTIRGNKWRSSAFSRMLRNEAYIGNVVYNKEVKRGAIRNGGAFKHKPEDKWIRCDNIIEPIVPRDVFDRVQLKLRSNNISEALAKNSQYLLSGLLKCSVCGNPYFGQTAERRVGGKSYVYTRYLCSKQNRYNEKRDNVNLKRDWFDDLIVNRLFERILSETNIMERITNEAEEIEQAVKERTRQIEGLKKEKQRVEALLTKYYEAFESGSLSPEELKSRMKGHQGRADELALEIMNLQNEIAFCKARQGSGIATLLKVDFKHLRGMFDSLPQERKKEFLRAFIEKILVSPERFEIHYTLPSGMELDSLLFEMNGGNGQENGPDSIDENISKSRSGVSEKYPAKSYAGGVHGDAEDASRLSAYGKTGGTARRGVKMTKSDKPEKPRGDKPILGCANQQAPAHFPLDGINGESTAPWRIHKNVYDEQWNNAWFWRGLVILAA

SEQ ID NO: 5070 - protein, 569 aa, unidentified
  source 1..569: note = uncultivated organism
MEIEWKRRIKYYVDLKSGGTQMKEEKFYNAAIYLRLSRDDGDTDGSKEESNSISSQRDMIRSFIRKQENMEIYDIYVDDGWSGTNFDRPEFKRMMKDIEAGNVNCVIVKDLSRLGRDYIEAGRLIQKTFPAFSVRFIALTDHFDSLTADYNETSLVVPVKNFVNDAYARDISNKVRSHLKVKREKGEFIGAFATYGYEKCDIDKNLLVPDEYAASIVKKIFLWKIEGYSNLAIANQLNSLGILSPMEYRKMRGEKLRTAFTSGTKSKWSSVAVKRILTNENYTGTLVQGKMQTVNYKVKKTVKKPEEEWVKVQGAHEAIISKEDFEIVQDLLKIDTRASAGTQKSHMYAGLLFCGDCMEPMIRRANKYKGVETVSFICSIRNNGNECTRHNILEEDLNALVLTALKQQVSLFLEKSKVLDVISQMEIHFEEVVTFDKEIGKLRKEQDKYLNLRTGLYEDLKKKVITEEDFKNFKEIYEKRYQELQKTISNQEEMIRKLFKSGVAAGINLERIKTVMQITELDRMTLVTFVKRIFVYEDKRVYVELRYKELFSKVIMLADYMEQCGEGVV

SEQ ID NO: 5071 - protein, 501 aa, unidentified
  source 1..501: note = uncultivated organism
MKKVRCAIYTRKSSDEGLDQAFNSLDAQREACEAYVRSQRHEGWKLLPQRYDDGGISGGTMDRPALQSLLAELEAGRIDMVVVYKIDRLTRSLADFARLVERFETTGASFVSVTQQFNTASSMGRLTLNVLLSFAQFEREVTAERIRDKIAASKKKGMWMGGVLPLGYDKTDAGLVINKAEAEIVRTLFQAYVVLGSVQKLKDYADAAGLRTKQHEFASGRVTGGQPFRTGHLYQLLSNPLYCGKIKHRDQVYDGLHEAIISEALWIRVQDTMAHNRVARKTRKNAANPSPLAGKVFDGQGRSFYAHHARKGQRRYRYYVSADDQVRLPASELEQVVFNALVHRLQVQHLPSKDEPSQRETLNQVERLVVGSNELAIHLAGNDETLPICIPLSQRRRGVERKLVLDRQNTRRKLDRVLIRRIIQAMDWLDFIKAGRSIGDIANDQDVSPSYITHNLDLAFLSPRILEAISEGSQAPHISAYQLSKISIPVKWDEQDAIFLS

SEQ ID NO: 5072 - protein, 542 aa, unidentified
  source 1..542: note = uncultivated organism
MKTSIYIRVSTEDQVREGYSLEVQREYLTNFAKQQGYEVFEVYADEGISAGSTERPALQKLLADAKQKKFDLVLVYKIDRFSRRLKDLLNLVEKLESHGVGFKSATEPFDTTNSAGKLMFQQLGSFAEFERNRHAERVFPGMVKSIQKGNWHGSKHSPFGYHYNKEKKLLEVNKREAKIVQLIFKMRLAGKSIQRITDYLNRSKHKTRGARYFYNKFIRDILRNRLYAGKVVWNKYHYIKNPEKKCGVKWIKNDPSKVIVAQGKHKPLISEQDFEKVQKILDEKRTGPIRSRYNSYPLTGVLYCSECNHRYFGVSNIANHRTGRRDKWYACSGRRFHYVRCSGKTVKADLVEKMVLSAIENMLESDKLKDNRWLSMTRNKKSSDFLFFNADPASIKKELTDNRKKQLKLTDLHLKNLLSEDTFKEKNEALRKEEEELKSKFAGLELLLLEKENSAAYLDKVRSFLESYDNNKTELDINGKKEILGLIFKKISFRGGAQNEKISPSLYDPFQKLFSDDKISKISRKEAKIAPLFHQNLRMPDE

SEQ ID NO: 5073 - protein, 521 aa, unidentified
  source 1..521: note = uncultivated organism
MRVAFYTRISTDEDHQKYSLDAQRDRLEAYCKSQYDDYKVHKIYRDTSTGTNMNRPGLEQMLADAERSKFDALIVFRVDRLSRNVRQLAQMVELLTDNNVVLRSSTEPFDTSNAAGKMMMQMLGVFAEFEHATIVERTRAGMERKARNGEWCGGFVPFGYEKVDGQIIIYEEEAAIVRRIFRYYVHGRKGATKIYKELNDSGLRKRSGVLWDNRAIIVILRNPFYTGVIKWKESIFEGKHEGIISQETFDRAQAILEKRNIQSNGERFKRESDFFLTGLIFCGKCGKGLVGRAAHRNGHRHKYYACSNRSYHRGCDLPFIRADIVEVLTIKEIHSIFRRPELLERIWKMVDERLQAERPEKAKEFSKIEEDIEKAKSALDRYFTAFETGTLEPELLGKKIEELNLRLQQLEDEKSNLEYQIDQLDLAKVDPDGIKVYLDALDAALENGGNERKKHLLLGLVEKVLVHDKDRYEFTFKLPDGSTLQNSLETVPESEDNSLSVNQLAPSVCNQEHAAPRLEHT

SEQ ID NO: 5074 - protein, 506 aa, unidentified
  source 1..506: note = uncultivated organism
MVISMTDQQILGYSRVSSEEQAAHGISIDAQRGILEGYAAMRETTIRIFEDAGYSGKNTQRPALQALLDKCRDGGVSAVVVWKLDRLSRSLRDTLTIIEDVFQPRNITLVSVTESIDTSTPSGRMMLNLLASFAQLEREQDSDRVVMAHKHLARDCKYLGGHVPLGYRIDQEKHYQLDPDAAPVVRKVFEMYMSRSGYTPILEYLNSFTFPGTRRTPFGKSDLKNLLANEIYSGTYVRRLGADPRHRITSPETIRVPGGVPALLTQEEWQRVCAIRKQSESAAAIYSARQIYPLSGLVYCAACGQLMHLNYGGKDRDGSVQRYYTCRKSCCRPARLEGLQSAVFSVVEQMAAEGAEAIRMACAVANSYADAADQDHASEAAAADQQIMEINKRIARIVAYISDRGTDAPASLADDLRRLEKERYALASRAASLRRPATRYDAPATVAAITACAGIKKQPPDQQKSLLQAAVCKVHVSAEDYKITFNWHTGGGDEPPHPVCQSILRR

SEQ ID NO: 5075 - protein, 560 aa, unidentified
  source 1..560: note = uncultivated organism
MKEKSTYRCAVYTRKSHEEGLDQDFNSLDAQAESCKAYIASQAGLGWKLRDTRYDDGGISGDHMDRPALQSLISDIKAELIDVIVVYKVDRLTRSLTDFAKLVDVFDAHDVSFVSVTQAFNTTTSMGRLTLNVLLSFAQFEREVTAERIRDKIAASKAKGMWMGGTCPLGYRNEDRKLHIVEDEAATIRTLFELYIRYQNVRLVKVQAEKLGLVSRLRTHRSGKQTGGKTFSRGHIYRILTNPIYIGQIQHKDKIYDGEHKPIVRPDIWDEVQSILKSNAAKRTTIGNSKSNALLAGLLFDSDGHKLVPHHAKTRGVRYQYYVSQKLKTSDQDSGWRIPAQMIEVIVKDILLETLRSKSDIIKLLPTENASAEKLQDITSKASELGSELDNTEHNVLKSLYNNLIETITLHSDCVSITFKTSYIKERLKVELFESEIITITKAMTIRRRGQEMKMVIDGQKQKAAKPDAALVKLVAKAHALSSSLQDGTVNSIKEFAEAHSIDHADAKRMLPLAYLAPDIVEDIIAGTQPSYLSALTLKNGYALPTLWSEQRAYLGFASI

SEQ ID NO: 5076 - protein, 567 aa, unidentified
  source 1..567: note = uncultivated organism
MRNNENCIAIYSRKSKFTGKGESIGNQVELCKEYIKVHYGEEALRDAVIYEDEGFSGGNLNRPAFKEMMTAVKKRKHKAIIVYRLDRISRNISDFSGLIEELSYLNVAFISIREQFDTGSPMGRAMMYIASVFSQLERETIAERIRDNMHELAKTGRWLGGTTPTGYASESVKSITVDGKTKKACKLKIIPQEIEIIKTIFDVFVETNSLTITEAELMRRRLFTKNNKHFTRFAIKAILQNPVYMIADEDAYRYFQEQGADLFSDREAFDGTYGIMAYNRTDQEKGKTTVYLPIDKWIVSVGGHKGVIPGKVWVQVQKSLEQNKSKSFRRPRSNEALLTGLLFCRCGSRMYPKMTQRMTADGKRIYTYVCKMKERSQKSVCDGKNVNGNTLDMAVVEQIKRLEEDRENFIRLLEQSRKFYTSNHDQYDTQLISLGQEQEEKTKKINGLVDFLTEVGDGSAKSHIAKRIEELHRECEAINARIQELERLTSQQELSDVEFNMLRQLLSVFRDSIDEMSIEQKRAAIRTVVRKIVWDGTNVHVILFGAAEGDISDTLRESKTHRGADSK

SEQ ID NO: 5077 - protein, 663 aa, unidentified
  source 1..663: note = uncultivated organism
MEKDREILRCAVYTRKSHEDGLEESDYNSLDAQREAAENYIASQKENGWVALPERYDDGGFSGGNMERPALKRLLTDVEAGKIDIICVYKLDRLSRSLLDFMKLAEMLEQRNVSFVSVTQDINTSTSAGRMMLNILMTFSEYERLVIAERIRTSVAGAKRRGKHCGGTPILGYDSDPDTKKLIVNEKEAKLVRYIFKRFSEVGSPREIVLELNKAGYRTKSWITRKGKFHEGSTWNTGHIYRMLRNRIYIGEILYKGEIYPAEHDAVISSEMWEKVSRILKENQKERDKSPRKKTTLPLSGIIRCGHCGGAMMPTYSRKGKRRYSYYLCRKYDKGQSECPLQRISANDIEKAVFKQLNAIFKVPSLISKVFLNVKLAEEKEREELLKKQSALKLGLDETRQQALDAVSKEQSPDLGEINKRVSEVNKNLKSIASRLTQIDKESFSEAHIREAFSTVDEFWDSLFPVERKNLVGRLVDKIEIRESGIGMFLKTDGIESLISEIVDSASEAEHTDNNSLAINNNSNPRVVPEILPDGRILIQIPMLIKRLRGRKKIIMPETLEGLNQNAVSPVQEALVQALSRSVAWMEKLENGEAASVNELSEKLGFDPSYVRRILKIGTLAPDIIESIMKGEEPEGLNFVKVLRAPVPFDCEEQRQLFGFTRK

SEQ ID NO: 5078 - protein, 560 aa, unidentified
  source 1..560: note = uncultivated organism
MTRCVTYSRLSTQGQVEGIEYSSIEAQTESCKAYIKSQAINGWEHVDSYSDISTGGDLARPGLQQLLEDAKKGKFDVVVCTRIDRLSRSIKDFLELNEIFERHNIKFVCTTQDFNTTTAAGRMFLKILVSFGEYERELISERTKIKMRAQAEKCFWHGGAVNFGFDKNKLGKGIVVNEKEAEVVKLIFNEYVKTESTSKVAEKINRLGHRTKLRKLSSGRTIGGKKFTRSYISELLQNPIYIGKIRYRGDIYDSNIPPLIDETLFNQVQNIIRNNREPRNTPNRNKYNFLLKGLVRCSECGSVMTPTPAKSGDFLYYRCTVVNHTTKEACKIKSAPAKELENAVIYKIKQLSENDTELREVIEKANREFVESSTSLLKERSKYESNLKSLNKSIRRFLNTIEKGSIQIKFIEDELKELDRKKIFYEDKIGEIKKQVEHYRNNLIDFNKMKENLSFIAESIDEFEPKLKKNILRLFIERVTLYTEKIRISLRDLTSTGLSFGAEPNLWFDKVQQWLPIADRIETKIDVELHFKRKIGDRGKIIFCYSQLQVPFSHQISLLE

SEQ ID NO: 5079 - protein, 514 aa, unidentified
  source 1..514: note = uncultivated organism
MPEIRVIQPIAEQAKKQRVAAYARVSSDSADQLNSFATQVEYYTSIIQAADEWEFAGLYADEGITGTRADKREDFQRLLQDCRAGKIDRILVKSISRFARNTLDCIQTVRELKQLGVTVVFEKEGIDTGSMGSEMLLSILGAAAQEESLSISQNLKWSYQKRMRSGDFITCSAPLGYFLEGNTLVPDPQEVPIVQHIFASYLAGKSTKEIAAELSTMEFSDKIKKHSHWRDRAVYYILTNEKYIGDSLVQKKYTSDELPLGRKKNRGEVAQYYISGTHPGIIDREVFKAVQKLLRLRNISHAPKGKVQLSPLSHMIVCGLCGSTFYHRHNKEMNRWACAAHLKDTTLCSMGIVADQDIQQTFLTLFNKLLDNPGILKTMLNQLLEIQSKAFYTRPDVQELNRQIAETVRQNHTLARLQTKGCMDSASFIKRCNQNNQKIEELRGELRSLQTPNDADSAIEKTKRLIDVLDGSEPMLEFDPAIFESMVQRITVYPERFCFHLINGLAFDEGRDRS

SEQ ID NO: 5080 - protein, 566 aa, unidentified
  source 1..566: note = uncultivated organism
MARKSRKPVESGQVFDTPSQTKMFSTGLYVRISVENEQKIESDTIGTQIQMLKDFVSQMPGLKIYDIYCDDDVTGTTFIRPEFSRMMNDIRDGKVNCIVVKDLSRLGRNFLESGEYIEKVFPFLGVRFISINDRIDTLSKPADISAQIKNMANEMYAKDISRKICSTMRTLQEQGKFIGSQPPYGYMRNPDDKYSLLIDPETAPYVREMFQKILDGYTVHRIALMFNEKGIPSPGRYKYDKGLVKNDKFKNSVWFFSTMRRMLSDPVYLGWIESGKYVSHFHKGGGKSVKVPKEDWIVIKGVHEPIIEENVFWQVQDLIAEHGKVSANAGRYNAKGNRENILRGRLRCGECGKSMALCKKRSHEKDQMWYICPMHEHYNSSYCKKKGIKKEFLEQLVLTLIQNQMQLFVDAEQLIQQLNRQSSAKSKYEIYQMQIRTTEKQISRYTELKANLYQDYAEKLLTESDYMLASQEYGKKIDELKIFMADLVKESQKFATEYSGSEKWRNLIKTYGEQDKLSRDMVEAVIDKITAYNDGRIEIQFKNYDELEAVLYQAAERRRESRRYAG

SEQ ID NO: 5081 - protein, 553 aa, unidentified
  source 1..553: note = uncultivated organism
MKTVRCAIYTRKSSEEGLEQDFNSLDAQREACAAYILSQASEGWKAVPDHYDDGGLSGGSLERPALKRLLADIKLGQIDIIVVYKVDRLTRSLLDFAKLVEAFDAAHVSFVSVTQSFNTTTSMGRLTLNMLLSFAQFEREVTAERIRDKIAASKARGMWMGGLPPLGYRPNGRSLAIVEEHAALVREIYRRYLELGTVRLLSDALNYEAVRAPERTTEKGFAYGGGRFSRGQLYSILKNPIYAGKISHKGKVWDGNHPALIDQAVWDRVQEQLAKNTQGHRTIRERSASLLAGRVFDPNNVPLITVHTTKGQQRYRYYARRPGSAAPAGSPEPTPMRIPANELEQVVIKAITQELSDPLMLAERCGITIRPESLATLTARAASLGERLPKDCAALRSLLVRVAVYPARIELELSTAGIAKVLGLPAPEQHSPSLSLQVPVRLTHARKVGRLIEQNGAAAIAKQDPALVRHLLRARQCWQELAKGETDVTTLAKQVGVNPSYVTRLVRLNFLAPKVVDAILSGEIREEVGSRALIATNAIPASWRVQEERYLPS

SEQ ID NO: 5082 - protein, 586 aa, unidentified
  source 1..586: note = uncultivated organism
MKVALYTRVSTEDQAREGFSLEVQRTYLLQYAKNFGWDVVCSMSGRDVYMDDGFSGGNMDRPALKKLLFDARNKMFDLVLVYKQDRLSRRLKDLLGLLEEFETLGIGYKSATEPFDTTSSAGKMAIQMLGSCAEFERNRLVERVFPGMVVGVKRGHWQGARYAPYGYRYNKEIKKLEVHVEEAKIVKEIYDMYISGKSTSQIAGHYYNLGIKSRQGGKFYTKFISSILKNKTYLGMLVWNKKRYEKKEKTHNGEGKGYKYVNNDPSKIIEVRDCHEAIITQEVFDKAQKLLDRNRTNKVVRFRNNVYHLSGVLKCHECGRNYRGLTLTKNRRTKERRPWYCCSSVGVSYVKCKNKSVTADAINRQVWDIIDTISKNLHVIEELGDMIKLSATEPEQCYIEQLEDTEKALAKNLEKQKALYEVFSEDKINIDIYKDKAELLRNEEKKLRQDIKSIQLKILEKRNAVNLVKATQDFLLKLRSNPNTQQMDYLIKTFMRIIFKGIYIQNQEIVKVDINQPWKMCYDEALKCRHGEEGVKCQKKREMTPKRAKTKANRGTESVYFCVPSDGRCLPYRHSMADIAEALTGE

SEQ ID NO: 5083 - protein, 540 aa, unidentified
  source 1..540: note = uncultivated organism
MARKSRKNLDATVVEKVYAPIFFRAGAYIRLSCDDTKKRGDSLETQQNIIENHIAAASNIKLEEVYSDNNATGTNFERPGFQRMLADAESGRINCIIVKDLTRFGRNAIDAGYYLEKHLPALGVRFIAVTDSYDSIDGDGGILLPLKNIISESYALDISRKCRAVQRQNIADGRFVGRLAPYGYKKAPDDCRRLIIDEETAPVVRQIFEWASEGVVRNEIARRLSAEGIPSPSHHNHAKGFNTSEKLIGITYWKSNKVKDILSARVYVGDMVQGKTRTINGKQISVDSSEWICVPNTHEPIISRELFDRVQGFLSETKHKAQLIQQNIAPFTANMFKGKVICDKCGHSMHRHRQNKDGTYWFRCESQWKYARDACTVVSVKEFDLKTETMTMLHKQAEAILGRRTALEQIAAVSDDSTTELRQINQRMDKNGYMLRSLYENMIDGIITKDEFVQMKADYEAKLDALSRQADEIRNRKYKAKADAAEYRELADVIPTAIGNDKLTGEIIDRLIQEIRVYPDKSFDVSFKFQDEFKEVRRVG

SEQ ID NO: 5084 - protein, 508 aa, unidentified
  source 1..508: note = uncultivated organism
MTNPSHPPRVALYLRLSVASDEESTSIERQEADLRALAQREGWDVVEVFTDDGFSGRKERAKARAAVEALRVGAIDVLAVWKFDRFSREGIKGLVPLLDALEQRPEAVFVALQDGLRSGTTAWEMLAPILATFARIESNNTAARVRSAIASNRAAGRWTGGPAPVGYVSAPNPAGPGRVLVPARGQVIDDGRVAPDEVTHLVEAAERIVSGQSLYAVTGWLNTTAMRPRRARSWSIQAVSQVLSGTAIVGQVKIGGEVLRDSDGVPREVFEPALPVPLWRSVRAVLAERATARVPAGTRRRGSRSRLLSGLAVCASCGAPLYVRQQQNGEAAYRCASRSNGRPCTAPVSVTAARLEEFVAANFLRAVGRLPILRPAEVEPVEVERTEVEDALRDVAARLGDPNLSEADEEHFETVSRHLRARLRALRGATSAAATEVALEETGETYADVWARLDDVAARREHLVSALASVEVSRGLRGRTGLDPARVSLRWADERDARCGYLDDPDAA

SEQ ID NO: 5085 - protein, 582 aa, unidentified
  source 1..582: note = uncultivated organism
MNEMMQFAIYSRKSKFTGKGESIGNQVELCRQYLASHYGGEVAEAAYEYEDEGFSGGNLERPQFKQMMQDAKEKKFVAVVCYRLDRISRNIGDFANLIEELNELNISFISIKEQFDTSSPMGRAMMYIASVFSQLERETIAERIRDNMHELSKTGRWLGGTTPTGYRSEEVSTVTIQGKEKKAFKLALIPEEAELVKKIFNEFLNSGSLTKTETFLVQNGYKTKYGKEFRRYTIKGILSNPVYMIADKVAYAYLCERKMDLFAQESDFDGKHGVLAYNRTIQKHGKPHQIRDEEDWIVAIGKHEGIIPGEEWVQVQRMLTRNKSKSYRRTRSNVALLTGVLFCGRCGSYMRPKLSSRFNEQGEQIYSYLCEMKEKSRMHCCAMKNVNGNILDRMVMAELKKMGEDDSEFLRRLKEGQKILKENSPKYEIDAARLDKEQQKLEEEIQGLVESLGKAEGTAAQRYILSRIDSLHDEKEKLMVRIKELKDASAGNEISEYEFDVVRQLLFNFRDTIDTMGIEQKREAIRTFVKRVVWDGENIHVYLFGSDDGEETLRGINAPIAQPEDETEVETEGEKPLSRNSK

SEQ ID NO: 5086 - protein, 542 aa, unidentified
  source 1..542: note = uncultivated organism
MSNQKKALRCAIYTRKSSDEGLEQEFNSLDAQREACEAYVLSQKSEGWALLPDQYNDGGFSGGTLERPALQTLIADIEAGRVDVVVVYKIDRLTRSLTDFSKLVEVLERNGVTFVSVTQSFNTTTSMGRLMLNVLLSFAQFELEVTGERIRDKIAASKAKGMWMGGRIPLGYRVENRTLVIDAAEAEKVQTIFTLYLELKNVRLVAEALQARGITSGCGGKPFSRGHIYKLISSPLYIGKVEHKGKTYKGQHQPIIDKATWDAVEAQLAANTRGKRSRPNIKEASLLAGLLFDDEGRPLAPTHAVKSGRRYRYYAASADSGSRAPTFRLAAGEVEQAVVAQIAGFLGRTGALIDDLGVGHLQPDALKNFMAKAEALAQELASGGSASQRALLLDIVERVTVAEDAIAVRLERQELAARLLGNAAPALEGAITIVAPARLTRRGVETRLVIEGDGVPNDDLAPDPALVKAVARGHAWFEDLVSGRAASVSEIARRKGLTPRYVSRLLELAFLPPKLVEAILSGTQPAEMTAETLTRGQRGLVW

SEQ ID NO: 5087 - protein, 542 aa, unidentified
  source 1..542: note = uncultivated organism
MPVIKCAVYVRKSTEHGLEQEFNSLLNQDESCKAYIASQAFNNWEYVRTYIDAAISGGTRERPGLKQMLDDISKGLINTVVVYKVDRLSRSILDFHNMMKYFDKYNCNFVSITQAFDTSTSMGKLTLNMLLSFAQFEREVASERVRDKIRASKAKGLWMGGNPPLGYDIKDKKLVINEAEAHQVKQLFEKYLELQSVKRLIQYAEAQGIYSKKWISKKGNQKGGNKISLMGMHRLLRDMTYIGQIAHKKANTTAKGEQDAIVSKELFNEVQQALKNNSNNKTESHRSPNLLSGKLFNSQGERFINQVKTNKNHTKIHYYAQKGLFIPAAPVDEVVSNTISEFLNSDLSHLPPDSASALKSVNWAALSGVQKRDFIQAIVDKAIFSNKQLIIYLDISPNSVRPFITEVYVNQSSLPMEFITNEYSVTITTPVVFRRYANTKFSEAKTSLLTIAGNNNLIVKAFATAWRYREMYEECGDVDTIIKSEHVAARFVYKHLALAYLNPAIANKILNGKLNMPVRDILDKASRTYDFNKQAKLFTIPA

SEQ ID NO: 5088 - protein, 531 aa, unidentified
  source 1..531: note = uncultivated organism
MGRRKTTPVSSGRIWRAALYTRLSREDGDKGESNSIATQTAILEEHIARDPTLSCAGVYVDDGCTGTNFDRPGFQRMIQDIEAGRIDCVLVKDLSRFGRDYIDTGHYLERWLPEHGVRFIAISDNIDSAKNAYDLLLPFKNVFNEQYARDISKKVRDSVRAKQEKGQFVGAFASYGYRKSPSDHNKLEIDPVAAQVVRRVFDLFESGMGKVRIAKTLNAEGIPCPSEYKRLNGDRYNNGQRIGSTTYWTYSTIHRMLQNAMYVGTMEQGRAPRAGMHGPAKKLDQSHWVLVPNTHEAIISREQWDRVQALLQKNTRQLIFDQNISPFAGYLKCGDCGRAMCKTRSNQVIRYGCGSYKRYGPTICSAHSITHEELSSIVLDDLNRIIGAIQDLKTLAEEAAPSVPKRDLSIERDRLQASLDRIYRLKKTAYEDYREGLLSKEDYLRYKADYETQEKHLTKQLEQLSKEKEPNVLDNPWIASLLQHGRLTELDRATIAETIQEIQVYSDGRIEITYRFADDLGLFPDTEPAEP

SEQ ID NO: 5089 - protein, 538 aa, unidentified
  source 1..538: note = uncultivated organism
MTERARVRCAIYTRKSSEEGLEQSFNSLHAQREACEAYISSQKHEGWQLIATAYDDGGFSGGSMERPGLKALLADVEAGLIDTIVVYKVDRLTRALSDFARMVDRFDARSVSFVSVTQAFNTTTSMGRLTLNVLLSFAQFEREVTGERIRDKIAASKAKGMWMGGAVPLGYDVAERLLVVNEPEAEQVRALFRLYLKHPNVDDLVAAADAAQIRSKHRTFADGRTTGGTALGRGSLYTILANPIYAGEIGHKGKRFPGQHKRIVPPELFDPVQQLLEANRRKARGTTSAGSGMLLSGLVQDAAGQRMTATHTGKANRRYCYYASATTRVPAADLDGLVATALTGTLASPARLATTLPSLDLLSAKLIAAAGKLADDIGQAGADDRATLIRAVVTGVRVTDAGVTTTLQLTSLGLADQVATIVTPATIGRAKARLALVVPGHAAVHPDHSLIAGIAQARAWLAALTSGQQPSLHQLAQASGVTPAYVRRLIGAAFLAPDLVTRIVEGRQPRWLTLVRLTDMLPLPTDWAAQRNLFAATN

SEQ ID NO: 5090 - protein, 573 aa, unidentified
  source 1..573: note = uncultivated organism
MTKRVLRCAIYTRKSTEEGLDQAFNSLDAQREACEAYIKSQTSEGWLLQPTAYDDGGFSGGTMERPALLRLLSDIDQDRVDVVVVYKIDRLTRSLADFAKIVERFDKREASFVSVTQAFNTTTSMGRLTLNVLLSFAQFEREVTAERIRDKVAASRAKGIFMGGCPPLGYDARERKLVINSAEAENIRFIFMRYLELGSVARLRAELDAKGITSKAWISTRGKSIGGNEWFVGALRHLLRNRVYVGEAVHKGTSYRGEHEPIVPKDLFDTVQAKLDSNRVNHKHKRTVGSRGLLTGLLFDDRGNALSPKRSRKPNGQTYLYYVSQASIQRREDKGIACRPIAAPVIEGLVHDRIQRLLGIPPAASKKARAGSPTPNGKMEQAATGISELMRRHLKRIEISSDQVTLMFDEQALAATLGATGSEIEEVLRSKLPPEDQIARLADRIVLTVFTHLASRGAARRVEGNDPASLTWTATKSRLDPRLITALAQADDWRRLINAGDVSCVEDLTKLGNHERSHVRKVLRLAFLAPDIQQAILAGRQPVTLTLTALTETELPLLWTEQRRVLGFTASAA

SEQ ID NO: 5091 - protein, 547 aa, unidentified
  source 1..547: note = uncultivated organism
MAFQSIVQETEEEYRALGYYRLSKMDIGRQESDSIANQRKLVHSYLQDKPNIRLVDEAYDDGYTGTNYDRPGFQAVMAAVDEGRVNCVIVKDLSRLGREYIETGKYLEMVFPARGVRFIAINDDVDSEHNNACDDIIIPVKNIMNEAYCRELSKKLRRQFRIQRANGEFLAPFASYGYLKSPDDKHKLVIDDYAAEVVRGIFALKLKGYSQQTIAEHLNRRQVLAPAEYKKSLGLKYKTGFAAKTSGKWTAGTVRGILQNPLYIGTLVQGKRGTPNYKIKQMRVRKEEDWVIVEKNHDPIIDPLAFRAVQQMLERDTRKSPSQDTVFPLSGVLFCADCGRSMSRRTVTRGSKKFSYYVCTTNKRGQGCSSHSFEQSKLELAVLHAIRAQVMLVVEMEQLLEEIGAQSMQGAKEKRIGLMIAQKKTDIDRYQDYRMNLYEALRDELIGQEEYERMRTKYTLLIDESRTAIEEMEKSLQEAQAGVDGDRLWMEQFIKYKDDTELTREMVIALVDRIYVSEDKRIRIEFNFQNEINFCKKIVESAEGEGA

SEQ ID NO: 5092 - protein, 568 aa, unidentified
  source 1..568: note = uncultivated organism
MQTDHRLIAIYSRKSKFTGKGESIENQIELCRQYILLHQGDNAVNSVLIYEDEGFSGGNLERPKFKKMMADARDGKISTIVVYRLDRISRNIGDFANLIEELKELKVSFVSIREQFDTENPMGRAMMYIASVFSQLERETIAERIRDNMHELAKTGRWLGGVTPTGYASEQVEKVMVDGKVRKACKLKLIQAEGTVIQVIFQKFLETNSLTKTDTFLLEQGYRTKNGKRFTRFSIRNILQNPVYMIADPDAYQYLKGNETDLFATEHEFDGIHGLMVYNRTIQKQGRANQLRPMREWIVSVGRHPGLISGVQWIKAQQFLEQNRDKGYRKPRSNVALLSGLLFCGKCGDYMRPKLTNRQTAGGETLYNYMCTMKERSRSHCCDVKNVNGNLLDQTILDEIKKLSVDHSAFMNQLKAGKKTLWESRGEYDQRLEQVAQEQRSKEGEIKSLVSALTKAVGSAAEEYIVAQIDTLHKEVALLNRHMEELRQLTPSHALTDLEFDIFQEMLSSFQNTMDTMTVEQKRAAIRACVKKIVWDGETIHLYLFGSQEETDFPELIAQNNPRCDNSK

SEQ ID NO: 5093 - protein, 561 aa, unidentified
  source 1..561: note = uncultivated organism
MAEVEVIQASDGPIVRDVRMVGMPLQVTRMRVAAYVRVSTDGEEQLQSFQSQKQYYQDKISQNKEWVMVGIYADEGITGTKTKKRDNFLKMIEDCMNGMIDVVMAKSVSRFSRNLVDTLQYVRMLKDRGVTIIFEKENINTSTMESEMQLALLATLAQNEVESLSQNVKIGVKMKMRRGEMMGFNGCLGYDYHQEDKSITVNEVEAETVRFIFDRYIEGYGAYTIAKELTALGKVNKKGEVKWTDSGVRGIIKNEKYKGDLLQGKTYTVDPISKRRLDNRGEEDRFYIKDHHEAIVSREVWDKAQEICQSRYKKNPNVVDGTRTKFTRKFAFSSMCQCGFCGTNLTRRSHNQDTQHKKPVWKCRTASNKGIENCPQSKSIDEAIIENAFVEMFGLLAENFDDVLESVLASVEEAFSTDGSADKLKRIEKEIYTLENRRKKLTDLMLDDKITKEAYDEKYEDLCKKLAKAESEKLMFSENTTTQNSITKRMKEIRSQLSDANIMDHFDRFVFESIVEKIIVGETYDDGTVDHYKLTFVLKGMDNRNVPDAKNRYKNLHKQAG

SEQ ID NO: 5094 - protein, 542 aa, unidentified
  source 1..542: note = uncultivated organism
MSKIWNTALYIRLSKEDELKGESNSVSAQREILKEYVRQQPELIEYDTYVDDGFSGTNFERPAFIRMINDIHAGKINCVIVKDLSRLGRNYSKTGELITDEFARLGVRFIAINNSFDSLSDGSNALTQCITVGVTNVINESYAASTSANVRGTLNLNRKQGKFIGSFASYGYQKDPDDHHKLVIDEEAASIVKMIFDKFIGGMSIIGIAKILNEMGIPNPSAYKRLKGYNYKHPTLSLADGLWPESSVRRILKNEMYIGNMVQGKNRKISYKIKKNKAVSEDEWFVVENTHEPIIDKSTFEKAQTMFNKGIRKPPKRNTVDLLSGLVKCADCGRGMNKKTNKHDYGTYSYYRCITNRKMKNSACSNHTIRVDKLEKAVLVYLQTLISIAIDLDEIINKINSTPSRKKENADLNATLSAYEKERTKYLHSMADLYPDWKAGIVSTEEYTLLKEELNRKKTALDVKIESLAQTINNMKTGVGSENDFIAHFKKYGNIDRLTRPMVTELIDKIMIHENGLVEINVKFSDAYKEILTYIDLNKKVS

SEQ ID NO: 5095 - protein, 561 aa, unidentified
  source 1..561: note = uncultivated organism
MANNAIRRCAIYTRKSSEEGLERDYNSLHAQREAGEAFIKSQTGEGWRLISTAYDDGGFSGGTMERPALQQLLADIRKGLIDAVVVYKVDRLTRALADFAKMVELFDAQGVSFVAVTQQFNTTTSMGRLTLNVLLSFAQFEREVIGERIRDKVAASKRKGMWMGGTRPLGYDVRERKLVVNQAEAETIRDIFERYLELGRVRLLTRNLQARGIVTGIKVSKNGNTRAAKPFSRGGLYHILSNPVYVGEISHKRVRYPGQHEPIVSRELWDRVQGRLHCQAARTGEGSKTEAPRSPLAGKLFDEEGESLYVQGGAKGGRRYRYYVSKRLVTGESRDAGTAWRVSAPEIERAVCAAAGNLLSDHGAIAQALEESGIDGHRLRPVLESAKEWVERLLPSGNEAASALAQLTERVELRGDGIQVALKLPISGGEQDDGTTTRHLSLSRFVPMQMKRRGVEMRFVLEGDSTTSRVDLPLLKAVARARRWSQELISGRVQSVGELAKREGIDRRSVRRLLRLGFLSPRIVEAIVEGRQPPDLTVIGLTRRVDLPPLWSAQEQALGLR

SEQ ID NO: 5096 - protein, 537 aa, unidentified
  source 1..537: note = uncultivated organism
MTQQKIYKVGIYARLSKENARDEESLSIENQKLILTKHVRDNGWDLVEIYCDDGFSGANQDRPALQKMLQDVKEGYINTILIKDLSRLGRNYIDMGHLAEEFLPEHNCELISLAENIDDMVALRNIFNEHHSRETSKKVKAVKDMLARSGKYVGSFPPYGYRKSDTNKHLLIPDEPAASIVRNIFTLRSQGMGLTGIAHHLNNMGVIPPRDYYYQKRDDEVENPFRMNHSWNINTIRTILENEAYIGNIVSLKKGTLSFRSHKVMYKPETEWIRVEDTHEPLIDMELWNRVRDIAAKRYRPRKKSDGSVSIFCGLVYCAECGFKMRSATQKKMRKNGTQYTYTSFLCGTYSRSGRTACSAHSIGESKLYNIVLEQIRNHSKIVALNKKHIAEDISEKLYGELLSDHRKRLTELQELQDRSNMLNKFIQQLYEDRVNGVISVSTFNNLMNNYNQEYEDHQQKIWDLENHIRNFRPNESNASKWVNLIKEYSQLEVLDTQILLSLVERIVINEVQIDTDKLTKDVKIIYKHVGDLSWLA

SEQ ID NO: 5097 - protein, 518 aa, unidentified
  source 1..518: note = uncultivated organism
MKKVIKINHQQTSIKEKVRVAAYIRVSTDHDDQTESFEAQERHYQRMYNKQRDWEAVGIYADEGISGTNMQNRPGIQRLLEDCREGKLDLVLTKSISRFARNLTECLEVVRELSLLGVAIHFDKEGLNTKQMDGELLLSMLSALAENESKSISENSKWSFKKRVENGTYRHVSAPFGYDIENGQLVINEDKSVIVQNIFNWYLSGDGTHVIAKRLNRLKVEPKRSDQWRDNSVMLILKNERYIGDALFQKTYTDNSYKRHKNNFDVDMLYAQETHEAIIDRELFDQVQALIEQRQAVILNDNTDIYTNTYIFSGRIYCKHCGITYRRRTHSLPHDRSYIAWTCKNRLINPNLCGTKFIRELYIEEAFVRMMNKLVFGRKEVLENTIIQLSKIEPADNKELQKVQEKLKTVQDSLYSLTKLLSSKVVENNFYLSEEAALQKEKKELLAELRRVNAEGNKHHYQIQEMKALLQAVNRSSYFNAYDEQLFDRFVERIVVDNRETIIFELKCGIHLTERLRV

SEQ ID NO: 5098 - protein, 660 aa, unidentified
  source 1..660: note = uncultivated organism
MKAVIYARYSSDNQREASIEGQLRECMEFATYNGIQVIDNYIDRAMSAKTDNRPEFQRMIKDSYKHAFDCIIVWKLDRFARNRYDSAHYKTILKKNGVKVISAKETIAEGSEGILLESVLEGMAEFYSAELAEKVTRGLKENALKGLYNGGSVPFGYVINAERKLAIDPLTAPIVADIFKMSYDGKTVKQIYNELAAKNITRSNGKPLRYNAVRYMLSNRVYIGEYNHMGVKIENGVPAIVDKEIFDGVQIELAKNSKAPARHTADDDYLLTTRLFCGKCGAMMVAQAGTSATKRVVYRYYACARQKKHQCDKKMVSKTKLENFIVYKTMQMLQTESVIENLAEKLYELQFTESTLLPKLQEQLKQKEKEIENIVNAVQKGFATETLLKRLSELEEEKKGIEDSVAKEQLTAPVFTKEHFIMALHNFRKIDVTKQDGKRKIIDAFINSIYLYDDRMKIVYNANGKEEVVTLEDLESSTLFSSGAPTEKTIMLSSFFHFLPKMMRRCRSVGAHVRCARATQMQALDCPSLAVDRTKKNDLYIHCASLFFLQGSKGLERDVKKTAQCAVFSPRRDSNRVSGAKKGVRNACARRVAEQVPSTAPTEKTIMLSSFFSFYRVLSFLFFDIMFYFVLLSSTFHGINSYISFKFLLQKCLECVLPHL

SEQ ID NO: 5099 - protein, 560 aa, unidentified
  source 1..560: note = uncultivated organism
MANTSTKHCAIYTRKSSEEGLEQDYNSLHAQRDACEAYIRSQAGEGWRLIKTAYDDGGFSGGTTERPALQQLLANIRDGLIDVVVVYKVDRLTRSLADFARMVELFDVQAVSFVAVTQQFNTTSSMGRLTLNVLLSFAQFEREVIGERIRDKVAASKRKGIWMGGALPIGYDLRDRKLVVNESEAETVRHIFERYLELGCVRLLRKDLEAGGIVSATKTSGKGNTRGGKSFSRGALYHLLSNPIYMGEIRHKNDRHPGQHEALISRELWEQVQQRLGDQAARRGEGRKTEAPRSPLAGKLFDEGGEPLYVQGAAKGKRRYRYYVSRKLVKGGSDDAEHGWRVSAPELERSVSAAAQEMLADRDAIAQATEESDTNLNRLPSVLKFAQAAIERLRVGSEVASALAELVERVELRRDGILLALKLPFSTDERSDSTPASHIALTKFIPMQIKRRGIEMRMVLQGESGPNRIDPPLLKAVARARKWSDDLISGRVRSIGELARREGIDGRSVRRLIRLGALSPRIVEAIVEGRQPPDLTVITLTRRIDLPLLWSAQEQTLGIR

SEQ ID NO: 5100 - protein, 545 aa, unidentified
  source 1..545: note = uncultivated organism
MKVLRCAVYTRKSTEDGLEQEFNSLDAQREACEAYITSQRHEGWTLVPGRYDDGGFSGGNLERPGLKALLAEVDAGHVDVIVVYKVDRLTRSLADFAKIVERLDAKDASFVSVTQAFNTTTSMGRLTLNVLLSFAQFEREVTGERIRDKIAASKKKGLWMGGPVPLGYQVIERKLVPVPEEAERVRTIMRRYLAVRNVPALIEILRAEGVVTKIQHRASGPHRGGIPFARGSLFHLLKNPVYRGKIVHKGKVYEGEHQPIVDEGLWEQVQMHLAEKAPPRKRPTNDPQRAMLRNLITDPHGRPMVPTYGSSKIKRYAYYETRKDLARPGDAPGLRFQRGHLEQHLIGHLEELLGDEHALRRLSGIEEAGVLRTMFATAHLLALQLRQIGKVEQALRSLVAAIMIRADCMEVLLHPAPLAIESVTSLAWSIPLPHRRPFREARLRIDAGASSSGSSSDLINLIAEAMDAQRLVLASPELNLAQLAKREGRCRTQLARLLRLSWLSPRIIEAIAEGTQPKGLTRRALLICDMPIDWSEQERQFGFAA

SEQ ID NO: 5101 - protein, 559 aa, unidentified
  source 1..559: note = uncultivated organism
MEHAKSRTRRCAIYTRKSSEEGLEQDFNSLHAQREACEAFIKSQAGEGWRLIKTAYDDGGLSGRTMERPALQRLLEDIRHRLVDVVVVYKVDRLTRSLADFAKMVELFDANGVSFVAVTQQFNTTTSMGRLTLNVLLSFAQFEREVTGERIRDKIAASKRKGMWMGGVPPLGYDVCDRRLVVNRAEAATVKHVYERYLELGSVRLLRNDLMHREIVSKVRVSKNGVRSGGRQFSRGALYQMLSNPIYLGEIRHKKERHPGQHEPIVSRELWEKVQQHLRDQAATHRKRPTKAPPSPLAGKLFDENGEPLYVQGAVKGARHYRYYVSRGLVRGSVQDDRRGWRVAAPEFERAVRTAARQILGDRPAIAGAIEELNIDAGRLPSIFKAAEAWIQSLRSEAEVASVLTRLIECVGLKPNGIQVSIKLPIPSDDGATLNELALARFVPMRMKRRGVEMRLIIDGDATTTARVDLPLLNATARAHRWSNDLLEGRARSIGEIARREHLTSRHVRRVMRLAFLAPRIVEAIAEGRQPADLSTLAMTQRIELPPLWSAQEQALNTR

SEQ ID NO: 5102 - protein, 512 aa, unidentified
  source 1..512: note = uncultivated organism
MKKVAIYSRKSKETDTGESIKNQIQMCKDYFYRKNDAFIFEVFQDEGFSGGNINRPEFQRMMLLAKKREFDIIACYKIDRIGRNIIDFMNTFDELEKNNIDLVSVTEGFDPSTPAGRMMMTMIAGFAEMERMNISQRVKDNMSSLAKIGRWSGGTPPTGYRSVRLPNGDKTAMYLELIPEWRIKIQSIFEMAANNHSAHNISKLLNIPTRTISGILTNPVYCKSDNDSKHYLESIGYKVFGELNGCGYLPYNRRPRSRSGKKSFNAIGMFASVSLHEAPISSSTWIKANEIRKRKGLEKRPRISQFSFLAHKVKCSCGNGMHITAGRMRKDGTKTFYFRCSRQHSTSISSLDRCTAKWINVRYLEEDVLEMLKNISRDESILNDYIDKKPKKNIKAEIKEIQNKINKNNKILDSLTDKLILLEGSAAQKIANKMNSISEENDDLNNRLLSLERENILDSIDTMNVDTLQDNIKTLLSNWDQLTMEEKQIEIGNIISEIRFDGNNDFHVVFNI

SEQ ID NO: 5103 - protein, 517 aa, unidentified
  source 1..517: note = uncultivated organism
MAKTQKNIIGGNGGPTRVAFYTRISTDEDHQKYSLGAQSERLEAYCKSQYGDDWRLHKLFRDTESGTHMNRPGLEEMLYDAGARAFDTLLVFRVDRLSRKVRELAMMVDELTKNGIALKSITEPFDTANAAGKMMLQMLGVFAEFEHATIVERTKVGMEKKAKCGKFVGGNVPYGYTLDPENGLVINEEEALIVRKMFQMYAFEREGIQTVSHKLNEAGHRKRSGQKWTKQVILHMIRNPIYVGKIRWREVEYKGTHQPIVSEVLFEKSKELLKDRVVALSGRRFDNGEERLLASIIYCAKCKTHMVGVSTRNHGRKFPYYLCNKRWRIRECDQDYVRADLLEAAIIKDIRNTFRDEDFMARLWAKANELLVAEKPGLEKEIARIDGQIAKARAKVDKYFEAFEAGTMKPDLCNQKVKDLTATLEALEIERKELAARRSRLSIPPVDKEMLEGILSEFDETMAKGTNPQKKHLLRRMVKKVLIHDRRTIEVWYCLPNRASVRTADYLAPWAGLEPAT

SEQ ID NO: 5104 - protein, 509 aa, unidentified
  source 1..509: note = uncultivated organism
MKALVYTRVSTVGQAEGFSLATQREACEKKARELGADEILYLEDTYTGIELDRPAMNQLREHVRNRDVDLIVVYDPDRFSRDLNDLLIVTKEIDRAGISLQFVNFEWQNTPQGILFLQLRGAIAQFEHALIKERTTRGKRKKAAQGKIRCYAKPYGYRFNKETDELEIEPSEAEVVRKMFEWYTRDEEPLSSYAIAKKLAEEGIPGPAGKGWLYSSVLRMLKNETYAGILRRKDEQPDWEPVRVPPIISRETWEKAQARLNENKRFNPKRTSGEFLVQRLVFCGLCGHTLTVVTRTKDDRSWSYYTCTARYQRKFGKDADFTPCKLKPVRTTVLDDLVWEQLSTLLKDPNKYVEYLQKQRQADVDLPRRRLEETEKALKHTQAAKERVNKAFFSGYITEEEYKRYIAEYTETERRQREEIEHLKAVIADRERALEGATALRMYANLFANSIDNLPFEKRQEIVRKLVKRVVVFPDTIEIEGYFEAETEETENSALGSTHRKKSNKEIIL

SEQ ID NO: 5105 - protein, 566 aa, unidentified
  source 1..566: note = uncultivated organism
MAKAARSRTRAFAYMRLSVDKEGGTPQSIDAQRSAIQAYAAKHDIMIVEEFADAGRSGQTDKRPEFQRLVQKATAPDHPVNLVLMFIFSRMARNMRLFFDVVGRLEDAGVEVRSITQDFGRGRGQRIARTITAMMDEEQARDSAILTRKSRRENARQGFDNGGPVPFGYQTYVARQDGEKERRKLAIVEAEAAIVRQIFDWADIGRGGRWIVKQLNEAGRTLRGARFANSNVAGILAREVYTGVYHDRTADDDGITPDVEDAIAVTCPPIIARDQFDRVAAMRATRNPRRMAPHVAAGTTLLTGVARCGMPGCSSGMTIRTGKGGRYTYYVCNDRVNRGGACACPSIRREKLDSLVLDAIEARLLGRDRLRTLLAGVLDVSQSRQAEREADLARSRSERTRLNTAINNLLILIEEGTMSARDPAFVERMATNRAALAAVSSRIDVLEAQLAKGKRRIDEQTIDRFGDMLRKKMRSDDSSLRSSYLRMFVSNVSVSDHEIVISGPVSSLENGVSVGLPVKEGAAPIFDREWCPWPDSNQHALRRSILSRMRLPISPQGQRSRAARRG

SEQ ID NO: 5106 - protein, 580 aa, unidentified
  source 1..580: note = uncultivated organism
MAKSQKMPRPPAGKMRGAIYTRKSSEEGLEQVFNSLDAQREACAAFILSQKHEGWSVLSTPYDDGGFSGGTMDRPALQRLLADIRAGKVNVVVVYKIDRLTRSLFDFAKIVEAFDANGVSFVSVTQQFNTTSSMGRLTLNVLLSFAQFEREVTGERIRDKIAASKKKGMWMGGLPSLGYDVQNRKLIVNDKEALTVLHIFRRYVQLRSVRALQAELDDAEIRSKRRRLADGTDYGGQKLSRGALYLMLQNRIYRGEITHKGAAYPGEHQPIVDKALWDEVQAVLSENRIDRATGSDAKHPSLLAGMAFDENGERLTPTHAVKKGTRYRYYVSTSLITGAAKGGSKGRRIPAANLENLVITRLRDFLVDRGALLDTVENQHPDAVEQNRLIGRARQIAEEVGTWGPDKARAMLMALLSRVDVRTDRVEINIRRRRLIELLGGQSIDQTAQAGNEPDDILTLTVMARLQRVGREMRMLVENSEDQTTADPGLLRIIARAHDIQTRLMQNTDLSLHAIASQEHVSAGYISRLLRLPSLAPDIITAIINGRNPPPLTAKKLMRLALQIQVDWTEQRKLLGFRPG

SEQ ID NO: 5107 - protein, 552 aa, unidentified
  source 1..552: note = uncultivated organism
MKKVRCAIYTCKSSEEGLEQDFNSLHAQREACAAYILSQASEGWSLLDEEYDDGGLSGGTLERPALQRLLGDIEAGKIDIVVVYKVARLTRSLIDFAKLVETMDKAEVSFVSVTQSFNTTNSMGRLTLNMLLSFAQFEREVTAERIRDKIAASKAKGMWMGGIVPLGYEANGRTLAIVDEHAAVIGDLFRRYCEVGNVRLLKEQLDEEGMIIPERFTSSGRKMGGVPFTRGQIYKILSNPIYIGEIYHKGQTYDGQHEAIIEPDRWANVQEQLAANRQGEQQAPTIKAQSLLAGRVFNEHGEPLVASHACKGKVRYRYYVARERESGSTATDRIRIPARELEAAVVGRLVAALDDPLSLLVLLGAELDRSTIEAAGTLASELANRLRSRDRKLVRDLVNSAKVGTEEIVLTVDANQLRQALSVPLGEHDEAQLTLDCKVCLKRTGMAMRLVEPDGRGVHDELDRSLVELLAQARNWWDRLSDGETTIAGLAREQGINDSWISRVVRLAFLSPEIVDRILAGTHPAPLNGTTLTTANQIPRSWNEQAMLLRLT

SEQ ID NO: 5108 - protein, 574 aa, unidentified
  source 1..574: note = uncultivated organism
MSTEHKPLVRCAIYTRKSSEEGLEQSFNSLDAQREACQAFILSQRQEGWRALPALYDDGGYSGGTLERPALQRLLEDVEASKVDTIVVYKVDRLTRSLADFAKIVEALDARGVSFVSVTQQFNTTSSMGRLTLNVLLSFAQFEREVTGERIRDKIAASKRKGMWMGGVPPLGYDLKERKLIANPKEAQLVCDLYRLYLELGCVSKLKAHLDREGIKSKVRISVAGNRSGGSSYSRGALYQILKSRIYLGEIVHRGQVYAGEHEAIVPRELWDRVQAQLKSDNQGRRTGIRASSPSLLVGLLQDAHGNHFTPTHAVKNGRRYRYYVCQSAKDNAGGTDGRPTRLPAHDIESLVSARLRSLLQSDHEVVDQLGLPSDIPALTQQLVTAARNLSSQWLSAAPKKIHELARRAIKRVVVHREKAELYVSRSELRDVLITDRPTSSSQLRGNDLIALEAAAKLKRCGGEVRLVLPPNSDGEIPGRAAPSLLKAIARAHDWRERIVNGTAQDRRSIAQQTGLNQRYVRRVLESAFLAPDIVEAILDGRQPHDLTVQRLCRNLPTNWTEQRKRLGFQRGGI

SEQ ID NO: 5109 - protein, 552 aa, unidentified
  source 1..552: note = uncultivated organism
MQQNIIDILNKNNITKLYAYSRKSRDIEGEGLQKHHDILQQFADEHGLPLEVLEEVGSSETLNRPMLNDIRDKVKAKEIRCLLVYRLDRLSRKVTDTERLLKEFHFHDLILIEAHNGRFIDYSDYIGNKLTAVMNDLYLEQAKQVLNAGKIKSVSLYGNHLGEAPLGYTYNKTSKKLEPNKDKHIIEEIYQSYLNDMNLFDVAVEMNKRGYKTRDGNIFTHKTIRDTLTNEKYIGTQVYGKRKWFKDENGNKTSKAAPESEWIIYENAHEPIITKEAFQKVDQKLKDNRIVDVNSRKKTYGLTNIIKCSYCGRNITFYKDSNNGKTYMKPCANIDFTTGKRCPNGASSLTIIDQFINDKIKSEIKPAMDKMNEVLAKSTEIIDTNSVRVKELNNEKKDINKKLDNLLDLQLAKGIDQRLIDKENQLKYRLQQIEDELEGIETEADGKNWVDVFFDLHRDFIAIPFKWKSKDPSVRNTFLKKYIDKIVYTKNNINPDKPKLEIHYTEIVNQAIELYKQYRQEMNIRVEERKQKAIADGTYWGLIGTGKHVNDK

SEQ ID NO: 5110 - protein, 523 aa, unidentified
  source 1..523: note = uncultivated organism
MNKVAIYVRLSREDIDKSKGDDSQSIANQKSMLSAYCKERNWDIYDIYCDDGYSGIDKTRPDFNRMISDCEQGKVDTVLCKDLSRFSRDNTVVDQLIYDKFIEWGIRFKGVADNSDNDSNHDTGMRLFVGAFNEYYVQDISRKVRKTMEHKRKQGQFVGSFAPYGYMKNPDDTSKLIIDDEAAEIVAEIFEMFANGQGYRKIIQSLNSRSIPSPSAYKALKGSNYICCNLEKSNQKGLWTQSTVEKMLRDETYIGTLVQGKTHPISHKNKKRKKVPKEEWIRCPDSHEPIVSDEIWSKVQDRINNRVRSDRITLELSPLSGKVKCAVCGRPMKRNIYWNKKHTIKYYNLQCASCKTGAMNCTNEHCMSGLQLEKVILSELNDMIYAYCNDDDIIIEDMTTSKVEALHKKLDSLNEQKSKARIRLDGIYTDKLDGVITTEDYLRYKEKFDAEIAELETKSNELLSIIEKYENNEHDNESRMNLITKYTHISELTKNIADEFIDTVFIGERNENGERDVLINWNV

SEQ ID NO: 5111 - protein, 531 aa, unidentified
  source 1..531: note = uncultivated organism
MSRGRIRCAIYARKSSEEGLDQGFNSLDAQREACEAYIKSQAGEGWRTLSDRYDDGGVSGGTMERPALRRLLDDVARDRIDVIVVYKIDRLTRSLTDFARMVEIFDRHGASFVSVTQAFNTTSSMGRLTLNVLLSFAQFEREVTGERIRDKIAASKAKGMWMGGNVPLGYDLPTGGTRTLVVNAKEAETVRRIFRAYLDLGSVNELKRCLDSNAIRSRQRHGKDGERLAGKPFSRGALFHLLRNPVYIGRIRHKDLLHDGLHPPIVERALFDAVQDKLMSHGARRVAGSDPAAAPASLTGRIFDAAGERMSPTFAIGARGRRYRYYVSTSLQKGQRPRDDAVIRRVPAGRIEEAISDRLRRITGIEAATPLAILDRVDVHRDHLDLSLPGHLHRALRASLASGEDLAEDPRDVTRMRLSLPVSFPRRGGKTSIAPAPVAGPQPDPHLIRALRAAHAMLERDAAGRPVLAMSPTSPHRRRLVRLAFLAPDLQSAILSGLQPHGLTLARLLATDIPPAWDAQMARFGRPRRPA

SEQ ID NO: 5112 - protein, 550 aa, unidentified
  source 1..550: note = uncultivated organism
MGALKSISKTYHAAVYLRLSREDGDVAEGGRAFSNSISNQKELVMDYLESRADIQVYSVYTDDGWSGVDFERPEFQRMLDDIREGLVDCVVVKDLSRFGRNYIESGRYIEKIFPMLGVRFIAVNDGYDSLDGQYGDDMVVPFKNLINDAYCRDISVKIRSHMEVKRKNGEYIGAFAAYGYLKDPEDKNHLVVDEYAAEVVRDIFAMKLAGCNVKAIADRLNRDGILSPLQYKRSIGIRMESPFQKGAEPKWSYNAVLRILKNEVYVGTVAQGKCTTPNYKVKKRVYKDKDEWIRVEDAHEAVVGRGEFDLVQVLLARDTRTAPEREKVFPLAGMVFCGGCGAPMVRKTVPSGGKRYVYYVCSGHKSDRASCSSHSFSAKKLEESVLALVQTFIGKVLALSEAADIVSRTSGMELGAGKIESRIGKLREEAENCGRRRKNLYEDFKDGILTKEEYAMLREQYQEQAAGIEASIVSLEKERDGILAGRTAGLEWVESLKRYEGVERLDRGLAAFLIDRIAVMGPEALEVAYRFGKEAEEMERFVLEHGKEAV

SEQ ID NO: 5113 - protein, 535 aa, unidentified
  source 1..535: note = uncultivated organism
MKDEERICGLYLRVSTEDQAKEGFSLPEQKERLEALCKFKGYKIYDYYTDAGISAKTGNHRPEFDRLIDDAKNGKINTVIALKLDRLSRSIYDWENLLKTSEKYGFDLVCANDDINTTTANGKMVTRIMMSVSQNEIERTSERTKVGMAGAIKQGHIPAVCPIGFKRVNKKLVPDPLTKDIVIRIFNLYFEGNSYSTIANIYNKEKIQGKTNWKDTRILKILSNELYKGDYVSGKTINKPIYYENVVEPLVSKELWENCQAQKKKNQKNYMRTQTYIFLQKLRCPKCGRILAGGATHKIKYDKWYFYYRCEDCKNNIKEETIEDSVKVLLSDILEYDNVVNEFFLPVLKSKLDNPKQELEKELKSLNNKKDRIRKAYIDSIFTEEEYKNELELIENQIKDINSKLIENLQAEQLNFTTEDILLKRDMDFINKIKTLTENNEALNLRVKTLNNMIKEKDNEISFLKSKLQDLKNTLDYWKDKFEKLISFLHDKLHSWYDKDEKYIDVVNDMYDDNVLDDDDIEELDLSKEKDDFER

SEQ ID NO: 5114 - protein, 555 aa, unidentified
  source 1..555: note = uncultivated organism
MKKIRCAIYTRKSSEEGLEQEFNSLHAQREACVSYIASQKHEGWVLLPEHYDDGGISGGTLERAGLQRLLCDVDEGLVDQIVVYKIDRLTRSLADFAKLVERLDAAEASFVSVTQSFNTATSMGRLTLNVLLSFAQFEREVTAERIRDKIAASKKKGLWMGGNVPHGYEPDGRTLKIVEDEARTVRTLFDLYLEHGSIKAVKQQADQMGLRTKARAGEGSKCQATGEAPFERGHIYYILSNPIYAGRIRHHNQVYDGQHPAIIDPTAFDDVQHRLKATSGRKRGRAGSGSKTSPLAGKLYDETGDRLTPTHANKKGRRYRYYIANRMIVGDANTDKSKATSGWRLPAKSLEQQLASEILTHLRNRLPVDLLIDTSADDIRRIRDLLDDAGAGNVTSSQKAVLACIQRATITPGKIEIALDRETVAAWLSVSSDAMNSDALSFSIPFQFRKRGVETKLVIGNDQTRAIDETLIRNIAKGHQYYDAIKQGQTFEEIAASENLSKRRILQVIDLAFLAPDIVKLTMQGDQPIGLTAKWLGQNPLPSDWQAQRRIVATL

SEQ ID NO: 5115 - protein, 531 aa, unidentified
  source 1..531: note = uncultivated organism
MTKSKPEEPKPIRCAIYTRKSTEEGLDQDFNSLDAQREASESFIASQKQEGWVALPARYDDGGFSGGNLERPAMKRLVADIEAGLVDCVVVYKVDRLSRSLLDFARIMGTFDEKGVSFVSVTQQFNTTHSMGRLTLNILLSFAQFEREIIGERIRDKIAAQRRRGKWAGGIPVLGYDVDRSGPSPKLVVNAEEAARVRRIFAMYLEHESLMPVVHELERRDWRMKTWRTKSGRERGGRDFDKSSLHAMLTNTLYVGRIRHKTKTFAGQHQPIVEQSVFDQVQAMLRSHSNGRGKHVVNKYEALLRGLLYCPLCNRAMVHNVVRREAKIYRYYTCQTAIKRGRTKCSSPTLPAGEMEDAVVDHIRCIATDGELRRDVLQQSLCASERELEELELQQSQLRHQLQRHHDEIRRIATSADMESLNSVRLATLHEQIADVERLLASTLVNADVIRNERINELDVNAAFGDFDNVWSKLTTLEKSKVLQLLIERVEFDPTDSTIAITMHPSAIKSLTQTKSEESDSLPTTPKEPAQ

SEQ ID NO: 5116 - protein, 684 aa, unidentified
  source 1..684: note = uncultivated organism
MINLKIAIYSRKSVLSEKGDSIENQIELCKNYCESYFQGEDLEYIVYEDEGFSGKNLNRPKFKELINDIKSNKINLLICYRLDRISRNVADFSTTLELLQKYNVNFVSIKEQFDTTTPMGRAMIYIASVFAQLERETIAERVKDNMLQLAKMGKWSGGCLPLGFNSEKVSYLNSEMKEKSLVKLIPINSELETIKFIYNTYLSKGSILATLTELNTLGYKTKLKSNFELSGVKRILKSPIYVISNEDTHNYLKSLGYDVFGTPNGNGYLTYQQKSSNNSIVAIAGHKGVISSDDWLRVQKRFESNKQKAKKSSNRSGTGQNTSLFSGLLKCSKCGSNMVIKYNSKNKQGFNYIYYICSGKQKTNIDIKCDCPNLRTDLVDDIILAKIKTHNKDIIIKTYEDKLKELQLSSNKQLTNDLNKNINEKTDQIRSLIRELSLVSDESIKEMLRNEIASLNSELIQVKEKLNNSNKIQSDIENLIINIKQTLINFKNFYNYFDKCNDINVRRTLLNNIIENIIYDVESKSFNINFINLNMQLSSVRKSYNNLSTCNINLILTGETIGDKLKYYRLKNNLTQDKLAKLVGFNSGSCIKDIESNRRLPGRNISKKLADIFNLDTIYFFDKYLEDTHNLSNKLKEFRQKNNLTIKSASLKYGFSQASWSDWENEKSYIKRSKLYILKDNNII

SEQ ID NO: 5117 - protein, 569 aa, unidentified
  source 1..569: note = uncultivated organism
MSGKSSPSIAIYSRKSRFTGKGESIENQIELCRQYIRLHTGEEAAENALVYEDEGFSGGNLDRPQFQAMMADAKAGRLSAIVVYRLDRISRNIGDFAGLIQALNDLRVSFVSIKEQFDTDSPMGRAMMYIASVFSQLERETIAERIRDNMHELAKTGRWLGGVTPTGYASEQTERVTVDGKVRKACRLKPVAEEAALVQLIFTQFLDTRSLTKTDAFLLQNGYTTKNGKRFSRFSIRGILTNPVYMQADGDAWAYLTEQQAELFAPQDAFDGLHGVMAYNRTLQKPGKTNQIRPISQWIVALGAHPGLISGADWVRVQRLLGQNKDKSYRKPRGNTALLSGVLYCGCCGGPMRPKVSQRCGADGQPLYSYLCSLKERSHGQLCSLKNISGNLIDQAVTAELRSLPEDSGAFARRLAREKRQLSGNQANQSDRAEHLRKALAENRQAIAGLVSALGNASGTAAEAYVLQQINTLHEVGDSLRRQAAALEPLSTSPDLSDAALDALGQRLSSLAAMADTLEVEELRQVIRACVQRVVWDGETAHLYLFGAADVAALEGTAEHHAPLCEDSK

SEQ ID NO: 5118 - protein, 558 aa, unidentified
  source 1..558: note = uncultivated organism
MQDTRKVYYVAIYLRLSKDDGDISFSKKKKESNSIQSQRDLLTAFLRQHPEMKFAGEYKDDGWTGTNFDRPDFKRMLEDVKSGRINCIVVKDLSRFGRDYILCGKYIEKVFPQLGVRFIAVNDGYDTLTATGADSIVVPFKNLINDSYSRDISIKVRTNLEAKRRQGECIANFAVYGYAKDPENKNHLVEDPYAAGVVRDIFTWAVEGLSPGSIAEKLNQLGVLSPMEYKKSQGIRYKSQFKTGSQAQWSHVAVRRILQNEVYVGNLVQGKRTSPNHKTKKTVVKSQEDWVRVEGTHQAIISPVQFDLVQQLLKQDTRAGALQQAVAPYSGRIFCGDCGAPMVRKSASWKGKRYVYYVCQANKEDREVCSKHSVREDTLHQAVLATVQRQIETVLDMDRTLQKLEAQSWEKDELEKISQTVEAQKELLRKNNTLRLGMYEDLQDGILTREEYSTLKEEIGEKIRGIEDAIRRLEAGKQEILQGLNGHQSWLVQFRQYAGVKEITRPLVVNLVERIDVHQDGEVEVTFRQQDQFTHILAFLQRKGARSNVVAFPQQEVS

SEQ ID NO: 5119 - protein, 602 aa, unidentified
  source 1..602: note = uncultivated organism
MRVEVIKKTEEMSNGENSDKNKKLRVAAYARVSTDHEEQQTSFESQQRYYYEKITREPNWNFAGIYADEGISGTQTLKKENFLRMIKDAEDGKIDMILTKSISRFARNTVDTLKYVRLLKAKNVPILFEEENILTTDMPGELLLTVLSSVAQQEIETMSSHIRLGNKMKAERGEMIGFNGIYGYECDMKKNQMTIKPNEAKVVRMIYKMYLEGHGCNRIASTLGELGIVSPRGKKKWQYSTINKILRNEKYIGDLEMGKTYTLDPISHKRKVNKGEEDKFYVKDHHEPIISKEDYYRVQEMFSDKQSSNNFRRTPINRAYTFTGKFRCAFCGEPLVKKTSYRNKDVWACRTYVKTGRYLCPNSKVAYEKILKKVFVEGINYLLDKNDFDVDEFMKEITDVLDENKITTAINKTKAQKFELEQKVSKLIDLLLDGKIDNDTFDKKRKSYLDQIEELVTKLDKLSNNTVFKSNDERLIEIKNKILSDLSNEGQSLIKFDNKLFDELVLYGIIGGYDKDDIADPYMIRFVIKPDINSRIKDDMIADMIINNNHIADEDCIYVPILDFRSRQPFYSFELQDNKNTKTYHESVRVRFEIEKWLIITN

SEQ ID NO: 5120 - protein, 556 aa, unidentified
  source 1..556: note = uncultivated organism
MTVQKKTVRCAIYTRKSSEEGLEQDFNSLHAQREACENYIKSQKHEGWNVIATAYDDGGYSGGNLKRPSIRNLLSDIKSGLIDIVVVYKVDRLTRSLIDFAKIVEIFDNANVSFVSITQQFNTTSSMGRLTLNVLLSFAQFEREVTGERIRDKIRASKAKGMWMGGCVPFGYKALEKRLIIDAENCGLVKKIFELYIQYESVSSLQRYLNRSLFCEKSVKNIGKIGAVVSSTIMSKNKLYGILSNPIYIGKIKLGETLVTGLHEPIISEDVFKNVQTILAKNFGKKSGKYSTSNWLLKNKLFNLNGKLYAVEQIKLGNIRKYYYTNSSTLIDSQVSCDRIPCDKLENLLLKFFKDLLLEKHVAELNFVYSENENYSKINIKKIISQLSYVISPRDFIDRFINKVVAVEDKFNIEVKLPLKYLYGNKFINGDRDEYIDFRIIISNPFFKIRRGLKQYYRSDNQFILKWIDLARVWYFNSIMDQSESIAQIAASMNLSSDCVGNNIMLAFLSPKIIKHMRDHLSDSTFSKARIIQIVSNNQIWSKQEDEYFKICDKNQ

SEQ ID NO: 5121 - protein, 530 aa, unidentified
  source 1..530: note = uncultivated organism
MLVESRGREARGAAVTQTAVRCGIYTRKSTEEGLEQSFNTLDAQREAAEAFIASQRHEGWMALPQKYDDGGFTGANMDRPALKRMLADIESGIVNCVVVYKVDRLTRSLLDFARIMEVFDKHGATFVSVTQQFNTTASLGRLTLNILLSFAQFEREMISERTRDKMRAARRKGKFVGGNLVLGYDVSPQAGGLVVNEAEARRVREIFQLYLDYGSLVPVVKELDRRGWTLKAWTTREGRKVGGTQFTKAKVYKLLTNAAYAGKVKYEGRIFEGEQERIVDEETFVRVQETLQRNGRGCGRIIRGKYSALLKGLVRCASCDAGMIHTWTKKDNRLYRYYVCVKAQQRGWNNCQTRSVSAPALENAVVEQIRSIGRDPTMLGEVMRQLADRANVKSAEMARGKDQIQSALQTLSREMSGLATTASSTGSEAKAALDRLAEIHQRAAELEGQLAELQQGAAAADLQGVNADDLQRALAQFSPLWEQMTTWEQERLIRSLVEEVRYDGPAGVVTVGFRSTGIKELCQHDAGQSA

SEQ ID NO: 5122 - protein, 559 aa, unidentified
  source 1..559: note = uncultivated organism
MKVALYTRVSTEDQAREGFSLEVQRTYLLQYAKNFGWEVFCSMSGRDVYMDDGYSGGNMDRPALKRLLFDARNKQFDLVLVYKQDRLSRRLKDLLGLLEEIDSLGIGYKSATEPFDTTSSAGKMAIQMLGSCAEFERNRLVERVFPGMIVGVKRGHWQGARYAPYGYRYNKEAKKLEVHPEETKIVKEIYDMYLSGKSTSQIAGHYYALGIPSRQGGRFYGKFISDILHNKVYLGILVWNKRHYDTKKKTKNGEGKGYRYVNNDPSKVIEVPNTHEAIITQEMFDKAQKLLARNRTNAVVRFRNNVYHLSGVLKCNECGRNFRGLMLTVNHRTKMRRPWYCCSSLGVSYVKCSNKYVTADAINKQVWDIIDTISKNLHVLEELGDMIKLTASEPEQCYIEELETKEKDLSKNLEKQKGLYEVFSEDKINIDIYKDRAELLRNEEKKLKQDVKSIQLKILEKRNAVNLVKATQDFLIRLRSNPNNEQMDYLVKTFMRIIFKAIYIQNQEIVKVEINQPWKMCYEEGLKWLKTQEKTTKQAIPEANRRRSYVYFCAPSDAK

SEQ ID NO: 5123 - protein, 513 aa, unidentified
  source 1..513: note = uncultivated organism
MNVAIYIRQSKEKEDSLSLESQEKLCISICESNGWQYTIFEDAGESGGDVERDDFQDMLYRIISGEFQHMMIYRLDRLNRDVPDFADLLRTLERHDATFQSATEQFDTSTPFGRAVAYIIMALAEYERRMTAARFKENYFYRAKKGHYPGGSTPFGYVLDRMLYEGKMATTLDIDPVTDPILLRIYKEHTVYGYSLREIATRLSSEGLKTGYGKPWSAQAIRRILRNPLYVENTIDIYEYFVGLGTSIANKPEEFDGTHGCLLLGKEIGRKHRKMTDLSNQILAIGLHPPRIPADQWLLSQRLLARNRQTKRKGTGHLSWLTGLVSCAHCGYAITVKGWKKKNKEYYYLTCRGRTNLGAATCKAKTMHPLREVEKEIERQLLDHVHEIDLSNTAGLQKDPVVASEINRLKGQDIQLTKEIDALIDLGLDGAAKDYIQKKINKKDAQRKDIQASIQALSVESPVRNVSQVQDAIDRIKTTWADLGVRERHNLAEILIKGITISMDQTIDITWVF

SEQ ID NO: 5124 - protein, 544 aa, unidentified
  source 1..544: note = uncultivated organism
MKKSKNNRLDNILTERKRVGIWIRVSTKEQNESDAPETHEKRAENYAHYKDWMIVERYRLCTSGKSAMDHPEAKRMLNDIRSGRIQALIFSKLARLSRDARQLMDISEYFKKYNADMVSLGENFDTSTAAGEMFYNLVAVFAQWERRETSERISAAMLTRAKEGLPVGGVAPFGYKWQDDTLVIDKQEAPTVIEVFNTFIRLKKIKTTASTLNSLGYRTRKGSYWSDTSVRRMLTNTTYIGVHYLNHTKANGKRWRPKHKDEWIPLNVKPIIKKVIWNQANSIIQANSAHRIRRKNIYLLTGLISCTKCGCKMYGYAYGRSKGYYKCQKCTNKIPIQEIEDILIEKLKKFVFRPKDLTGLPKSSLEILQRKLRHLKKVKRETEIKIKETFELYHKKRISNGILANLMENIEKKYENVNKEIPEVKEEIMTKKLKNHKNDISNYMKSIGEIFNSLKFEEQSNLVKDIVESIKVNNNNIYINFYLLNFFKKNMDLLRKFNEKAWVHCRGEHEARRVGQGHFGAPDRHTAVLKRLAQHLDHVFVELG

SEQ ID NO: 5125 - protein, 601 aa, unidentified
  source 1..601: note = uncultivated organism
MQKTPNKDVIAIYSRKSRFTGKGESVGNQVELCRSYIRSAYGDSCADSAVVYEDEGFSGGNLNRPGFKQMMKAARQRQFRAVVVYRLDRISRNISDFSGLIEELNRLGIDFVSIRESFDTSSPMGRAMMYIASVFSQLERETIAERIRDNMHELAKTGRWLGGTTPTGYTSEAVKTVTVDGKSKRACKLKLIPEEADIVRTIYDLYLQTDSLTNTEAELLRRRILTKTGRHFTRFSIKTILQNPVYLIADQDAWQYFTDRQAELFSGLEDFDGVHGILAYNRTDQEKGRATIYLPVSQWIVSVGQHPGLIPGKTWVHIQESLERNKSKAYRKPRNNEALLTGLLWCACGNRMYPKLSKRLTPEGKPVYTYVCKLKEHSQRALCNRRNASGNQLDAAVIEQVKHLADDNSTFIQQLEKSKRFYTGGRDAYASQLEDLRSQQAEVERKLNALIDSLADFAHSDAAVHVKKRIEELHTQQASLDTRISELEELTSQHELSGAEFDVMRQLLVTFQSSIDNMSVEQKRTAIRTVVRKVIWDGEYAHLILFGAVEDQPDAPVLSGGDATDEDPASLEAFANVEYEDSDAETQSDSAVKTSWGEDSK

SEQ ID NO: 5126 - protein, 539 aa, unidentified
  source 1..539: note = uncultivated organism
MPKINCAIYTRKSTEHGLDMEFNSLQNQEEACKAYILSQAFNNWEYYKTYSDGGISGGTMERPGLQNLLNDIRAGQIQVVVVYKVDRLSRSIIDFHKMMQEFDKYGCNFVSITQSFDTSNSMGKLTLNMLLSFAQFEREVSAERVRDKIAASKAKGLWMGGCPPLGYKIVDRQLIPEEQEVSIIRLIFDKYLELGNMAALAQWLNEQGYHTKKWLVKGDKTRGGKAFKESSVRRILSNPIYIGQITHLAKQKVYKGKHKGIVDPELYSRVQAYIHRRVQARYNIIKEARKPAFLFGKLYDEQGHKFNLASCNKKNGQKVRYYYNPLGGSYLPLEQINQFVINACKQADLSRMDKNADTSLLTEENIKESLLRVICNRTDRVNQLRIIFDVQKLNALLSHLPRALCPNKNAKLPVIYDQENCWIKAEFMVDNVSSVRLQHGTSCNILTIRQINKSLVRGLAKGWRLKKLLEQGMTTQEWEKASGMNKRTFARYLNLCYLSPKIITDILEYKNPKNFTLRALMDLAESRSDFDSQEAGWII

SEQ ID NO: 5127 - protein, 530 aa, unidentified
  source 1..530: note = uncultivated organism
MSRPTTPAPRAAVRLVRCAVYTRKSTEEGLDQEFNSLDAQRDAGEAYVRSQSGEGWVALPDRYDDGGFTGGNTDRPGLRRLMADVDAGRVDCVVVYKVDRLSRSLLDFAQLMRTFEDKRVSFVSVTQQFNTASSMGRLVLNVLLSFAQFEREIVGERTRDKIAATRRKGKWAGGRPVLGYDREPGGRRLVIHPDEGAQVRDIFALYLRHGSLLPVVKELARRGWVTKRWADQTGRVTGGKPFTRTSLYQLLTNPLYAGRVRYKAEVFPGEHPALVDPATFDRVQERLRANGAQGAGPGSPDKYGALLKGLLRCGPCGAAMTPTCTTKGSRTYRYYACVAGHKRGAGTCPSKPVPAGPVEGFVVDRVRAAGRDPGLLRQVVEQARRQRDERLAELAAEEKGLAADLAGLRRHLGLESARFRPGDDSGEVVRRLAALHDQQRLAEDRLRRATEQAREVRAARVSEADAAAALAGFDPVWAALAPGERARVIGLLVERVVYDGVAGKVAVTFRPTGITALAGELADRQREQVA

SEQ ID NO: 5128 - protein, 514 aa, unidentified
  source 1..514: note = uncultivated organism
MQKAGIYCRLSIEDRDKMCSDDSRSIQNQKDMLCDYCVKHGWEIYNVYVDDGYSGVDRSRPGFNRMLIDCENGKIDIVLCKDQSRFSRDIMVIEQYINDKFIEWGVRFIGVADNADTESESYSTMRLFASAYNEMYVKDISSKIRRTLAFKRQQGQFVGSFAPYGYRISAEDKHRLVIDEAAAPVVRMIFDMYVSGDGYRRIVQHLNSEGIASPTEYKRQTGSKYVNSNAGTQGLWTQSTVARILANETYTGTLVQGKSHHISYKNKKRKKVAKEEWVRIPDAHEAIIDAETWTKAQQRLSGHARAGKASQELSPLSGKVRCALCGRPMKRNVYYNKARTIRYYGLQCGSYKSGAMNCPNTASISGLQLERAIVDELNSIVERWCETDEIRLTDSTSGQIEALGKKLDLLKAQEKTAKERLVKLYRDKLDGIISEEDYLLFRRSMSDEEQALSEEMAEIAHRREMLKNQQEPDIREMVRFEKLDRITADEFIDFIEIGATDENGERRMVVHWGV

SEQ ID NO: 5129 - protein, 549 aa, unidentified
  source 1..549: note = uncultivated organism
MNRRETTSPAATAPLRAALYMRVSTGRQAESDLSIPDQRRQMTDFCAARGWEVAAEFVDAGLSGTDDNRPQLQRLLDIATAGGAPFDAVIVHSFSRFARDHFALEYHVRRLRKHGIRLVSITQDLGDDPMSVMVRQVFALFDEYQSKENAKHVLRAMQENARQGFWNGAAAPYGYAIVAAGQRGAKTKKKLAIDPVEAETVRLIFRLFIEGDGTSGPMGVKAVATWLNDHGHRTRRGARWGIGPLHKLITGTVYKGEYRFNQKAWKTKEDKPSDEQIVVPVDPIIDPATFDRLQKMLKARNPKVTPPRTVTGPILLTGLATCASCGGGMTLRTGKSGRYRYYACATCAQKGKSACKGRAIPMDRLDSIVTERLAVDLLTPSRVHTLLEALLERQAARNSDHAERVAALRTKLLEAEGRLSRLYQAIETGIADPADPTLKDRIEALRTERDIAQATLDRALTEMRPEARITQEKIQAFTETMRANICDGPVPFRRAYLRAMIDNVEVDDAEIRIHGRKTVLERLVMGSGATAAGVPSFVRKWRTRQDSNL

SEQ ID NO: 5130 - protein, 562 aa, unidentified
  source 1..562: note = uncultivated organism
MARTANRGTNQAVSQTPYNVLHWRLGEYIRLSKEDAQKAKKGDDSNSVINQGRLLDDYYNRHIDEFESAEKYIDDGCTGTDTDRENFQRLLADIYARKINCVIVKDLSRLSRNYTDAGTLIENLFVQMNVRFISLAEGVDSYKNPDSVSNIIVPITNVMNDQYCYQTSKKIRQVFDYKKRNGEFIGSYAPYGYIKDPNDKHALLVDEEAAEVVKQIFSMFVSGMTVRAIVNHLNDHGVMCPSLYKQSQGLKYHCPNGQTRPMWSTITVSSMLKNPVYVGDMAQGRNRVKSYKIHKLEPVPEEQWIVVQNTHEPIIDRETFAKAKDLLKRDTRTAPKQKQLYLFSGFLRCADCGRAMSRIASKDLYVYYQCGTYKSLSKKACTMHSIKSTKLEAATLYAIRQQVHLAVNYSAIIAQINAAPQKKSQSARLNEQISAKEKELARIMRYKQALYQDWKDGNITHNDYRHMGADYEQQIETAMAVIDSLKAERDKLENGIDEENPFLTAFKKYENIDKLTREILIELVDYIKVYEGGDISIKFKFADELRRIMEYVEINRDLQQAG

SEQ ID NO: 5131 - protein, 574 aa, unidentified
  source 1..574: note = uncultivated organism
MYKKYDEKRAALYIRVSTQYQVDKDSLPLQREDLKNYTKYALGIDSVEIFEDAGYSAKNTFRPAYQQMMARMRTGEFSHLVVWKIDRISRNLLDFAQMYSELKRLGVVFVSKNEQFDTSSAMGEAMLKIILVFAELERNMTSERVTAVMISRAANGQWNGGRIPYGYDYDPETTTFTVNPQEADVIYKIYDLYEKYSSLVTVTKMLNEVGPKTRAGNEWTPTTVSKMLNNPWYTGVYRYNYHDEKATGNSSTASVKDEKEWVLLEDHHPAIIDPARFERIQANLWANRRSNKGGNTYMRKNIHVFAGLLKCGECGGGMQASVDRVQPDGFRPSMYLCATRRSNKSCNNKYIKDGAVGNFVLNYIANIFKAQGNFGKSTSLSTFERKLLRGETFADIEAIEPLGLKEMFMMMRTGASPTDIFSTPKPVSGEEYSADEKDLLIAEKRKKERALARLQSAYLYADDTISEREYITERKKITDEIEGIDKRLEEIEKNSSMSFTLSDKDFMDKASYFILSQELQDKRYINYDKLSRSVDPLLTKSFIKMVIKKIVILDGKIMSIEFTNGITHKFLYKQ

SEQ ID NO: 5132 - protein, 523 aa, unidentified
  source 1..523: note = uncultivated organism
MRRMGADGAGPYRAGLYLRLSREDETHGQSGSIANQRALLRRYAEDQGFQVVDCYVDDGYSGLHFDRPGFQRLLRDIEAGRVNLVLTKDLSRLGRDYIDTGYYLERYFPGRRVRYIALADGIDTFDRHCAQNDMGPFKSVMNDLYAKDISKKVRAVMDAKREAGQFIGAFAPYGYRKDPADKNRLLADEPAAGVVRGIFSAFLAGTSMAEIARRLNREGVLPPSRYKAEIQRLPYSGAKASQGLWRPETIRAILGNPTYAGDVAQHKNEKPSYKLKASRRLPREAWTVVADTHKAIVGREEFQAVQRLLQSRGGRARPGARAHLLAGLVFCGECGRPMTFCRRSSGGSFVLVCSGYARYGECQRNTTDEAALEQVVLERLRGLARQALPPEAEQALLRECGQSLGAARERELAHARERCGQIEWVLKALYEDRAARRIGESEFEALAQAYREERQGLQRRLREGPGEETGEPLPQGGAAHSLLSFEPPDHRMLCQLIRRVSVGQSGAVAIDYRFARPVPAGGA

SEQ ID NO: 5133 - protein, 543 aa, unidentified
  source 1..543: note = uncultivated organism
MKIAIYSRKSRASEQGESIQNQIDMCKAYADTHFKDIEFFVYKDDGFSGGNIDRPEFQLLLKELKKRSYDVLMCYRLDRISRNVSDFSSTLDMLTKNDIGFVSIKENFDTTTPMGRAMIHISSVFAQLERETTTERITDNMFALARTGRWLGGTAPTGFDGKREMYVDGNGDKKFAVKLTPVPEEQKIIETIFDKYIELGSISKVVTYCVQNDIRSKNNKILHAATIGRLLNSPVYCVADGIAYDYFAKHKSIIELEREDFDGKFGIMPYGRTNQAGDRVKNNDMSKWIIAIGKHKGVITSDKWIKVQKMLKKNSHKAIRGESPTNALLSPLLRCGSCGARMIVTGQTILADGTPAYYYKCQTKDVSKGTKCDIANIAGYKLDEYVVEHIKRILSSQTGLDELLESEKKDVLEDKKLLTKNKSKIENTIKKNRDAIDGLIMKLVELGDEPGINDYVKTKVSILHNENEKLKIKLKDIEDEEKVKEVSELNIDMITDSLLNFNALIDSQDVLGKRKLIQDVVRKIEWDGKEVHIGISINKLDHG

SEQ ID NO: 5134 - protein, 550 aa, unidentified
  source 1..550: note = uncultivated organism
MKRVRILLRVSSNQQLEADGDLSVQRQLVRDYIDQHDDWQLDAREYFEGSSSGYKNAVDRRDILQEALTDAQKGEYDILAAYKDDRIGRRMWEIGAYVMTLKSFHVDIYTVKDGCISPENDDIMGQMMLALRYGNAQKSSSDTGMRVKDTAEKLVRKGKFMGGAAPYGYRLVFSGELSKHGRALHELQIVPEQAALVRKIYDLSFYQEFGSVKIAKILNADEYDRRMAPGGEWKCGTSTNILTNPIYAGYTAYKRRERIGGKYRRQEQDGWTIAEKPNPGIRIIDGTRWKLVQEKRKNRAAKYRPNQAPEENRPKRPVISRNDGGLSLTDVLYCSDCGKKMTNGTRYSYWKIQGTGEKRSRKIPLYRCPSAHSGIPHTGSAQFRADLLEKVIFDCLAEYIDRLLKADDIAAACEKKRSFQIKALETEQKHLQRELSKITQDIRIMQEHIPDAMSGAYPLSVTELADAIRRHTERKKLLEKERNSRNDALKRFNAEAAAHSVHSQEKNFPLPTWAQVFEKASAETKRVLVNRLLERIEVSEMQIVIRFRGC

SEQ ID NO: 5135 - protein, 582 aa, unidentified
  source 1..582: note = uncultivated organism
MPKVRDATHRPSRRLRCAIYTRKSSDEGLEQAFNSLDAQREACAAFVLSQKHEGWSVLPALYDDGGYSGGTLTRPALQRLLADIADRKVDVVIVYKIDRLTRSLFDFAKIVEVFEARGVSFVSITQQFNTTTSMGRLTLNVLLSFAQFEREVAGERIRDKIAASKKKGMWMGGLPPLGYDVRERKLIVNEEEAKTVLHIFRRYAELRPVRALKVELDAAGVLSKRRTFADGTVYGGHKLSRGALYLMLQNRIYRGEITHKGNAYPGEHKAIVDQALWDRVQAVLAENRVDRTTGADAKYPSLLAGLAFDDSGERLTPTHAVKKGTRYRYYVSKSLITGAAKDHSRGRRIPAGNLESLVIGRIRDFLADDGAVLSAISDAEQNGAQQKRLITRGRQVSEELPALAPDTLRSILMTLVSRIDIKSEHVEIRVHRRQLHDLLQPESIEPPSAHPAPTGPGDILKLKVKARLQRVGREMKLIVHNADDRTQADPGLLRIVARAHDFQERLVEHPDLTVPAIASQERLTIGYLSRLLRLPSLAPDIVTAIINGKHPPELSAKRLMRLALKLPTDWADQRKLLGFQGE

SEQ ID NO: 5136 - protein, 540 aa, unidentified
  source 1..540: note = uncultivated organism
MPKINCAIYTRKSTEHGLDMEFNSLQNQEEACKAYILSQAFNNWEYYKTYSDGGISGGTMERPGLKTLLDDIRACKVEVVVVYKVDRLSRSIIDFHKMMQEFDKYGCNFVSITQSFDTSNSMGKLTLNMLLSFAQFEREVSAERVRDKIASSKAKGLWMGGNLPLGYDLNDRHLVVNEPEAEIVRQVFQKYLEMQNMLGVAEWLNKQGIHTKKWVTKHSQRTRGGEPFKKNTVQRMLTNPVYLGKITHYRQNKIYNGVHKPIISRELWEQVQQVIRRRISDPNAFRHYKFHKTVLAGKLYDDKGKKFRFASSKSHRRKLLYYYNGVGGHYLPVEQLDNFVLDMLRQTDLEELEPLADRIDITDKQMWSWIVKATCQTAGKAHYLTILLDEKQIKADLINCPKITEKLERKPLSLERMEDNLYVRGKFMVANVSSVKLRNGTARNILTVRQLNESLVRALARGWQLKKISERGGGMRVLEKEVHMTKRTITRYINLCYLSPRIVADILEYKNPNNLTLRELMNLAEGQVDFEKQEKVWNGE

SEQ ID NO: 5137 - protein, 541 aa, unidentified
  source 1..541: note = uncultivated organism
MKAALYLRVSTEEQREKQSIATQRTFAESYCAANNISVYAWYEDDGVSGMIPLDLRLAGSRLLADARAGKFDTILVYRLDRFGREPRLILNAVNDLESLGIQVKSMTEPFDTGNPAGRFLLTILSAVAGLERDTIIQRSMEGTNRLAREGAWLGGIVPYGYHVVGKDRNARLVVSEQAIPGLAVSEADIVRLIFHMTAEERQSCIAIAEYLNATGVPPVYTRDGRELRKGKRKTATAGIWRPGRIRSIIINTTYRGIHRYGKRSKKQREVIEREVPAIVSAELWERAQVVLHEHMLFSRRNAQRSYLLRGLIKCAHCGLTYIGTGQRMYNGKIRVYYVCNGRHQARRLFGSKDKKCPAQSVDGDMLETLIWQDIENFLRNPGAVLDLLAQQLNQRGDEADQLRAEVARLQQSLQARNREKDTVITLFRRGRIDERSLDSQLDQIQQEERDLQHQIDHLQELMQEAQAVESTLRSTQELLQRLRQRLEEPTTWELKRQLIEALIERLVVTTVDTEQGKKEARITVIYRFGASLELEGQRQIT

SEQ ID NO: 5138 - protein, 563 aa, unidentified
  source 1..563: note = uncultivated organism
MKPVPTRIEGRVRCAIYTRKSSDEGLEQSFNSLDAQREACAAYVQSQASEGWSLVPDVYDDGGLSGGTLERPALQRLLAEVAAGRIDIIVVYKVDRLTRSLLDFAKLVEALDAAGTSFVSITQSFNTTTSMGRLTLNMLLSFAQFEREVTAERIRDKIAASKARGMWMGGIPPLGYKADGRSLAIVEEHASLVRLIVERYLALGTVRLLADALAREGHVSPLRTTTTGNAFGGKPFSRGQLYLLLKSRIYLGEIAHKDQIYPGLHKPILERDVWDQVQALLAANLQGKRSGALHRSPSLLSGLIVDAAGEPLQAVHATKGKTRYRYYTSKPGQRDQSSAIRIPAREIEHAVSHRVAQLFDDSLALAELPWLDVPADRYAMTANLARELAARLRQPERALVRTLVGSVAVHHASIVICCEPAAIADLLQLARPSEEITLTLTCDLRLTRSGRRLRLVHDSGAHTHIAPDRSLVRLVAQGHRYWAELRKGELDVTSLGEREGVTRSYITRVLRLAFLAPDVTVAILRGEQHASADVAAITATSSVAADWPAQRQIFLPSQLATNC

SEQ ID NO: 5139 - protein, 572 aa, unidentified
  source 1..572: note = uncultivated organism
MADDRKRSSKLRCAIYTRKSSEEGLELEFNSLQAQSEACEAFVTSQKGEGWQTLKAHYDDGGWSGGTLDRPALQRLLADIRAARVDIVVVYKIDRLTRSLLDFAKIVEVFDAHGVSFVSVTQAFNTSTSMGRLTLNVLLSFAQFEREVTGERIRDKIAASKKKGMWMGGLVPLGYDAKDRKLVVNTEEVESVCFIFRRYLELGSVYKLKAELDAKRITSKRRPGANGRAWGGRPITAGALYHMLQNPIYCGRIGHKEQSYEGMHEAVIESGLWEAVQRSLAVNRRERRNGASAKDPSLLTGLIVDANGKRLTPSHAVKGGKRYRYYVSRSLITDPGRASESSWRLPAVELERVVVRQVGEFLADQSRIWALCKGAKFSHREAVSALKRAHELADAFLRGSDGALRPLLLHLARKIVVYADQIVMELSQVGLLKQPSQGSATELRAQGSDRAIMLTVPCQFRRRGREMRLVIGVQAGGEGRPDATLIAALIRAHAWWQELCGGNAGSIKQIANRARSNERYVARNLKLAFLAPDLTAAILEGRQPANLTADALIKMSDLPRSWALQRQRLDFF

SEQ ID NO: 5140 - protein, 515 aa, unidentified
  source 1..515: note = uncultivated organism
MSTITIIPSTKAQQLHLRVAAYCRVSSDSADQLHSYAAQINAYTQLIQQHSDWELVDIYADEGLTGTRMDKRTEFGRLLSDCRKGRVDKILVKSISRFARNTKDCLVVLRELKLLNVSVQFEEEHIDTQTLTSELMVSVFGSLAQQESTSISQNLRMSYHRRMEKGAFSTCKAPFGYRLKDGKQLTIHPTEAASVSWIFSEYLRGRSQAQIAEDLTRRGLPTADGTPYWQETSIAYILTNEKYIGDSLCQKTYTTPLPFAQKRNFGEQPQYYVHGSHPAIISKEVFEQAQQLRRKRIYEKQHCNRLSPFLGKLICGNCGSSFTRRVNANGYTCFVCRNRNKKVTRCSVGRISEVQLQAACIRLYNRLRCNMDTILTPALHQLRVLEEALQRDNPALTQLNLEIAETAVQAQKVSRMLSAGLISADICITKQRKIDSTLKELRRKRGKILQNSAVDEAIKTITSLQEILTTGPEQLIRFDTDLFETLVEKITVLPDHILRFQLYGGITLEQQEETA

SEQ ID NO: 5141 - protein, 542 aa, unidentified
  source 1..542: note = uncultivated organism
MLSIETKRVELLYRVSSIGQVEKDDIPMQRLFCREFVAGHSNWVIVKELYEKGVSGFKKSAKERDAIQELQQDAVEGKFDILLVYMFDRLGRKDDETPFVVEWFVKNGIEVWSAVEGEQRFDNHVDKLLNYIRYWQASGESIKTSMRVKTRLEQLTESGLYTGGTLPYGYRLENKGRTNKRNKEVGDLVIDETAAEIVRLIFHKYVNEGYGAQRISRYLMEMNIRREDGSDFPNTTLVRMLKNRIYTGVIHNGDVESEPIPELQIIDPDTFERAQALMKDRTMNRTGASANLRGRSLLVGNIYCGHCGNRLTLTTSGRIINRADGTIRNGVKLRYNCHYKARHPDKCDGPSGYGVTKLDGIVDQIIRYQLSKIQANSSSQAIIKQHEQSVALAKARYRLTCSQLSEKQKELTDLQAETIKVIRGESRLSIDLLNELVAKAQEEIHRLTLSSEEARSSLEEVQHSAAQEEQEMNQLKTWADLYDNCTFAAKKMIVSQFIKSIHVYRDYTLEIMFNVTFDEFRKLSADTRNLGNEKAEIYARAE

SEQ ID NO: 5142 - protein, 514 aa, unidentified
  source 1..514: note = uncultivated organism
MSSTQADRAEAKLRAGVYARLSETYDAAESVPIQLERGAEHATRRGWTVVATFKDDGYSAFKEITRDGFAELIAAIEAGQVDVVIVREIDRLTRNLTDWNDFEKACVRHGVRLSAYTGGDLDLSTPEGAYYGGMETLRAKRESAVKSARVREKHDLNARAGKRAGGGPRWFGYTRIYANPEETDPQKRTILREEVNPVEADAIREAAVRVLEHGESVRSIMRDWTQRGIKPVRGKQWYPTVWVDIMTSPKLAGLREWQGQKYPAQWPAILDADTHERLAKMFADPARRKHIVRSQAHLLSGIAICPKCGRGLHYRNYEGKSSVRTRSDAYACVAGPYGCGRTAIKAELLEEYVTGAVLDALESPRVQEALREGQLDEHAPRRAELLADIQRNQEIRADARRDLTDGTIDRADWLDIRQRTEDNISKARREYDRLSGSGTVMSDIPASEQVRDAWESWNVDRRRAAIRAVMHRVIINPLPPGAPCSPGGTFKDPVKRREREMAILRQRVEFDWRV

SEQ ID NO: 5143 - protein, 551 aa, unidentified
  source 1..551: note = uncultivated organism
MRCAVYTRKSSEEGLEQAFNSLHAQREACEAYITSQRHEGWILDPTPYDDGAYSGGNMQRPALQAILAAIKAGEVDVVVVYKVDRLTRSLPDFAKIVDVLDAAKASFVSVTQAFNTTTSMGRLTLNVLLSFAQFEREVTGERIRDKIAASKAKGMWMGGLPPLGYDVRDRKLIINPGEADTVRALFGRFLDSGSVDRLVVQAAELGFRTKARVGANGPTGGGLFSRGTLYHLLENRTYVGEVVHRDQSFPGEHQAIVDRDLFDRVQAVIAANRRTRKSGRNSPHPSLLASLLKDGTGQGFTPTHTKKAGKRYQYYAMRPRGQEPVYRLPASEVEGLVRNAVLELLCSPDQVIGLVGTSDPEVANQVLAEAAHLKELWRGDDPVVLRQAAVTLLAGVVYRPDMVELQIRASAFGACAERIVSRHVTAHIQRRGATLKLVVDNGAPREDPKLLSIIATGEAWFDALAKGEVESIAELAERESCSPAYVSRLIEAGLISPKLKAAIQQGTQPVRLTAATLTAAGPLPLDWRDHQAFVVGELFPPTPFETEASQE

SEQ ID NO: 5144 - protein, 546 aa, unidentified
  source 1..546: note = uncultivated organism
MAKCAIYCRVSSDEQAEKGTVQSQVEYAKKYLELHGPENNIDDFEFYIDEGISGTVPLTDRPAGSRLISDANSNRFTILFMYRLDRLARSVKHVLDTYELLESKGIALKSMTEAFDTSSPTGKFFMTLLASIAALERDTIMERTQMGKDRNARAGKWVSGLAPFGYRVGNDGMLEVYDQEADTVKMIFDLYAQDMTMLEIARYLNARGTETPATSKGTKNKTGGKWHSASISKILSADVYTGKYQYLHGSKRNRKNIEMDVPVIIGIEIFSEIQKKSKINSDLYRGRKGRLYLLRGVIFCGHCGLAMSGSTANNNKHIYYRCPGVNDLGQGKKCTSRSINAINLENAVWEDILELVNHPDKFQEYFDEENKKNKERSIPITSELSEVEESILAKQKARGKILSMIARGVISDQEAEDELKDLAIEIRALNSRKEYLFEQKGREIDIEEEYVNSHIAFGIIKERANSLDIDDKFNVIQGLVSRVDVFTIMKNGNKGGNKATIKYTIGHCIELLIPSNSETHTKIYNIESTWTFQAFSKKGGTRINWR

SEQ ID NO: 5145 - protein, 538 aa, unidentified
  source 1..538: note = uncultivated organism
MRIAIYSRKSVDTGKGESIENQIGMCRDYIATRIPGSADAEIVVYEDEGFSGKSLDRPQFKRMLADCHRGGIDYIVCYRLDRISRSVSDFSSLIEDLNERKIAFICIKEQFDTSTPMGRAMMYIASVFAQLERETIAERVRDNMLMLARAGRWLGGAPPTGYSSEKVEEYILDGKAKTSFKLKINPDEIGVVKTIFAKYLELRSLNGVSKHLIREGVKGRGGKAFSLPGLKDILRNPVYCIADKEARDYFIALESDVSFTQSQCSDQYGLLSYNKRDHSRKGKPRLEESEWIIAIGRHKGIVSGADWVKVQEILAENRPDNLEAPKSYNDYSLLSGQVFCQKCGARMFAKRRTNNRELYDYICGNKLRAGGTLCDCQNLGGEQADDMVCDYLMDYASEDSGIHKMLEELRQKVEAQPAADPVTELDSRIDKTRRELDSLVATLASAGANESMIRHVSARMEELDGELAHLTGQKNQAEASREGADMGRAQLDLLIHTFASFKESFPSLTIHEKREFVRLFVQKMEWDGENLHIFIYGR

SEQ ID NO: 5146 - protein, 538 aa, unidentified
  source 1..538: note = uncultivated organism
MKQQENNTALYLRLSRDDENYGDSVSIETQRTILRQFVQDNGFHVVEEYVDDGWSGTNFDRPAFKRMIEDVESGKINCIITKDLSRFGREHVMMGYYLEFYFVDKNVRYIAVSDGEDTEKGLSDFVPFKNLFNEWYAKDTSRKIKASMNAKFKTGERTCAYAPIGYKKHPEIKNKLAIDEETRWIVEKIYEYALLGYGAAKITGILIEEKVPTPGYINYKRDGFFANIYAGAPEEKSYTWTIAQVKSILKDETYIGNTIHYKQTNVSYKNKHRIRKDKDEWMRVENTHEPIISKEDFETIQKMIDTRRRSQKQEKDTQIFAGLLKCADCGWTMIYSINTSVKVPYNYYKCSRYSQMGKKHCSNHYIRYDTLYAYVLSRLRYWSSQAQTDEDKLLKKLMAASDKETGKMRNKQENDLKRMQKRKKELDGLFSRLYEDYVSEKITEYNFNMLSVKYQKEQAELEEKITALSEEIKTSKDNEANAGKWLGLIKQYSDISELTAPLLNALIEKIEIHQAVKKDDGTIEQEVEIYYRFIGKIE

SEQ ID NO: 5147 - protein, 538 aa, unidentified
  source 1..538: note = uncultivated organism
MNDKKIRCAIYTRKSTEEGLEQEFNSLQAQREACEAYIKSQKHEHWQLLPTEYDDGGYSGGNMERPALKRLLSDIRSGLVDIIVVYKIDRLTRSLMDFSKIVEVLDKHNASFVSITQHFNTTTSMGRLTLNMLLSFAQFEREVTGERIRDKISASKKKGMWMGGKPPLGYYRKDKKIYPDEEKAKLVTSIFQKYVVLKSTTLLKDWLAEQGHNISVGNLNCILRNKAYIGLVGHKGTWYPGEHQGIIPIELFEQVQAVMADNHINRQHYEPKKSLLSGKLYDDKGNAMSPSWSTGSSGKKYRYYVSQAIIRKEPSKLGKIGKVSLPQLENFIDSWFDRFLREKQKIHSYIQHFEVAKQKKILKLLSSYTITRSIEKALIKRVQLNPNEVEITLHTEQVVELFNAIYENREMRLLKPEELKAENTYTEPYHIGTIANGEKIIVGQFVEPKKRPNTELIKILNQAYTWHQDVINGTSTQGMAKRDKVCVQYVRRILNLSFLSPKIVRSILNGTQPADCTLKKLLSIKFSNWQEQEQIFYK

SEQ ID NO: 5148 - protein, 535 aa, unidentified
  source 1..535: note = uncultivated organism
MKSESRAYSPPESIRPGNNGTVRCAIYTRKSTDEGLDQEFNSLDAQRESAESFIKSQQHEGWVCQPDAYNDGGFTGGNMERPALRRLIFDIERGEIDCVVVYKVDRLSRSLLDFSRIIGLFDKHGVSFVSVTQQFNTTSSMGRLTLNILLSFAQFEREIISERTRDKISAARKKGKWTGGMPVLGYDVDSQAGRLVINPEEAERVRAIFDLYLEHERLLAVVQELNRRDWRTKHWITKKGHERGGKPFTKNGLFRLLTNVVYAGKVRYKDSVYPGEHEQIISEDQWQQARDLLRKNARSGGAEMPSKHGAILRGLLYCIPCGTAMMHTYTAKGSRRYRYYVCLNAQQRGWSACPTKSINAHDIESFIVEHIHGIGSNQEIIAETVKRVRAKTENRLADLNRERLIQKKQLRRLHLRLRKLIGEPASISVDSPKIDQLADLQDQIRSAEQRMTEIEEEIITLQREAVDEEDIARSLSAFKPIWESLNSREQSRIIKLLIERIGYDGRDGSVKVTFRSLGIKALCERKDLSIGERLR

SEQ ID NO: 5149 - protein, 523 aa, unidentified
  source 1..523: note = uncultivated organism
MPKVGIYCRLSIEDKDKLKTDDSQSIQNQKSMLRDYCNERNWEIYDIYCDDGFSGTDRTRPAFNRLISDCKSGKIDIVLCKDQSRFSRDTIVIEQYINDKFLEWGIRFIGVADNADSDSEMYGTMRLFTSAYNEMYVKDISAKIRRTLSYKRENGEFIGSFAPYGYKIDPDDKHHLIVDKEAASVVKEIFEMYVQGNGYRKIVCELNSRGILSPSAYKHNTGSNYVNCNADESNSKGLWTQSTIARILHNEMYTGTLVQGKSHHISYKNKKRKRVAENKWIKIPNAHESIIDIDIWKRAQERLNSHTRVGKNSWEISPLSGKVQCAVCGRPMKRNVYYNKAKTIQYYGLQCATYKIGAMNCSNIKSISGKILEKKVIDELNKIIEQYCQTDEINLTDFHSEQIEKLKKQLEKLQTQQKTSESRLTQMYKDKLDGIISDGEYSIFRDTLISEKQDILNRIENIKNQLDELSAKKINADNQRTIIKEHSHFTNLDRTIADEFIDYIEVGEVSKTGERDIFIHWKI

SEQ ID NO: 5150 - protein, 557 aa, unidentified
  source 1..557: note = uncultivated organism
METKKKIIRCAIYTRKSSEEGLEQDFNSLDAQREACESYIKSQQHEGWVLIDKQYNDGGFSGGTLERPALKELFQDIEDGKVDTVVVYKIDRLTRSLMDFSKIVELFDKKTTTFVSITQQFNTTTSMGRLTLNILLSFAQFEREVTGERIRDKKAASAKRGMWMSGKPPIGYKLENKKLVPDENKISTVTAIFEKYLEFEGMLKLKQYLDENNMKSRSNRDISKGNLYKILSNKIYIGLISHKGNDYEGEHEGIIDIDIFNKVQELLKQNRNNNRCKHTAKNPSLLAGKLFDDNGNRMSPSHSNKKGRRYRYYVSQALLQFRKQDAGSSTKIPAGEIENFVIDEISRFVFSRKKIQKYITDFDVDKQKDILDAMKNLNKNIQNNLSSHFIKTILSKIILSKDNVEITICQNQLIKALEAITYGTGIPEEIKGETPYPIIISREIKISNVAFNGRSIVISNAVNRELQFNKKLINAITKSFYWNNLLMLGEVKSSTDIQKLEGLTDNSYIKDVLLLRFLAPDIIEKIIKGTQPTDWSIKKLFDIKTLDWHEQRKILSA

SEQ ID NO: 5151 - protein, 540 aa, unidentified
  source 1..540: note = uncultivated organism
MSCNNYSTCNEQIKAVIYARYSSHGQREQSIDGQLRDCYAFAERQRYMIIGEYIDRALTGRNDDRPDFQRMLADARKKQFKYIIVWKLDRFARNRYDSAVHKADLKKYGVRVISATENITDEPEGIMLEGLLESLAEYYSANLSKHVKRGMRESVLAGNYTGGIPPYGYKVEGKKLVVDENTAPIIRYVFDQYAKGVPKKKIIEELKERGDYLRSGRTLTFNTLQCILRNQKYIGKYIYDGQEITGCCEAIISEEVFNAVQKRLDSVKRAPAAGKAHEEYLLQGKAFCGYCGTPLVGESGRGRGGAIYHYYACGKKKKSHTCPKKNEKKGFLEWYVVEQTVEYVLTPERIDYIADRIVAKYDEEFNDNGIRNLERQAQKVENEINAAVDASLSAPEKVRPRYYEKIEMLETQKADIEMNLATLKIAAGHRYTKKQIVAWLKTFCKGDNLDVNFQKRIIDVLVNSVYVYDDKIVIYYNVKDGKQISYIEACSDIPDSEADFEGCGMVRISNNTVNHRLQKSLRICRRDFCKRETANPLFSR

SEQ ID NO: 5152 - protein, 574 aa, unidentified
  source 1..574: note = uncultivated organism
MSGALPTTKTIRCAIYTRKSTEEGLEQAFNSLDAQREACVAYIASQRHEGWVLSPELYDDGGFSGGNMNRPGLTQLMAEVHAGRIQVIVVYKVDRLTRSLADFAKIVEVLDSQGASFVSVTQSFNTTTSMGRLTLNVLLSFAQFEREVTGERIRDKIAASKRKGLWMGGPVPLGYDVQDRKLVVNKAEAATVQHIFARYLELGSVVATVEVLNREGVVTKVSASSTGGQRGGIAWARGGLAHLLSNRVYIGEMRHKTEHFPGEHAAIISRDVWEATQALLAGNRIARASNQNQSHTKLLRGLLYDGLGRRMQGSQTNRGTRRYHYYITNPADADTTPGPSRRVPASELEATVTHRLRAFLTNGTSLDEAATSLRLPDEHLSTFIRNATALAAAIEEDPAAATHILRRVDVHDDRVDLTICLAALLQDDRIKARPTAESDQTASNMPTASRTAYRLSVPMARIKRGKEVRLVIGDESSLSPAQTDLGLIKLMALARSAWQAMLAAGDATLPSVAAAQGYSVEHFTRLLRLSTLAPCIVAAIVEGRQPIALTRQRLAKLTNLPTDWAEQRRMLGFK

SEQ ID NO: 5153 - protein, 518 aa, unidentified
  source 1..518: note = uncultivated organism
MFPLKKASDRLAIALYARQSIEKENSISCETQLEYCKSRLMPDEREINTIPFVDEGCSGGNTNREAFQRMIRMVEKGKITKIVIYRLDRISRSLSDFVGILNTLKEHNVALVSTQEAFDTSSPYGDMIVKILMVFAEFERNSIIARVTQAYEYRSQLGFYMGGKTPYGFGLEDIKINGINTKRFSPIVDEIEQVKYIFENYAVENVTLGRLQKNLIENKIMPTYGGSWSTSKLSTILKNPVYVKADNNIYEYFALKNTNIISQPEAFDGIHGIQLYGKTKHKPESMDWSDIKAIVMTHEGVIDSDIWIKCQNKLQKNKQIRNAVSNKASWLGGKVICSQCGRRMTTIKGKIGSGETRIYFTCTGKSHNKICTGTRTTIYAENLEDMVYRAISERLVSLKEFRAKTNSIANPMINELRNKIKTLELEEEKIAEAVTKSEVNSDLLALLSSKASKLQSDKLEINLKIQELQSKEVDNKTVINLSKKWKNANFEEKRGVCSILVDRILIDHSGNVEIVWNI

SEQ ID NO: 5154 - protein, 517 aa, unidentified
  source 1..517: note = uncultivated organism
MNTANNIEQANAVIYARYSSHGQQEQSIDGQLRDCHTFADRQGYTTIGEYIDRALTGRNDDRPDFQKMLSDAKKKQFKYIIVWKLDRFARNRYDSAVHKAELKKFGVRVISATENITDEPEGIMLEGLLESLAEYYSANLSKHVRRGQRESVLAGTYTGGIPPFGFKVENKKLVADDERAPIIRYVFEQYANGVSKKQIIDELNQRGILSCSGRKLTLNSLQNALRNQKYIGKYIYNGQEVTGGCEAIISEDLFNAVQKRLDSVKRAPAAKKAYEDYLLQGKAFCGYCGTPLVGESGRGRRGSVYHYYACGKKKKSHTCPKKNEKKGFLEWFVVEQTVEYVLMPERIEYIAERLVKKYDEEFNDKGIKSLERQAQKLENEISAAVDASLTAPERVRPRYYEKIETLETQKADIEMNISTLKIAAGHRYTKTQIVSWLKTFCKGDELDADFQKRIIDVLINSVYVYDDKIVIYYNVKDGKQISYIEACGDIPDNETGFEECGGVRISDDTPRHSQKPH

SEQ ID NO: 5155 - protein, 528 aa, unidentified
  source 1..528: note = uncultivated organism
MRQSQSRDAPRALDVSPRRVLRCAIYSRVSTDEQAVLEYNSLQAQEEICAGYVGMRGRDPGADAAWQVADTYRDVGYSGGTLERPSLRRLMQDVESGAVKVIVIYKIDRLSRSISQFYELWRVFERKGVDLVSATQDLNTTTSQGKLMLNMLLSFGQFEREQIGERTRDKVAAARKKGRWTGGMPILGYDVDPRGGRLLVNEDEATLVREIFRLYVATPSLTKIVEELGRRGWRRKTWTRRDGVLREGSAFDKEGLLRLLRNPLYCGKVHHRGTLHAGEHPAIVDESTWALVQSLRTRNGETGGKDVRNQHCALLKGLLRCATCGSAMTHSFTRKGDVVYRYYVCVDRLKKGANACPDGTASAHEVEQQVMEQIRTIKRNSELIAETVRQARVQLDERRALLVAERRQLTTDLGRQKTAMKRVLDRVSENSDSANHLGETQGRMQAIETRLVAIAQEAVAARALEFDEHTVARALEAFGPVWESLWPTERARILGVLVERLDYDGREKRIAIRFRTDGIGRLTANGTT

SEQ ID NO: 5156 - protein, 510 aa, unidentified
  source 1..510: note = uncultivated organism
MKKGVVYARYSSDRQNEQSIAGQVDVCTQWAKDNDISIMHIYHDEALTGKTDKRPDFQRMIKDAKSGKFDYIIVYKLDRFARNRYDSAIYKAQLKKYNVRILSAMENIADGPEGIILESVLEGMAEYYSANLAQNVMRGLHQRAELAKYLGGTIPLGYKIDADKNYIIDENTACVVKRIYEMYADGYTIKEICQELNAAGHKSSTGKKFAYNSLHRLLTNPKYIGRYEYMGVVLEDAIPRIIDDATFEKVQQRVQRNRRAPAAAKGAVDFHLTGKLFCGKCGSNMVGDSGTSGTGATHFYYSCIEKKRKHGCTKKSVKKDWIEEIITDITINQVLTDENIEYISQKAFELYEKERNDTSEITALNNTLREVQKVIDNIMKAIEQGIITDTTKQRLMEAEERKKAILVSIAKEEIKKPPITQENIMFFLYDMRSKIYNSSERIEIILKTFVNAVYLYDDKLVLTFNFREGENLKKLELTELEKFGFDNVRFTITILSELFMFAVIVKLRSR

SEQ ID NO: 5157 - protein, 569 aa, unidentified
  source 1..569: note = uncultivated organism
MAGRKSKYYSDENIINKKIWSVALYIRLSQEDADNGQDKQESNSVTSQKTLLNEFVEEHDDLIVYDTYIDDGFTGTDFNRPSFQRLLEDMRNGNINCVIVKDLSRLGRNYIEVGNYMEQVFPLFNIRFIAINDSVDSFKNPSSTNTILVPFKNLINDEYARDTSTKIRTSLNGKKKKGEFVGAFPSYGYIKDTKDKHKLIIDEVAADIVRKIFNWNVNEGLGKIAICHKLNDLGVLNPTGHKKIELGQNYNNYGIQDNTYTWTPSTVRNILKNEVYIGNTVQGKRRAKSYKIHKIENVPKEEWVRVENTHEPIIDKDTFEKAQELSRRDTKVSQKTKELSVWAGFLKCADCKRAMNKKSSTNKSGNKYEYYICSTYRKKSNKLCTKHSVKQENLEKAVLEAINLHIDSLIDIEEILEQINKSEFQNIKNENIEKMITAKQNEISKISNFKMKLYEDWKNEDITREEYIEYKQKYENDIERLKQNIERLQNEKEKYENQNVSGNEWIKKFKEQKDLTELSRDIIIELIDCIYVHENGDITIKFKFEDEFKRIREYIENNKNVLEIKSQAV

SEQ ID NO: 5158 - protein, 596 aa, unidentified
  source 1..596: note = uncultivated organism
MPSGEAAPKKSIRCAIYTRKSTEEGLEQDFNSLDAQRECAEAHVMSQRQDGWMLLPQRYDDGGFTGANLERPALRQLTADIEAQRVDCVLVYKVDRLSRSLLDFARLMEVFDKRGVTFVSVTQQINSHSPMGRLTLNVLLSFAQFEREIISERTRDKQSAARRKGKWTGGFPVLGYDMDSQARRLIVNETEAEQVRKIFAIFLHHSSLVTTLEETRRHGWTLKSWTTRKAKPHVGRPLDRLALVRLLSNVLYIGEVNHKGKAYPGEHEAIVSRAIWTKANDLLKSRSRGAEKVERNRHGAILRGLLKCANCGNGMVPAYTTRGSRRYRYYVCVKAQKQGAKACLGQMVTAQRIESAVVEKLYELIANEDWQHRPDAFPQSRADWDGLERDQQHVFLEQAVNRILYDHSREQAGIQLSHSGHGHAGEEIFVRVRKKAWEHLSPPPAKGEAQIKLRESRLPRLSRLMALATRLEGLLQDGTVKDYADLARLGGVSRARITQIMNLRNLAPAIQEQLLFLSAEGGKKVNEAMLRRIANETDWRRQMEIFDGVRSPLTSGRSGRSAGAGPACKSCGPGHQGSESTRDSQGRQRTTSAAPR

SEQ ID NO: 5159 - protein, 566 aa, unidentified
  source 1..566: note = uncultivated organism
MEKSCAIYLRVSTEEQSPENQRADVQRYAEALGYKIVEEYIEKESGAYSERKELQRMLSDAVAGKFKVVFIWALDRLSREGIEETLIYIKQLRKAGVSLKSFQEQWLDTSDEGIGELITAIFSWVAKQERKKIMERSMTGKKERLRNGKLIGCYPPYGYNHIKRDKVENTDARFEINLSEALIVKRIFKLYLEFESIFLLGKTLMKAGIKTRGRGGTPKFFGVSSLKKILSNETYIGNWYYGKASLRIAKFHIKKNPKHKLTGRTSNPKSEWFLVKVPAIIDEKTFQRVQEIMKKRFKKRENEKLPALCRGLIRCVDCGLLYSANLYKYSKHAKGGERKYFMYRCPQKHSVSFNKPPCHSRSIMVHKLDKIIWDYISIFIKDRGRVKERIRLLREKREKEKDSNKKSINDLLGEKERFKAQINKLLDLYGEDQIPRDEIRAKIEEIKEKELVLDGQIGEIHKELIGAEKAGAIEEEVEKLCVLYENKISNLSFENKRKIVKKWVKEINLLKDGKIVIKTTIPQEEVFERLSGCGLLIHVTQRGQEIKKSYDAKRLSEALQENSKEV

SEQ ID NO: 5160 - protein, 500 aa, unidentified
  source 1..500: note = uncultivated organism
MDNVAVIYTRLSTAKSGDNKTLEDQEKTCLRLAESHGLIVAKVFAEGSGVSAYKKGVARPELDELIAYVRHRPGSTVLAWEWSRLTRRLVDLSLWIELIEEHRLRILTPQLDTALPGQLLMLTLTAAMAQQESQTKSDRIKDGKRRQREAGRYLGGHEPAGYRHGPNGSLELHPLGADVLRRAIALYVDERLALRAVCLQLNAEGHTTQSGSPWATNYLRRAILSPLTAGLIEQSDGTLMTALGLEAGGVLTAARWRDAKLRLESRSSTSNKPARRPATSLLSAGILRCSNCSGGLTPERRKDSIAYRCSMRSEGKCDSGASIRSHLVEPYAVIQALYKIRAAQAAAAHDDDFTDIELIASNFQTLTNPEADLRRSQLETELGDLLQRQETMTDLFVGGKLAPEAYERGISALTRQLETTQNALEGLPDTSKGTPLPVDGAEWLNQLAEGDITPAELPGAFETACGSLAVARDVLASCIESITVHPHIPGKPSSERLTIP

SEQ ID NO: 5161 - protein, 580 aa, unidentified
  source 1..580: note = uncultivated organism
MNDKIYRACAYLRLSREDEDKRGGMDESNSIKSQRMMIESFVRGLSDVELVKEVCDDGYTGTDYERPAFKEMIAMVERGEIDCIIVKDLSRLGRESIGAGNYIQNYFPKKNVRFIAINDHYDSLTANSSDTYMIVPVKNFVNESYCRDISIKSRSNQQAKRMNGEYIGAFVCYGYRKDEQDKNKIVPDEEAARVVQDIFAWKLMGLSANSIAQKLNERGTLSPAEYKKASGAKYKTSFQRNPEAKWTPKAVLRILSNEIYIGVLEQGKREKVSYKVKKTIEKPKSAWVRVEHNHTPIVTEADFKAVQELLKRDTRAEKAMTEPKLYAGLIFCGDCGRGMVSRKVTYKDTVNEYYICSGYNRGKECTRHSIKVDVLNEIVIGEVKKYVKQLTDTKKLLTILDEKQIHFEEALNRDKEIAKLREKEQEYSAMKTSLYADLQEKLITQEQFNRYREIYSNKLSEIAQAIKVQEATVKSVYENGIAAGQWLDEFRENMEIEKLDRMLLISLIDKILMYEDKRVEIVFKYRNEMAKAVDLIKGELDAGTVARNAVAGNEVAPETVGMIEDSAVSDNSTLSLREVS

SEQ ID NO: 5162 - protein, 514 aa, unidentified
  source 1..514: note = uncultivated organism
MKPPVRVLRCAIYTRVSTEHGLEQEFNSLDNQREAAEAYIKSQAHEGWRGLPTRYDDGGYSGGSLDRPALQRLLVEIQARRIDVVVVYKVDRLTRALSDFAKLVELFDAHAVSFVSVTQAFNTTTSMGRLTLNVLLSFAQFEREVTGERIRDKIAASKKKGIWMGGTVPLGYRVADRALHIVEEHAALIRTIFARYLELGSVGAVQAQLRAAGILIPQRTDGTGRLTGGSAFSRGHLYAVLANPLYIGQITHKGTVHEGQHPAIIDPVVFEAVQTRLTQNRRRHTTRQMQSEHLLGGRIRDDRGQAMTPTHTRKGTRRYRYYVSQAVLQGREAGAIRRVPAPDIEALVVETLRTAFPDAGSRSDAELIAATLACVHVHPGALRIILTSDDEATIEVAWSQPSNRRRREIIPSPASERASVRPMKVEDRARILQAIAAGRRWVDDLVASRITSTGAIAAREGCSERSVRMTLALTHLSPVIVQAIVDGQLPRGIGIRDLTALPIVWSEQEHALGF

SEQ ID NO: 5163 - protein, 615 aa, unidentified
  source 1..615: note = uncultivated organism
MQTLVNSALITGTRWNGPRFFGLRPKAQDIGEPVASDPSRSPKRKVGTTSARSGHLGGGSDYRKRSMSTPPSRFRRAVTVTGNMTKSVRCAIYTRKSTEHGLELEFNSLDAQRDACEANIKSQASQGWKALSQHYDDPAYSGGNLDRPALQQLLKDIDAGRIDVIVVYKIDRLTRSLADFAKLVEAFDAKSISFVAVTQQFNTTTSMGRLTLNVLLSFAQFERELSLERVRDKVAASRRKGKWTGGTVPLGYDAKDKKLVINKAEAETVRYIFQRYLEVKSFGRLVADLAAKGIVTKRRDTKVKKFNGEIPFTYGPLAYFLKNRLYIGETGHKDKWFPGEHAAIVDRKTFDRVQQLLGSKSEGRKARRTASEALLMGKLYDDRGNRMSPSFSAKNGVRYRFYVSSALLRGQNGEVGSLGRVSATEIEGTVRAAIIVQRGQGTKASDGSPDPLEEVERVVVARDQLLISLMRSDDAGDIDDANSEIRIPWSSNNRAPTGTVQSDGENDASHNEGLVQSIVRAHAWKRALLDGAHDSVEMLAEANRLHPKVVCQALAWRFFRRTLPQPSWKAGSPKGFRWRKSQNCFRCRGQGIVPCSADYRWNAMIERHSAAYLPQ

SEQ ID NO: 5164 - protein, 539 aa, unidentified
  source 1..539: note = uncultivated organism
MKRVYCLYRVSGKGQLDIRENAEDDIPMQKNACHRYKEYHDDWEIVTEFQEKGVSGFKVSAGDRDELQKLLHAAEKKEFDVLLVYKLDRLGRIESETPFIVQAFINLGIEVWSTVEGQSRLDSHVDHLINYLHFWQAAGESKNTSIRVTERMEQLTEQGYYTGGTVSYGYRLVDNGRKNKKNLPVFDLQIDEQESEMIKTIFNLTVQLNMGSYRVAEQLNKKGLRTHNGTKFQCNTINRILKNELYIGYIVNGKKRSEHLPHLQIIDDKTFEQAQAILKKRKEVNESKNQITAVTKGNVLLSGFIFCAHCGGRMTPERYQDRSIRKDGTEYKVDEMKYCCYHKRRKLCECDGQTTYKASIIDGAVSELIKSIFLKIKIVPDKHEVDKNINQLLQSNAAEQKKKWREIEKTKLKIEKLQAEIANALIGESSFEPDQLAEIIRKTKEQLSRMEVEYQANKDSIESQKEKFAKVIPNFEKFQGWAKEFELADLDRKKAIASQLISSVDVGKEGITVQFNIDYQQFLGEWEHEVIPYSTLKSA

SEQ ID NO: 5165 - protein, 547 aa, unidentified
  source 1..547: note = uncultivated organism
MQKTYQAAMYLRLSREDGDVTEGGKQVSNSIANQKELVMDYLKSHPEIQIADTYVDDGFSGVDFERPEFQRMLSDIRENKINCVVVKDLSRFGRNYIESGRYIEKIFPMLGIRFIAITDGYDSINEDMGSEMIIPFKNLINDAYCRDISVKIRSHMDIKRRNGEYIGAFAAYGYLKDEENKNHLVIDDYAADVVRDIFTMKLCGMSQQAIADKLNADGILSPIQYKKSIGIELESSFQKSINPKWSYNAVLRILKNEVYTGTVVQGKCTTPNYKIKKRIHKDETEWIRVENMHEAIVSRSEFDLVQALLLRDTRVSPDRAEVFPLAGMVYCADCGEPMVRKTIPSNGKKYIYYVCAGNKRDKTNCSSHSISEKRLTGSVLELVKTFVGKVMALSEAVEVVSQAPNMKPDIMKYEIRILRLREEAESCNLRRKNLYEDFKDGILTKDEYSMLRDQYQSQMADIENSISSLEAERDGLLANGSGKQEWIENIKKYKGIVSLNRSLITFLIERIDVIDGNTLQVTYRFQKEIAELEHVVELYASELKEAI

SEQ ID NO: 5166 - protein, 522 aa, unidentified
  source 1..522: note = uncultivated organism
MNGPVLPKPKKRSGGRRRQVKSVVRETRKRVAIYTRKSVDKGLDQEFNSLDAQRSRVETYVAARASQGWMILDETYDDGGFSGGNTDRPAFQRLMTDVRAGRVDVVAVYKFDRLSRSVADFTRLMADFEDSGVEFVSVTQDLDSTTPVGKMLVNILASFAQFERDMISERTSDKICATRKNGLWTGGHAPYGFAVLDKKLVPDPVMAERVPVIFDLYIELGSISVVVRELNRRGWKTVKGCQWRKASVHNLLRNPTYIGRIPLHGEDYEGQHDAIVCPEVFERVQVLMESQGPSRKTETRNRWELLLRGTLYCAGCGEEMIHHYTKKKDLLYHYYRCPKKEGPGTKRCSGGSTSTTAIESFVIERVRRVCQDPAISDAAATRAESALKEDIPPLQRALTVLGREAAQVARQREKLVLLLAEDAAEPEATRTKLEALKGDAMTFEARKRELHKQIALLEDAPSRVEELRTAIEEFLPLWEQLTIRERIRVLKLLVERIEFDCQTGETEIIYRDIGMVSLKEAS

SEQ ID NO: 5167 - protein, 524 aa, unidentified
  source 1..524: note = uncultivated organism
MIKDREIRKLNCAIYTRKSTEEGLDQDFNTLDAQRESAESYIKSQEAEGWVCLPDHYDDGGFTGGNMDRPALKRLLADIEAGKVDCIVVYKVDRLSRSLMDFAKMLEVFERKSVAFVSVTQQFNTTNSMGRLMLNVLLSFAQFEREIISERTRDKMAAARRKGKWGGGLAPLGYDNDREGRKIVVNEDEAAQVRGTFELYLECQSIIQTIKEIDRRGWKNKLTVTKSGKERGGRHFDKSSLFKLLTNVAYLGKVRYKDEIHEGEHDAIVPIELWEKVQKQLKHNGRTGGIMVRNKFGALLKGLVRCVCCDCAMTPNHTTKGGNKRYRYYVCTSAQKRGWHTCPSKSIPAKQIEDFVIEQIKKIGYAPELIQDVVTSVADKMKGQLKQLEDERLALGRDTARWNSEIRKTSALIRPNETDSPAIARLADLQERIAHNERRINTVLSDIKKISNNLLTQQDVETAMTTFDPIWESMTLRDQIRLVQVVVKQVDYDGESGRVTITFNPIGIKKRAEHATKDLEEARA

SEQ ID NO: 5168 - protein, 526 aa, unidentified
  source 1..526: note = uncultivated organism
MKITEITAEKKENKIQRLAAYCRVSSDSADQLHSFAAQLRYYSNYEKQHPEFELVGIYADEGLSGTSMKKRAEMNRLIQDCEQGKIDRVIVKSISRFARNTHDLLQTLRLLKSYGVTVFFEEQSIDTSQLNSEMFLTFPGMIAQQESESISGNMRWSYKKRMESGEFNCCAPAYGFDLINGELVINETEAAVVRRIFGMYLQGVGKQRIADALNDECVPKKHGEKKWNTTMITYILGNERYIGDALLQKKYTTDTLPFRLIPNKGERPQYYVENAGPAIISKDIYNAAQTLSKKKACVRKSNADHILTQTMFCPICGKAFRRLTNNGKNYWISSVVEKSSCICKNQRLRESGVFDAFSILTYKLKENREVLIDNLIAQLERIQQRFGGTDDRIGDIDKEIAQLCAQSHLLAKLNNNGILSSAEYAEQAAEIENKIKTLRTERRKKLSENQDDEMLDELKTLRQILDEYKPHAEFDEALFEIIVKRIEVVNNSQLCFKLLGDIELTETINRKARCKQREAQDNPVWV

SEQ ID NO: 5169 - protein, 556 aa, unidentified
  source 1..556: note = uncultivated organism
MTDPTSLHACAYVRVSTKRQAEHETSLNEQETGIARAAVERGYEIVETYVEAGKSGMTDRRPALQRMIADACAQPKKYDAVFVYNFSRFFRDEYECEGYRRKLERAGVKLISATQDVGEGPHARLIRSIFTSLDAASSEINAEQVKVVMSANAEAGFHNGSAPPLGYRTYVAERRGKKDKKKLEIDPAERPLVELIFRLYLEGDGTSEPLGIDAIVKWLRQRGYTHRNQHFHTGLIYAILTRETYAGRHYYGCRNSRTGEMRPREEWIEVKVPAILSEERFQAVRQRLKARNRHIAAPRSHTSPVLLSGLGRCGCNGCTSTMMLMTGKGGRYRYYACSNRRKKGDLSCGGNNVPMDKVDDAVVSALETRLFQPERLKSLLGEILDASDAADTDRRKRLAVLRTEETEVNTSIRALFRMVESGVTAPDDPFLKERLATLKLRLSSLGEEMVALERQIGAKGGRITPEKVERFAAAIRAKLRDAADPQVRRRYVRAFVGEVVMSREQIVIRGPNRALELAAAGDMPADDKVRTFMGNWRTRQDSNLWPLPSEGSALSS

SEQ ID NO: 5170 - protein, 504 aa, unidentified
  source 1..504: note = uncultivated organism
MRFFIYSRKSVYTGRGESVENQVELCRQYLESRFPSERRELVIYEDEGFSAKNTDRPQFQRMLRALRREKPDYLVCYRLDRVSRNVSDFAGLIEELLRLGVSFLCIREEFDTSKPMGKAMMYIASVFAQLERETIAERVRDNMRLLARDGRWLGGTPPTGFRAEREQYIGPDGRPRTACALQVIEREAETVCRIYRLFLSGMGLATVAAALGGRYTPQGVREILRNPVYCAADSAARAYFLQRGADVCFSEEECGPERGILPYNRRGGRGGGPARQPVEAWIIARGAHRALISGERWVAAQRRLSDTLPDSARPAKQHNGYALLSGLLRCGRCGEKLFAKPRGREGKFDYICAGKLAGGCARCAAQNLGGEQTDAAVWARVRRLLQPDRAQLLREVEALERAMPCGEKRRVQRLCSERENLLAALASCGKNPRAAEQIAMRLEELLQELREARREELRTASPDAAALLAPCGENLLERRELLRKLVREVRWDGEELTLFLRCRA

SEQ ID NO: 5171 - protein, 548 aa, unidentified
  source 1..548: note = uncultivated organism
MKAKEFYNVAVYLRLSKDDGEDGKAESNSITSQRDIIRSYIRKQSDMEIFDFYVDDGWSGANFDRPSFKRMMEDIEAERIDCVIVKDLSRLGRDYIESGRLIQKTFPEHGVRFIAINDNYDSLTADFNEESLVLPVKNFINDAYCRDISMKVKSQQKVKRESGQYIGAFAMYGYKKDPDNKNHLVVDKYAAGIVRSIFEWKVEGYSFEAIAEKLNGMGVLSPMEYKKSNGEHFSTGFKTNVRSKWSAVTVRRILKDETYTGMLVQGKSERVNYKIKKSVIKPTEDWVRIPDSHEAIISKDLFAVVQQLLMTDCRCSGGKDTSHLYSGILYCGDCGEPMIRRVSTYKGKTTVRFICSNYNKNGKCSRHSILQEDLDKLVLYGIKSRVELIMEQMTVISGVKDLDMRYDDIVAFDQEIVDLKAEQDKYKKLRAALYEDYKKGIISEEDFRTFSAIYEEKYSQIQSDLDKQMVNLRSLFKNGLEAGMRLEQYKDVLQLDSLNRTALVHLVEKLFVYGDKRVHVVLRNQNQFIKVAMLYDFLKQSEPERSVG

SEQ ID NO: 5172 - protein, 551 aa, unidentified
  source 1..551: note = uncultivated organism
MSDKKRVFCLYRVSTTQQLDKRTRENEKDDIPMQKRACEDFCDKMGWEIVDSRSEKGVSGFKVSANDRDAIIDIRKAATQKKFDVLLVYMFDRLGRKEDETPFIVQWFINNGIEVWSTQEGQQKIEQHVDKLLNYIRYWQAQGESEKTSARVKTAQAQMIQDGHFRGGTVPFGYRLEQNGRINKKGFPLGDLAINEQEAAVVRTIFDRYVNHGYGTHRICGYLAENGLTPRAGGRFINTTIQNIIKRPMYIGILSGGGVQSDVIPALQIISPETFEKAQEIARERASSYADRRIPLNTKGDALLSGNVFCGHCNARLTLTTNGKKYLRKDGEVTITPKTRYVCYNKTRHPEKCDGQTGYTTSKLDGVVEKIVESIFARIKEKPGEQIIAAQFEERIAGIKLNLEQAKTALNSELQVLSMLENELLKVIQGTSALKPEMLNKKHDETERAVAEKRAVVDTLEDELANSKDTMHQVTRQYNDVLTWADMYAESTIDVKKMIVAQLISAVRVSAGYKIEIDFKISERQLGLDQEQEQEAAKKPKQKKRRDEPAL

SEQ ID NO: 5173 - protein, 611 aa, unidentified
  source 1..611: note = uncultivated organism
MYQTNTAFRIPNTFILDRNRERKAVFYGRVSTEHEAQLAALENQMQWYDDQAKFHPNWTVLDKYIDEGITGTQAKKRPAFMQMIEDAKQGEFDLIVTREVCRFARNTVDTLVMTRELKNYGVEVYFVEDNIWTMDGDGELRLTIMATLAQEESRKISERVRAGQKISRDNGVLYGSGNIIGYDRVDGTYVINEDQAETVRMIFDLYLEGFGETKICKELCRRQRKDGHGNVSWSVSKISRILRNATYMGYKCYLKSYSNNYLEQKRIKNLDESTYLYVKGDFEPIISEEVFKRCEEIRKSRTTKMVVNKGERTYGKKASQDVWLRKLRCACGSTFRKNKWRTNQRGDTVFGYQCYNQVNNGSKSFREKNGLDTDGYCDIRMIGDWKLDLMAKKIFESIWTDKKDAVMEAYKLLGECYQSDTSNNKATIAAVQGKISRATARLDNLIAMRADGEISKEKFGELRQKAENELATLNEELDKLNAVSDELAESLDMNAIKSALDEMIDFSGPTIDENIIEKFVSRITPIDNGHYRWDLNFTQNKKQAIIGSVEGRKGKATADIKEYGENDEHSHRTYDKSIQFSSNGTIAYLCLIAACAAARRAIGTRNGEQET

SEQ ID NO: 5174 - protein, 501 aa, unidentified
  source 1..501: note = uncultivated organism
MKNMEVGIWIRVSTEDQARGESPKNHEARARMYAEIKGWNVVEVYDLSGVSGKQVSEHPEAQRMFSDVESGKIQGLIFSKLARLARNTRELLDFSDFFQKHNANLISLEESLDTSTPAGRLLYTVIGALAQWEREEISARVAASVPIRARQGKPTGGPGPFGYMWDENKQLVPNPEEAPVVKRVFEAFLETGKLLTTCERLTAEGLRSRKGTFRPVTLKRLLTDTAYKGLRRANYSKSKGQRKSWELKPEEEWVYVPVEPLIDESTWDKVNALLQKNARHSQKAVPKEGKYLFSGLLVCSCGQKLYVAPYQGMKSPRYVCRDCRFKLNEDVLEDHFLTALKTMIVRPEELKAVTDCEAERKEKEDRLALLRKEIKTVDGKIDTLLDLVNDQVIDRRNFTDRFMPLKERKEQILAEIPRLQAEIDFAKTSAVAKDYLLERATNFASMWPILNDDEKRRLVQDLVDQVEIRDESLHFLLSYNPSLRVVGKDTHISRDWWQPPA

SEQ ID NO: 5175 - protein, 502 aa, unidentified
  source 1..502: note = uncultivated organism
MKTAVIYARYSSDSQTEQSIEGQLRVCEEYAQKNNILILNTYIDRAMTGTNDNRPDFQRMIKDSNRKEWNYVICYKFDRFSRNKYETAIHKKALKDNGVKVVSATEFVPDTPEGIIFESMLEGYAEYYSAELSQKIRRGNNESRRKGNLTGGKIPYGYKNVDKKAVIIPEEADIVRYIYERYSIGVYVKDIIAELNGKGLLHKGKPFVANTVYGILGNERYSGIYRHNGEVFENIYPQIVPKETFDKVRAKVNANKFGKRSEHITYLLKDKIKCGYCGKSIIGDNGTAHNGERKYYYTCQGHKKKTTNCHKQSIRKDILEKIVLDSITEQIQKNNSLDFIVKGLMREQERQLQANIVLNLLVKEQRTTENSIANIMNAIENGGTSNTVMKRLRELEIRQEELERQILIEKSKTTVQLTEKQIREFYMQALSLEPKLLINYLIKQITLYDDKIEIQFNAPIKVSPDDESRRGFLFYSKTVKLSYKVPFRTNLIKYKFEIEMYV

SEQ ID NO: 5176 - protein, 562 aa, unidentified
  source 1..562: note = uncultivated organism
MEQSKPTLQRCAIYTRKSSEEGLEQEFNSLHAQREACEAFIKSQAGEGWRLIKTAYDDGGLSGGTMERPALQHLMADINQELIDVVVVYKVDRLTRSLADFAKIVEVFDARGVSFVSVTQQFNTTTSMGRLTLNVLLSFAQFEREVTGERIRDKIAASKRKGMWMGGLVPLGYDVRDRHLVVNQTEAETVREIFRCYKELGNVRLLKAELDRRGLRSKVRVANNGVQSGGHSFYRGALYTVLRNPIYIGQIRHKGICHPGQHEAIVELDSWEQTQTLLSAHPVRGTPGATKSAPSPLAAKLFDERGERLTPSHAVKGPRRYRYYVSRKLIQGKTDQAHRGWRLPAAEIEGIVAVAARQMLADEKAILDAVQGAEIASNQIPEIMQSADAWSRRLESAAERSSVLTTLVNRVDLSSDGFRLALKLPTQLAQAGEALNNASIAVSRFVPMQIKRRGVELRLVVNGDRSKAQKADPALLKAIARAHRWFDDLVTGRVASMAEIGTREGLPKNYVSWLIRLAFLAPDIVEAIIQGNHPPELTAQTLITRRIDLPLEWQAQKTALEF

SEQ ID NO: 5177 - protein, 513 aa, unidentified
  source 1..513: note = uncultivated organism
MKCAIYVRVSKDCGEQKASLQNQQDLFKKYIVERNWEIYDFYIDVQSGSKLKQRRNLQRLINDANNKKFDIILAKELSRLARNGKQTYEIRDIAEKNGIDIITLDGAIDTLSGDIGKFGLYTWLYENEARTISQRIKQALNTKAKRGEYKGSLPPYGYNVVNGKLIVRDDFSPFIVKRIFKEYLNGRGYDAIAKSLYEENIPTPSQLANKSNSTPIWHGSSVRKILTNQNYTGDLVQSKTETISVTSTLRKFNKSSDYIIVENCHEAIISKKDFNAVQDLLQSRKKIKPKPQAHLFTNLLFCADCGKGMHFKKNRRGYVCGLYDKLGNKACSDHIVRENELIESILNEIKLFSSLLNNKDTINKIKNALNEDNKSKNIQINKLKTELKKLEEYKLKNLKLLMDDSISKEDYDLFNKSNNIKIDEINSKINSLSKSISKKGSNLTLDRLKEIETLVTDITELTPELLNRLIEKIEIKKDGSARIYYRFSIPSNFYSLINFKQHSACGVFGKLIY

SEQ ID NO: 5178 - protein, 521 aa, unidentified
  source 1..521: note = uncultivated organism
MDWGTGRESNMASKSNGNGNGAPATVRCAIYTRKSTDEGLNQDFNSLDAQRDAGEAYIRSQAGEAWKLLPDQYDDGGYTGANMDRPALRRLLADIQARKVDCVVVYKVDRLSRSIRDFGKIMEILEKHGATFVSVTQQFNTTTSLGRLTLNILLSFAQFEREIISERTRDKQILARKRGKWTGGHLPLGYDLEDGNLVINEAEAARVRQVFEWYLEGHSVHGIVAKCADLGWSNKERATKEGRTFGGHPMWKCHIYTMLANPLYAARIRAGEELVAATHPPIIDDHTFDLVKQKLKANTRNPGGEHRPRMEALLRGLLYCAACGSPMSPSYSSSKTRRYRYYVCLRTMQRNGDGCATRAVSAPLVEEAVIESVRRFAAKPEVVEAIARAARHRMAEELGKYREELKAVNIRVRNTKSQFARAKNLDPDREAALRDVVSSGEAKAEQLRSLVERGERLRFDDQMVRQRIATFDEVWKIMTIQQQASLLRQLIERVGYDARGDKVKVTYHSNGIREFCKEATK

SEQ ID NO: 5179 - protein, 564 aa, unidentified
  source 1..564: note = uncultivated organism
MKKANIDVYDAAGYIRLSKDDIDIDGDQKTESNSVSNQREIVREYIRSHPDLQLYDMYVDDGFSGKDFERPEFKRMMEDIKAGKVNAVICKDLSRFSRDTIEAGEYQKRVFPQEGVRFIAIGDHYDSLTATSVETNLVVPVKNMVNESYLSKTSDAIRQSQEVKMKAGAFIGSFVPYGYEKHQADKNLLVIDERTAPVVREIFEKKIDGMSMDGIAKLLNERGVLSPMAYKLDNGEKFQTGFKCSDTPLWSAKAIQRILSNEVYTGTLIQGKSSTVGYKTPKTKKNEDGSAFFIRVEGTHEAIICKNDFDCVQRLMKYEGRWKDGDQISIFNGVLFCADCNTPMIRRTYKNKSGDKHMYICKTKNLGKGCTRHAIEEEKLERIVLQALRVYVGGCLDYAKLIEKVRKYEISFDQISDYDQDLKRMREEYEVINADIAGFKSDFATGIITQKQFESYTNKYTKKSQEVLKRMEESEKLVKSIMTVGVASGTKLEDLRRTMKIEELDRRTLLSFVDSIWVYEEADVRIRIDFRFTDEIPKLEAMQKCCDDMEMQMKCENWEVITSA

SEQ ID NO: 5180 - protein, 649 aa, unidentified
  source 1..649: note = uncultivated organism
MVYQMAASSSPPIQIVYRFMIRCFYCQKIFSFLFTIVVPYVIIGTINSHTRRSIPMKQNDNCIAIYSRKSKFTGKGESIGNQIELCKEYIQIHYGADALNHLLVYEDEGFSGGNLNRPDFKKMMTAAKEGKFKAIIVYRLDRISRNISDFASLIQELSRLNIAFVSIREQFDTTSPMGRAMMYIASVFSQLERETIAERIRDNMHELAKTGRWLGGTTPTGYASESVKSITVDGKAKKACKLRLIPEEAELVKTIFALFTENKSLTITEAELMKRGITTKRGNHFTRFSIKNILQNPVYLIADEEAYHFFVSRKAELFSDHDAFDGEHGLLAYNRTDQEKGRSTIYLPISQWIVSVGQHPGLIPGKVWVGVQELLEQNKSKSFRRPRSNEALLTGLLYCRCGSRMYPKLTKRTTADGKPIYTYVCKMKERSQRSICNSKNVNGNTLDLAIIEQIKSLEEDSSTFITQLERSRQFYTGNKMQYEEQLANLRDKKAETEKKIETLVDSLVELDTSTARSYVTKRIEQLHQNIESIDANIRELEALTSQNALSDIEFDVLRQLLSVFHSSIDEMTLEQKRSAVRTLVRKVIWDGVNAHVVLFGAEESDIEYPDLSPLYSENNAEEEACEELLEFSDVDYEDGSKTLLCEGNK

SEQ ID NO: 5181 - protein, 580 aa, unidentified
  source 1..580: note = uncultivated organism
MERTNRPIRVAIYTRKSVEDAEDKQFNSIDAQRQMCESFIAAKAAEGWVALKERFDDYGYSGGDLNRPAYRRLISQCEQGLIDKIIVFRIDRMTRSTKDFCEFDEKMKKLGIGFTSVSEPFVDTSSPMGELVVNLIVSFGQWERKTIQERIQRHFRTALDQGYFVGGVPPYGYKVENQNLVPDPDTAKNVPHIFKLFLQCRSAKKVAAQLQSEGIERFPGRPWTIQSIHNCLRNVRYVGDANSHGKIVKGRQQPLITRDLWDKVSGMLKVTANQTSKRASCPETALFQGLVLCGHCKRPMSYRWSKKNTLGVRKYSYFVCQQDMRKGISTCPIRHVSVITVQDAVEQELEAVMLASTAMLVAAANATSFTPEQIVTGFRRHTFWQGLSSADRQIIYRLFLRSITVFKSSLELRMNLPVPGAADELKRTHYIPKDAQPDADVHLEEAECLFVKVPVAFRTISGRKQIVKDADSAAPAKPTQQQLNTTMAQGTVLKSFAKAIAWMKMIDEGKATSISQLAELVGTDRRYVLYTIRLATLSPRIIRAALSGELPDGFSLQKVRKIETDDWEEQERLLGFPPAT

SEQ ID NO: 5182 - protein, 587 aa, unidentified
  source 1..587: note = uncultivated organism
MATQITKNVMENGIGEFLVLYSMGSNYKKVKGCDGMAEVEVIRAADGPVARRRDIEGKGVRLDRIRVAAYVRVSTDGEEQLASFESQLKYYQEKIGANKEWAMVGIYQDEAITGTKTSKREGFQKMINDCMNGEIDLILTKSISRFSRNLVDTMQYVRLLKEKGVRIIFEKENIDTMSMQSEMMLALLGTLAQNEVESLSANVKMGIKMKMKRGEMMGFNGCLGYDYHKEDKSITINHEEAETVRLIFDLYLQGYGAYTIARKLKEMGKVNKKGAVSWTDSGVRGIIRNEKYKGDLLLEKSFTVDPISKRRIENFGEEEQYYIKDHHEAIVSSEIWDMAQEIRTKRSHNHPKQYGDKREKYTRKYALSSMCECGFCGTKLTRRMLHSSSKYATPSWYCRTAANKGKENCPHSKTVHEQIIQNAFLEMYRLLAQNFEDVLESVIGTVRSVAEDDSGRDRLQKAEKSLYNYENRRKKLTDLLIEEQISKEAYDEKYEDLTGKIAKAKEDVRKLRAGMEEKKDIGKRMDTIRKQLQSGDILDEFDRLVFESIVDKVIVGETEPNGRIDPYKLTFVLKGNGKRVMSAANKK

SEQ ID NO: 5183 - protein, 512 aa, unidentified
  source 1..512: note = uncultivated organism
MARAGAGNKLRAVIYTRLSVKDPDGGDHGSLERQEDDCLKYAKDKGYEIAGVYRDEGVSATRGDKRKQFKAMLTRLETGTINVVLIWKLDRLARRSTDLDRFLKILEEEEIILYSVADGHEAKPGNSHLSLRILTIVAGEESNNIGIRVRRAKLERARLGGHTGGGPRPYGWTSPAKLKVVPEERKHILELVRRFLAGETCHAIARDWNERGIKSSTGVRWNSSQLYNILRSPRYAGVVLYQRKSKSPQVFKATWKPIVDQQTWALVEHELGRRAKEPKNGGFHGRRHLLSGFLVCEACGYKMLSWKGKERHPAVYLCQQRTEHPDRCGKSRILMQDADETAADLVLHAMKTPSIAVATASGVGLKAVAQKQDRLRFLDAQIRDLEVKYLKGAITSEAALSRARSELSDERDAISAELSGARAQVALRGRVLKSLRDWKSLTLLEQRAILAGLFDYIVIAKGKTRESAVKRLKPIFVMQSEKPSRVAGRLMLESVLAAQKLRRARSKTVRRV

SEQ ID NO: 5184 - protein, 507 aa, unidentified
  source 1..507: note = uncultivated organism
MERYDAIYARQSVDRADSISIESQIEYCQYETRGGDYRTFSDKGYSGKNLERPQFQAMLEAIRQGAVRRVIVYKLDRISRSILDFATMMAEFQAYHVEFVSCTEKFDTSTPMGRAMLNICIVFAQLERETIQMRVEDAYISRSRRGFYMGGRVPYGYQLVPCLLDGKKTSRYEIVPEEAEIVRLIFSMYAQPQTSYGDIVRYLREKQIVNTRTNDGAWDRCRLADMIKNPVYVKSDLDLYRFYKDQGTVIHNSPKDFIGCFGCYLYSDKQAGRKQVDLKGQHIVLAPHEGIVPSDLWIKARIKCLGNQQVAKPLKAKNTWLAGKVKCAVCGYALTIKKCRLKSGTIRYFICSHRMQTNQCQGVGGIRADDFEDLILREMREHLRAFATLRAGEREPENPQIHALHVKLEQLSGEIEKLMDKVADADSVLMGYIQKRISELDAQAEQDRQALRELSPLESREKRNVSELRNYMDQWEELSFDDKRAVVDQLISRITANQSGCEITWKI

SEQ ID NO: 5185 - protein, 555 aa, unidentified
  source 1..555: note = uncultivated organism
MHDGSGSSRSKTVSSSVALYLRVSTEEQRERQSIDTQREFGAKYTDLHQLRVHRIYPDDGISGTVPLEKRPEGQRILQAARRGEFNQLLVYKLDRLGRDTRLILNAVAELEKYGVRVRSMTEEFDTATATGRLMLTMLSGFAAHERDMIRERSMAGTDRLARAGAWLGGIVPYGYRKEGEDKEARIVISEEEIPGVGISEADVIRRIYRLAANERATCVRIADFLNMLHVPCAYARDGRLLLRGKRKQKTSGLWRAGRIRNMLINATYMGRHEYGKRSKVQRPTIVREVPAIVDEATWQKAQQVLKSNFLFGIRSNKHLYLLRGMAKCGLCGLTFIGTHAIRPSGKVDSYYRCNGKHATRGIYGKDGERCPAKDVNGIFLEDAIWSDIEEFLRNPGEVAEILRQKIAARAHDRGPEFDRRSLEIALETKAQERDRVLGLFRKGRINETALDAQLDEIQAEEQSLRARLEMASHIEPAQDIAALANVEEMLTNLREKLDAGITWDSKRQLVEVLVDGITVDTVGVGAAKQAIVNVRYKFVSSLHTCTDTGSCRKAT

SEQ ID NO: 5186 - protein, 539 aa, unidentified
  source 1..539: note = uncultivated organism
MALETAIYARQSIDKKDSISIETQIEICKKETFLEEHIVIYKDKGFSGKNTNRPAFAAMMNCIRSGKMKRVIVYKLDRISRSVLDFSRMMEEFSRHKVEFVSCTEKFDTSTAMGRAMLNIAVVFAQLERETIQARVSDAYYSRSHKGYYMGGRVPYGFRLENAVIDGVHTSKFVEDPEEVEKIRRIYEEYAKPEGTLGSALRSLLEAEEKTETECDDVSEDKAVLENKAVPENKTVPGCEAVRGRAPLSSARISEIIRNPVYVRADIEVYHFFLSQGARIINPVEDFIGTNGIFLYKGRDGDGKKRKQYDLKDREVVIAPHEGVIDSELWLACRVKLMKNRQLSTVRKGMRSYLTGKVKCKKCGYAYQVIQSEGTKTLNRYFRCSGARYSIKCTGAGHTIYADELEEYVRSEIKKVLEQFSYLSDECERQQEPVCNHYKIRIASIEKEIEDLLEKVASANDSLMVYINKRVETLDGEKQELQKKMAKITSEDDVFRADKITGFTDKWDELELIDKQRIVDILIDHIEIGEGEMEIFWNI

SEQ ID NO: 5187 - protein, 506 aa, unidentified
  source 1..506: note = uncultivated organism
MNSICCAIYTRKSSEEGLEQAFISLDTQREACEAYIASQKHEGWHLVPAHYEDGGFSGGNMDRPALKRLLADIHAGKISVVVVYKVDRLTRSLADFAKLVVQFDKFNVSFVSVTQQFNTTTSMGRLTLNVLLSFAQFEREVTGERIRDKIAALKKKGMWMGGTVPLGYTALDRKLVVNEAEAATVLTIFNEILRVGSVHRLQDWLRANNITNRRGHHFFRGPLYTILRNPHYLGRIKHKKDSYPGEHPAIIERDTWDKVQSLLDSNIQGKRRKTRATKVSLFTGILFDAIGTLYTPTHANKNGRRYRYYTSQAAIKKTVKSDAPPRIPAPDIEKAVVDRLLDLLQTPEQLLATLRDEAVTTPPREGFYSRLIAHAVTTAQSWRERIAEDCTQFLKNVIERAIIRSDYVEIRLRTPELVNEILGGAASTAGLLPIASIECPYCHVRQGRAVRLIVGDTSLTTGASRKAILKAIARARRWYEQIATGEAGSIEQLACMASLPALSICT

SEQ ID NO: 5188 - protein, 670 aa, unidentified
  source 1..670: note = uncultivated organism
MADVKVTSPLTRREVNPEMSKKENQKPCAIYVRVSTQMQADHGLSIESQIETLKQEAARRGKPVYAVYTDVKSGGSFNRPEFQKLVKDSQKKPPPFDLVITWSVSRFGRNKMESYIATEKLRERGISIFYYKEPFDTEDSMGRLIIEILRAVAEFSRLEYVKDVERSKSHLARNGYSTGGKPPFGLRRKEVLENGKRHIRWEPDPDTAPIAKKIFEMYADGHGYKSICRWLNDRDIKTTWGNKWRAASFSRMLRNEIYIGNIVYNKEVKRKMGRNGGSSDMKPEDEWVRCDGAIEPIVPRELFDKVQLRLKQNDISASLSKNSQYLLSGLIKCGICGNAYFGRTPKKKVKDKVYSYSQYICSKQNRYNEKRDNITLKREWFDEIIVNRLFERILCETNIMERVRNEADEIIQAVEERKKQIETLKAEQKKIDGTLQKYYDAFESGALTPEELKSRLKRHRGRIEEIKLEIKNLQNEISICEVRKESGLEALLKVDFKRLRSLYDELPFEKQKDLLQVFIEKIIIDPEWYEIHYTLPTGFEMDRYEHDSDGSDGGPHGSGNDPEKSGNGCVPEGADKIRKSENGSLVSSPMKNFLSGINGDRTKERRLGSDRKNGKNCGTSRDVTNPAESKKPQENKAFSDNAEQQLQSHLSSYGKNGEGGIRTHEELLSP

SEQ ID NO: 5189 - protein, 555 aa, unidentified
  source 1..555: note = uncultivated organism
MNSATPGTIRASSLSGNGHGANRASGATVIRCGLYVRVSTDRQAAQEFSSLDAQELVLKQLVEDRNRGRLPGDPEWTVVGIYRETASAKDTNRPQFQRLMRDIEAGQINMIVFIRLDRFSRSLRDFLTLQDFLRELKCGYVSKYDPYIDTSSPHGEAMVHIMMVLAELERKITGARTREKMIAARQQGRWTGGCPPLGYDVVPDKGKLSLNVVEADQVREIYQLYLEKLSLMSTVTELNRRGWRTKSWTTREGISHPGHTWSKVTLRRLLTNRICRGEMPCGKESYPSEHPAIIDEALFKRVAETLADGRDHGPSRGRNSFAYLLRGLVWCKACGSAMSAATTKKGKTNYRYYRCTSVDKKGTDACPVRYAPAEPLEQFVIDHLRRLGREPELVEETLKDAHRQITEATARLAGERKRLETESRRIQADAKRVFSSKAKGSMATAHIADLEERQGLIASRLAEIEAESRKLAEAQIHPEKAKEALALFDPVWEVLESGERERLVRLVVERVEYDGINGEFGLQLHPIRLRSLIDSDQKLMPPLKTGMETITEEVA

SEQ ID NO: 5190 - protein, 513 aa, unidentified
  source 1..513: note = uncultivated organism
MAKVSIIEPTIDTSLIRKLRCAAYCRVSSGSEDQLHSYEAQVKYYSEVLSSSETEELVDIYADEGITGTCEDKREEFKRLMTDCRRGKIDRIYVKSISRFARNTKDCLKNIRELKELGITIFFEKENIDTAQVSDEMMITLMGGLAQEESTSISQNMRWSIQKRMRNGTFMQSVAPYGYVINSGEMVIDPYTAPIVKEIFSNYLNGMGTPAIANELNSRGVSTRMFCTKWTHKMIRYILKNEKYIGDSLMQKTYRTDVLPSIQKKNHGEKEQYYAENTHPAIISHEDYYKVQSIISNNGLKYHRLSGKEHIFSGIIKCSRCGSSYKRKKNNDKYYWVCMTHDLKAGNCISHHIPEKSIKQAFIKLSNKLILHHRDILLPLQRALQDLTSKKFGSNTKVLDIRRDIAALNEQKHVISRLRTKGFLDEKKYNEQFTALENKKSRLERDLNKLSKADNEDETLERLDTLIDCFEERTAMITEFDDELFSMIMERIVVRDNILEFHLISGLKFNEEI

SEQ ID NO: 5191 - protein, 544 aa, unidentified
  source 1..544: note = uncultivated organism
MNVTMIPKKTVTVIEPKRVNIVDRNKYYQLRVAAYCRVSTDSKEQLTSYENQKKVYTEMIAAKKEWTLAGIYADEGVSGTQAKKRDEFNRMIKDCLAGKIDYIITKSVSRFARNTVECLQYVHMLKEHKIGVIFEEQGIDTLKTDSELYLVIFAGFAQTESENMSKNITWTFRKNFKEGKVKFNYARLIGYRKGPDGEPEVVPHEAEIIVKIFDWFLAGMSIANIRDKLREDGHKNRAGNTDWPRATIQNILKNEKYCGDAILQKTITIDCINKTVVKNDGSQVPMYYVHNNHTPIVSREVFNKAQTELARRNAVKPMSDKSSVTTQGKYSKFALTKLIQCAECGSPYKRVTWTRGDKKKIVWRCTSRLDYGKKFCKQSPTIDETVLHTAIMRAIKKFYTEDSDTYIALLKATLADAMGCSSTRNEIDYLERRIDSLNKKMMNIVSENIAQGHDVEDCEEEFKSISDEIAELKEQIKILQEQSMGNEISEDRIREIQKAIDNQEIDLTEYDDALVRQTIECIRVHDSKRIDVIFGGGYTVEETL

SEQ ID NO: 5192 - protein, 602 aa, unidentified
  source 1..602: note = uncultivated organism
MCEYKGYEIYKIYKDAGISAKTGNHRPAFEELLQNIRDKKCNTIVVLKLDRLTRSVYDMEHIMKFLDENNAYLDCANDDINTTNANGKMVARLLTTVSQNEIERTSERTKIGLAGAIKVGHIPHKSPFGYKRDSKILVPDWATKDIIVRVFNLYYEGNSYQTIANLFNKEEVLGKTNWYDSTIMRILENEIYKGDFVHGKRTKNPVYYSDVVEPIVSKELWESCQVQQKKNSRSYKRTLTYIFLQKLYCPKCGRILGGKATTKKNGNSYYYYYCNDCKLIIKETEIEKEIEHFIDDINEYDSVVNQTLLPMIKTKIENPKEDIQKEISNQNQKLDRIKKAYVNGTFKLEEYDEERKIVEIAITELESRLKECEVCEDLSLTPDDILIKRDIDYINKLLYPKEYQENNLSWNELTREEKQDLVMRYIDEIKLKESSNHKCKVDEILFRENMCTPCNELYDSGYLDKKDYALIGNVVTKLRFSEFLPFDKASEHIFRLREFYNVGYYEATYYYQDKVMFFNYYNERRIVRIFPLEDYKKMDNIDKLKLGVIYVNDGDKSILENEEDVFEYLPPVVNSTEYELDEETRKRREQIEKEWNEIQKNK

SEQ ID NO: 5193 - protein, 554 aa, unidentified
  source 1..554: note = uncultivated organism
MKEQDPCIAVYSRKSRFTGKGESIGNQVELCRAYIAAHDGPEALAHLAVYEDEGFSGGNLNRPAFQAMMKAAREKRIRAVIVYRLDRISRNISDFAALIGTLSQLGVAFISIREQFDTGTPMGRAMMYIASVFSQLERETIAERIRDNMHELAKTGRWLGGVTPTGYAAESVTTLTVDGKTRRACRLRLIPEEAELVRTVYGLFLQSRSLTATEAELMQRGLRTRRGKYFSRFAIRAMLQNPVYLVADREACRYFEDLGAELYPDASAFDGRCGVMAYNRTDQKKSSATVHLPVSQWIIAVGQHPGLIPGSEWVQVQEALAQNRAKSFRRPRTGSALLSGMLYCTCGSRMYPKQASRRGPDGTRAFSYVCRMRERSRGSLCRTRSAPGGALDGAVLTQLAALPEDTATFAALLRQPLRRPAAPAEEQLAALRQEKMQTERRLAALVDSLAAMEGGAAREPVLRRIGQLQRDCEAIENRMAELAHPPEPPLEEQAVQPEYSRLAGMESCLAALPPEQQRSAVAALVQQVVWDGAEAHLTLRCAEDAPSLWREDSK

SEQ ID NO: 5194 - protein, 562 aa, unidentified
  source 1..562: note = uncultivated organism
MAGEVEVIKAVEGNATRRRSMIGNGLSIDRKRVAAYVRVSTDGEEQLQSFQSQKEYYQDKISKNKEWVMVGIYADEAITGTKTVKRDGFLKMINDCMAGMVDVILTKSISRFSRNLVDTLQYVRMLKDKGIAVIFEKENINTLSMESEMALALLSTLAQNEVESLSANVKLGIKMKMKRGELMGFNGCLGYDYHSEDKSITVNQEEAEVVREIFDMYLSGYGAPTIAKELTRLGRKNKKGEVKWTDSGIRSIINNEKYKGDLLLGKTFTVDPISKRRLENMGEEEQYYIKEHHEPIVSPEIWDAAQEIKKSRYRRSTMSVPGTRKKYSRKYAFSSMCECGFCGKYMTRRAHNQTTTQTKPVWKCRTATNFGIENCPHSKSIDEAIIENAFLEMFHLLADNFDDVLDSVIRSVEETLSDDESAVKLQRLDKSLSSMESKRKKLTDMLLDDKITKEAYDAKYNELTRKINQAKGERALYSANVEAQQHISRRMREIRTCIAEANMLDKFDRVVFESIVDKVIVGDISEDGDIDQYKLTFVLKGMEDRFVSDAKNRYKNMNTKVV

SEQ ID NO: 5195 - protein, 546 aa, unidentified
  source 1..546: note = uncultivated organism
MKKSIRRTSQGELLETDLRGSQARSRSSVVIRCAIYTRKSTDEGLDQEFNSLDAQRESAEAFIASQRHEGWICLPDRYDDGGFTGGNMERPALQRLLVDIEAGKIDCVVVYKVDRFSRSLLDFSRMIDLFEKYAISFVSVTQQFNTSHSMGRLTLNILLSFAQFEREIISERTRDKMSAARRKGKWVGGMPVLGYDIAPEGGKLIVNDDEAAQVRTIYQLYLEYKAMMPVVQEIERRGWRTKQWRTRKGRERGGDIITKNGLFRLLSNVLYAGKVDHKGTIYDGEHPAIVETVLWQEVQDTLRRNGRNGGKDVRNKYGALLKGLLYCAPCGTAMIHTYTAKSSGKRYRYYVCLSAQQRGWASCPTKSLNAHEIESAVVEQIRGLGKNSEIVAATLEQAQRESVARLSELETEQRIHLRKLAQLNSRVKKLVDASTAEISENAATDQLADLQEHIRVMEQRMVVVRQDIINLQREAIDENDLTHALMLFKPVWEMLPPRDQSRIIKLLIERIGYDGRDGKVTITFRSLGLRMLCNDQEKTLNERLLA

SEQ ID NO: 5196 - protein, 517 aa, unidentified
  source 1..517: note = uncultivated organism
MTAESEVRRVLVLYARKSVERENSISCETQIEYCKMMLKPEEREETILTLIDNGFSGGNVNREGFQKMMHLVRQGAVSKVIVYKLDRISRSLSDFMNILQEFKAHKVEFVSSQESFDTASPYGELIVKILMVFAEFERTSIINRVTQAYAHRSEMGFYMGGRRPYGFEPVPAVIHNVKTKKLHPVPAEAEQIRYIFAVYAQENVSLRRLMDILLAEGRTPRNGSCWTTAKLSTILKNPIYVKADCDVYDYYDRHGTQIITDVSLFTGVHGAQLYGHTKHESGNPDWSDMRLVLLSHDGLVDADIWLKCQRKLENNRRITNSYSNPTSWLAGKVVCGMCGHTMTTIKGKPDQNGGQRRYFHCTGKSHKRICTGPRVTIYAADLESMVDDCIASKLAGLRDAGRGGGNAAHGAINELKLKRKAIEQQEKQLLDTMLAGGCNAELLALANRKAAQLGQERLALHKRLEEYTARQAERGSTLGLEDAWKAADYPRKKAVAMLLLHQIRIREDGSTEIIWNL

SEQ ID NO: 5197 - protein, 512 aa, unidentified
  source 1..512: note = uncultivated organism
MQGGSERSTNINNRIKAFYGRQSVDRKDSISIESQLEFALHEFGGKAFKKYTDKGYSGKNTDRPKFQELVRDIERGLISDVVVYKLDRISRSIVDFAKMMEMFQQHHVEFISATEKFDTSTPMGRAMLNICIVFAQLERETIQRRVQDAYYSRCEKGFHMSGVAPYGYKLEETVIGGIKTKKLVTDPVAAEQVRLMFAMYSEPNTSFGDIIRYLANQGISISGGEFHRSTLSKLLHNPVYAQADLELYKFFKTQGASITNDASDFSGMNGCYLIQGRGVSERKESSLKDQIVVVAPHEGLIPSETWLSCRKRLMNNVTVGGERKAKNTWLAGKIKCGRCGMALLAPSTSVGKHSFRCQRRTTSMNCEGCGKLSVGDVEDSVYKEMCHKMAVFNTLTRTNTSKTNPKLTAANVALAQVETEIEKLIDSLAGASSMLMSYANSRIEELDSKRQLLAKQIADLTVDTVSPKQVEHISNYLDNWADVGFEDRRTVVDGLITKINAIRGKIDIEWKF

SEQ ID NO: 5198 - protein, 554 aa, unidentified
  source 1..554: note = uncultivated organism
MLISDTIYKAADYLRLSKEDGDFSFSNNKAESDSISSQRKIIQRFVAQQPDIELVAEFSDDGYSGTSFERPQFQKMMEAVKAGEINCIIVKDLSRFGREYIDAGRYIEKIFPQLGVRFIAVNDNYDSLNFSTSDSLIVPIKNFLNDSYCRDISIKVRSNFESRRRNGEFVSNYTPYGYLRSPNDKTQLVIDEAAGEVVRDIFRWKVEGMSPVTIAEKLNLRGVLSPSEHKRSIGINYKTAFQTNARSKWSPKTVIRILTNEVYTGVLVQGKRTTPNYKVKHTIVKDEQDWSRIENAHEPIIQVREFELVQKLMQEDSRRASGSDTVYPLSGRVYCGTCGALAKRYSVTYNGSKYAYYTCPNTTKEGSCEKRRISEKELENTVLTLLQSEIKLVLNMERALSQIKELAWEHREITRLDKAIEVKMAEAEKCRTMKVSIYEDLQEGLISQEEFLQMKEGYSQQIGEIEQDIGKLKKERAMIQEGVADRSGWLSQFRKYQNLPSLSRAAVVNLVDQIQLYPDKKIRVVLRYQDQLADMMEFLRGQDTAERLFEAEVS

SEQ ID NO: 5199 - protein, 557 aa, unidentified
  source 1..557: note = uncultivated organism
MKKVRCAIYTRKSSEEGLEQEFNSLHAQREACAAFVASQKHEGWVLLPEHYDDGGISGGTLERPGLQRLMTDVEEGLVDQIVVYKIDRLTRSLADFAKLVDKLDAADASFVSVTQSFNTATSMGKLTLNVLLSFAQFEREVTAERIRDKIAASKKKGLWMGGNVPLGYEPDGRTLKIKEEDARTVRALFDIYLKQRSLIATTREAERIGFRSLPRGRRGDAYPSSKDMTIPFCRSQIHYILTNPVYAGMIRHKKQVHEGQHPAIIDRAVWENAQELLASGAGRVRGVGAATPGPSLLAGKLFDEAGDRLTPSHANKKGRRYRYYVSSRMVTGKAGDARSLSAGGWRLPAKALEEQLAAAIIAHLRSRAPGNLLINASIYDLERLQRALAQLAPEASGVDSTPTLHGVERAIIAPGKIAVSLDQKRIAELLGVEPVSIDPAALHFDMPFQFRKRGVESKLVIGDGRAKRPDATLIANIAKAHRYYDAIKRGASFEQIAETEKLSKRRILQVIDLAFLAPDIVRSIINGDQPIGLTAKWLGQNPLRADWESQRRIVSAL

SEQ ID NO: 5200 - protein, 512 aa, unidentified
  source 1..512: note = uncultivated organism
MIYTRISLDRNGDSVSPSRQAALCRQMAEARGYEVGHVYEDRDASGWRREAKRPGFKAMEAALDAGEAEAVMAYSLSRFGRRATALLDFAERLKDRGIALLLYDQGVDTSTPAGQMFFTILAAFAEMESAQTSEKVKSHHRLAASQGKMHKGGVRSFGYGQTTGDKDADAKVRDHINLDEAEAVRTVTAMLLGHQSLGSCARWLNEQGITTTKGNVWNGQTLSQALRAPRIGGLRHHDGANLPGDWESVLDEETWTRLVAELDSRRNKGSGRSVQAHLLTGLAKCGRCGCSLKAASFRQANGKLFNRYQCLPREGLPNCGSLAASKATVDRLVVERFLEFMSSASLRPVDDRTADLQGEAEELEGKINKLTTDHYVHARLTDAAFMAAYDQLAAELSLVQQAQRAAAIRRSDTSQVLEPGSKESMESWWEQASLEDQRAALGRAIYKIVIRPAAKPGGNKFDTSRIEIRWRWDLYTRASEAEWEHMSEDERTRADGEGQRDLDEISELEAAR

SEQ ID NO: 5201 - protein, 508 aa, unidentified
  source 1..508: note = uncultivated organism
MRAEPSKKKVRCAIYTRKSVTEGLEQEFNSLDAQREAAEAFIKSQASEGWVCLPQEYSDGGFSGGTIERPGVQRLMRDVQAGEIDCIVVYKVDRLSRSLLDFARIMGIIEASNCSFVSVTQQFNTSHSMGRLTLNILLSFAQFEREIISERTRDKVVAARRKGKWTGGHPILGYDIGKDKKLVVNRGEAERVRAIFDLYLRHEAPLPLVRECRKLGWTTKVWVNRKGERRGGLPINKARIHGILTNPLYMGKVRAGKLVLDGEQEAIIDEATFVRARAILDRNCQNGGVVVRNRHGALLRGLLFDAKTGFALSHSFTKKGGKLYRYYVNTQAAKEGWGNCAGTTSLPAAEIESFVLERVQAAGRDKTLQREILAEAARDHAERSQRIERERKAALGRIRQLAAEIREAAESGDGDQLRRLREQSAIQEEKLSAILDEQRRLEALRLSEDEVLAALHDFDPLWRQMAPRERARLVELLVEKVMVDSEAGTVAITFRPSGIRTLTREKIA

SEQ ID NO: 5202 - protein, 567 aa, unidentified
  source 1..567: note = uncultivated organism
MKNYERMNSEYNVIKAKKKRVAAYCRVSTDSRDQENSFESQQRYFKEYIERNPDMELVKIYADKGISGTSTKKRVEFNKMISDAKAGLIDRIVTKEVSRFARNTVDTLQITRELSDVGVSVYFVTDSIDTSEADDEFQLTIMASVAQKESQKTSKRVKWGQERRMEQGVVFGGSLLGYDVIDGVMHINEEGAAIVREVFEKYVNQEKGANTICNELREEGKKLLSGGDWNIQHIIRILRNEKYVGDLVQKKTYTPDYLSHGKKYNHGEEPFIVIKNHHEPIVSRELFDAAQARLDSRTRESSKVGHSNRYWLSGKIVCGRCGARYVARYRQNKDGSTSKYWACGEAHLHGNKKQDKAGNEIGCAMESIREVDAMTIMDCIASRLQINKDKVMNHILKDVTAVLKRKSNVSERDNIRKEVEDNKKRMDHLIDMCCRGLITDEEFLRQKTALLDEKDALEERLRAIDTTDRTLQRGEAFEKELRKHIEDALASDECKENYYRSILEKMVVNDREHIDVYLQLLSGEQRYLADTINKTAKFRGVLKKRTIDDTDIPISVSVARTRSSGME

SEQ ID NO: 5203 - protein, 505 aa, unidentified
  source 1..505: note = uncultivated organism
MPMVTVIQPKVTDDAQCLIRVAAYCRVSSSSDDQLNSYNSQLVYYTHKFEESKTEVLIDIYADEGITGTSEEKRLEFQRLISDCRKGKIDRIYTKSISRFARNTRDCLKNIRELKSLGITIMFEKENIDTANINDELMITIMGGLAQEESVSISQNMKWSIRRKMRNGCYTPHSAPYGYVINNRKLVINNDEAKIVMEIFSYFLKGHGTQNVAEYINNKYCINPPLSVSTVRYILTNERYTGNSLYQKTFTSDIIGSHHRPNKGECDMYYVNNTHESIVSKEEFDTVQLLLKSRAHISNSKKRNIFSGKIYCGSCGKKYLVKEKKNRSFLTCVLHSQKAELCNSCIVYSDKVMDSFIRLFNKVYNNYVDLIVPIINSFHECETKRVAGNQSIIELRRNLLQLNEQIRVIATLRTKGFINGAKYKEQTNEIKLKINKLNKDILLLSQSDDTTLKDMEMLKDYFEKRSGIMAEFEPEVFEFLIDRIIVNDNIFEFHLIGGLIFSEKI

SEQ ID NO: 5204 - protein, 557 aa, unidentified
  source 1..557: note = uncultivated organism
MIFRQKCRKIHLFTCFIYMEVKMDKAALYLRLSKEDVDKINKGDDSESIVNQRLLLMDYAISHDIQVVDVYSDDDYSGLYDDRPEFDRLLHDSKLGKFNIVIAKSQSRFTRNMEHMEKYLHHDFPLMGIRFIGVVDGVDTQNTANKKSRQINGLVNEWYCEDLSNNIRAVFHQKMKAGQFLGGYAPYGYLKDPNDKYKFVIDEYAADVIRRIYALFLEGYSVKAICHILEDEDVLNPTLYKKKQGLTYKNAKSDEFGAKYNLWSETTVKRILTDDVYIGRLTQGRYQKASYKDKKIVPVPKDHWYITENHHEPIIDNETYYKVAALRSKRRICVDSQYGDKKKVHIFAGKLCCKECGHTMIKSGGVRGRKDDWYLRCQLSNKSRRKECTSHNIRYSTIENVVLEKIQELVKCALEDKSKLNSLLNIISDSDNKETLQNKKKELRKLDSDIENVSKSVKALYFDRISQQIEEDMFFQLKADFENELQNLKSKKKIIDLDIEKLEYETESKSDVIEVVRRHTNYSKLTHEIVNDFIDYIEIGEKNKETEEQEIIIHWNF

SEQ ID NO: 5205 - protein, 523 aa, unidentified
  source 1..523: note = uncultivated organism
MPNVAVYCRLSIEDREKTEGGNSASIHNQKAMLRDYCHERGWDIYDIYVDDGYSGIDRSRPEFNRLLRDCEAGHIDIVLCKDQSRLSRDTVVIEQLINDSFLEWGVRFIGVADNADSDSESYSTMRLFTSAYNEMYVKDISSKIRRTLEHKREQGQFIGSFAPYGYQIDPENKHHLIIDTEAAEVVQMIFDMYAGGDGYRKIVSRLNDEGIASPAVYKRMNGSNYFNSYADSCNAEGLWTQSTVARILANEMYNGTLVQGKSHCISYKNKKRKKVDKADWVRIPYAHEAIVDMDTWERTQERLNSHSRVGKRSDELSPLSGKVRCACCGRPMKRNVYYNRSRTLKYYGLQCAAFKTGAMNCSNTRSISGLVIERTILDELNAIVEKFCQTDEIQLTDIHSVRLKELERRLMTLEGRHIAAKDRLVKMYKDKLDGKVSDTDYLLFRQSLSDEEEKLAKQITEIVQQTEECREHEGNPESRRELIERYTHFDKLDRNTADEFIDFIEIGEVSSNGQREIHIHWKL

SEQ ID NO: 5206 - protein, 560 aa, unidentified
  source 1..560: note = uncultivated organism
MMDNRKIAIYSRKSKFTGKGESIENQIELCKTYIKNRNQGFKDEDILVYEDEGYSGKNMNRPQFQLMMKAAKEKKLSGIVCYRLDRISRNVGDFSILIDELNNYNMTFESINEKFDTSTPMGKAMMYICSIFAQLERETIAERIRDNMHELAKTGRWLGGATPTGYESKKIVERVNVNGKDMTAYKLELIPEEAELVKLVFSKFLEYNSLSKTEAYFLQNNIKTKNSKDFTRFTFKAILQNPVYMIADSDAWKYFESKGVDIYSDKEQFDGKHGLLGYNKTLQRSGKSNVMRSIDEWIIAVGKHQGIISGADWVKAQMLLEQNTSKSYRKPRSHTALLSGLLVCGNCGSFMRPKMYNKDYEDGERRFSYLCETKEKSQQHKCKIKNPNGNVLDRAICEEIKKLSENSSEFVKQLENTKSKIKSNSEELDIQIDSLENSIADKKKQIDNLITSIAKGEAATDYINQRIEELDKEIKASEQRLADLKNLTEENVLSDNEFDVLRDILSSFASSFDTMNIEQKRAAIRTFVKRIVWDGENIHMYLFGSEEDDVFGEPSGGDRK

SEQ ID NO: 5207 - protein, 561 aa, unidentified
  source 1..561: note = uncultivated organism
MERISRAIRRCSVYTRKSSEEGLEQDFNSLHAQREACEAFIKSQQGEGWRLVKTPYDDGGVSGGTMERPALQRLLEDIRHGLIDVVVVYKVDRLTRSLADFAKMVEVFDAQGVSFVAVTQQFNTTTSMGRLTLNVLLSFAQFEREVTGERIRDKIAASKKKGIWMGGCPAIGYDVRDRRLVVNQAEAATVRQIYHRYLEVGSVPKLKKDLDRDGVVSKIRVSRKGIRSGGRSFSRGALYELLSNPIYIGEIRHKQERHPGQHEAILERELWEKVQQRLLDRATRTPEPRTKAPPSPLAGKVFDETGEPLYAQGAVRRGRRYRYYVSRALVRGSTSEGQRGWRVPGPELERAVAIAARSILDDKPAILEALQGAGMVDTDVNQVFKLAAEWRESLLSDMERSTALVELVGKAILTDEGIRLGLNIPVPCSGSGGAPIRKVLKLLRFVPLKVKRRGVEMRLIINGGDEPRKPDPALLKAFARARGWFEELASGRVRSLVEIARREGLAKRYVTRLTKLAFVSPALVKAIAEGEVPIETNLQMLMDGRVALPLGWNDQEQLFLD

SEQ ID NO: 5208 - protein, 529 aa, unidentified
  source 1..529: note = uncultivated organism
MAMKNGNGKANGNGADLVAKPIRCAIYTRKSTDEGLQQEFNSLDAQREAGEAYILSQRHEGWQLVPAHYDDGGYTGGNMDRPALKKLLVDIEAAKVDCVVVYKVDRLSRSLMDFARIIEVFDKRGVSFVSVTQQFNTTNSLGRLTLNILLSFAQFEREIISERTRDKQSAARKKGKWIGGHPILGYDIDPRGGRLVVNAKEAERVRAIFDLYLEHQAAIAVVEELRQRGWCTKSWQSAEGRAHGGKPFTKNRLYGLLTNVIYTGKVNHKGTIYAGEQDGIVDVKTWERVQKLLGRNGAARRDRTRNKYGALLHGLVFCVPCGAPMIHTYTMRGPKRYRYYVCHNAQQRGWNTCETKSVGAPAIEAAVIESIRRLGSDPELARRTVEHARSQVAARIVQLRKDEAAGRDQLRRLNMEMACAATVSGEEDGAAARFDRLVEVHKEVQAIEDRLTTIRVELEALADDPLDAADVLSAIERFEPAWNSLRTHQQTRMVNLLVERVGYDGRTGKVTVAFRSQGMRELCSGRKVE

SEQ ID NO: 5209 - protein, 553 aa, unidentified
  source 1..553: note = uncultivated organism
MDNRQVVIHYTRQRGEMKMYMGLMDNVDNKIYNVGIYVRLSKDDFSKGKATDQEVSESIKNQKNMLTKYVMEKSWNIVDIFVDDGVSGASFDRNNFNRMVDMIEAGAIDCVLCKDQSRLGRDHIEEGNYREKYFPSRNVRYIAIDDGVDTFRDTSGNDMATMRSAMNDMYIQDTSKKVKRSFDTKRRNGEFIGAHSPYGYKKDTINKNKLVIDEEVSHIVARIFAEYIEGYKEGKGYTSVANGLNADGVLTPTQYKKTKGNYNNAKARLGLWSAESVRRILTSPTYMGALTQGRTLKKGPKVKSFLNIPKEYWIIVPGTHDPIVSEETFTVVQELIERKEKYPTRPSIEGHLLTGLIFCADCGERMTFHKTNRGTTQCICSKYKRYKGMCSRHAIREEDINKLVLDDLGRIASKVVDVQKLKKMSVGAEAQNQRANSIQIQLDKLKNRVEEIRNIIKSLYTDKVKGIVSEETFIEMQATFSEEKTVVAKKIQQLEEQEKKADKVERKANKRLDEMIEDLVNMKEINNIILKELVDRVEVSENKEVMIRYKFSA

SEQ ID NO: 5210 - protein, 575 aa, unidentified
  source 1..575: note = uncultivated organism
MIKRAYAYLRVSTFQQVDGKSLTGQEEEIRKYCNVYGIELVDVYSDEGKSGKSIEGRPQFQKMLRDIKEKQEVDYVIVWKLSRFGRNACDSLNSLNILQDNGVNLVALTENVDTATPMGRLVFTLLAALAEMERENIREQTANGLKYNALSGGWNGGIPPYGYDAVNKELVINEEEAAVVRKIFEWYLESEEASCDSVTGRLNEEGIKPRHYKRVDRKATEESETDETVYLPPVADWYTSQVKKILDNPTVCGKIRYGYHKTDDSGNKGKPSNDSENDYILVDGKHEAIISEEMWNRAQEKRKKSRKPRGRRDSTSENVNNVFNGIVKCPQCGAHMINYGSRYKRANGEESYYSTYVCGYWNNHKKGKCRKNPIKTEILEKAVIGGLREYTRRPNLAEEIHQYMEQELDTGKLEKETEELKNKIAALDKNEDMQYKILCQIGVNPTYQNMKPERIQINLDKIATEKKELQEKLDYKMKQIESVQLEKMDFELVKNLLENFNEVYEDAPKELRKRLVRSLIKEVQLGYDDKGKVVPVKMILKFSGEQIELMKEHKENFGLNEAHAERSVRNGFLYV

SEQ ID NO: 5211 - protein, 515 aa, unidentified
  source 1..515: note = uncultivated organism
MSPPIKRCAIYTRKSTEEGLGQEFNSLDAQHEGCLAYITSQKAEGWTAIKTNYDDGGYSGGNMNRPALTQLLQDIQAGKVDIVVVYKIDRLTRSLMDFSKLVEIFDKHNVTFVSITQSFNTTTSMGRLTLNVLLSFAQFEREVTGERIRDKVAASKKKGMWMGGYAPEGYNIVDKKLVVEPASADTVRQIFERYRKLRCVSGLKRDLIRDGIVSRTWTSSTGLTHGGEEFSLGVLYKILRNPIYTGQVSHKGVLYDGQHEGIIERQLWDDVQDLLVQNSPRMRGKRPEPIVELLRGKVFDPDGRPYSPSYTTTGGKRYRYYISQNLLHHRDLPKGVMARVAGPDLEDCVLSAVGRVLEAEQIIQIFAEGYADVAVSHLIDNKQDYEIRTLMMACLNRVIIRESGLLILLDTAALAKWFLDAHHLRLPASIAPMHEMEAPLVAGRAKRDSRVVAAPERLGAKRDPFDKSEEELRRWAQGIVWRDEHFRGKSLAEIAKTQKCSRTKVLEDINCTLAL

SEQ ID NO: 5212 - protein, 528 aa, unidentified
  source 1..528: note = uncultivated organism
MMALRCAIYTRKSSEEGLEQGFNSLHAQREACEAYVLSQAGEGWKALTTVYDDGGFSGGNMERPAMRQLLADIDRGLIDIVVVYKVDRLTRSLSDFSKIVDRFDAKSVSFVSVTQAFNTTSSMGRLTLNMLLSFAQFEREVTGERIRDKIAASKAKGMWMGGRPPLGYACEDHKLQINNAEADKVRSIFRRYLELGSVVALTRELAATGICSKSWIGKREQALGGHPLSRGAVYHLLGNPVYRGAIRHGKLLYGESHPPIIDAVTWDAVQARLALNAPKSPTAPKIGEGALLKGILVDDLGNAMQPIHTQRRGCRYHYYVTASRVHGDDREVGSLPRIGAGTLDAVVLERVAGLLRPSWRAGAPVEVRVREALSKVTLGAAKIGFTLHADSCGPNVEGGGLKDGDFVEVEIPIRLKHRQGATLITPADRQLGGAPTPDRALVRAVSQTRDWRRRLETGEVASTRELASLEGLCNRHAGRILPLAYLAPDLVVMILEGLQPRAMTLQALTAKPLPRAWADQRRLVASFG

SEQ ID NO: 5213 - protein, 544 aa, unidentified
  source 1..544: note = uncultivated organism
MNVILPLSSRAALYLRVSTTRQAEVDLSIPDQKLQTAAYCERQGWPIVAEYVEPGASAMDDSRAEFQRMIERACDDDHPFEVIVVHSFSRFFRDAFGLEMYIRKLAKHGVRLVSITQELGDDPAQVMMRQVIALFDEYQSRENAKHVLRAMKENARQGFYNGSRVPLGFTLQEVEKRGHRTKKRIIADPVEAEIVRLMFDLYAHGDGQSGPMGVKEVTKHLNAKGYRTRLGGRFGIGPVYGILTNPIYIGSWSFNKRNSKTGQAKPQSEIISIEVPAIIDRITFDKVQKTLQAKNPQANPPRAVTGPILLTGLAYCASCGGAMTLRTGTSKNGNVYRYYTCSSAARIGKTACRGRSIPMEKLDQLVTEHVADRILVPERLEALLQSVADRRVKTDAEVQTRLENLRREAGTAEDKLRRLYKLVEEGLTDLDDMLKDRITQLKAGRDRAAAALDRVESQRPAIRLETDKIVCFGNLMRRNITEGEIPFRKAYLRSLIEAIEVDDHAIRIHGSKTVLERAVLADQAKHPGVRGFVRNWRARRDSNS

SEQ ID NO: 5214 - protein, 567 aa, unidentified
  source 1..567: note = uncultivated organism
MARKSRRNQLTESQQVKTSEKVYHCGLYARISVENERKREADSIGNQLQLLKDYVSEHPDLMVHDIYCDDDISGVDFIRPEFSRMMNDLRDGKIDCIIVKDLSRLGRNYLESGEYIEMVFPFFQCRFIAITDRFDTKYNQADFSVQLKNLANEMYAKDISKKITSVKRSAQEQGKFTSGRAPYGYLIDQLDKQHLVVDEETAPVVKQLFAMLAQGNTLHGIATKMNECGVPSPGRLLYERGITTTEKFKNSKWYMPTIRRILTDEIYLGWMVSGKYRSTYQTTGQKGTLRVPREEWVVTKGTHDPIVTEDLFYKVQEYFQSTKEAYGQTALYNSKNKKRSLFTSHLRCGECGKAMYLRMKKNGNGEKRGWYYCPMHENYNSSYCTKKAIKQEDLESVVLKLIRSQIQLFINSRELCISLNKRESSKTKHRLYFDHIRDIKNQIDKAVEGKASLYTNFVDGVITQEDYIIMGQQYAKKADELRIFLAELEHEAQKYSLSYASGGTWTRLVEQYSNVDELSEEIVDAFIDEVTLYNNGHVEVKFNYRDEMDEVVHLAAIRRKELDRYAV

SEQ ID NO: 5215 - protein, 521 aa, unidentified
  source 1..521: note = uncultivated organism
MRVAAYARVSTDKEDQLHSLAAQQHFFQEYIRSQPAWNCVGIFADEGLSGTCVAKRPQFTAMLQLALEGEIDLILTKEVSRFARNTVDTLTITRQLKAAGVGVVFLSDGIDTRDSDGEFRLTIMASVAQEESRKISERTRWGQDQAMKRGVVFGNNSIYGYTLTGGVLTICPEQAQVIRCVYRKFLIEKKGTHIIARELTEEGVPPPLRPDGSWSSTMVLRLLRNEKYTGDLLQHKYRTTDHLTHRKTPNPAAESQYLLLNHHEAIISRETFRQAQEELVRRQSTPVRHRTPRYWFSGKVICGSCACSFTAKTTHRANGTSYRRLVCRRRCDIPAPGQSRCGMRSVSESEVNICARHILQQLPLNQKAIIHQVMADLHIPHPSSPEKLQAALLRQSERKQRAQEAYLDGTISLEDFRTLAERCNAEISRLNGLLCSEDAAARRKDLQQKLESALDGEACILEEIIDCMIVCEDCLLVSSGSLRFRIQTEKISKRGESRFKIISCTRFSDDFPSTMLQLCNF

SEQ ID NO: 5216 - protein, 537 aa, unidentified
  source 1..537: note = uncultivated organism
MDEKLTQTKKPIPCAIYTRVSTNDGMEQEFTSLDAQREAAENYIASQKSEGFFALADRYDDAGFSGATTERPALQKLITDIKGGKIGCVVVYKVDRLSRSLLDFSKLLEFFDQNNVAFISVTQHFNTNSSMGRLTLNILLSFAQFEREIISERTRDKMGAARKKGQWMGGRPALGYNIDKENHRIVINEAEARIIREMFDLYLNKRSLLAVAIALNHKGYRTKQHLRKGKPSGGLPFTAMGVKLVLRNMLYTGKINYKGKQIYQGQHEAIISEEIFNDAQQILSENRREVKNKPQKNIGLLSQLIRCKHCDSAMIYSYTTKNHKWKYFYYYCSIAQKRGYANCPTKTINAQRLENQILICLREICSNKNMLPETWENLTFAQQRETMLALVKIILFEAETSTVFVTLQGSTQVHECKIDMETSLIRAVPRAIALQKEPKLRQFLILAYQVQELLDQGKAKSPKQVAQWLSMTRTKMYVLMNMTMLAPSIQEEILFSNNNLIRLIPEYKMNQITREISWHKQKQIWQQLTAGLAKQSS

SEQ ID NO: 5217 - protein, 545 aa, unidentified
  source 1..545: note = uncultivated organism
MIEAVDYSRYSSAMQREESIVAQQSANSKHCLEKGYVLVKRYADEAMTGRNMNRPQLQQLLLDARQGKFKVVVVHKLDRLSRDVLDMLKIRQELGKCGVRIESVIENYDDSPEGQLFQHFQMGLNEYYSRNLGREVMKGTLTNAELRKHNGGKPPLGYRVNPETKRYEINEEEAPIVRIIFEKFLDNWTYSEIAQYLNLQGYKTRTGASFSSKSAFYDILVNPKFKGQYTYNRTSRKDPYTKRNHRKSKDESEIVRIDGGMPAIVSEEMFDKVQERLKSRVRTKGELSAKTPYLLSSLLVCEQCGGKFHADNRPSGRNKTPYMTYRCSNRKAVGDRKCRCKEIKRDEIESFVLGQIEGILLNPANIDYFMECLNQQLSNRQSQSKLDKPRVKKRLTEVTNQINQLVEVLTKLGEGQSLESIVEKLKQLEFDKKQLEHELEVIEEKIAGFQINKTSVKKMFKDLRGQLHTENARHVREIIRLLIKEIIVGDETIEIIFNLNSLFCLQIKTICTFQQRYLRAWIENRYMEGIDSNSKSIPSLLKCSL

SEQ ID NO: 5218 - protein, 515 aa, unidentified
  source 1..515: note = uncultivated organism
MSIEDKNKQKTDDSQSIQNQKEMLRDYCQERNWEIYDIYCDDGYSGIDRTRPAFNRLLHDCEAGKIDIVLCKDQSRFSRDILVIEQYINDKFLEWGIRFIGVADNADSDSELYGTMRLFTSAYNEMYVKDISTKIRRTLSFKREQGQFIGSFAPYGYQIDPSDKHHLIVDKETAPHVQLIFEMYVQGNGYRKIVQTLNSRGILSPSAYKQQTGSNYVNCNADDSHSKGLWTQSTVAKILRNEMYTGTLVQGKSHHVSYKNKKRKKVAETDWVRVPHTHEAIIDPETWARTQERLNSHTRASHSTSYELSPLAGKVRCAVCGRPMKRNVYYNKAKTIQYYGLQCATYKTGAMNCPNVKSISGKKLEEKILDELNTIIAQYCQTDEIQLTDFQAEQMKGLENQLEKLKAQQTAANAKLTKMYKDRLDGFISDQEYSLFRNVLVTEEQDISQRVSDLEKQIETLSARKEHTENQRAIIEKYTHFTKLDRTVVDEFIDYIEIGEVLETGERNILIHWKI

SEQ ID NO: 5219 - protein, 514 aa, unidentified
  source 1..514: note = uncultivated organism
MYTARFDALYGRQSVDKKDSISIESQLEFCRYEAHGDPYREYTDKGYSGKNTDRPDFNRMMRDIRAGLVKRVIVYKLDRISRSILDFANMMETFQKYGVEFVSSTEKFDTSTPIGRAMLNICIVFAQLERETIQMRVSDAYHSRAEKGFLMGTRAPYGFKRVPYVIDSVHTACYEVVSDEMEQVELIYRLYTEGRRPDGDMYSNFGILDYFVEHKIPHLRGSCWTQPAIASILANPVYARADLELYDYFKAQGANIINPVEMWQGGNGCYMYRPAGSKAGTMRGYKDRTIVLAPHIGRIPSDMWIKARLRSMNHRTRATGKRNTTSWLMGKVKCGYCNHAMAITRAGTTDKRYMQCAYKNSTRGVGCAGVQQTVRAHEVENFVFEEMKKKLSMFDCLTCDTAERPVSPKFTENSVRIAQIEEEISALIAKVSSANDTLMRFINERVEELDAEKRSLSMENISINSVGAESFSQTIFDHVREWETAPLTEKQRIVDIMINKITITYNHIDIDWNI

SEQ ID NO: 5220 - protein, 505 aa, unidentified
  source 1..505: note = uncultivated organism
MARCYMRVSTEEQAQTGYSLAAQRDKLELFCQLQGYQIAGWYRDDGVSAKDLKRPEFQRMMKDAQPNDVIVVYKLDRLTRSVRDLDDLLSDFEKRSIHFRSVTEQFDTTNATGRLMIRMVGEFAQWERETIAERTTFGKQKKFSSGEWNGGRVAFGYTTEPSGKMKGGKNLLRLVPDQATSHLISLIFEKYLAGHGSRQIAVWLNEQLGARSAKGGRFSAEQVMRILGNPTYTGAFPKGKRGGDREWVKGEHEPLVALEIYEKAQEVLKRRKQMAPRQATGVYVLTGVARCGVCGGPLTISHLTGRQKGQYTYRCRSWNSGMGCGGDGKRPLTSSMGHLIEAHVVESIAALGDPETLDRFYGAIEADYEKRLGMTDVEIRRLRQDLAGAEMAVRRWDQAYETGEIALSDYLARVKPHRQRVEAIQKQLEAVTNTPAPPPKEVLANFLVNFRDIWENAEPEERKMLLQHFCDGWGVTIYLFPGLRLDLAVGRVTPAPGIAAPGSVG

SEQ ID NO: 5221 - protein, 554 aa, unidentified
  source 1..554: note = uncultivated organism
MKAPTAKPSLRCAIYTRVSTDARLEQEFNSLDAQREASEAYIKSQSNEGWSLVRTRYDDGGFSGGSMERPALQRLLSEVQAKRIDVIVVYKVDRLTRSLADFAKLVELFDAHGVSFVSVTQSFNTTTSMGRLTLNVLLSFAQFEREVTGERIRDKIAASKKKGIWMGGVVPLGYRVEARALHIVEDHAELVRGLFRRYLEVGSVARLKEILDAEDVRLPIRIDGKGRSTGGGFFSRGHIYKIFSNPIYIGQIAHKGDVHEGQHPAIVGRELWDKAQQSLKDHFTTKTQRHERQSTNALLVGKLFDDRGNLMTPSWSMRGSKRWSYYVSQAILRGDKANAGSVARVSAPEIESRVIDAIGSFDEGQNSQAIHLGCYPSRDDVPPAQNKNTSSDHRDRIRSRIERVTLERAAIRIAQSHEADQEAEAKVLTIPWAAPSPYRRREIIHRTSVGSSAVRPLPTSARVALTKALRKAHRWLDELLTEPKLTIESIAARESKSERSIRMTLSLAFLSPDLVKSAIDGRLPRGFGLTRLIDLPIAWSDQWAALGLKAPVRT

SEQ ID NO: 5222 - protein, 567 aa, unidentified
  source 1..567: note = uncultivated organism
MLDRVGSKTRTIRCAIYTRKSSEEGLEQDFNSLDGQREACEAYVLSQRHEGWKALATPYGDGGFSGGSMERPGLKRMLADIHAGLIDIVVVYKVDRLTRSLTDFARMVEVFDARGVSFVSVTQSFNTTSSMGRLTLNVLLSFAQFEREVTGERIRDKIAASKRKGLWMGGFAPMGYSADGRTLKVVAEDAAIISRIFDRFLVLGSIQRVKEELDRNGIMTRAFKSASNRQWGARPFGVGHLRLILTNPIYVGEIAHKGERFKAQHPAIILRETFEAVQQHLALSKRENWLRGQAKDASLLARLLFDAAGNRLLSDHAVKKSRRYRYYATKPDATEVMRIPAGEIEPIIIQGLAARLRDRPWLMATLLGKCASPDSIHNLAAEAATLAAELQHPTASRQREALHRLVEQITIRHDRLCIALKPDPFGPEAFLNDVDRKDEGESTSMVIEIEARFVKKGQSLHLVVPPAEGVDRAARLDKALIKAIARAVTWYDDLVAQRVTSMREIAGEEDVSERYVAQLLPLAFLDPGLVEGALDGEKTIAIQSGDLAKGIAVPMDWSQQRKALVGA

SEQ ID NO: 5223 - protein, 558 aa, unidentified
  source 1..558: note = uncultivated organism
MSLAGKKIIRCAIYTRKSSEEGLDQDFNSLDAQREACESYIKSQQHEGWVLVEKQYNDGGFSGGTLERPALKELFQDIETGEIDTIVVYKIDRLTRSLMDFSKIVELFDKKSVSFVSITQQFNTTTSMGRLTLNILLSFAQFEREVTGERIRDKIAASKKKGMWMSGKPPIGYELKEKKLLPDVAHVNKIKIIFEKYLELRSVPDLIKHLKENNIKTKNNVFFTKGAIYHILQNKIYVGLITHKDKVYDGEHQAIIEKELFEKVQQILSQNRINRKNSINAKTPSFLAGKLFDDTGNKMSPSHSNTRNRKYRYYVSQAIIQARRSEAGSVSKIPAGEVEKVVTEEIKTFLLNTKNIHQYIEDYDIHKQKELLLSIKSLQNDIKTGFNNAFIRTILSKITLYKEKIEITLCKQQLLKALNAVAYNTMLPEEIKKDIMEPIFITKALRLTQTSKNGGIIIITDSQKQEVNINPQLIKAIAKSHYWNNLLLSGESVSSKDIQKLENLNDNTYIKDVLRLRFLAPDITEKILNGTQPPEMSIQKLFKINTFDWMEQRRLLNI

SEQ ID NO: 5224 - protein, 624 aa, unidentified
  source 1..624: note = uncultivated organism
MTDRRRQSSPLRSASRRCAIYTRKSSDEGLDQAFNSLDAQREACEAYAASQRHEGWTLLPTRYDDGGLSGGSLERPGLQRLLADIRASKVDLVLVYKVDRLTRSLSDFARIVEVMDEHGASFVSVTQHFNTATSMGRLTLNMLLSFAQFEREVAGERIRDKIAASKRKGMWMGGSVPLGYVVRDRKLVVDEGEAERVRSVFRIYHELGSVRLLQARLAAEGVRSKTGRRLVHGALFHMLQNRVYRGEVRHKGNVYPGEHEAIIDAPLWDAVQAQLAENRVQRTSASNADHPSLLAGLAYDGDGPTRLTPTHAVRSGRRYRYYVSQTLITATRASSPGGRRVPAHDLEQLVIGRLRRFLADEAALHAALQSIVLGAARRRGLMDRAARLARDWPRLSASEVRRMLLGLLSRVSLHADRIDLHVRSDRLPLLLTDRPVAGPPEVMPGNAEGPSLVLTVQASLRRAGKEIAMVLGADPAAAPTADPAMMRLILRARAMWEKVQRGEVAGLGELATREGVSGSYASCLIRLAFLAPDILGAIMDGRQPAELSAAALLQECRRGLPFDWQQQRDALGFRCASRIPQHHPERHGTAGTSLVRRSSRLPTCPDGRPGNSDCRKGPERRGPA

SEQ ID NO: 5225 - protein, 545 aa, unidentified
  source 1..545: note = uncultivated organism
MPTRVAIYARVSTEGQAQEGTIESQIVALREYAAAQEFETIEECLDDGYSGTNLTRPGLDRLRDLALQGLIDAVVILSPDRLARRLAHQVVILEELEKRHVKAIFTNYKLGDTPEDNLLLGIQGLFSEYERTKLIDRTRRGRIQAARKGHVLGGIAPYGYRLLHKTKDSPARYDVNPLEADTVRLIFRLISDDKLSLRGAAKYLNHNSIPTRSGAPWSSSTLADILRNEAYIGNAYTFRHTYVEPTHCRTRTPYRKVKNTTKKLRPQSDWISIPIEPIIDRATYDAARAQMQLNIERSPRNNWRNQYLLRLLTVCGLCGCHISGISSNNHTYYRCSVRQNGSKKAIPHDQSVSVQHPKLDGLVWDALVELMDDPQRLEAHLAKRQAIREAPVHSVDERANAKAQATLDAEEERLLDAYREKVIDLAQLKKQMQKLEGKRAHLKGLQEALARSTETLERPTITRDMLEDLSARYRHAMANADFTARRQIVETLITEVTLYPGKAVVSGVIPIDNALLRPLFPLPPGSLARGRCAALGRPLTIEHPC

SEQ ID NO: 5226 - protein, 541 aa, unidentified
  source 1..541: note = uncultivated organism
MNHQLQCGIYTRVSTDNQAEVVFNSCEAQEEKIRGFIDSQENMGIFKVYSDAGFTGSHLNRPALTEMLADISQGKVNLVISYKIDRLTRSPKDFYQLIETFEKYGVDFISVTERFDTSTPSGRLLRNIMLTFAQFERELISERTKDKMLQRAQKGMWNGGTLPYGYKTEVKKLVVNESEAKIVRAIYESYILSGSLSRTYTEMKSRGIKDRKGKPFSMGAISYILRNVLYGGKLYYAGNIHAGIHEPIISEDIFNVAQDIHRTKKTSNRISKYFALTGLIQCKECGSFMTLHYTKKKARRRAKRYHYYRCTKTLKRDWDSCTTKQVSANKLDDYIFQYLERISIDQQYIESLTFKLNNDRPGGRTGCELSSEKQQICPDQVEQALKNFLKGLAERKGLEKNLWGKNFIKKIIYSKEQIELNLYYFEDPSLRPSTISGLRSPRLEASGPSAGPAATPPVTLYCSKTSSACAFEALPSDQRPDGVKNKPEISGDLAQNPRFETQDLATPRGFEPRFSDRKSEVLGLWTMGSQLQQPQSVVTSY

SEQ ID NO: 5227 - protein, 534 aa, unidentified
  source 1..534: note = uncultivated organism
MGEKPMVEGSLAKKQPRVIVIEADKELRPKKLRVAAYARVSSDSTDQLNSFMAQVRYYTTYITSKEEWTFVDLYADEGITGTSAGKRTEFQRLIADCKRGLIDKVLCKSISRFARNTTDCLETIRLLKGLGVGVCFEEQNIDTAQMSGELLTAIFAAISQKESESISGNMRWSYRRRMESGKFITCKAPFGYRLEQGKLEIDETEAEIVRQIFSRYLEGQSADEIAAWTNTLGVQTRDHGDKWYSSTILYILKNERYAGNALIQKKWTTDTLPHVKKRNKGERKQLYLENSHPPIISIEAFIAAQKLISCRHQNNSKNMGILSEPRPLARKIVCGCCGSIFRKARINEKTYWVCRNHFQNKDNCSILQIPESEVYAAFLRIYHRLRMDGIPVLEQLAANCRKIREQKYLWRVDIVELNKQIGNLMDQNHMLAEMQKHGLVNSDFFLSQTNEITRKLREAQAQKERLLSADQDRTLEQTRELLEALASMPEFLPEFDEDIFSDLVERITVESNTTLCFRLKNGLELRETIERTVR

SEQ ID NO: 5228 - protein, 557 aa, unidentified
  source 1..557: note = uncultivated organism
MPSTPTAAPESACAIYVRRSSAGGNGTNKSLAEQEAEVRALAAAKGLTIAHVYAEKEGTGASRFSRKRRPEWEAALADLEAGDRFRTLVVFALDRADRKGADEMAKVIRRHAETGRRIIGVDGTDTGDPHRRMETIIRLEVAAEEVERLSSRVTRTKRHRRAEGKWLGGRPPYGLAIGPDGQLVQDSETFPTARRIADALLVGATLWAVVGDLNRDGVPAPSVPALLKRAERAEAEGEVEKAAGLRARAEAAVWRVPSVATMVKAPAWAGLQSIRKRTKSGGWAYLAEVYRDPETHEPVSVGEGVVTRQERALIMAALSSRTVERFEKGQARHTGLRSAGAGSLLADVLRCPSCGARPGLTGGPERRSYRCATSAQAAAACDGFNAPEAALDDYVAARIRTRLGALEPEPGEYWHPALLAAAKVWAGEASPEVRLERSRLEGNLAEARDDDVRVRSLALAGVLLPEEAAVERQKTQARIRTAEEALATLSGGEPDPGALLDAASTAEAWETLDGATRRRVVAAVVERVTVTKAKGRGYRFHPEERVTIRWTGEDKGA

SEQ ID NO: 5229 - protein, 547 aa, unidentified
  source 1..547: note = uncultivated organism
MKKHVIYSRKSKYTGKGESVENQIEMCKQKILTKFPDISENSIIILSDEGFTGANINRPSFQKMMKLVKDNKVLSITCYRLDRISRNVGDFCNTITELQKYNVSFLSIREDFDTSTPMGKAMMLICSVFAQLERDTIAERIRDNMIELAKTGRWLGGNTPTGYKSTEVKTMSIDGKLKKLFKLEPIEEEKKLVLLLKDKYKEIKSQTGLETYTIINNIKTKKNKMFTRWTLANILSNPVYARADEDSFRYFTKLGAQVIGNINEYNGKYGLMVYNKTNQISGIGKKDNPITDWIVAVGKHDPFYTGLEYIEIQELLKNGANKRFRKPPVNNALLSGILKCEFCGSYMRPKVYKKSSNQIKFSYLCSLKEKSKGKLCNHHNLNGNIADKLLTDIIKNLKKDNDIFYKEIKKLASNNLTNEEKKKNELIILEQKIKKNEKDIKALVDKIKIVKDEIVPIISEEISSLKNKNQKLVTSINNLKTKKNNTINNEEEIVIDILDNYFNNFDKLDLIEKRNLVKLVVESAYSNGDNLTINLIGADFPSGDNCK

SEQ ID NO: 5230 - protein, 554 aa, unidentified
  source 1..554: note = uncultivated organism
MLIPDMVYAAATYLRLSKEDGDLSFSSDKAESDSISSQRTIIERFAAQQPNIRLVSEYCDDGYTGTNFERPQFQKMMEAIRAGEINCIIVKDLSRFGRDYIDAGRYIEKIFPQLGVRFIAVNDHYDSLNYSSGDSLIVPVKNFLNDSYSRDISIKVRSNFESRRRNGEFVSNYTPYGYLRAPDDKTKLVIDEAAGEVVRDIFRWKVEGMSPVTIAEKLNTRGVPSPAEYKRSIGVKYKTAFQSQSRSMWSPKSVMRILTNEVYTGVLIQGRRTTPNYKVKRVIFKDESDWSRIENAHEPIIPVREFQLVQRLMQEDGRRAPGSDRVYPLSGRVYCGTCGSLAKRYSVTYNGKKYAYYTCPTTQKDSGCEKRRISESALEDTVLTILRSEIKLILDMEQALKQIEELAWEHRETVRLDRAIEAKTAEAEKCRTMKVSTYEDLRDGLITQDEFLQMKEDYSRRIEVIERDIGTLKTERAVIQEGLVNRNGWLALFHKYRNLPSLSRAAVVNLIDRIDLYPGKEIKVVLRYQDQLANMMEFLREQNASISLPRTEVS

SEQ ID NO: 5231 - protein, 566 aa, unidentified
  source 1..566: note = uncultivated organism
MSGPAKVRCAIYTRKSSEEGLDQAFNSLDAQYDAAAAYVLSQRHEGWKLVTERYDDGGISGGTMNRPALQRLLRDIEAGRIDMVVVYKIDRLTRSLADFAKLVERFEEANCSFVSVTQAFNTSTSMGRLTLNVLLSFAQFEREVTAERIRDKLAASKKKGMWMGGTIPIGYDLHPDPRARTLVVNPSEADTVKRLFDLYDELGCVNELSRQATREGLCSKPRTLSDGRTVGGGRFTRGQLYYLLHNPIYIGKIRHKGQSYEGLHEPIVDLELWNRVQKKMEINATRPRQSALAASRSFIETSPLAGKLYDETGDRLTPTHTKKNGKRHRYYVSRRLIKNPRERNDKSGWRLPAKQLEQQIAGLMAERITSLACQLRLITLPQAAEGLALIDRAKSIAKDIKENGIEAAAELIETCTIAPGALTVTLDRSQLARALSVAPDNLVDDALIFGSPFQLRRRGVEAKIVSGIKVAEPDQKLTEILAKAHGWLERVLQGEAIADIARRDGHAKYYVGSRIQLAFLSPALQQAILDGTQPQTMTLQKLVQNDLPLDWHEQERMFLAGDRVSR

SEQ ID NO: 5232 - protein, 504 aa, unidentified
  source 1..504: note = uncultivated organism
MQAIYVRQSVDKKDSISIETQIEECKSKISITEDYEIFKDKGFSGKSTDRPEFQRMMSEVKRGNVTKIVVYKYDRISRSLYDFINMQKEFERYNTALISVNENFDTSTTQGKAMVNILMTFAEMERETIQQRIKDNYYSRGEKGLYLGGYAPFGYTKVETSVNEKKTYTFEENKYESEILRQMYNDYLKGKSLGELSRELNDNKIPTRKNRPWSTTCIARMLRNPVYVKADADVYNYLVSLGGHMNNSIEEYIGENGCYVYGEVSKRKGNKFVSLENDFVSLGLHKGIIDADLWLSVQQIFSRKKGHSNLGTGSLTWLQGLVRCKCGYTYYAKRFMPNKSKKEYKYLYCRGRKNNACPYPKVMMNVDRIETIVEEALLERLEDLKSIRMSGIVKYSPEINSLKIRLAETDKKISNLMVTLSEGTEVTAEYVNRYIKELDTEKRALTEQIAELELKSSRLNDPSLDIDNILNNWHSYDIELKKKIAKDVIDVIILEGSNISINFF

SEQ ID NO: 5233 - protein, 514 aa, unidentified
  source 1..514: note = uncultivated organism
MPVAAVYVRVSTEDQARHGYSLGAQTEACRARAEALGALQVQIFADEGVSGALLSRPGLTALREAVAVHSVDLVVVWDPDRLSRNLSHQLLLTEEIERARVRLEFVNFEWKNTPEGQLFYALRGAIAQYEKEKIRERTSRGRLQKAKQGRLPAAFRPYGYDYDPHTALLVPNPAEVPVVQRIYRWLLEEGEGPGAIARRLNLLGIPARKGGRWHRTVIRQILANPVYTGIFHANRWDTAGCSLNRHRPEAERVAPSLRPEAEWVPVAVPALVEPADWREAQGRLEQARRLWSGKARAEYLLSGLLTCGRCGMSMSGFVGVDWGVKRRKYTCRRSRAAGGAGGWCGQALAAEPLEQAIWSRLAAALADPDELQAAAGDRADRRDLEQELAAVEVALLQAEKGRANLLALLEQGLLPAGEAVESLGRVKHRVAALTARQRELQTALSTPAAPAIDPGRLASFLTEFRAGRLPMAERKRLVRELVAGIEVDGRRATVFARLPGLFPEKPIDRSPLPH

SEQ ID NO: 5234 - protein, 552 aa, unidentified
  source 1..552: note = uncultivated organism
MARPAPATPPDSPNAAPQRAALYMRVSTGRQAESDLSIPDQRRQMTAFCAARGWEVAAEFVDAGLSGTDDNRPQLQRLLDIATAGGAPFDAVVVHSFSRFARDHFALEYHVRSLRKHAVRLVSITQDLGDDPMSVMVRQVFALFDEYQSKENAKHVLRAMQENARQGFWNGAAAPYGYAIVAAEQRGAKTKKKLAIDPVEAEMVRLIFRLIREGDGTSGPMGVKAAASWLNERGHRTRKGARWGIGPLHKLITSTTYKGEHRFNRKVWKTKEEKPESEQVVVPVDPIIDPATFDAVQAQLKSRNPKSTPPRVVTGPILLTGIATCASCGGGMTLRTGKSGRYRYYACATCAQKGKSACKGRSIPMDRLDNAVTERLADQLLTPDHVENLLAGLMDRQTARDADHGQRLTMLRGKLTDAEDRLKRLYQAIENGIADPADPTLKDRVAAIRTERDIAQVAFDRAVAELQPGARITTEKIAACVDVMRANVLDGPIPFRRAYLRALIDNVEVDDTEIRIHGRRTVLERLVMGGGAAPAGVPSFVRKWRTRHDSNV

SEQ ID NO: 5235 - protein, 504 aa, unidentified
  source 1..504: note = uncultivated organism
MLPKQTEYKVGMYLRLSKDDERAGESLSIENQRRVLTNHIREQGWTLYDEYVDDGISGTTFERPGIQRLLEDAKAGRINLILCKDLSRFGRNYIMVGQYTDYIFPMYGIRFIALTDNVDTANSESAGMDMMPIMNVFNEWHSANTSKKIRAVIETNARSGKYKTTFSSYGYDKGSDEKCTPVIDPEAAAVVRRIFDMRVTGMGYKSIAQVLNEEHILIPTDYKYKKLGKEIGRKSVHLWTTHTVRCILQNPIYIGTLVQLRNTTVSYKNHRHIDRDEEDWAVVENNHEPIISMDVWNKCREIDASNSRGKKTQKGEVYPLSGFCYCDRCGSKMKLTGNDNNRNRMTAYCCGRYSRFGKEYCTTHFITRSAIEGIVLADIQRQIDFVMNDAQAREKYLARKRKTSAEQEQTDKKQLKNAEKRIKELNRLIQSIYEDKVAGKMPEDMAFEMLEKYQTEKKALQAEYEEMQKRTEETKQDENDVDEYIRRLKSYAGRRSLQGRCALS

SEQ ID NO: 5236 - protein, 509 aa, unidentified
  source 1..509: note = uncultivated organism
MKNAGIYVRVSTERQVQEGYSVAAQKNNLTKFAKDNSFNIYSIYSDEGISGKNVKDRPEVKRLINDIELGLVNVVLIYKFDRLTRNISDTEDFINLINKYEITIYTLSEGAVDVSTPQGRFVTRLKGAVAQLEREQTAERIKVAFVQKVKDGYSLCCNTPSYGYNRKSGQKVMTINRDEAQVVKRIFRMYIDNHSFTDIAKTLNNENISTKMCGRELKVRDKISKSVIGTRIVNSVWQPKMIRLILSNPNYIGKVRYGIGTKQYFEADGQHKPIISQKVWDKAQDKLAKIKHISRTNLPKDDVYYCGTLVCGICGQKLTTNRTIGRLRKDGTRNLFNGYRCINREKQTCTAIGISHDKVEKAFLKYLESIDDFSVIDELVIEEEPDSIQEEIVSTQKAIQNANSKMKEIMNMFMVNAIDHNQLTYMTSELKKVIKVNEDKLKELQQKHQSHPVINKNNIAKSILEHWSYLTDSEKLAFLTDFVEEIVIVNRSTDRHNGEAEVINVKFYS

SEQ ID NO: 5237 - protein, 525 aa, unidentified
  source 1..525: note = uncultivated organism
MKKCAIYARQSIEKKDSLSIEDQISLCRQQISEQDSVIVYQESRSGKNAVGRPEFQRLLDDIRNDQISTIIVYRLDRISRNLLDFCNTWELMKSHNVQFISCSEKFDTRTSMGEAMIMIAMVFAQMERNTIAERVADNFFSRAEKGFYLGGYAPFGYNKVDIQLHGKKTAAYQVDESKRDTIKFIYHEYATTNVSLGKLTVKLTEMGIKTMRGYNFDGPGLARLLRHPCYVKADAMVYQYLNGKGATMNDDISCYAGTNGCYIYAKNIERTKKELEEYNYVKKKNGKTFANISNAFVTLAPHEGIVDSQVWLACQYKLDNNKQVKCDRSGTHSWLSGLMRCGKCGYGLTVVNNNRGRNYVNCYGRKKHVCTGREHAWQLEEIECFVYNKMMYRLNELRCIEATSTDKQENQRAIEIKNEIARLDNRCSNLLDEIEIARESGLDSSIGALRKRLDEYTRSIEQKHKELGALYNADNERKKNMNCGVSIETIIEQFNDFDMKTKQKIARSLIQHVIVNDHSIDVILY

SEQ ID NO: 5238 - protein, 579 aa, unidentified
  source 1..579: note = uncultivated organism
MPTNKNEVKIMKVAIYSRKSTFTGKGDSVENQIQMCKDYMQNLRNRSNEKYEFLIYEDEGFSGGNTNRPQFKKLLKDIKEKKFKILICYRLDRISRNVSDFSNILETLQMYDIDFISIKEEFDTSTPMGRAMIYIASVFAQFERETIAERVRDNMIELAKSGRWLGGTPPLGYDSKTVKYMDENLNERSFTKLSENKEELNLVKLIFDKYLELKSLSNLEAYMLANYYKTRRGSNFDKTSLKRILTNTVYVKSSDEIFSYLAEQNITVVGTPDSVHGILTYNKLKSNYTRDGNFSRSFRDTKDWIAAVSNHKGIIEPKDWLMVQSIREVNKDKFVVSSRSHNALLTGIIRCKKCGSKLRIVHGVVSKKTGKRHFYYTCSLKKDSKGSRCDNKNGKVELIDKIVVNAIKELGENKLNLINELEKQLKEKSKEFHEINEKENIDHLIEQKKKQVDNLLDKISLDPDLSDLIIPKLKDLKNELKELTDSSLKHKDDLNNLKAEEINLSFIKSLLNKCSLIDSLEHDEIRELIRGLTEEIRWDGETKDLEIDTVGSRDSNKRKKLMEPVDEKILCLSDSGTRR

SEQ ID NO: 5239 - protein, 523 aa, unidentified
  source 1..523: note = uncultivated organism
MSKQRQLVESGPIRVATYTRISTDEEHQPFSLEAQAERLGSYVRSQDNWQLARRYTDQMSGSTLERPGLQQALADARAKRYDMLLVYRVDRLCRSVRALAQLLEELDQAGASFRSATEPFDTGTAAGRMMVQMLGVFAEFERATLIDRVIAGMERKAARGEWLGGHAPYGYRLNRDTALLETDEAEAPVARLIFDLYARKHLGARGVASYLSRHGHRSRPGHLWSHVGVLGVLRNPVYVGKIAFRDVEYEAPHTPLIEPEVFAQAQRLLRKRGDDASTRRSNTTDFLLSGLVVCAACGRRYIGTAAHGRSARYRYYTCFSRNRHGSRGCRSDVLRADKLDEAVLESLLATYADTGLVKAAIDASRLKAAQRAPSQRSELRRVEAEIAHAEASVQRYYSAFESGGLPETRFLSRVQALETRLTERRARLEDLKESDRTEVLVAPTAEVMRNVKETLREAMLNGTPGQRKALLKELVVEVRVESRDSIVPTFRLPTAPVRVMEAVVGRGGLEPPTSALSARRSAS

SEQ ID NO: 5240 - protein, 540 aa, unidentified
  source 1..540: note = uncultivated organism
MSLTVALYARVSTDEQADNFSIPAQIELLKSYSRSMGYVTYDQYVDAGYSGTTQNRPDLQRLLTDAATGKFQIILVYRIDRFFRSVKDLLFVVDHLNTLGVSFSSITEPFDTTNPIGKFMLSLLGSIAQLERDTFIERSRMGKLRRAEEGYVVLTHPPLGYDYIIPERKTSENDIKKQRGERGYLIINDEEAETVNLAFDEYIKSDSSTYSVAEILKSAGRKTKRGGKWSSERVYAILTDTCYIGEWLYKNVKVPVPQIVDVEKFNLAQKLLKERKNMIHRETQRQYLLRGLLRCKSCGSHMGGTTELLRRRQCGKRYGEPSGEIQYYRCHKNMMASRNKESARCHAPWIRAEELEHKVLTHLTLTLSNTEKIQEALKSHNSSISTVKKQMEEEIKSYQKKVTKLSLEKERVLQAYREEIIELSDLKKEIDIIKDKQKSFEQNLKELEMKLNLENEKVTNINTLANRYKSMDTEKILNAPYQEKRDFLMKLVSNIWVLTKEDGRIEANIECIIPELDETPQADGMGTATPLASHALPPFQ

SEQ ID NO: 5241 - protein, 529 aa, unidentified
  source 1..529: note = uncultivated organism
MKPVLRCAVYTRKSSDEGLEQEFNSLDAQREACLAYIQSQKGEGWTASTRRYDDGGWSGGTMERPGLQKLLADIKAGLVNVVLVYKVDRLTRSLADFARIVDTFDRHGVSFVSVTQAFNTTTSMGRLTLNVLLSFAQFEREVTSERIRDKIAASKAKGMWMGGIPPLGYAPRERSLDVVPEEAETVRHIFRRYIELGSVHVLARELAAQGIRSKRWTTSKGDHRGGVTLTRGALFHMLRNRLYLGEIVHKGISHPGQHAAIVDDETFAEAGRLLDAAPVRRNTRATDAAPLTGLLFDAAGNRMTPVHSKGRSGRRYRYYVSAPLQTGCQIAQSIRGRIPANRIEELVLSHLRSWSGRPDADWQVFAPWVRRVEVHASALLITISPPALERWAERIDAPAHADALPGGELRVSAPATIVTRGGRSRIADTGVVRINPDRALIGGLRRAHGTLAEHGIDLSRRAGNFEGARGIDDPCYRSLVSLAFLAPDIQHAILTGRQPDGMMLGQLLRADIPLCWHKQREMFGMSGRT

SEQ ID NO: 5242 - protein, 572 aa, unidentified
  source 1..572: note = uncultivated organism
MSEHKTISSVRPIRCAIYTRKSTEEGLEQAFNSLDAQREACVAYIASQRHEGWVLSPELYDDGGFSGGNINRPGLTQLMAEVQAGRIQVIVVYKVDRLTRSLTDFAKIVEVLDTAGASFVSVTQSFNTTTSIGRLTLNVLLSFAQFEREVTGERIRDKVAASKRKGMWMGGPVPLGYEVRDRKLVINQAEAATVRLIFQRYLERGSVVATVEALELEGVRTKLFEAEGKTRRGGVAWTRGGLAHLLVNPVYIGQVRHKGAHYSGEHESIIATEVWDAVQALLTKNRVTRKHTQMLRHANLLGGLFFDGLGRRMKSSQSAKGAKRYHYYETSVDAVAKVPGVAWRVPAHDTEALVISRVREFLEDQPALQAAAAIAHPDLDARALDRVLTSARSLSIELGMDPNTARSIVKRIDIRDGVLDIKTDLQELFATACEKAVIRGYDIGSSPQHLQQLSVSITKLRRGPEVRLIIANSQSSEQQPADPALVRLLATARAAHVSMQAADIQSVAEVAAAQGYTNNYFTLLLRLATLAPSIVQAILEGRQPTSLTRQRLAKVTNLPLDWTEQRCVLGFE

SEQ ID NO: 5243 - protein, 506 aa, unidentified
  source 1..506: note = uncultivated organism
MAEQKVGLYLRLSRDDERAGESMSIENQRNYLMQYVQKRNWSVAELYTDDGYSGTHFDRPSFKRLLNDIDAGRINVVITKDLSRLGRDQIGTAYFYQVYFPQKHVRYIAVTEGFDTMDPGSSNVLFPFLTAANDFYTADISRKVRTALLTRKREGKFIGSSPPLGYRKDPNVHGHLLIDSQGAEIIRQIFQLYLLVGSVVGVAKELTEQHVPTPSQYKSGKGLQKRFYGAWNDTMVRRILTNPTYAGHLTQNRREKVNYKISQRVDLPRDSWIIVPNTHEPLISQADFDRVQEMLTVRSYSCARNGKSHLLTGLAFCADCGSPMTYVKESKSRIYMVCQGYRKGGRLHLCTSHCIREDVVIGAVLEQFRSLSRHLDIGEFQRAIQSSQGNSQRQDRQANTAKQKLQQLNVMLEQLYQDRAAGVLLEQEFHTLLARNREERAQWEILYKQAQAISKQENIQRDYAEEIRQFLAFKAVDRATVLSLLERVLIHEDKTVELIFRVCDPN

SEQ ID NO: 5244 - protein, 589 aa, unidentified
  source 1..589: note = uncultivated organism
MTTENSQTNEKKLRAAVYIRCSTDEQSKGYGIKVQEEKLKAFCKSQADEYILEDEHVYKDEGVSGSLNIEHRPELSRLFENVKEGKFDVVLVYRLDRFFRNTRRLLEALDILRSHNITFQSATESFNTNDPTGRLLITLLGGIAESERETIRERTMSGKLRAAKEGRWVTGVAPYGYRVDENKKLYVIPEEAKIVKKLFQWAVDEKMPLRLIERKMNQMKKPPPYTTKYAKKKTLGYWHCRTIGRILTNEIYTGNFYYRKYKRPFSNLTSITDKRKLRPREEWIPLETPAIITREIFEATKKQLLKNREFAKRNLKREYLYSKLIYCGECGFKMFGGYQPPRKNWEGVAGIGTRYYHGTYRKSDVLGTTKRCKWCPQYSERRLEPIWECLKEVLRNPKNMFNPLEKYIYREENPENVKSQLEEIDTELSSVRIKQSRVDELYINGQIDKDKYKEHSGLNQREEKILGGEATRLRQSLLSKKEKAEREVAIQEAYEQIKDRLENVSYEEQAQIIRLFIDRITLYAKGDHASVIFHFPSSTEIATIKLGSRASQEEKHFPLVLNIKTMTELERRQQIIRANPLMYIPKMLI

SEQ ID NO: 5245 - protein, 540 aa, unidentified
  source 1..540: note = uncultivated organism
MNQTIAAPRAVLYLRLSRDDVGSGESQSIQNQRALLQDYAARPGFSIVDEYVDDGWSGTSFDRPRFQDMLRDMEQHRFDVILVKDLSRLGRDYIQTGRFLELVFPEHGVRLISVNDGIDTARADTDLAPFRNVVNEMYARDTSRKIRSALHAKMQAGKFIGNFAPYGYRKDPADKNHLIPDAHAAAVVRQMFTWAATGKRPSEIARLLNERGEPPPAVYRCQTHPGLAPDLYSRRKAWTSIGVSRILQDVVYLGHVAQGKTDKISFKSKKTQEKQPDEWIVVRDRHEPLVSQQTFDAVQRQRASRRCDRKGAFDNLFSGLAFCADCGKAMSTVGTRKKGSAANLACGAYKQYGTSACTNHFISYEALYRCVLEAVRRYVCLSEEECDALFERLNRRLRLDERGREANSERERLGKELNRTQRLIAQLYEDRMAGRIGETNFYPLLEQYEQKTAQLQTQMDALQPDSGKDSLRQQQERLRAIIRRYQDIDELTPSLLFELIERIEVGQGTYEKSEKGRVKRQIIVIHFRFLPEPYEIEWTE

SEQ ID NO: 5246 - protein, 537 aa, unidentified
  source 1..537: note = uncultivated organism
MSKAAGKRLRCAIYTRVSTEHGLEQDFNSLDAQREAAEAYIKSQAHEGWTLIRTAFDDGGFSGGSMERPALQRLLAEIRLGKIDVIVVYKVDRLTRSLADFAKLVELFDAHQVSFVSVTQSFNTTTSMGRLTLNVLLSFAQFEREVTSERIRDKIGASKKKGLWVGGMVPLGYASRDKKLVVVEEEAERVRLIFRRYLELGSLDKLLRDLREKGVVTKVRPLSNGRARGGIAFTRGPLAYLLRNRFYIGEVVYRGTICPAEHEPILDRNLFEAVQSKLTAQQSGRARSRHASQSLLLGKLFDDRGNRMTPSHVRKAGRTYRYYISSALLQGRREETGSLPRVAAPEIEAAIVRALRERCPEADRLSDGELVERHLVRAQLSSTAIEIELALSPQQSMDIAGHAELDPNDESVSSVSVTIAWSPGSTRRARDIIIPEATPQKAVRSIEAATRATLVRSIALGRRWLADITRGTVAGPEAIAKREGCSTRRVAMMISLAFLAPDIVQAATAGRLPRGVGFTRLVDPPVEWDRQRAMFGL

SEQ ID NO: 5247 - protein, 573 aa, unidentified
  source 1..573: note = uncultivated organism
MARRPVTAERPRGAIRCAVYTRKSSEEGLEQAFNSLDAQREACEAYIVSQRHEGWTLVKTAYDDGGFSGGSMDRPALQQLLADVEAGKIDVIVVYKVDRLTRALSDFARIVEILDARGASFVSVTQAFNTTSSMGRLTLNVLLSFAQFEREVTGERIRDKIAASKKKGMWMGGNPPLGYDVKDRALVINAREAQQVRHIMRRYVVLGSIRLLAEELLRDGYRTKHLHGRGGIAFSRGALSHLFGNPIYRGKVAHKGAVYDGQHEAIVEDALWEQVQTLLADRRNNAPSKRSPRRSLLAGLIHDGEGRKMTPSHTSKDSKRYRYYVTHPSALLGTGASPWRISAPEVERIVIDRLKRWLGDRSAILTLAGAKAAASAFAKARQAATDLDKPDRRAAILAMLLERVDITEDRIEITIAPSGPRLMLGLEQLVHDQPIRLTSRATRIRQGKDVRMIVGDMSRIARRARSTSRWLRSSPKPLNCIGRCLQHRIIRWPRSPMRRASTASDRRNCCASRCWHPISWLAASRARSPSRSRQSGCSTATCRSVGRSNGSCSGWSEVHSPPHRIQTGQTSGR

SEQ ID NO: 5248 - protein, 527 aa, unidentified
  source 1..527: note = uncultivated organism
MFTGKGESIENQIEICRQYISTIENSSAAEIAVYEDEGYSGKNTDRPEFQKMLADIRANKPDYVVCYRLDRISRNVSDFSSLIEEFNDRGISFVCVKEEFDTSKPMGKAMMYIASVFAQLERETLAERVRDNMMMLARTGRWLGGATPTGFASEQAQEVVMDGRVIRSCRLKPVPSEIATVKTMFDQMLELRSVSGVSKYLIHNGIKNRAGKFYSLLGIKEILQNPVYCVADQDAFAYFTGRRADVCFSLADCSDKLGLTSYNKRDYRKSGAPRQPVDRWTIAVGKHRGIVNGAKWVTVQSIIADNKPDGVRPAVMHNEYSLLSGLVYCDKCGNRMFAKRRQNRNGRFDYICGNKLRGGLEVCSCANLNGRQADDLACECLLQYANETSGVFKMLDRLKRDSAGKSRENPLDTVQARIRKCGEETDRLVDTLSLGSLSPVLIQRVNARVLELDKEIEDLTAQRIRLQETAESFTDKELQTDRTAGALSNLKNNFASLSVHEKRVLIKLLTQKIVWDGQDLHIFLYGG

SEQ ID NO: 5249 - protein, 589 aa, unidentified
  source 1..589: note = uncultivated organism
MKVGIKKTAMHCAIYTRKSSEEGLEQSFNSLDAQREACEAFIASQRHEGWQAMPTRYDDGGYSGGTIERPALKRLLDDIAANKINVIVVYKVDRLTRSLADFAKIVEALDAKMVSFVSVTQQFNTTSSMGRLTLNILLSFAQFEREVTGERIRDKIAASKKKGMWMGGLVPLGYDLEGRKLVPSPKEAEMVSKIFTLYLEVGCVSKLAKLLDREQIRSKVWITRTGARLGGVAFARGALYHLLRNRLYLGETRHRDQWYPGEHKGIVPRSLWDRVQAQLNSNLKKRRNRVRERASSLLTGLVEDEHGTRYTPSFTVRRGRRYRYYVSQLAIKNMASEGIGPTRVPAQELESRVIEKLLAFLKSDAEVFDGLGLAGESTAVASQLLSAAKQLALRLSSMSSRGLRELLASFLCRITLHENKIEIKIRKGELRQQLESGGKTIPADPLSEGSSVAASDVISLTVEAKRKRCGGEVHLIVPPNSGVSPEHPKLPLIKAVARAHSWLERVMQGQVFDRRSLARDAGLTDRYVSKVFRCAFLSPDIVEAILAGRQPLDLNFDKLCQDVPLSWVEQRERLGFPPANSSHPRSMVQ

SEQ ID NO: 5250 - protein, 533 aa, unidentified
  source 1..533: note = uncultivated organism
MTEKVAIYIRVSTQHQIDKDSLLVQRRELIAYSELVLNIKEYEVFEDPGFSAKNTDRPQFQAMMTRIRAGEFSHLLVWKIDRISRNLLDFSEMYRELKKCGVAFVSKNEQFDTSSAVGEAMLKIILVFAELERNMTAERVTAVMLSRANNGQWNGGKIPYGYEYSAETKEFTPLLSEAQIVQIIYDKYEEKRSLIQVAKYLNDNGVRSRTGSQWSAVTVHKILTSVFYIGSYRYNVRDEENGFKTKDKSEWITIENHHPPIVTVPQFERVQKLLQSNSRLATRQFKTSKNVHVFSGLLVCGKCGCNMSANTGKVLKNGWAVSQYACHNRRKGTCDNKYISELTLGPFVFNLIQIAITSQDISEARLEAKLKKALNVPRIEGVSKLIAKTQPKFYTPPSDTGILERDKLEERKRKIENAMIRLKNLYLFNDTPISEKDYIIENERLSKELETINNSMSRLPEDSEILVSRESYRIMATEINRGTFDYIEHGAEMNREVMRDFIRAVVQSITVLDGKVTEIVWKNGAKITFPTVT

SEQ ID NO: 5251 - protein, 534 aa, unidentified
  source 1..534: note = uncultivated organism
MKKAAIYSRKSKFTGKGESIETQIELCKKYAYNIGITQFLIYEDEGFSGKNIDRPQFKKMIKDAHEKKFDTLICYRLDRISRNIADFSTLINELDRLEINFISINEQFDTSTPIGRAMMYIASVFAQLERETIGERIRDNMLELSKSGRWLGGQTPLGFESTSTTITDEFGRNKKIYFLTPIESELTTVKLIYSKYIEFKSLSKVYKYLYIRNIRTKNGYNWTKKKIQLILKNPLYVKADYTVMQYLSNQGMITCGQPDGLHGILTYNKSRGNKIYRNINEWIAAISMHKGIINANDWLKVQTILNINKSKAPRMGTSHTASLTGILKCHYCGANMIVKHGHISKKTGKKLLYYVCSCKDISNGKKCSNKNVRVDELEYEVIKKLNDIKINRNMLISLLEKYISYQKCNYNNENLNNLKYIKEKQKQIDNLITQLSKEPSLSEYIIPKIYHIKSEIDYLNTQNNNISQNKFKETILSTNENVLFNRICSLKYIFDICDINDKKKLFKSLIKEITWDGNSGTVKIKLKEDMKITF

SEQ ID NO: 5252 - protein, 565 aa, unidentified
  source 1..565: note = uncultivated organism
MTERKHLRCAIYTRKSSEEGLDQDFNSLEAQREACEAYVRSQAHEGWKIVPELLDDGGYSGGNTDRPALKRLMQLVSAGEVEIIVIYKIDRLTRSLTDFARMAETFDHHNVSFVSVTQQFNTTTSMGRLMLNVLLSFAQFEREITGERIRDKIAASKRKGMWMGGNPPMGYDIRDRQLVVNEADAATVRKVFALYLEAGNVPALLARLEAEGIVTAKRFSAKGNHHGERPFTRGHLYKLLSNPIYIGRVPHKQVSHPGQHHRIIDQPLWEAVQELLASNIQGPRSRRRRAKLPIGLLTGVMVSASGNGFIDSHANKGSRRYRYYVEDINSSRRRAIRLPAADIDDAVTSAVVQFLSDRQALLAGLGDLERASVKSALERGTILSRELTAASPRDRVVTIRPLLREVHYREDALRIELHHGGVRDALGLTSPAAHEGENYRSDDVENVVLHAPLTTRRRGRQVKLLLNGNLRPSDVDEPLATAISRAHVWAQSLINGKAASITEIALRERVALTYVSQLLPLGFLAPSIVEAILDGYQPVSLTADRLVRGAKIATRWSEQVKTLAD

SEQ ID NO: 5253 - protein, 517 aa, unidentified
  source 1..517: note = uncultivated organism
MATAQDNLARKQIYIPALQSGAAQLRVAAYCRVSTDSEDQLNSFAAQQTYYNDYIRKHDSWQLAEIYADEGITGTSAAKRDDFQRMLSDCRKGRIDKILVKSISRFARNTKECLEYIRELKDLGISVFFEEHNIDTRMVTSEMLTAVLASCAQAESESISKNMAWSIQNRMQKGTFNTCKAGTGFLLSKDGLAIRPEAVPVIQSIYMDYVNGKNSREISVRLTAEKALGRVWNRKLVDYILTNERYAGNALLQKKYRTDTFPRVKKTNRGERPMYYVEGSNPAVIDQELFDQAAELRKSRRREAAKKQARPFAKKLHCQCCGSLLRSKKTNGTWYWVCRTHEESAEKCPLLPILEDEIIRAFLRLYYNLRNHQEILTFLLQQERKIRTRQILWGADIVEINKRISDIISQSHKLAAMNKCGNVDPDIFIAKSNQLAEQLRKAKQQKERLQTQEDNDLIESTSQMLEAISVGPDMLEAFNAELFCELIERITIQNNTKIRFRLKNGLELPESIERTVR

SEQ ID NO: 5254 - protein, 543 aa, unidentified
  source 1..543: note = uncultivated organism
MEKETKKRIYCAIYTRKSTTEGLDQDFTSLDAQREAAESYINSQKHEGWVALPGQYDDGGFTGANIDRPALQKLLADIKTGGINCVVVYKVDRLSRSLMDFAQLLEFFDKYNVTFVSVTQQFNTNTSMGRLTLNILLSFAQFEREIISERTKDKMAAARKKGQWLGGRPPFGYDVEKDGKKLLINPEEAKVVREIFKLYLEGNSLLKVALILNEKGCRSKQGTSKNGNAYGGKKFGVTRMQAIIKNVLYIGKVSYGGQIYEGQQESIIDEETYKKAQEKLKENRVERRAIKNTECTGLLTHLLHCNTCNTFMFHTYTMKKPTVKYRYYVCTNAQKRSYSACPNKSVNAQAIEDATIESLKRIFSDKKKFKEPTKEMEALLSPIWDTLYPEEKRRILKVLVKEVYYAGETKKLGIVLNGSNLKLEFDVDLKQVRPLNKWHKEEEIEKEPKIRQNLMLAYQVQRLMSKEKIPSLKQAAEWLNMSHVRVDQLMNMLLLSPKIQEEIIASDNPNIASIPEYKLRNIINEADWQQQAQLWRELAKPQA

SEQ ID NO: 5255 - protein, 538 aa, unidentified
  source 1..538: note = uncultivated organism
MNPAPQKPRRCAIYTRKSTEHNLDLAFNSLDAQREACEAYIKSQAHEGWRLIPDRFDDGGLSGASLERPALQKLLDEVRARKVDVIVVYKVDRLTRSLADFAKLVEIFDQHDVSFVSVTQSFNTTSSMGRLTLNVLLSFAQFEREVIGERVRDKIAASKRKGLWVGGPVPLGYRSVDKKIEVAADEAALVRKIFADYLHCGSIGELAALFEREGVRPEPRRLVNGRLSTTERLNIGPLAYILKNRFYVGEIAYRGEIYKGEHEAIIARDLFDAVQARLAEGTVARRKMRARSKSILAGLIFDDRGNPMSPSHTNKKGIRYRYYVSQAVLQKQKAEAGSLARVSAPDVETIVSEAVRDRRASDQMNPNQTFDHAAGADSGALSIDRAVLAETVERVIVHRSEIEIDWRRSESETSEGATPRSQWIPFEAHLSRKKGIAHSPSEDSLDPRARKSLLEAIAKAQRWIDEITAGKIESLDEIAARENIVERYVRRLSALAFLSPRIIQAIIDGTAPADLTVTRLTQALPQSWATQEKMFGVA

SEQ ID NO: 5256 - protein, 583 aa, unidentified
  source 1..583: note = uncultivated organism
MKSPISQSTHTIRCAIYLRVSTDEQGSGERNALDTQLEACRSRITINRVDGWEEVQIYKDKGFSGATNDRPELQRLLRDARAGKFHVVVAYKIDRISRSLVKFHEVLGVLQKCEIQVVTAKDSFDTESAQGRFALGILLVFAEFERELTRERTMDGRQSKFNNGGRPGGPIPLGYASLAENQTLQPDSNADTIRKIFAAAVNGQAPAEIAKDLQARGTLNPINRQDKRNEGKEEKERPFRSDEIIRIIKNPFYKGIVRFKEEEREGNHIPLVSPETWQNANTQLLLHQNTKRKGPRKRNQHNLLLKHIAFCAECGQHLVPKAAGKLRKNGEPYLYYTCGSLIRNANKSHCTTRNLPARELDELIVKIVSVISDHPDVIEAGLDELRKKQNADNGPQNDRLSELKSEKQELDNQIENIFSTIKRSSKAALTDLLLAEAEELATQKAVTDNEIEKVETQLAFSKQHGVTAELVASSLKSFKAMFHCLEFYDQVELLHLLVNSVSIKQLHSLPTNLTEHEAVLEREDSKYLLEVQFTADPPIIKNLASISNEEVENEKGEPRKVSPKFAQSFKLVPRRGFEPLSHG

SEQ ID NO: 5257 - protein, 520 aa, unidentified
  source 1..520: note = uncultivated organism
MRLLPVIRLSIETDETTSPERQLDKIQTYARLGDHELVPITEADYDLNVSGSVSPFERPGLGPWLQDDRLEMWDGLCVAKLDRLTRSLFDFVTLVSWLEARGKTLICIDPLLDLSTPAGRAFASITATFAQFERETIAARVRDAWHQLRDSGKYGGGQVPFGYRPSKLDKGWGYEPDPVYGPIVAEIFDRYSRYESLGSLTRWLNDSGVPTPWNVTRLRGKKPAKDTLWKTTSLRKILASPASLGATVRTDGAPVRDEDGVVVYRADALVERDVWERVQARLVANPVSAKINTWPLTQIAFCAVCEDPMYSATAKYGDKTYAYYCCIHSLRRDGKCTARRVKADELEDAVSRELLALVGDRELTESKLIPGRDYSEDIVRVAEQIGHLFSEIQVEALSGIDIREKQATLQRAQEELARLHALKPVQARVEPVATSQTFRQRWESLDAAGRNEFLRSNGVRAVVSREGMPPIVHQEGPLTPTEIPRMAIIDKPELHAVIYLSSLGDMLRQASAMAATVRPS

SEQ ID NO: 5258 - protein, 527 aa, unidentified
  source 1..527: note = uncultivated organism
MARTRHIPNTDHAGGAMWRAALYTRLSREDGDKPESDSISNQKKLLEDYLSRQPDMQYVQLYVDDGYTGTNFDRPDFQRLIGDIEAGRINCVVVKDLSRFGRDYIDVGRYLERWFPERGVRFIAIGDNIDSEKGPYDMLLPVKNIINEQYARDISQKVRSSFRAKQRSGEFIGAFASYGYRKDPEDHNHLVIDPTAAAVVRRIFTLFEQGNGKVKIAKLLNAEGVLCPSEYKKLNGEKYHNGQKLGGTTYWTYATIHRILKNQMYAGNMEQGRAPRQTMHGRAKLLAKERWAVVENTHEAIIDPEQWERVQSLLQRDTRTLNFKENVSPFAGFLRCGDCGRAMSKTNGPGGAYYCCGSYKRYGPTVCSRHGISYRMLEQIVLADLNKIISAVGDLKKLAEEAQPEAKTYDRKGERDRLRSSLERVRRLKKSAYEDYKDGLISKEDFLRYQADYKRQEELLSGQLEQMEQPQDRELDRPWVTELLKHGKLTALDRTTVAEAIRQILVFEDSRVEITYTFSDDLGVLGR

SEQ ID NO: 5259 - protein, 521 aa, unidentified
  source 1..521: note = uncultivated organism
MTARRRCAIYTRKSTDEGLDQEFNSLDAQREAGEAFIASQRHEGWEGLADRYDDGGYSGGTMDRPALRRLLADIEAGRVDIVLVYKVDRLSRSLLDFARIMETFEKRGVSFVSVTQQFNTASSMGRLVLNVLLSFAQFEREMISERTRDKLGAARRKGKWVGGTPPLGYDVVEGRLVVNAEEASLVRDVFDLYLRELSLLRVVLILNTRGVHTKSWTTKNGHARRGRPWTRGAVHRLLTNVHYIGKVRYDGHIYDGEHEAIVDADVFARVQRLLQESQHDVAGGARNQHGFLLRGLVRCAACESTMTASFTSSRGRAYRYYRCTSVVARGTNACPVRAVTAAKLEDFVVARIRELAASPELVEPLFARVTAQRDHERASLEQEQARLLHERQDHGREARRLVTALAAAGSSENRLAAEHLRELEARVAAIDVRLSEIAEALGAIDRATIRVGDVERALADFGAIWSELSFRERARFVHLLFSQVTYDGQNGRVHVTFHAAGVARLAAERRSQSEATCPPPC

SEQ ID NO: 5260 - protein, 573 aa, unidentified
  source 1..573: note = uncultivated organism
MEKTQKKHVRAAIYTRVSTEDQAREGYSLDVQRDYLIDFAKREGFQIHFSDSKSKIYIDDGFSGYSLDRPAMSQLLQDARARKFDLILVYKLDRFSRRLRDILNILDELDSLGVQFKSATEPYDTTTSSGKLMLQQLGSFAEFERNRIIERVVPGMVRGVQAGHWQGARYSPFGYRYDKTTKRLSIEESEAKLVREIFKRYIAGESTQEIGGDFYERKVPSRSGGEFNSSLIRRIIRNKIHIGKLVWNEHHYDKKQRTLRGYRYVKNDPSEIIEADGLHEAIISEDVFYRAQSIMDRNRKGKFYKRHKRDYPVSGILTCAKCGSSYHGIYNVSNHMTGEKRAYYRCSGRASKNIHCGNSDLRAEIPEAHIFGILESLFSSPEIQKQRLKNLIADRYQEEATSETSRELEGLKKELQECSNKLAKLTDVYLAGTITKEIFEQKAQNLRNEEGELRIKIERKELQLIEKEESNDYLKRAEEVAKSADSMKENLHPSLRKELLKLIFKKVLIEDQKVTKVVLFHPFDRLQPKVPVHKTSGGDSEERRFEQCQNLERKQPKKTLKSWLYVLRPSDVK

SEQ ID NO: 5261 - protein, 521 aa, unidentified
  source 1..521: note = uncultivated organism
MQITDITPELKKREEKIRLAAYCRVSSDSEDQIHSFAAQIKHYSGYAKQNSQYTLIDIYADEGLSGTEMAKRDELNRLLKDCSQGKIDRIITKSVSRLARNTENLLSMLRMLKDFGVSVYFEEQGIDTTQMNMEMIVTFPGMVAQQESETISGNLRWGIQKRMATGEYIISQPAYGYMLKGKDVVVNESEAETIRRIYGLYLQGYGIQQIVDIFNDEKVASPNKNENEPWKIGTVRYILNNEKYAGDAVFPKRYTTQSLPFRRKENRGEKTKYYIENYYPQIIEREVFQKVQNLIELKKRGIKRCGKVTSVFTGKLRCPDCGRVFRQNTCREKTYWQCSLNASTGKCKSRRIRDVALYETFTQMVYRLKFNRREIIEDLIKDLEILQSLTSENKNEIKRIDKEITDLSAKNFVVAKLYTNGILSATEYTKQTSEIGNEIKILRAERKRKLSADVAELCLCELNELNETICGYALTSRFDEKLFEEIVEKIVVEDKGKLIFFLKGGITATEEISEKWRCGDK

SEQ ID NO: 5262 - protein, 526 aa, unidentified
  source 1..526: note = uncultivated organism
MKPEPKFCAIYTRKSSEYGLEQEFNSLDAQREAGEAFIKSQTGEGWQLVADRYDDGGYSGGSMERPGLKNLLADIALGKIDVVVVYKIDRLTRSLADFARMVELFDRHEMSFVSVTQSFNTTSSMGRLTLNVLLSFAQFEREVTGERIRDKIAASKAKGLWMGGTLPLGYDKPSGTSRILKVNDGEASVVRQIFKTYLEVSSVHALERVLNERGVISKVRVTKKGKTLGGQPFSRGALFYLLRNQTYRGMLNHKNKVHTGLHEAIVDAEQFDNVQKLLNSNSRRHGCRSGRVAKAPFTGLLFDSEGSPMSPSFSHGARGQVYRYYVSTSLLKGRKKSGKSVQRVAATAVEQVVEQSLLRLIPQANYLPQVKPSRIEMHDTSMVLYLPAKLLQSIRKRLLDNERAEIHQTDPKRLKLTLAIQMQRHGGKFTISSPGSPIPRKDPILIKALRAAHAIIEKDRHGFPVLNAAPTQSYKRLLVRLAFLAPDIQEDILAGKQPPEFTLERFIHGKVPACWEVQRQQYGWGN

SEQ ID NO: 5263 - protein, 517 aa, unidentified
  source 1..517: note = uncultivated organism
MKVAIYCRLSEEDHDKLHETDDSNSIKNQKAMLLQYAMEKGWDVYSIYSDDDYAGADRRRPEFNRLLIDAEQHKFNIVLCKTLSRFTREIEIVEKYIHGLFLEWGIRFVSVVDHADTSIKGNLKITQINSVMNEWYLSDMSDNIKASLNIRRKNGYHIGSFALYGYSKDPEQKGHLIIDEEAAKIVREVFSLFAKGYGKTSIARILNDRGIPNPTEYKRQNGLRYKTPASHNATLWRYSAISDMLTNEMYLGNMIQGKYGSISYKSKRNKPRDKSEWFVVEGTHDPIIDRETWDKVQTLVAGRAKPFKVGTVGLFAKKVRCASCGYFMRSSKSKGRLYLRCANRYISQDSCEGASISVDRLERIVVDELNRLSAEYMNKEELERKVEFVNNLEDQKSKINSDLAFWQKKLEKNTNAHYRIYQDRIYEEITESEYITFSNKNREEREQLEKSITEAERALAEIEEKIAAGDDRRARIDRYINVSKLTREIVEDLVDCIYVSKRDPGSKTLNVEIKWNL

SEQ ID NO: 5264 - protein, 547 aa, unidentified
  source 1..547: note = uncultivated organism
MPENTVKVWNTCGYVRLSREDGDKEESNSVKGQKELIRDYLRRTPDLRECDMKVDDGYTGSNFERPAFQEMMADIKAGKINCIVVKDLSRFGRDHLEAGTYIEKIFPVLGVRFIAINDHYDSLHRNPESDELIVPFKNLVNEAYCRDISIKTRSHLDIKRRKGDFIGAFPMFGYRKDPENHNRLLIDDEAAGVVRDIFRWKLDGVSTQDIADRLNAAGIPTPMDYKTAQGIRYQTKFRKKAESAWCAKTILRILKNPIYIGTLEQGRTTTPTYRVKRQVNRPQSEWAVVENNHDAIIEQNDFETIQRVLALDTRTSVGGEAVEFFSGLLFCGECGASMVRKTVSSGNKKYVYYVCSAHKQDKTRCSAHRLRDITLNEIVLDSLKQHIQNVVDLSDLLQMTDTARLRQASMQRLQKRLDRKRQEIERAQMLLQSLYENLADGIIDREDYKDLKAKYSRRRQEAEEQADAIREEMGQELAGSSENRAWMGQFRKFQNITELDRAVIVTLIERIMLCKDHTVEIVFRWQNEYQWLVDLVARQAHSEQEVG

SEQ ID NO: 5265 - protein, 506 aa, unidentified
  source 1..506: note = uncultivated organism
MKTIAVTATDKPRKRCAVYTRKSTEEGLDQEFNSIDAQRDAGQAYIVSQRAEGWILVADDYDDPAFSGGNMERPALKRLLADIEAGKIDIVVVYKIDRLTRSLTDFSRMVEVFERQGVSFVAVTQQINSATPMGRLMLNVLLSFAQFEREVTGERIRDKIAASKKKGLWMGGRPPLGYDVVQRKLVVNADEAELVRHIFLEFVNIRSCTRMAALLNAAGHTTKAWTTQDGKVNAGGPFDKKLLYALLRNRLYLGELSHQGQWYPGQHEPVVDQALWDQVQGVFQEDGTRRAVGTRQREKCDALLRGLLFDHEGNKLYPTYTRKQGKQYRYYLSQGTLRFGAAVSAVRLPAEPIEAATVAQIKTVLSSPEAVAAVCRELGAEVDEASTVLALSRLGDLWEHLYPVEQHRIVHLMVERVDWLDQGLRIHWRELGWKSLLQEFTPGTIGAEQVEQEAAGVRRCLCRSGLNGWVNPWSMLMSGNPPPLCCVRWVWRCTGSSNSIRTFIPV

SEQ ID NO: 5266 - protein, 546 aa, unidentified
  source 1..546: note = uncultivated organism
MRDTTPTVICIPAKPEVVLASKHQLRVAAYCRVSTDDEEQLTSYEAQKNYYTDKIMTNKEWTMAGIFADEGITGTSARKRPEFLRMIRQCKQGKIDIVLTKSISRFARNTVDCLNYVRALKELGIAVIFEKENMNTLEIDSEILITMLGAFAQSESESISANVRWGIRQAMKEGKVTIQYKYLYGYRKGDDGKPEIIPNQAEVVRKIYDLFLSGTPVRGIQEYLNTSAVPNINGEPKWARSAIDSILTNEKYCGDVLLQKTYIDDCINKKVKKNTGQLPMYLVQNHHEGIISRETFDAAQAELARRSAGKSPSKKNAPTGRSRYSSKYALSDRLYCGECGTRYQRCTWRNRDGSKRIVWRCVSRVDYGNTYCHDSPTLDEEPLHRAILAVINSAVKDKDTIIYNLKSAMEKELAPVAGQQLSLSEIDNQLEQLNIEFSKVLAEASESGDQAVYSDRFREIMQKQTALKAQRNKIQGMLVESGKAATHIEQCRQAAESIPATITEWDEALIRQVVESVTVEMDSKLAVQTKSGTEIFIDIGDVTIKK

SEQ ID NO: 5267 - protein, 625 aa, unidentified
  source 1..625: note = uncultivated organism
MQNIAARYNPYIFLDRNRERTVVYYGRVSTEHEAQLAALENQLQWYDDQTERHSNWNVLQKYIDEGITGTQAKKRPAFLRMLEDARAGKFDLIVTREVCRFARNTVDTLVTTRELKNLGIEVYFVEDNIWTMDGDGELRLTIMATLAQEESRKVSERVRAGQKISRENGVLYGNGNIIGYDRVGSTYVINEEQAETVRIIFDLYLQGAGQTKIAKELCRLGRKDGHGQVSWSASKIGRILHNATYKGYNCYLKSFSNNYLEQKRIKNLDEETYMYVKGDFEPIVSEEIWDKCSEIRKARTTKMIVNKGERTYGKKSTQDVWLRKLRCSCGSTFRKNKWRTNKRGDEVFGYQCYNQVNNGSKAFREKNGLDTEGYCDIRMVGDWKLEIMAKKIFEGIWTEQERKDAILEVYRLLNEYYQSDTKNNQAAASALEGKIARLKNKIDNLISMRADGEITKEEFKSLKDTTEAELNKYMEEKARMSELSNSESGMEFDTEKIRAVLEEALDFSKPKLDDSIIEKFVSQIIPVDNCRYRWDLNFLPNETQSLVCKVEGRKNHADATIEEGSEDEDESPRTYVLSMDYSNISVTAKNAYQSYVLHTLCFPQSIPTMLWERSNVWRISALSRT

SEQ ID NO: 5268 - protein, 566 aa, unidentified
  source 1..566: note = uncultivated organism
MLFITGERMNKWERYSDKNKISIPYQCGVYLRLSKEDENLSSSIQKSQSNSIENQKQFIEEYIRTNSKMQIVRYYTDDGYSGINFERPSFQKMLQDIKENKINCVIVKDLSRFGRNYIETGKYIERLFPALGVRFIAINDQYDSADENAPANDLMVPFKNLINDAYCKDISIKIRSHLETKRKRGEFVGAFTVYGYQKDENKNKLVVDHYAGKIVKEIFRMKMNGMSQQTIADELNGLGILSPAEYKKEQGSGYQAFFQKRVMALWSAVAVSRILKNEVYTGTIVQGKESTPNYKINIREKKPSEQWCRVENTHEAIIKKTDFDVVQAIMKKDTRVMEGKKGVSIFSGYLLCADCGNSMVRYKVPSQAMSYVYYRCSGNKVDKNYCSNHRISEKALYDTVQRTLHLHIQYLLDSKEQFEYIKTAPFPSKKNEILELQIVKKHKEVIKYRELKFECYEDYKSGVLSQEEYLLFYKEMRSRVKDAQSAIIELNRKKDIFLSAQAAKQKWVEEFLRFHGAGEELTRLLIVLFIDCVYIYENHRIEVIFSYQDDVMKMVENSKIVYKGVV

SEQ ID NO: 5269 - protein, 567 aa, unidentified
  source 1..567: note = uncultivated organism
MKKCGLVIRVSTDRQARNTEGSLHNQRQRLHAHIEYKSATGDEKWIEARKYVLKAVSGRDSIRSPEFARLYEDVRSGAVNTVVCTALDRVSRSVKDFLSFFEFMNEHGVEFVCLKQNYDTTSPQGRLLITMMMALAEFEREQTSERTRDAALARAERGLWNGGQILGYELDPDRKGYLIPNEQESTLVNFAFRIYLACGSILETAKALNSKGYRTKEYTSRRGRHHPAREFSYSSVQVMLANRAYVGQKEINKKRRPRVCDSTDERDRYRVVDAVWEPIVDKAVFEEAQDLLRRNHESKHNEVRRPRHTYVLNGGLLWCGQCGAEMEGRSGTGRKGGRYYYYACKNGECGFRVSADEAEGVVLERLGQLARSGDVLEAIAHKVNQQLTANLPELERRRAALTREFHQTKDLATGLLDQMASLSGQESAKLAQERLEELGRRKRQIEEDLDRLELEIESYQGDSISSEKVRLTLECFGEVFERLRPHRRKDLIRLVLHKAILSPDCMKMALYGHPPEIGPSSVSVPELRSQTPTWLPGVVSQSVVMWDEVGIGVAAGAKGHSGLSLVP

SEQ ID NO: 5270 - protein, 523 aa, unidentified
  source 1..523: note = uncultivated organism
MIAALYARYSSDNQREESIVAQLRACREYCKRKNYTIIHEYADEAYSGTNDNRPQFQEMLAAADAGMFEVLVAHKIDRFGRNAYNFYKNIHRLEMAGVKIEYAAQEISDTPEGHMMQTVMIGMSEWYSLNLSKEIKKGFKENVLAGKTLGGIPLYGYDVDKDTKKYIINEREAVAVRTMFSMYANGHSYGEIINWLNESGYRTKRGRTFGKNSLHDLFHNRRYIGMSVGCKNYKQKNGKRNAHAPDDENTIIAENACPAIIEREVFDMVQKKMKENQKRAGAFAARRTYLLSGYVFCDECGASMTGAANVDRNGNYRRYYRCGTAVKGGKSACNNRSVNADDLEALVLEKTKALLYDDGVLAKLTEKAISEYSRLQKDRTTGAAFMQKERDKARAELDRLYKKMRERDEWDDLDEAELKTAKELFRGAEKSLDEIRLRGALPEITPEQIREYIDTKYAAKIKNESTADYRTLMDHFVDSIRISPDTVTVRFKVYLSWCDWCNTEDITIFVDLVFPRPKRLCRS

SEQ ID NO: 5271 - protein, 572 aa, unidentified
  source 1..572: note = uncultivated organism
MIANKKTNLCNEKKRVRILLRVSSHQQLEADGDLNIQREIILEYIRNNPDWILDDKEYFEGGVSGYKNSVADRDALQEAYRDAENQEYDILVLYKDDRLGRRMFDIPIYIMSLKNLGVDVYTVKDGILSANPDDITAQLMLTMRYAMAQKSSADTGMRVKDTAKKLVTQGKFMGGKAPYGYILQHSGEISKHGRALKHLVICPEQAEVVRHIYDLSLTKEYGSAKIACTLNTNEQYRRLAPNDVWKGGTITSILTNPIYCGYTAYNRRERLNGRNRNLDSSEWILANKPNPDIIIIDEDIWMKVQKKREIRGKKYSKSLENQDVTIISRNDGMLSLVDVLHCGYCGCKMVNGSRYNYWTIKDTGERKTSKIPIYKCQNAWQGVPHDKTKQFRADRIEPIIYGALAEYINHLLENENILEEITENNKAEKQRRSNDLAREQKKLNQIRRDIAVLEEHIPNAMTGTYDISLKELMDNIRKQKSKEQEQSAVVQQKESDLQASTITSKDWEEIKGNIPSWQEVFLYADTPTKRVLVNKLIERIDITRERIVIRFKISLDEFLPQSPMDNNGVVPE

SEQ ID NO: 5272 - protein, 526 aa, unidentified
  source 1..526: note = uncultivated organism
MNTLKIQGSSALTPQREIIRIKATADVIPQKLRVAGYARVSSDSADQLNSFSAQVNYYQRLIEKNSGWELAEIYADEAVSGVSTDKRDDFGRMLADCQKGKIDRIITKSTSRFARNTLDAIRVIRELKDMGVTVYFEKENLDTATLTSENLLTLYSLFAQEESLSISKNCKKGNRMRMEKGVYVSSNPPYGYRLIENQLVVYEPEAEIVCRIFTEYLGGSSITRIAQALMEDAVPFKNGRMKWRHQAISNIIKNERYVGDMLLQKTYSEDALPYRKCKNKGALPKYYVRNTHQSIVERIQYELANILLKERGEHINSECGEYPLSRKIRCKECGTAYRRKITNQIPYWVCRQHDNNKDDCGGERLREDAVHEAFVRLYNKLKQNYAGILLPMLSGLEKLQELKTRNNPEISTLNKQIAELSEQNHVMNGLLSKGILDSALFISQTDELNRKIRSLKVTKARLLSEQESDGVLDKTEDLVEIMENGPDRISGMQITLFHEMVEKIIAHDTQTVNFILINGLVLTERL

SEQ ID NO: 5273 - protein, 581 aa, unidentified
  source 1..581: note = uncultivated organism
MAESFKRCAVYTRKSTEDGLEQEFNSLDAQYEACAAYALSQKHEGWHLLPDRYDDGGFSGGNMERPGLKRLLDDVASGKVDIILVYKIDRLTRSLSDFARIVDVLDTAKASFVSITQAFNTTTSMGRLTLNMLLSFAQFEREVTGERIRDKIAASKRKGLWMGGPLPLGYEVENRRLVINPEEAKLVNLIMERYLVEPSVQGLADYLNARGYRTKIQIRASGPHKGGCAFRRGTLYHLLANPIYLGRIVHRDEVYPGEHEPIVPEALWQAVQDKLKANASGTSRRLKGQQPSLLTGLLQDSEGRAMTPSHASKGKTQRYRYYVTRPDQTKDQPAYRISAHDIERIVINRLAAYLAVPANIANFSCSDISDIDAHALQQALAKADLASAALRSGSTQAKHEIITQMLAQAVLHEDRVELTLSHNGLADILGIALNPQSAPIVLSVAANRLRHGRQIRLVIEGEGGLAMTPVKPSPPAVLSSDHQHDTKLIALLADAHAARRLVLAHPHSSLADLAKQHGKCHKLLAKLVEISCLAPDIVTAVLDGKQPNSLTTTSLRSTKLPLAWNRQRAILLESPKTDLTV

SEQ ID NO: 5274 - protein, 507 aa, unidentified
  source 1..507: note = uncultivated organism
MRVAAYCRVSTDSDEQEMSFEAQREYYTDKIMRNPEWCLAGIFADEGISGTQAASRPDFMRMIARCRKGGIDMIITKSVSRFARNTVDCLNYVRELKALGIPVIFEKEGLNTMHATSEIYIGMHGIFAQSESESLSGNVRMGKAMSAKKGVVPFSYKSFLGYRRGADNQPEIDPEEAEIVRFIFDRYLAGDSLQIIKLALEHKGIPTPMGKSEWSVATLRSILTNEKYKGDALLQKTYVVDCITHKSKKNDDRPQYYVENNHPPIVSREVFDRVQTEMARRTSKRRVKEKGTKTESGKYSSKYALTDMLICGHCGTPYRRCTWVRKGEKKIVWRCISRLDYGKKYCPDSSTIEEGALQNAIVTCIKQVLQDESGYASIENMKRHVSLYFGKDDENSTAADEARAAELIEAITQAASAGQYTSQMQSLVDELNRVKAVIAEKKRRQSEAGQSSDRIEDIMAAIEKLKDTPMVFDNQAIRQIIACIKVIAKDEILIIFKGGLERSVKLH

SEQ ID NO: 5275 - protein, 539 aa, unidentified
  source 1..539: note = uncultivated organism
MTPNERKMFRCAIYTRKSSEHGLEQDFNSLDAQREAAEAYIKSQAHEGWKFIKTHYDDGGISGGTIERPALQSLLSDIRDHKIDVVVVYKVDRLTRSLADFAKLVELFEAHGVSFVSVTQQFNTTSSMGRLTLNVLLSFAQFEREIAGERIRDKFTASRRKGMWMGGTIPLGYDVKDRKLVVNDAEAAKVRHIFERYLALGCVSKLRADLDQRAVRSKQRTLTSGRVLGDGSFGRGALYHLLQNRIYRGEVIHKGVAYAGEHDAIVDEQLWNAVQAKFSENTLMRRTTQIRSGALLGGLIFDDSGNRMSPTYTVRRGNRYRYYISQAQLRGRKAGSLTRISADDLERIVVEAVCRELPQNGIATITASGTWRAETRDHIRKSVDRIDINSQGVEIILKAPGVDPTATFVGRDDESGGRKTLKIALPPPRPRERKEILVPGGSGVQPRRADQALVLSIARARSWMRAMRRGEYADTAEIARRFDLSNPHVRRILRFSFLAPDIVEAIVEGRQPRSLTVKRLLRGIPLAWSEQRATFGFTH

SEQ ID NO: 5276 - protein, 558 aa, unidentified
  source 1..558: note = uncultivated organism
MTVRCAIYTRKSTEEGLEQDFNSLDAQREACEAYVQSQKGLGWVVQKKHYDDGGISGGTLDRPALQALLLDIEQGRVDLVVVYKVDRLTRSLMDFSKIIETFDAQNISFVSVTQQFNTANSMGRLTLNVLLSFAQFEREVTTERIRDKIAASKKKGMWMGGPLPLGYEVNDRKLIANETEAMTVRQIFRLYTKLGAVRELKEELDRRSIVTKYRIQKNGKQTGGKLFSRGNLYQLLSNPIYIGRIPHKGETYPGEHDAIIDQNTWETAQALLAGNATIRTQTTNIKGSFLLTGKIFDENDKPLYQSQAHKHGKHYGYYISKHLMHGAHENNVGWRIPAKTMEEAVVASLLNMFRSQSRLMDIMCLQDPSINSLTMLKMQAAKLTQQLEEGNLEDRRNILQAIIQRIELASKSLTLVLDKSGLAKIFGVKCTDDASPASLNIPIRLQRRGVETKLIIESPGAEKRNFDIDLCRLIGQARTWFDLLTSGEASTVREIAKRENVNEHEITRVLHLAFLSPRIVEDILDGRQAEGVSVYRLRRLSSIPFDWAEQVELLENLQ

SEQ ID NO: 5277 - protein, 610 aa, unidentified
  source 1..610: note = uncultivated organism
MEEKKIVGIYIRVSTEDQAREGFSLSEQKERLEAMCKYKGYEIHDIYEDAGISAKNTKDRPAFNRLLYDIKSKKINTIVTLKLDRLTRSVYDWENIMKFLEENDAYIDCANDEVNTTNANGKMISRLLMSVSQNEIERTSERTKIGLSGAIKNGNVPSQTPLGFKRENKKLVPDLLTKDVIIRMYELYSLGNSYQKIKNIFNKEEILGRTNWRDNTIKAMIENEIYKGDYVHGKRGKNPVYYENIIEPIVSKELWENCQVQKKVNSRSYKRTLTYLFLQKLICPKCGRILGGKATKKKNGNNYFYYYCHDCKTTIKEDIIEESLKHLLNDILEYDSVVNEFFLPVLKNKIANPKEKLQKELNNQESKKERIKEAYINGSFTLEEYDKEINIIEDNINELKRQVLENEQVSELKFTKEDILVKRDMDFINKIKLPTLYNDFVTTWNKLDRNRKASIIMNYVDNVELKLNKNNSYEIDKVNFRSTFYKNWKELFDEGVIDTKIPAYTGAVCNYVRYSEYMPMGKIEQHITRLRQCYEVYYYKGTFNLKTQMLDCKLYDDTSIVRIFPLEDKPYEGKEKMDMGVISVKNDNNARIEKEEDLFTTIPDEVKINN

SEQ ID NO: 5278 - protein, 525 aa, unidentified
  source 1..525: note = uncultivated organism
MNTAQNNKNGTIRCAIYTRKSTDEGLEQEFNSLDAQRESAEAFIKSQQHEGWVCLPDRYDDGGFTGGNMERPALKRLLADIEAGEIDCVVVYKVDRLSRSLLDFARIMETFERHGVSFVSVTQQFNTTSSMGRLTLNILLSFAQFEREIIAERTRDKMAAARKKGKWVGGVPVLGYDVDPRGGRLLVNEKEAVQVRAIYELYLEYQALLPVVQEIDRRGWRTKRWVTKKGYERAGKPFTKSSLFRLLTNIIYTGKVNYKGVLYPGEHDQIVDTETWNQVQDLLRKNGRNGGKEVRNKYGALLKGLLYCAPCGTAMMHTYTNKNGKRYRYYVCLNAQQRGWAACPTKSLNAHEIETFVVEHIRGIGSNKEIIAETVRRLRARSEKRLEELYCERRAVERVLKRLHARLRKLVGESWKSISSSQLTTDQLADLHDQIRNNEQRMTTIQEEVIALQRETVDEEDVTRALSAFDPVWESLNVREQSRIIHLLIERIGYDGEDGKVTVTFHSLGIKELCTRVQSSEEEVL

SEQ ID NO: 5279 - protein, 525 aa, unidentified
  source 1..525: note = uncultivated organism
MSRAPRKPERPERGTTRCAIYTRKSTEEGLEQEFNSLDAQRESAEAYIASQRAEGWTVLPDRYDDGGYSGGSMERPALDQLLRDIEAGKVDCVVVYKVDRLSRSLMDFARIMETFERHGVSFVSVTQHFNTTHSMGRLTLNILLSFAQFEREIIGERIRDKLAAQARKGKWTGGAPVLGYDVDRSGPSPRLVTNATEAARVREIFRMYIQEASLLPVVKELNRRGWVTKRTVTSVGRERGNRPFNKVTLYALLTNPTYTGKRLFKGELFAAEHEALVEQDLFDRVQQQLKSNGRSGGVEVRNKYGALLRGLLRCKGCDSAMAHTFCKGKARNAHRYYRCINAIKNGRDACSAGLLPATEIERVVVDEVRGLAQDEAMLKQVLADAEAAVGAELAAVRRERDDLRRTVARGHKELQRLVATGKATADVTGHIADLHTRLAADEHRLPDLDARIAEMEKQIVSPEDARAVFADFDGLWQSLIPREQARLLKLLISTVEYDGDASTVSVTFRPTSIRALIDRKLENAA

SEQ ID NO: 5280 - protein, 558 aa, unidentified
  source 1..558: note = uncultivated organism
MQNIAIYSRKSVFTGKGESIENQVELCKNYCNSYTDSKDAFNFIIYEDEGFSGKNTNRPEFQNMINDIKQKKINTLICYRLDRISRNVADFSSTLELLQKYDVNFISIKERFDTSTPLGRAMIYIASVFAQLERETIAERVRDNMIQLAKSGRWLGGNIPYGFNIDKIAYLSNDYKEKTLSILTPNEEELKIVNFVYSYYLKTHSIREVTRMLYKNKIQGKNGGNIDLTQIRRMLRNPLYVISDKASHNYLSSCGMQVFGDPNGNGYITYNKNKQKSIGNNIDEWIVAVSKHKGIISSDIWLKVQSQLDANKAKTSARIGTGRNHSLLSGILKCKKCGSNMVIRFSGKDKNNRFYEYYTCAGKQNKLMKENKCNAKNVRVDLLDKKIIESIKTYNKIILIKTLKQSLENMNYDFSNKHMDEIKNQIQEKETSMENLINQLSKSPSQTVSDRLMKEINILDAKINDLNKQLKNMKNKSNIEKNCNTDIKLIIDSLKNFDDTVNYIEDIDQKRFLVQSIIKNVIWDSEANDIEIELNSDKNSYFCNNRKPMDCNIHSGKR

SEQ ID NO: 5281 - protein, 535 aa, unidentified
  source 1..535: note = uncultivated organism
MSDDLIPAHIAGRRLTVLHDPKETISQEFINIGGYIRVSTPKEAQASSIEYQKDLLKQWAEVNKYNLVKVYTDIKSGEYKYLRNELNEMLNDIKKGKIKGVVAKEISRTSRDVMDILELKREIASCGGFFISIKESYDSRTDDDEVLLILHAALAQKERKQTAGRVKLTQIMKAKEGKTNSPNPAYGYMLSEDGQHYVKNPETYPTLRFIIEKYIDGWGQQKLVRYLNSKGIPGPRGKKWHSNSIKTIVSNPVYLGITMYNITTTVRTADGKRKLVVRPREEWIIRENTHEPLITQEEWDKMQHIAEQRRRKYDHEWTCEKKYLGSAVLRCAECGGKVYGMRINKKKLGVKNRSGYYYRYFCNGKNGKCPPPMKSWRMEEVDKMIVDLVKELFSDKDRLMDSIKKQLSFRETRNIEILKKRADIVKRIEHINKAMKKQQIAYEEDVITLKEYRERISELRAEQQDLNETLAELDSELTSIDSVVERFNKMYNYIKEKINSFEDMPLEEQSFFIESVFEKIYLTRDYEFEKIEFKL

SEQ ID NO: 5282 - protein, 502 aa, unidentified
  source 1..502: note = uncultivated organism
MERADSISVEQQAQLCRGALTTRELQSCRVYTDKGFSGKTINRPALQRLLHDAENGLVDKILVYRLDRISRSVHDFTGLCAQLSARGVHFQSVAEGLTLDDSPSGTVMAQIMMVFAQFERETIQRRVTDNYFARAKAGMYLGGRPPFGFSKGETTIGGKRTACYVADPVQSALMASLYARYLQDGETLGSLVRWLNAGGYHTARGGSWSTLPLGRLLRSPAFVRADAAVYCYLQGKGATMNDPIDAYDQRHGCYCYAPHQSGHRLSDLSGSFITLAPHEGIVDAACWLEAQRKLDRNRTLCSSGAGTHSWLSGLMKCQKCGYAITVVNKPAGMRGHYINCGGHKRGNAVCPGRGTVVTLEQIEEAVQTRLLDFLRSYRAVAPQTQRRPDARLNRLAAAIAQQEDEIGQLTRNLAHVRETDVIHIVSAQIHEANHALSELKRQRDALLYTHPQDDLEPFFQAILTEWPDYTIPEKKKIAQAAIRRVVVGDDTVEVVFRLPYGA

SEQ ID NO: 5283 - protein, 509 aa, unidentified
  source 1..509: note = uncultivated organism
MAYSQHIERLKKAVAYIRVSSDKIEQEKSLENQKQQFLQFIKKEGYEYHDIYLDVETGTNADRENLMRMLKDAEAGKFDMIVAKELTRIARNVELSYRIKRLAENKDIRIYTLDGKVDSHDPKSMAMFGLHAWMAESEAQQTSERIKAMMITNMKQAKFMGSTPPYGYVKGGEDGKTLVVKSEETTEIVKRIFQLTLEGKAQDTIAKILIAEEVRTPSQELGKKNAGIYWHGTTVRKILENEAYIGNLVQHKESSISAVNHKRKEIPKEQQIRHENTHEAIIDEATFYRVQELIKVKNRRGKYGTRPVKRLFTQRIYCADCGGTMWYRKNIKGYICGTNEKKGKTVCDCNHSIKEKAIEEAILADINTFSKNFDYKKIENALKKEAEKLLGNTKSTTVKLEEKIKKNRIKHDRLLDMELEGRLTKDEYDEKSAGLREEYIELSNQLKEIKADTKGNSKAFDIKKTKQYIDQYINATKVDQKLVTALVERIEINADKTFKINYAFAPLNN

SEQ ID NO: 5284 - protein, 516 aa, unidentified
  source 1..516: note = uncultivated organism
MMRGKPTPALRCAIYTRVSTEHGLEQEFNSLDNQREAAEAYVKSQAHEGWRCLPTRYDDGGFSGGSMDRPALQQLLSEIRSRRIDVIVVYKVDRLTRSLTDFAKLVELFDEHGVSFVSVTQAFNTTTSMGRLTLNVLLSFAQFEREVTGERIRDKIAASKKKGIWMGGVVPLGYRVENRALHIVEDHAMLIRRLFTSYLELGSVSTLKRHLDDTGLHVPERIDGAGRPGGGKPFSRGHLYKILSNPLYVGRLSHKGNSYEGQHHAIIDQGTWDRVQAQLASHAHHRKRQRIGSEHLLTGRIQNDRGHAMTPTHAQKGSRRYRYYVSRAVLQGKNDRGSIARVPAPEIEALVIAALREDRRVKPDLSDGDLIRSHVHRVTIHEGRIEIASQGEEDAPIHLPWSRPSAQRRREIVVPDGSDPQVRPMKVEDRARILKAIATARAWLEELVSGRVGNAETLATREHRSERSVRMTLLLAFLSPKVVEAIRAGSLPRGIGITRLADLPASWSEQHAALGI

SEQ ID NO: 5285 - protein, 544 aa, unidentified
  source 1..544: note = uncultivated organism
MLPKQNNYSVGIYMRLSKDDERAGESLSIENQRAILTEYVSKQGWTIYDEYVDDGISGVTFERPSLQRMLDDAKTGRINLIICKDLSRFGRNYIQVGQFTDYIFPMHNIRFIALSDNVDTANSQSTGMDMMPIVNIFNEWHCASTSKKIKAVLEANAKAGKYKSAVPAYGYLKSDDEKHTPVIDPETAPIVRRIFELRAKGIGMSKIAKILNAENISAPSEYYYKRIGKENIVSCTKLWSKETVRRLLSNPIYLGTLAQQRRTTVSYKNHKIIFKDKEDWVVVEDNHEPIISQELWDKVQEYSHSVSRGKSDKQGVTGTFSGLLYCADCGYKMKKIMMKSRGKSQRVSYTCGLHAYYGKENCTTHTISEAVLESLVIADIQSKLQLIVDEDKARKAFLSKKTGIRASQGASDKKRKSEIEKRLSELDTLTQSVYENMVLGKVPEEVCVKLIDKYQEENKALQAEFETVMSRLDTINQDECDVDEFIRRLKKYAGFEVLTREMLIELVEYITVEDVPENRNTPRKIHIYYKFLDKALPDKRNALM

SEQ ID NO: 5286 - protein, 545 aa, unidentified
  source 1..545: note = uncultivated organism
MQIANPDKIWNTTLYLRLSRDDGDKEESNSITGQRELLRDYLAQHPELHEYAVRIDDGWSGSTFQRPSFQKMIEDVKAGRTNCIVVKDLSRFGRNYLDAGEYIEKIFPFLGVRFIAVNDHYDSLGGKQSSDELIIPFKNLINEAYCRDISVKIRTQLEIKRKKGQFLGAFAAYGYLKDEQDKNRLVVDEFAADIVRDIFRWKLEGVSPQDIANMLNRIGVLSPMEYKRSLGMRYATPFKASAHASWSAVAVFRILKNPIYTGVLVQGKETTPSYKVHKRITKAEADWCVIEQNHEPIIPQTLFDSVQKVLKLDTRRSPDGETVNLFSGMVFCGDCGASMVRKTVPNGGKKYVYYICSANKHDKTVCSAHRIRENALEDIVCTSLKVHIQEVIDMQELLAMTETAPLRAAEAQKVQRQLDKKQEEYAKLQKLLISLYENLVGGIIDRTEYSRLKESFSFRAAETEKQMDALQETLTGIQERGTQNAWMEEFRKHQNISALDRAIVVSLIDRILIHENDTVEIIYRWQDEFAWQLDVLRRAKIREAV

SEQ ID NO: 5287 - protein, 589 aa, unidentified
  source 1..589: note = uncultivated organism
MDGVGVRRFVIYSRKSRFTGKGESIENQIELCRQHIAAHYSNEEAEAALVYEDEGFSGGTLERPQFKQMMQDSQEMQFTAIVVYRLDRISRNIGDFAKLIEDLGNRGIDFISIREQFDTSSPMGRAMMYIASVFSQLERETIAERIRDNMHELAKTGRWLGGTTPTGYASESVSTVTVDGKTRKACKLQMIPEEISLIKLIYDKFLETGSLTKVDEFLLNGGYQTKRGKQFTRFAIKGILTNPVYMIADEDAYQYLVKNNVDLFSEKESFDGEHGIMAYNRTLQRPHKTTLQKPMDEWIVSVGKHIGIIPGATWVKIQKMLQVNKSKSYRKPRSNVALLSGLLYCGRCGNYMRPKVTNRLTATGDVIYNYLCGTKERSRSHLCNVKNANGNMLDAKVIAELKKLRQNSEIMAQMLTQAKRKITGSQDGYEVEIANVKSQIADNDKAIETLVDTIITAEHTDAKQYIVNKIDERHKKGEELKHRLSELESINAEHALTDIEFGLICQILSNIGDSIDQYTVEEKRAAIRTFVRKIVWDGENAHLYLFGSDGDYDFPAPPAVGDGLKDPDGNDELSENPDGSNEPLGEDSK

SEQ ID NO: 5288 - protein, 505 aa, unidentified
  source 1..505: note = uncultivated organism
MARYLMYLRKSRMDTDYEEVSVEETLSRHRQILEKFCKDKKLNVVEVLEEVVSGESLATRPQMMRLLELINTGMYDGVICMDIERLSRGSPMEAGYIMQVFQINCCKIITPGKTYDLQNESDEQFTDMKFMFSRYELKTINKRLVRGRNQSASEGKFLGSMAPYGYRAYKLPGVKGNSLRIEPEEAKVVQMIFDMYGQQGMGYNAIAYALNEMHIPARKGQWSQTSVANILTNEVYLGKIRWRKEPVKRVIKDGMLAKKRIQNDDYELYDGLHEPIITEEQWNRVKAAQKQRNHSPVNTERQLRNPFAGILFCDKCGAIMKRTVPDKRRNPTPWYRCTTRGCDCKIIKCDVVENAIRDAMEEWLDAYMIQIESNQHSATDPVATALESVRGQLAGLQHQQESICEYLEKGVYTIDMFTKRNASLSKEIKQLQLTEADLLRQQSEGSQKDQRAAQIVPTTQHILESYPFLGTEEKNRLWKLVMKKATVYRSPDDKLTVNIYPNLPK

SEQ ID NO: 5289 - protein, 511 aa, unidentified
  source 1..511: note = uncultivated organism
MPTVTVIQPTLIEEKSAVIRCAAYCRVSSDSEDQLNSFMAQLKYYENFLADSETETLINVYADEGITGTREDKREDFQRMMSDCRKGKIDRIYTKSISRFARNTRDCLKNIRELKFLGITVFFEKEGIDTANMTDEMMITIMGGLAQEESTSISQNMRWSIQKRMQNGTYKIARPPFGFDIIDGNLEINEAQAKIVNQIFNWYISGCGLLKIANILNENNIPSNQLQGKWTADVVKYILKNERYIGDAVFQKNYVTETLPHLKLRNYGEKPKYYVTDTNPQIVEKRVFETVQRLLKERYKPYSNDGHLMSGKIICSKCEATYKFKKCGKKSYWTCRTHDKKSDLCENGRILESKIHGAFIALHNKLLYNYNQILLPLQVALQDLKLRQFNGNSNIMELHKEIAKLKEQVHVLARLKTKGFLDDVKYLEQTAELNAKVNKLQSELKKTSHLDDEDETLDQIEMLIDYFEKKENPISEFDESAFENIVEKIVVINQNELEFHVIGELKFKELI

SEQ ID NO: 5290 - protein, 571 aa, unidentified
  source 1..571: note = uncultivated organism
MHAEPKSKVINCAVYTRVSVDERAETQAYSTLDNQRDSCLSYIKSQKSQGWRVFKAYEDSGQSGGSLNRPAMKQLIQDIKKKHIQVVVVYKIDRLTRSHKDFYSLLEVFNQNGVTFVSTTQHFDTTSSAGRLLLHIMLEFAQFEREMAQERTYDKRLAMARKGMYCGGRVPLGYDSKKKQLHINPEEAKIVRLCFELYPKLGSMGSVSKKLNEMGYRTKKFYIKGKRGGGSTKFDKKKVSNILANPLYLGKVRFTDNKNGKEYLFDGEHKPIIDAKTWGGVQNILVTNRDTRKTFKQNKYEMLFQGLIRCGVCGSMMTNSSKRKNGKVYLYYRCVEAIAKGKGACSIRTMPGDELEAFLINEFKKLGQNEKLLRKSIEKANVMAKKGIEPLQKEKDSAEAQLTKINQGLRRLIDILKSEDMPQKRVQTVLNEISDLEASKEKLENETHRLNTNMHHLSQYVIDAETFTKLFREFPEVFETIPFEEKRNLILLLVKEVIYTPTKLTVKFWGDLPEMNLDLKNPPDWTPPPGGDDDGPYPPKGSSPKSVEASKMSGNQVRSGVSNGWGTRIRT

SEQ ID NO: 5291 - protein, 539 aa, unidentified
  source 1..539: note = uncultivated organism
MNARTPIGAETRRCAVYTRKSSEEGLDQAFNSLHAQRDACEAYIRSQAGEGWKLLAGAYDDGGISGGTMDRPGLKQLLADVEAGRIDVVVVYKVDRLTRSLTDFAKIVDAFDKAGVSFVSVTQAFNTTTSMGRLTLNVLLSFAQFEREVTGERIRDKIRLSKERGMWMGGVVPLGYDARDHKLVVNEAEAETVRRIYRRYLELGSVHALCAELNQLGIRSKAWISSKGRTLGGVDFSRGALFHMLRNRHYLGEIVHRDQSHPGLHPAILDLALFEAVQQRLASQRRKPRRSSAKAAHALLRGRIFDGEGRRFSPTFSTGRSGRIHRYYVAGDLQRGRELAGDAVRRVGADALETLVLSELRRLSGRSQAKPACLVRLLSRLELRPDETHLVLRQAELFENDHPELALGDVEARLRPGERLVIEPGEPPHIRVALPRRMQLRGGRTWALFSVSQTAKPRVDQALVAALQRAHQLAAEWTDNSPPNAYDRKLVELAFLAPAVQRDIALGLQQPDLTLAHLLRETLPLAWSAQKRSVTRPES

SEQ ID NO: 5292 - protein, 544 aa, unidentified
  source 1..544: note = uncultivated organism
MVVTKIPKKTVTVIEPKRVNIVDRSKYNQLRVAAYCRVSTDSKEQLLSYENQKKTYTEKIAANKEWTFAGLYADEGISGTQVKKRERFNQMIKDCLAGKIDYIITKSVSRFARNTVDCLQYVRLLKEKNIGIIFEEQNLDTLKTESELYLVIYAGFAQSESENMSKNITWTFRNNFKEGKVKFNYAKLLGYKKGADGEPEVIPHEAEIIVKIFDWYLSGMSVLAIKERLKAEGYKTRQGSTDWPRATIQNILKNEKYCGDAILQKTYTVDSINKTVVKNDGSEVPMYYVHNNHTPIVSREVFNKTQTEMARRNAVKPASCKVSTTMQGKYSKYALTKLIHCAECGSVYRRVTWVRGEQKKVVWRCTSRLDYGKKYCKHSPTVDETVLHATIMRAIAKFYEEDSETYTALLKATLADAMGCSSTRNEIDYLERRVDALNKKMMNIVSESIANGQDVEDCEDEFKQISDEIAELKEQIKILQEQSMGNEITDERIREIQNAIDNENLDFSKYDDGLVRQTIECIRIYENKKVDIFFGGGYVIEEML

SEQ ID NO: 5293 - protein, 519 aa, unidentified
  source 1..519: note = uncultivated organism
MNTEKTPPTTTRCAIYTRKSTEEGLEQDFNSLDAQRESAENYIASQKSQGWECLPDYYDDGGFTGGNMDRPAVGRMLEDIDAGKINCVVVYKVDRLSRSLMDFAKILERFENKNVSFVSVTQQFNTTTSMGRLTLNVLLSFAQFEREVISERTRDKIAMARKRGKYTGGRPVLGYDIVPEGGKIIINETEAEQVRTIFDLYLKRGSMLPVVEKLDRLGWHTKTWVTRKGKVHQGRIYNKPSLHSLLTNPLYMGMVRYKGQNYDGEHDAIITTELFENTQRLLAENRRMPPPARIGKYGGLLKGILRCKVCNAGMSHYFSKKKEKRYRYYVCQNAISRGWKNCPHPSLPANEIELFVINEIRTIGLDKSMIDKIVSHSRESVKDETAAHKKRLKLLRTELDSYNSQLQPLLSSPIQDKNQLANLRERVAIAKRDITITSNRQEELQNNVLSAANIRTACHQFDPLWDTLTHTEQWQMLSLLLECVEFDAETDTINITFAPGGVKNLNRQANEANLQEATA

SEQ ID NO: 5294 - protein, 562 aa, unidentified
  source 1..562: note = uncultivated organism
MNNNVAIYIRVSTLHQADKDSLPMQRKDLTNYCSLILNTEQYEIFEDVGYSGKNTLRPKFQEMMTRIRNGDFTHLLVWKIDRISRNLLDFAGMYKELKELGVTFVSKNEQFDTSTAIGEAMLKIILVFAELERNMTSERVTATMISRASNGQWNGGRIPYGYDYNKDTMEFSLNPVESNVVKVMHDKYESMHSLTSVARYLNDNMIRTRNKNLWSPVGVMLILKSNFYCGDYVYNRTKDGNRQKKKNKDEWITIKEHHPAIVDHLQKNRIIKMLENNCKICKAKNTYVSNKHVHIFASLCYCAYCGKPFGSTISNSGRSWQYSKYDCPTRRKSKLNCSNKSTSDPKLGSFIFNYILNMINLQNNFTSEFTNYDIQKALLHGLTFHDIERISDYSLTATYDMLLDNDTNVLYTNSDDALPDDNRINKLSTLRVKLHEIERAMDRLSNLYLFSESSMSEKEYIIKQNKLQEQYTNISNEIDVDTSSDFQQTLSDAQFIQKASNFILMQELSNKKRINFKWLATTIDKKVLKNFVNEIIESIILKDGKVHEITFKNGLCHSFVWK

SEQ ID NO: 5295 - protein, 592 aa, unidentified
  source 1..592: note = uncultivated organism
MIISKKYHKVSGVSQISPERRRTFMVKKETKAIKRVRTLLRVSSHQQLEADGDLKLQRQIVSDYVDQHEDWESDGKEYFEGGISAYKNSAEDRAALQEAYKDAENKEYDVLVIYKDDRLGRQMLSTMQYIMALKVLGVDVYTVKDGCISPEADDIMGLIMLALRYGSAQKSSSDTGMRVKDTAQKLAAVGKFMGGKAPYGYRLENSGELSKHGRLLKTLVICPDEAEIVQYMYRLSLNMEFGSVKIAKILNENEKHRQLAPDKKNWRGETITSILTNPIYSGRTAYKRREKINGKYRTLDSKDWIIAKEPNETIRIIDDDTWNRVQDKRALRAGRYTKKLENQNVTVISRNDGMLPLIDILHCGYCGCKMVNGSKYNYWTIKDTGERRTSKIPIYKCNQAWQGVPHDKTKQFRADKVDPVVFNVLSEYIDKLQENEDIFQLINQKQNEEKRRKESELAKEQKELDKIRNGIAVMKSKIPEAITGNYALTIEELMSAVRTHEKQEQEQQDKINQIKTELEHSSVSVKEWEEIHQKLPTWKEIFQNTDVSRKRVLVNKLIERIDIRKGKINIRFKINLDEFLQSRMSMDYGVPE

SEQ ID NO: 5296 - protein, 514 aa, unidentified
  source 1..514: note = uncultivated organism
MGIPLLSGGIYMDNRLKAVAYARFSSDNQRDESIDAQISAIENYAKINNIEIIGTYIDRAKSATTDQRPNFQKMIADSSTGTFDIIIVHKLDRFARSKYDSAIYKQKLKVNHVRLISVTENIDGSPESIILESVLEAMAEYYSKNLAREVMKGLCENAKNTIHTGGIPPLGYDIKDKKLVINRHEAEAVRIIFDMYNDGYSYGEIIKTLNDNGYKTKIGNNFGKNSLYEILRNEKYMGVLTYNKSSEKSATGTYNRHKYKDNENIIRINGGCPAIITSDVFYTARDRQLYNKQVSQSNRTRQKYLLSGMLYCDVCGSPLYANRRKKDSQITYRCCKKYRSVDKCTCKEINQQWIDSEIIKIIKKHILNEQNLDYILQTINDYNNSQKSKQANIFLEYTNELTDIKNAKENILNAVEEGFAKEHFKHRLDTLIQRESYLKHQLHTMDNIHHLSISKTDILLISNKFNRLLKENDITALRAMLNDFIDKIYIGNNKVTVYLKERWFRTTILTLDRY

SEQ ID NO: 5297 - protein, 529 aa, unidentified
  source 1..529: note = uncultivated organism
MKAVIYARYSSDSQREESIEGQLRECLEFANKIGVDVVANYIDRAMTATSDNRPDFQRMIKDSYKHCFDMIIVWKLDRFSRDRYDSAHYKHILKKNGVKVVSAKENISEGPEGIILESMLEGMAEYYSAELSVKVKRGLKENALKAKVNGGQIPFGYYINEEQKHAIDQTLAPIVVEAFTMYADGYLIKDIVNRFNAKGITTRLGKKMSYNIVQYMLTNRKYIGEFRYNDIVIPDAVPAIVSKDLFERVQRRMAQNKHAPARHKAEDDYLLTTKLFCGKCGALMVGEAGTGRKKEVHRYYKCVNAKKHTCDKKTARKLWIEDLAVQKAMEILHDEAVIDYLVDRIFDLQGEENPRLPRLRLQLEDVENRIKNIIMAIEQGIIFDSTKDRLAELEKEKSQLDLTIIQEQIKKPFLTKEQIRFGIEKFKKLDISTKEGKQRLIDGFINAIYLYDDKITFTFNYKDGTKTVFLSELNCTPSGSDLKCLGAPSKEDCEIFADRYFHYTKNARVFKSCVFSIRYKLNVFYLFLQ

SEQ ID NO: 5298 - protein, 545 aa, unidentified
  source 1..545: note = uncultivated organism
MTDLLPAAGYIRVSTKRQAEAGTSMAEQKKGIERDAERHGYVVVEWYVDGGISGRSARRPEFQRLIADSRSKTRPYNAVYIYNFSRFFRDDFEVEGYRRKLEKNGVELLSATQQITKGPHARLQRAIITAMDAAASDINAEQVTLVMRANARDGFWNGSVPPLGYETYTAEIRLKKHKKMLRVLSSEAAVVEHIYALYVGTDGKASLGIARLADHLNTKGLSYRGRPFSPALVHTILTRETYIGRHFYNVKDSRTGEKRPREEWIEVAVPAIIPEKTFEKVQAILKSRDPKMAPARSHSSPVLLSGLGRCGNPGCNGTMMLMTGKGGQYRYYTCSNVRRKKDRSCCGNNVSMAQVDDAVLTVLEKRLLDPARLEKLLAQLLERSAGADVKRKRDIVTLRNERNAAETAIQRLFESIEAGLIDPKDKDLKKRLASHQARRAALSQEIDLIERQCGDKLDRIDSETIAAFANGLKKKLTDPDRPGLRKNYVQAFVSEVVMTKDDLIVRGPVASLVQAVSTPEDGAPPVRTSMANWCARLDSNQRPQD

SEQ ID NO: 5299 - protein, 550 aa, unidentified
  source 1..550: note = uncultivated organism
MKSKLQLNKRTGIYLRLSKDDEKAGDSLSIENQRYILRKYVADNGLELIDEYVDDGYSGTNFDRPEVQRLLEDAKNGRIDTIIVKDLSRFGRNYIFVGQYVDYIFPMYNVRFIAISDNVDTANTNSAGMDMMPIMNVFNEWHSANTSKKIRAVAEANAKAGKYRSTHAPYGYVKGSDDKALPVRDEPAATIVRRIFEMRASCKTYKEIYTVLNDEKVPIPAVYLYEKFGITNKKPNKNLWADSILRSILKNPMYLGHLVRLRYTTVSYKNKRRVDREPIVFQNAFEAIVTQELWDKCRELDELAIGHGKHTVRGTMHVLSGLMFCADCGGKMKLGQQDLRPSKKHPEKRIRYHYICGNHSRFGKYYCFNHYIRREVIEELVLSDIRAKADFVMRNEKQARDEFLKRKEQATIAEVNADKKALKTKQRRYSELEKLILSVYEDKVSQKIPEEICVKLLANYTEEQNRLKTEIDEIEGKLSALVKNETDVEEFIRRIKQYIDVRELTREMCMQLIEGITIGAAPGDKTGAREVHIYYKLLGKNCEPEKTLSI

SEQ ID NO: 5300 - protein, 564 aa, unidentified
  source 1..564: note = uncultivated organism
MKNIQNQELYVIYSRKSKFTGKGESIETQIDLCKKYLVNKYGNVEEKIQIFQDEGFTGYNTNRPQFQKMMQFIKENKVKCVIVYKLDRISRNVSDFCNLKNEFAKYNVSFISVTENFDTTTPLGSAMIMISSVFSQLERDTIAERIRDNMYELAKTGRWLGGTTPFGYKSKKTENLLLDGKRKSLYKLDIIPEEARIVKLIWNKMLELKGLSKLESYLLQQGIKTRNGNIFTRFSLVTILKNPVYVIADEKIKLFFNTMKVNVYGIDKTKITNNYGLIAYNKREEIQGKTKSYKNISEWIIAVGKHHGIISSDKFIEVWNIIENNKNKRLRTPQINKSILSGIIKCKYCGSYMRPRLRTSMASNGKKNFSYLCELKDKSRKKLCKCKNINGIEVDKLVFEKIKSLTLPTSCLVEQIKLSINNRQKYENNNKNELSTLNVSMAKNKAKIKSLLNKISIIDVDLVNDIVLQIKELKHKNIKINARIAELTKKMNQEICKEEILSIALNIIDKYLYSFDTLDITEKRIMIKSLVDSIESDGENVYINYIGSFNTTVCPRGDGSRSCS

SEQ ID NO: 5301 - protein, 555 aa, unidentified
  source 1..555: note = uncultivated organism
MTTTTKRAGIVARVSLDRDGESESPDQQLGDGHGLADQRGWQVVQTYVERDVSGYKRDVKRPQYDRLVRDMKAGKLDVVVVWAIDRLTRQGVIGISKFMDVMEQTGVELVSVTQPFLDTTTPLGRGVLALIASLAEQESANISARVKRSHRYQAANGKRHTGGWRTFGYSCPGVDPEGCTVEGCPHDGESVIEAEAVIIKEAAQRVLGGESLWSICTDLNARGVKTTAVGKVRRVRDAPPDPVTGEYPSYTVTGEWQSRTLSALLRNPVLAGVVQHNGDRHPGTWEAVISENEHDAVVQALTTRPATRKLGDRHLLTGLVRCGLCDNPLKYMVMKNNTNGTKFPRYQCVKQPGHQHCGGIAVTMRSTDEHVARELVDFLAAVRLRPLDHEDDVGDLERQLTDAQERLTALVQARFVHGTLSADDYETARVHLQELIETTELRLTAARKSQDAQAAGLPLGDRAALAAWWEAADVEDRRTALRQAFSRVTIHPAQRRGGNKFDASRVDIRWNWDRFIRRAERATPTEADEAADRDERFIEGIYAEGVEQLEAERAG

SEQ ID NO: 5302 - protein, 530 aa, unidentified
  source 1..530: note = uncultivated organism
MKIAAIYSRKSKFTGKGESIVNQIELCKRECSHLNIEQFIIYEDEGFSGKNIKRPQFQKMLNDARQNKFHVLICYRLDRISRNISDFTCLINELDSLHISFISVNEQFDTSTPMGRAMMYIASVFAQLERETIGERVRDNMLELAKSGRWLGGQTPLGYSSKKLSYLDAQFKEKTMYALSPIKKELDVVKLIYDKYLQYKSISQVFIYIFQKNIKTKNGVDFNKKRIQLILRNPLYVRADEVVMNHLKFIGMNVMGKANGKHGILTYNKSKGARIKRDITQWIAAVSTHEGIIDAPTWLKIQEILDINKNKAPRLGTSATALLTGTLKCSKCGKSMIVKHGHISALTNKKIQYYVCSTKDYSKGVRCNNPNIRVDELEDVVIDNLKSIHLSKDILLEELCKIKSEKSNNNLMLSDIESLPTEIIIKQSQIDVLINQLSLDNDISKYIKPQISKLGGELEILNIKYENIKAISSKNNNSQIMKFTHSLNTFPAMMNSLDFNNKRLLINAVVESIYWDGVKGIVKINRVTLK

SEQ ID NO: 5303 - protein, 501 aa, unidentified
  source 1..501: note = uncultivated organism
MQMTVIEPTIAPKMKRKIRVGAYCRVSTDHNDQKHSFHAQKMHFTMLYAHSADYELVDIYADMGISGTKAVIRPEFQRMLDDARCGKLDRVVCKSISRFARNTKDCLTALRELKRLGVTVAFEKEGIDTARVSDEIMITIMEGLAQEESASISRNVRWSIRRRMANGTFRVARVPYGYVKNEKRELVIDPEKAAVIRRIYELYLSGSGARKIAVLLNSENLPSPTGKQWNNVTVKKILKQEKYIGDIRWQKTYSIFMGDRDCINNGDVDSFYIENAHPAIIDRETFYLAQQVRETAAEKAKPKGLTLTDSLFRGKLRCTCGRSYYRVGAKRDYWQCIGRTMMGGNCKNFIFYHDELISAWSRMCMKLRSHADEILTPILIQLDMMEKAVQGTEIAQLQEQADDIRQRRYMLCKLCTEGCIDREKLMASEHELDAELDEIMNRIEKISSYADDTAGQVETVYRAVSTIAPERLVDMILDYAEIDGRKISFHLIGGLVFREVL

SEQ ID NO: 5304 - protein, 510 aa, unidentified
  source 1..510: note = uncultivated organism
MAQVQRIDPIIVQDEKETVAAYCRVSTDSKDQLNSYQTQIAYYTQLIAENPNWELADIYADAGITGTSIEKRDEFKRMLADCRAGKIKRVLVKSVSRFARNTLELLETTRELRELGVVVVFEEQGIDTSQMLGEMQLTMFALAAQEESTSISKNMRWSYQKRMESGQFVGTRAPYGYRLKDGSLEIVPSEAKTVRAVFESYLSGMGINRIVDLLKSGEIATPNKNVWTYSAVKYMLTNERYIGDALLQKSCTVDSLGHIRKKNNGIQPRFYLNSRHEPIIQVETFRRVQKLIAKKSKYQGLEKHSFTNKIVCPDCGKHFRRMNCSGKYYWICYSRASRPSDCTPYRFSELSLVIMTLNLLGRLYLNQDEIILSALTLIHEIEYTQVGSDSKLYELDKSIADLNDKALVLQRLQNKGFITAEEFRARSDSLAAQRMKLTAERKRKLSGSKAHEMIEKIEELQATLASWPGVPTEFDIDVFDEIVEKIIPSEDGTLRFRLRCGLEIKEVMPT

SEQ ID NO: 5305 - protein, 536 aa, unidentified
  source 1..536: note = uncultivated organism
MDKNTDKEKPVIKCAIYTRVSTTEGLEQEFTSLDNQRESGESYIQSQKSEGWIILPERYDDGGFTGANTDRPALQKLIDDIKAHRINCVVVYKVDRLSRSLLDFSQLLESFDQNSVTFVSVTQHFNTQNSMGRLTLNILLSFAQFEREIISERTRDKMGAARKKGKYVGGCVPLGYDLDKINHKLIINPEEAKIVRELFDLYLKERSLLEVAKIANSKGYRTKARNITGGKQHGCVKFSSTGIEKILLNAYYAGKVKYQDVLYPGEHERILDDETFMKVQDAIHTNPLKFGTRRPIGKNIGLLSRLLRCRTCNSSMYLTHNIKYGKLRYFHYVCLNAQKRGYQECPTRLVNAGLMEAKVMEYLRKLTDDQRLKPESWEAYTLDQKRTALKDIVKEIKYDGGTAILEIILNSTQKSHKFNVSKAELKYHAITPKDRLIQSEPQLRQNLLLAHQIQELIDKNKTRDIKEVSGWLNLSQQRMNQIMSFLFLSPRIQEAIVLQNDPCLFEIPEYKLRTITDELDWDKQYTMWQKLTQKTS

SEQ ID NO: 5306 - protein, 569 aa, unidentified
  source 1..569: note = uncultivated organism
MRIATYTRISTDEEHQPHSLGAQADRLAAYCASQEDWQIVCRFEDQITGTLLERPGLSQALAAAHSGRFDLLLVYRVDRLARSVRTLAEILSELDRAGVGFRSATEPFDTTTAAGRMMVQMLGVFAEFERATIIDRVVAGMEKKARRGGWVPGIPPIGYRIGEDGFLEPSEPQASLVRRIFSLYIEKRLGTRALANLLNEEGERTQAGKLWSNASVQGVLQNPVYIGQIRWRKDTFAAPHTPLVEVATFEAARALIAERSLNRSKRRSNSSDYLLSGKVRCGHCGSAMVGSSAHGRSGRYRYYTCYKRHRYGKSEGCEAERIPADALEEQLLTLIVRKLGDTGFLERAVARAAELADDERPRRLGELQTLQRTLGERGQVRERYLAAFERGALSDKDCGTRLRALSEEIAQLDARRKELEQQLAATAPAELDVNALEELASLLANGLPTSAPSERKHVLGQLVESIEIRGRDWIKPTLRLPAVRIVGEEVERTGIEPVPLASLAGRWPCEPGEGSVHNTNSERIVRSATRGGGGAGLRPAGAAAGQWREMERTGIEPVTSGLQSRRSPS

SEQ ID NO: 5307 - protein, 530 aa, unidentified
  source 1..530: note = uncultivated organism
MNRAVIYARFSSHSQTEQSIEGQLRECYEYAKRQNIMIVGEYVDRALTGTTDKRPNFLKMIEDSKKKTFDFVLVYQLDRFARNRYDSANYKAKLKKNGVRVLSAKENISNDASGILIEGVLESMAEYYSAELSQKVKRGIRESLTKGYFIGGYGLFGYDVVDKRWVINAVEADIVRDVFNRYKNGEKLNDIINRLNRDGIKTKAGSEFNMNSVARIIRNEKYIGIVRSNDNVYTNVVPAIVDERLFRECNEMMDEHKHKQRECKAEKPYILSGKLFCGYCGGMMTAEAGTSKTGKVHHYYKCFNRKKNPSACGKKNYKQKDLEDLVFDTTVDYILKPKGIDRIAQIVVERFNAEITKPANLVNLENELKSKEKAINGLLSAMEQGVVTNTTKDRMLALEAQKEELESKIALEKTRQTEPLSLETVKAFLYYFANKKYETDEARNEFFNSFINRVILYDDRVLIFYNTDPNSPTTIDTTENKTICDQFNQNNAKENSLEPSGFKRVSLGGAGGIRTHVTVARQTHFECAPL

SEQ ID NO: 5308 - protein, 610 aa, unidentified
  source 1..610: note = uncultivated organism
MVERANPKAFRCAIYTRKSSEEGLEQDFNSLQAQREACEAYIASQKHEGWKALPKPYDDGGYSGGSIERPALKQLLDDIKARRVDTVVVYKVDRLTRSLADFAKIVEIFDAQGVSFVSVTQQFNTTTSMGRLTLNVLLSFAQFEREVTGERIRDKFAASKKKGMWMGGFVPLGYRAKERTLVIHEAEAKIIRTIFLLYRETGSVFKVEAELDKCKIIRPLSKAMTSGRTYGDRPFTRTEIYRLLANPIYVGEIHHRGQHYEGQHPPIIDRRLWTGVREKLAANAPRRRIQRTAKGQNLLTGLIFDEQGNRFTPTHAIKNGKRYRYYFQQRAKHSKSEHSKSGQRPWRIAAIEIEKIIVEQLANHLEDRHWLLKHCISANADIANRKAAFEKGKHLAGQLRSTDSLAVRELLSAILVRTTLTETEVLLDIDRSRLNAAFERSSGLDAHFHTGNNEQTVSDNRKTASVRDTIPVTFAIERRRRGGETKLLILAPGNDPAKNDPDPTLAKLIAQAHQWWSDLSSARFATVRALADAYRKDERHVARVLTYALLAPSLIDEILEGRQAVGLTTQQLMDLQDLPHQWSRQVSVLRGNASVFKTGGSVENRQSCNL

SEQ ID NO: 5309 - protein, 551 aa, unidentified
  source 1..551: note = uncultivated organism
MSRTVAIYARVSTEHEAQLSALENQVQYYDDILKKHPDWILYDRYIDEGITGTSIKKRKNFMRMIEDAKNKCFDLIITREVSRFARNTVDTLQETRRLKKLGVEVYFTEDNIWTFNDEDGELKLTIMATLAQNESKKTSQRVKAGQKISFQNGVFYGTGNILGYDKIGKEMIINEEQANIVKFIYSSFLSGNGTTKIKYELEKRGYLTATGLKIWSASNITRILHNPFYCGTIIYRKSFIPDFLEQKPKKNKGEVEKVVVEGTHQPIISKEDFNKVQQIFGERASKIEKDKSVGYGIPKNIWSKKLMCSCGSTFNRRTYHKKNDESITYCYHCYRQKNLGSSKTREKKGLPIDGTCDVSLIQEWKLNVMARALFEVIYTDKEQIINVINELIDNTINENNNYEEIQSKINSYLKKIEKEKNKIDKLLEMYLSDMIEKENYIKKKKELEELIKDQNIAIDELRQKQDISTETVADRIKNLKKNVLDNIRFDNENTISELVDSYIEKITIYNDRSEWILNYIDGIINLDIKGQERSSKKELYMTPLRKAFRSA

SEQ ID NO: 5310 - protein, 552 aa, unidentified
  source 1..552: note = uncultivated organism
MGRTDQVAVGYYRYSSEAQRDSTSIDVQREQCERAAGQRLLSFVDEARTGRSLAGRENLHRLLADASAGKVSHVYVYRYDRLGRNESDTFSVVEDLEGAGVEVISATEGRDSLTRGVMLVMSAHYSRELAVKTRNGLIKRHEQGACTGGRPPYGFQVVDSDGRKVLAVDPSEAVVVTEIFNAYSGHDPMGFKAIAKSLNDRGIPTRSMVAERQGKAKTIRRIGRLRLGTPWTKSSIRSILENPIYTGLVVYNKRRMKLDRKTGHRVPVLNDPASLRSYRSDALRLVADSQFETVQCKLKQRKRVTSGNARSADLIRTFTGHLFCETCGSTFYSRKSANTKGTYVYYQCGCRQRRGPDACSNSTSLREDRLLASLQGVCTAVFDDIDGMVEQALLLAREAADDNRQEADRIRVELSAVDRELCTVSNLLVDTEVLAVPLAKKAILRKAADLEARRDGLQNRLSSLLDKANDNTDRLVSIIRQKFEEARSAWESVASPAQLNMMIGQIVGPSIVTTDGRLLPVPEKPEATGLAVASGVHGAIAGGGFEPPTSGL

SEQ ID NO: 5311 - protein, 557 aa, unidentified
  source 1..557: note = uncultivated organism
MQEYYAIYSRKSKFTGKGESIENQIELCKNQIINKYGSDVADKILIYQDEGFTGYNTNRPEFKKMMNDIRDKKIKTVVVYRLDRISRNVSDFCDLKDEFNKYNVGFMSVTENFDTTSPMGTAMLMITSVFAQLERDTIAERIRDNMYELAKTGRWLGGTTPLGYKSERVENVSIDGKKRSLYKLVTIPDEVKIVKLLWDKMLELKGLGKLESYLLGQGIKTRNNNNFTRFSLINILKNPVYVVADKNVKDFFESMGATIYGSDLDFDGKHGLIAYNKRLEVPGKTKSLKDISEWIIAVGKHDGVISSDKFIETWNLIHKNRDKRFRTPPANTSILSGIIRCKHCGSYMRPRMRQTINANGERNFTYLCELKDKSRKQLCQCKNISGIETDKIVIEKIKELTMPTSLFMVKLKEIADGREKETTKRENELSNLNMTLSKNKIKLDGLIDKLAIAPKEIIPDIAREIKNLKIKNNELENKIVNLKISVEEKINQEETAKLAIDVINRYMDSFDTLDLVSKRTLVKLLVNSVETDGENLYINFIGSNENCPWSDGSRSCS

SEQ ID NO: 5312 - protein, 533 aa, unidentified
  source 1..533: note = uncultivated organism
MSRPRLRCALYTRKSSDEGLDQAFNSLDAQREACVAYVASQSGEGWRALPDCYDDGGVSGGTMERPALQRLLQDIERGRIDVVVVYKIDRLTRALADFARMVEIFDRHDVSFVSVTQAFNTTSSMGRLTLNVLLSFAQFEREVTGERIRDKIAASKAKGMWMGGIPPLGYDPPVDSGRKLVINPEEAEIVRTIFSTYLDLGSVHALERWLDQRAIRSKPRLRRDRTPAGGQPFSRGALFHLLKNPIYLGLISHKGTLHEGLHAPIIAADLFEAVQVRLSSQRRRGKSRNKGSLAAPLTGRIFDATGAPMSPTFSIGRNGRRYRYYVTAALQQGKRKPSDDGVVRRVPAALIEAVVTARLRLISGVDPTQPLSVLQRVTVEPQALVLAIPVLLADAARATLVSGERIDDDQCDSGDLSLRIPFTLAPRSADPAIAAADRPGPRPDATLIRALRRAHSMLERDQHGQPTLTASPTSPHRRRLIRLAFLAPDIQAAILSGRQPRHLTLASLLAADIPIEWHALAKTFGVKPGTHDH

SEQ ID NO: 5313 - protein, 527 aa, unidentified
  source 1..527: note = uncultivated organism
MPQITVIPATVNLHTHLPKYEKRKRRVAAYARVSTEQDEQTSSYEAQVDYYTKHIKENAEWEFVNVYTDEGISGTNTKKRKGFNDMVEDALAGKIDLILTKSVSRFARNTVDSLVTIRKLKEAGCEVFFEKENIYTFDGKGEVMLTIMSSFAQEESRSISENVTWGKRKSAADGKVYVGYSHFLGYDKGPEKGGPMQVNPDQAEIVKRIYRDFMGGKTPFTIASELTAEGVATPAGKKKWRTTTVENILSNEKYKGCAILQKTYTVDFLSKTIKKNEGEVPQYYVEDSHEAIIQPDEWEEVQIEIARRKALGRHYSGNSLFASRLICGDCGGYFGPKVWNSNNPLYRRTIWQCNDKFKGEKKCGTPHLTEEAVKEKFVAAFNEIFDIKDELLANLYEIRDRYANVAAIEEEQSAVLGEIDVVTELTRRAVEENARKEQDQTAFNLKYAGFERRFEELKRRYEELAEKKESLLVKGRIIDSFISALKRRERPLDEFDERLWQITVDTAEVRRNGAIVFTFADGTKIEK

SEQ ID NO: 5314 - protein, 527 aa, unidentified
  source 1..527: note = uncultivated organism
MKRLRCAIYTRKSTDEGLDQSFNSLDAQREACAAFILSQAGEGWSPLKEIYDDGGFSGGTMERPALKRLLAEVEAGRVDVIVVYKVDRLTRSLADFARIVEILDRAGASFVSVTQAFNTTTSMGRLTLNVLLSFAQFEREVTGERIRDKIAASKARGMWMGGNPPLGYDVRDRALHVNAAEAETVRAIFQRYRKSQSVYALRDALDRDGIRSKLWVSRAGRTIGGAALTHGALYHILSSRLYIGEIVHRGKVYRGQHGAIIDADTFEAVQCKLADGAPAMPSTTTKGHRLSLLGRLFDDAGHPMTHAHANKRGRRYHYYVSTAVNARKPAGSLARVSAPGLETAIRELVSPLLSAEWRPHARDRVLPALQRIVLSKGHVKLDLDPRAVSEALDPTSALTVTRDADVCQIEAPLALGSMRGAKDVIAAGGASTPSRIDRALVRAVVLARRWADELAEGDPPSIQALADREDACPMYTGKLLPLAFLAPDLVEAILDGRQPSRMTLAGLIEATLPLGWADQRAFFSQFR

SEQ ID NO: 5315 - protein, 550 aa, unidentified
  source 1..550: note = uncultivated organism
METEIKNITKLVSIYARVSTGRQENEKTIETQLMAVNEFIKKNNYTFVQEYKDDGWSGDNLVRPDLDRLRVDANKKRWEAVVIYDPDRLARRGAWQEVVIEELKEKGIDVLFTTIPPPKNDEEMIMYKMRGVFTEYERMKIKERFRLGKIRKAREGHIVGNEPPYGYIYIPEKKNEHGDREHGYYVINETEANVVRMIFSWVANEKLTMRSVVRRLCELGIKPRESKKGTWNTSTLSTMLKRKTYIGEGHYLRSYAVIPENPFKKEIYKKIKKSSRKLRPETEWIKIPTPVIIDKELFEKASKIIKENYALCQRNRRNEYLLAGKIYCTCGRRRAGEGPQRGKHLYYRCTDRVYSFPLPRKCYEGGIEARSLDKLIWENIVKLMTSPELIEKEAEKWITNKNDVTKIVDISADQINKEIEKLKKEESRYVMAYGAEAISLDQLKERTAEIKERISSLRGQILYLDQQEKRLKEVSLPSRDYLKDLCQEAKNMLKCLNLGFEIKQKIIRELVDKVMGNQKEVSVEGYLPIDQNYYVEYKTINRNRRLAKCG

SEQ ID NO: 5316 - protein, 515 aa, unidentified
  source 1..515: note = uncultivated organism
MKNTVAIYCRLSEEDKNKKNRLDDSGSIQNQKLMLTEYAEKQGWEIYGIYSDDDYTGSDRNRPDFNRMISDARAKRFNIVLCKTLSRFTRELEVVEIYIHNLFPLLGIRFVSIVDNIDTDIAGNKKSRQINGLINEWYLEDMSESIKAALKTRMKAGYFIGSFAPYGYKKDPEIKGHLVIDNETAQTVRDIFDMYINGVGRSGIAKTLNEKCIPSPSEYYRINGIRKNILSERNGRYWNYNTVSHILENEVYIGNLVQGRTFNPTYKSRHSISAEKDNWIRCENTHEPIIDKETWELARKIWNSRSKPCYKGSINKFAGVLYCAKCGYGMGVAYNRHKRYYRCNGAKYGRVCCEGTNVFESTLEKSILDEIHKIKEKYLCRDIINRAAVTDIVKIRTKDLEKRKRKLLRNSEELSNTLKSLYIDKMNGIISISQFIELSKGFEKERDELNRKISDADSDIENESKQTCDEESRRKDAEKIISFDDISRELVSTFIDRINVGGNRENRTIDILWKF

SEQ ID NO: 5317 - protein, 533 aa, unidentified
  source 1..533: note = uncultivated organism
MNLNERGIYTAACYCRLSRDDEQDGTSVSIETQKKVLEDYCLSNGYSVFDFYCDDGYTGTNFERPSFSRMMSDVKTGNINMVVVKDLSRLGRNYIETGRLIEETFPESGVRFIAIGDDVDTSRENLDLDLMLPMKNIFNQYYPADCSRKTRQALKTKAMRGEYIGSYAPYGYRKSEEDKHVLEIDEQKAPIIIRMFEMAAYEGYGYNKIARILSEQKVITPSAYQAEISGRRFEKDPYDWNLATVHKMMENQTYLGHTINGRKRKISFKSKRMLKQPEEKWIVVENTHPPIISEQLWDDAHKRLSSRKRVNKLGDTHIFAGLVKCDKCGYALSYSNQKNHSEYFCCNTYKKKGKDVCSIHYIPYADLYDIVLADIRSHILKVQRNQETFTKSVLKKLGNSSEKNKEHLKNEIAAAEKRIRELNDRFDKLYEDRLDGIISDSKFKELSSRCEDEQIKIKVRLSELNEQAGQQIENENNVSKFIQEINRFSDVNELDKEILNRLIDKIVVSDRVKENGTQMQQIRIIYKFLGDLN

SEQ ID NO: 5318 - protein, 630 aa, unidentified
  source 1..630: note = uncultivated organism
MANKTTAADDKKAKRIAIYTRKSNDDNLATNVTSLDAQKSCCRSYISIQRGNNWEEIPEVFDDPAESGRSLKRPAMQRLLKRVEEGAIDGVIVYKLDRLTRNSRDFHYLLELFENHNVAFISATESIDTKSPQGRLMTAIMVQFAQYDREMDQERSKDFHLARAKKGLWCGGISPLGYDSKEKLLVVNEKEADLVRRIFEYYVKSQSAIRVAQDLNRLGCHRKLWKNKEGKMFGGQPFDMDSIIRILQRKVYIGIIKNGRTGQEFPGQQKPIIAPDVFEKVQKMLVGHNHRGGEIHYATNKYGFLLKGLVRCGECGSPVSPMIRPKRKKIYKYYKCLAQDKGLPVGCSIKSIGAKKLEEFVIEKMAALGWDRPFLEKVVRIATKKATESLTPLEKERCQMLEQIEDIRKQSKQLVNTVKAGGDSLEIAEEIRSLENSKKDLEVRVAGIEAQVSHRKQVVYDLDVVQGVFKRFALFIHRLPVELQVQIIKLMVERVTIGKGNITVKLYELPVAVLKKSLDKKGVCFGGYRQGERQGPNTTGNAKTAKSPQSGTGTAVVELEAKWRLRRDRIKTDFDDFQPGLSGFPAKSAPKAPYIPAFDLSWQVMWVPIRNGERVIYEIPPGYKIKSQPA

SEQ ID NO: 5319 - protein, 569 aa, unidentified
  source 1..569: note = uncultivated organism
MVWPALLRIKGIIMTRPERRTIRCAIYTRKSSDEGLDQAFNSLDAQREACESYISSQRHEGWKLIPAHYDDGGLSGGNLERPALQRLLEDIADGKVDLVVVYKIDRLTRSLADFARLVDRFDAADCSFVSVTQSFNTSTSMGRLTLNVLLSFAQFEREVTAERIRDKITASKKKGYWMGGLLPLGYDRHPDPKMQTLVINEVEAETVREIFLLYDQHGCLRQVEQEVIRRGYRSKRRTLSDGRVTGSKPLSRGQINFILRNPVYIGRIRHKQESHGGLHDAIVDHDLWDRVQEQLDRKSPKKARGPSKSGALLTGRIFDETGDFLTPSHSQKGSRRYRYYVSGRLLAGSPADASGWRLPAKQLEDAVSEAVFRHIDGDLSRILSNPTPSLFESLKSNLGRFSRNMAADLVERVDVSARQLDIALSANAIAEWLGVSEDEIDCTWLRLEAPFGIRRRGKESRLVFGTIHTAPDPKLIRMIALAHSWLEEIKSGTLMKDVAARYGWQTLMVRQRIQLAFLSPAIVDAILEGKQPEGLTLTQLVTSDIPLDWDEQWAALGFDALPDTGAPVP

SEQ ID NO: 5320 - protein, 772 aa, unidentified
  source 1..772: note = uncultivated organism
MATKRQTATRRRDAITPETPMRVAVYTRRSTDDEHQPYTIEAQTEKLTAYVNSQPGWQITATFTDDASGATLDRPGLTKALAAARAAKYDLLLVYRLDRFSRRIRDLATLMDELEDIGVHFRSATEPFDTSSAAGRLFVQMLGAFAEFEREVIIDRVISGMERKAANGQWTHGPRPYGYLVDPSTHRLVPHPDEQHVVREIFTRYAATRAGTRAIADQLNAHGKRTRNSKPWSGHTIGRMLANRLYLGEVGFRDVTVHDAHPPLVDADLFERCQRILAVRGEIGSQRAASNSDYHLTGRITCPNCGHKYVGTSATGKLRRYRYYTCFSRTRYGRAGCAASRIDADLIDTAIMDALIDFYSRTDLITAAIAAEQTLRATGAQQHTAELNTVTGQITTTEAAIDRYLTAFENGTLDERTCGSRIRDLTTKLDQLRVRRDDLAELVHAEPIPPSLSAIEQLRRDLAHVLANGTPGQRKAIIETHIAEIKIEGTNLIPIFMIPTDDEGPTETSADPSTTTFRTLLRVVELRGLEPLTPTLPVWCATSCATAPCPAEPNGLLKCTQSPRVPVTRYPGASVQGGIGRERGHRRHQPALAAQHHLPQVVRLRHERVARERVQDEPGTLVYLGLQLLGVPPGIAGEDAEAVQFTGERFGVAGEVDGADDAFHATEAVRIRTGAGAGQADGGLGLHRAALEHHGRLRGQGIPAGQHLADRHLGGAVQHHAEGTGFLVRDQQHHSPLEVRVLQRRRRDEESSRESISRHARDHAQTRGSSGR

SEQ ID NO: 5321 - protein, 1182 aa, unidentified
  source 1..1182: note = uncultivated organism
MDEKTLWVQTLWNPLNELKKSPLESKEQGIRVAAYCRVSSDRNNFSSLINQVSYYTEYIKNRDNWKFAGIYYDIGKSGANIDKRPAIKRMIRHCKEGRIDLILAKSISRFSRNIKDLIYIIEELKRYEVAVYFEAENIDTSINYNRFLLEIYTAIYQEEIENHSQLTRMGYEKRFTKGVPTYGGGLLYGYDIDENNGDPIITVNEEEAKVIRWIYEMFIDGTNYAEIAKQLIRSGVNTKTGKQIWTGKQVKNILTSLIYTGNKIARTTTKDLFTNEITKGLRDEFLFENSHPAIISKATFDRVQLRINKKSTENKSYTIRPLTRRIICGYCNQKYTIKPPTTWRCRTTTISKEFCKAEALNDKKIISMVLQALEIKLEELDLQKLLKVLEKVNQNDHFEFHRLSRLTEIEIAYAENNEDKIKALIKKYKEFEAEIRKIEDDRIYRDLAIDWITNLNSVDEFIEEITIEHIRAWALELIVYTQEEYIVKWCDGTETVVGECNYDKKPFKIDPVKIPEYKFVEREVDKEVNAEVIKINPGDIIFNNIKKGLKGNEILLPTKKKKLRVAAYCRVSTLLEEQQSSLQSQIAYYTHKILRTKNWDYAGIFSDEGLSGTQMNNRTEFNKMIEKCKEGKIDLILVKSISRFSRNTVEALETTRMLKALPNPCYCFFEKESILTSDSKADFLLSLHASLGQEEISNLSHNIKWGISKMAERGFIHMGTDIYGYTIDKKRNWTVVEEEAEVIRLIAKELLEGKSISEIIKNLYKKGIKSPSGKDYWDDSHIREMLRNEKYKGDYLFQKTFTPEVIGAIPRVNRGEATQYYIENHHPAIIVPEEWDLIQEEMSKRTKAPVIDPKPSRTAGRASFYQRLFCRDCGAVLSRYRSRGRTREGSDWRCYNTYGKAHKTCNNRGFRQEYIEYNFMKTICEKEEIKKLVEKGTKRLKLTSKDELKVEELNERIEALNQQLYEVVDEELSKSGQDIKRINCLTEEIVKYKNELKIFEDRAEKIKSNKRELKNLLKYKLKPMGFREFHNMDVRINPGDSLYDTTKNAEDITYIKEDKDNFREDIFEKYVVKGEIDGKGYITYTFIFGIEFGIKMTYEEYLEELEKTKADINFEELLISREVQQLTSFCKEAKTPKEMREYLNISSRVSFDKRILKPLYSAGKFGLIRGKCAYDWRYYWTD

SEQ ID NO: 5322 - protein, 504 aa, unidentified
  source 1..504: note = uncultivated organism
MRAAVYLRISQDPDGTGLAIDRQREDCMAIVKANGWTLVDEPPYEDTESASDARKERPHYNRLTADYDAGKFGALVCYDLDRLTRQPRQLEDWIDRAEQRGLVIVTANGEADLRTDGGRMYARVKAAVAKAEVERKSQRQIRAHVQRSSLGKPPKGVRPLGYDLDGGTIEHERDAVKAIYKAFMADYSIRAIARALSGQTGPDVAAGVPHVQAHTLTLAIERNARRVTKGLPARDLPETRGWHSSTVLGILRNPRYAGYSVYTSKTELARGERRRVWRDSIVRDPETNEPVMGRWEAFIDPDEWERVQTILDNPGRKTNKEGTERKHLGSGIYVCGLCGATMTSASRGYRCRRGCFNRTGKPIDQLVRATIADVLADPELHEKVVPDNGPRLQLVAADIAKAEHRIARAQRDYDEEFIEGVDLKRVRAEQNAIIAELIEERTRLLAPTGLASLLADGNASERFLKAGLGAQRATIELLAKITVFPSQQGRKGFDPASVDIEPRF

SEQ ID NO: 5323 - protein, 550 aa, unidentified
  source 1..550: note = uncultivated organism
MTTPTLRAAIYCRKSSEEGLEQDFNSLDAQREACEAYIASQRHQGWRLIATPFDDWGYSGGTLERPALQQLLSQIKDRRVDVIVVYKVDRLTRSLADFAKLVEVFDAQGVSFVSVTQQFNTTSSMGRLTLNVLLSFAQFEREVTGERIRDKIAASKRKGMWMGGKVPLGYRVEDRRLMICEAEAVTVRRLFALYLQHGCMRALQAAALQEGLTTRTGQGFFRGNLYHLLQNPLYRGQVRHRQAVYPGQHAAIIDEGLWAAVQARLAENRIDRNEQRGAKDPSLLAGRLYGAAGEPFTPSHAVKNGKRYRYYIQRHDTPASPHRRRRRQRLPAAEIETLVKAAILRLLRSQPDVWSAVCLQEPSTEAAQQLRERAAALADGLANGADQHGALRALLHRVQIGTDAVKVELQVNALRLAFDLPPLVQKDAPIHILTIPAQLRRRGVETKFVIEGPASARTPQPDPSLIKTIVRAHEWWHRWRTGQGETLASIAKSEGVKDRYVARVIALAFLAPDLTTQILDGQHSPALSTDALLKYWLLPPAWPDQRRLLG

SEQ ID NO: 5324 - protein, 519 aa, unidentified
  source 1..519: note = uncultivated organism
MKKVTKIEENCNLQSTRPKLRVAAYCRVSTDSDAQLESLEAQKQHYENYITSHNNWTFAGLYFDEGISGTKKEKRPELNKLIQDCKNGKIDFIITKSISRFARNTTDCLDMVRTLLDLQIPIFFEKENINTVSMESELFLAILSSMAEGESHSISENNKWGIQKRFKDGTFKISYPPYGYDWNGTEMVVNPSQAIIVKRIFAETLAGKGSQTIANELNAEHVPTKKGGRWTGTSIRGMLINEKYIGDVIFQKTYTDYHFNRHVNYGDKDQYMIMDHHEAIISREDFDAVANIIAQHATEKGIQKGQAKYQNRYCFSGNIICSECGNTFKRRVHTCKDHKYVAWCCNTHLTDKASCSMLYIRDDDLKIAFLTMMNKLIYGHKQILRPLLTHLRNTNNGKSSEREQALQTLLLQNTEQRETLTKLMAQGYIDQVLFNKENNELLTLADNYKAELDTIQKSCYLDSEIATAVSELLRFAERSKVLTTFDESIFDAHVNNIIVYSRNEIGFELKCGLTLKERI

SEQ ID NO: 5325 - protein, 535 aa, unidentified
  source 1..535: note = uncultivated organism
MQKLNRTGLYLRLSRDDEKNGESMSIENQRMILRKFVTENGGTVADEYVDDGWSGTDFERPGVKRLLQDAKDGKLDTVVAKDLSRFGRNYIQVGQYIDYIFPAYGIRFIALSDNVDTAERGSSGMDMMPIMNVFNEWHAANTSKKIRAVLEAKWQAGRYTNWAYPYGYKAGTDENRTAIIDEEAANVVRRIYDMRLQGNSVRTIARALTDDGIPNPSAHYTRLDGKKSDRRGSPYWSPKTVAGILKDRTYIGTLTQHRTARFSYKNHKAVNVPECGQFVKENAHEAIIDRSVWEKVQAINGRTARGKADKANRVHALSGLLVCADCGKKLKGKSGGNGKPYSYCCRTYADLGKKYCSAHSVAEKQLENLVLQDIRSMLGDVEIDEKKTKEYFLRERAKNGENNRLSAEKKLRALSNRLTELDKLIRSAFEGKVLGNLPDSVCINLCEKYQLEKEGAERQIAELERQLAETECTDAEAEKYITLLKRYAKCEELTREMCLRLVALITIGEKPQDGGARQIHIYYKVLPEREDAGRN

SEQ ID NO: 5326 - protein, 515 aa, unidentified
  source 1..515: note = uncultivated organism
MDFNSLDAQREACAAYILSQAGEGWQQVDELYDDGGWSGGSMIRPALKQLLDDIQAGKVDIVVVYKVDRLTRSLADFAKIVEILDAKGASFVSVTQAFNTTNSMGRLTLNVLLSFAQFEREVTGERIRDKIAASKRKGMWMGGTVPHGYRVEDRKLLIEPQEAEEVRYIFNRYLELKSVPALADHLVRQGMRTRTRTLKVGRTIGNVSFGKGPLGFLLKNPVFIGKIKHKDAVYDGEHDPIIDHDTFERVQATLASNTRDKLISKHAKSPSLLAGLVTDPDGRPMSPSRGKKGSKQYCYYVTRFKPGEDRSTICRLPAGALDQIVVKTLKAYLSKPTEPDASTCKVEWQANCQTEAALADSLDHTTTSELRAILIDRLVKVNVAADRIDVMIGDEDAVTMATPAQLVRRGNELRIALPPDSESATDKNTDAALVRLVVQGFAAREHLLTGEEIPAVSRYEKRHLHRLARMSWLAPDIITAILDGRQPVQLTARHLMRCADIPMEWQQQRQFFGFT

SEQ ID NO: 5327 - protein, 557 aa, unidentified
  source 1..557: note = uncultivated organism
MEQENGAIYCRLSQDDGSAGESGSIQTQKTLLTQYCKEHGIHIADYYCDDGWSGTNFERPEFKRMINDIESGRINTVIVKDLSRFGREYAQMGLYIEHYFEQKGVRFIAVAEGVDSKNGLDNLMLPMTNVINSLYARQASTKTKAAHRARASSGMYMGSHAPFGYQKDPKDSHHLIVDPDAADVVKDIFQMFADGIGYVRMTKILRERKVLNPQAYFNQNNPDYYKNSDYWRKPFDWHATSVRVILNNPVYLGNVVFGRTKTKGFFDKQRIEADESEWIVKENTHEAIITRELWDTVHQMMKARRRENSTGTVQPFAGLVKCADCGSSLNVSYDKKKGRYNGFTCWVYKNYGKERCTSHAIGWVTLNQLVLEDIRRNAYEAKTAAGDYMQMLVDAKTEKQKTEIDRCKRELKKADKRIEELTKILNKLYEDVALEKISEERYQAMAPKYEQEQSELRGQRERLSAEIARNDEIYDNIQQFLPLIWKYTNVQELTPHILNELIEKIVVHEKEIGEDGVKTQQVDIYYKFIGCVNIRRAKADHAEIIKAEQGQADHRTA

SEQ ID NO: 5328 - protein, 597 aa, unidentified
  source 1..597: note = uncultivated organism
MELLLLGCRTTVNLKVRSDRMNNKHFLAAMYLRLSRDDESTRGGLDAGNGTDGEDKASKAGFLKAESNSIGNQRELIRAFIHEQQDIELFDIYVDDGFSGSNFDRPEFKRMIKDIEAGKVNCVIVKDLSRFGRDYIESGRYIQKIFPALSVRFIALTDHYDSFRADVGESGIILPVKNFINDSYCRDISIKVKSQFEVKRKNGQCIAPFAPYGYQKAEEDKHRLAIDEYAAEIVRKIFAWKIEGLALSAIAEKLNGMGILSPKEYKKFTGTNYKGGFSGAAAAHWSVPTIKRILTSEVYLGHMVQGKTEKINYKLKKSIKKPEMEWIRVKNTHEAIVSEDSFQVVQHLLKADGRVSPTSEKTSFFMGILFCGDCGEQMIRRTNRYKDRQKVYYICSTKNRGEGCSRHSIEEEKLKELVLEMVRKYANCFLEEKRIFEQALKMETNFESIVHYDSEITRLKEQQDKYYALCSSLYEDLRHGIITKEEFERLHCEFKRKAAEFEAAQKKQENMIKELFRSGVISAARLKTMQECSELKEIDRHTLCSMVKQIFVLESRRIEVEFRYVDQYRVMREVNKRVKEVESQKQMTDETSKGRSA

SEQ ID NO: 5329 - protein, 578 aa, unidentified
  source 1..578: note = uncultivated organism
MKTTRCAIYTRKSNEEGLDMAFNSLDAQREAGIDYIKSQKHEGWLLVEDEYNDGGFSGGTMKRPGLKQLLDDIDRGRIDVVVVYKVDRLSRSLSDFARMMDVFDEKQVSFVSVTQQFNTTTSMGRLTLNMLLSFAQFEREVSGERIRDKLAATKKKGYWVGGTPPLGYRLQSSEESKGLYIIPEQTDLVRTIFDRYIKLSSPVAVANELNEAGYTTKQWTSKKGIVHGGKRLSQKYIHGVLTNRIYIGKITHTRGDHTDIYDGLHESIIDQATWDTTQKLMTKQDRKSLHRWTHPHLLKGKLRTSDGFAMSPTSTHRPLTKKSETKQKRLVRYYISQKAIKHGFKNCPIKTINAVHLDELVRGLVLGHLKHNDLDRQSTEVRDRWIRKAIHEVTLAPDSITVQLDTKKIELLQRHSFRSLPNDIPSRPVCLRTPEVDDRGEHIELKLQLQIKKLDGRRLLLSPDGHDLIIPSTPEPRQHIVDAIGLAYRWHDGLIKSGLQIREYAIEHQLNRTRILNLLPLTLLSPNILRNALAGTLPSRITLGDLLTASKQLDWNRQADELGISTAMSQCISSQSAS

SEQ ID NO: 5330 - protein, 600 aa, unidentified
  source 1..600: note = uncultivated organism
MSERSMRCAVYTRKSSEEGLEQAFNSLDAQREAGLDYIKSQKHQGWIAVPGHYDDGGYSGGSMERPGLQKLLADIQSRRVDVVIVYKVDRLSRSLADFARLMQTFDEHQVSFVSVTQQFNTTSSMGRLTLNMLLSFAQFEREVTGERIRDKIAATKRKGIWIGGIPPIGYRLPREGDKGHALGDRTLRIVEPEAAIVRSIFDGYIETGSLVALAKRLDEAGHTTKRWSSAQGKPHGGRRLTTTQLYRILNNPIYLGKITHTRGDKTEVYDATHIPIVSRALWDKAHARMERIEFETRHRWTHTHLLKGKIRTCEDYAMSPGSVQKVAKGADAPAVAKLTRYYTSQKAIKQGYASCPVKSINARHLDDLVRAIVMDHMKDAHGVELRPQLPEKRDHWIRDSIHQVTLAPDRLTIEIERDCLRAVASEIKATKASTPHRRPPKRPKNVENGTSIDAKASVLMCSYKPEVDDSGPRTTLSIRIQMKRLDGRRVLVSPDGDDLLLKLSSEGVPIPKEHFVRAIGQAFLWLRDLSKSPISLAQYCRRQGLAYTRVDELLNLTNLSPKILHAALAGELQSAIRLDDLLAAAKNLDWTKQHELLGLA

SEQ ID NO: 5331 - protein, 508 aa, unidentified
  source 1..508: note = uncultivated organism
MDDNSRLERAKRPPRIAFYTRISTDEDHQKYSLEAQDERLRAFCQSQYGDDWRLFRVYRDTEGGTHMNRPDLEEMLYEAEAQSFDILLVFRVDRLSRKVRDLAQIVDDLTKHEVTFKSVTEPFDTGTAAGKMMLQMLGVFAEFEHATIVERTKVGMEKKAKGGSWVGGMVPYGYGLDPEKGLVICEEEAAIVRKMFKMYAFGREGALTITRKLNDAGGRKRSGKKWDKRVVLHILRNPLYIGKLRWQGVLHEGKHEPIVSQLLFDKAQQVMQERAEDSKGRQWHNADERLLTGVIKCARCHSHMFGGGGRKKGKYIPYYVCSKRFNDHECEQDYVRADALEATILQDIKTMFRDKHFMDRIWGEVNRRLGEERPDVEQETAKVKVQIARARASLDRYFAAFEARTMSPELCGKRVEEFNARMHELEAEKRHLEARRQRLELPALDHATLSGLVDNFENVIAEGTNPQRKHLVQRLVSKVLVHDKEKVEVWYKLPDSQGFENRNNWLPR

SEQ ID NO: 5332 - protein, 550 aa, unidentified
  source 1..550: note = uncultivated organism
MDKKKVAIYSRVSTVEQAEEGYSIDEQERLLREYCDKHDLEVYKAYSDRGISGKDIKHRPELKEMLKDSEENKFDMVLVWKINRLSRKLADVLKMVELFDKNNVTFKSYSEPFETNTPAGKMQFQMMALIGEFERGTIAQNVKMGMLARAREGKWCGNRVLGYDIVPVEGSLNKKRKETKLVINEKEAETVRLIFNEYSNGNGYKAVTNKLNKLGYKTKKGNNFSVGSIKDILTNPVYIGKIRYNVRQDWSEKRRKNINPNPIIVDGLHDAIISEELWDKVQKILESKKGKPARIYDGEYPLTGILRCPVCGAGMVIMRTTNKLKDGTKKRITYYACGNWKNKGTAVCNSNAIRVDKANEYVFGKIEELLSNEKMVKSIIENINNTRRNVEPNKKKLEKIDKDLSKLKSRKTKILEAYEDDLITKEELVERKSELDKNISALEEERQKLLITVTDENQIEISYDVIKEILQSFGRIMSNCTSREKQKMLLHMLVSEITIGKDREIDSIKLKINDGLIDYLSNEEEVPMKGASSFIMQHFRFGRMKLNLVI

SEQ ID NO: 5333 - protein, 544 aa, unidentified
  source 1..544: note = uncultivated organism
MRFFIYSRKSVYTGRGESVENQIELCRQYIAAKFSTAGDLTIYEDEGFSAKNTHRPQFQRMLGDLRREKPDFLVCYRLDRISRSVGDFAALIEELAGLGVAFLCIREEFDTSRPMGKAMMYIASVFAQLERETIAERVRDNMLLLARTGRWLGGTAPTGFFSQRQRELILEGKSKTVCQLRENPAELSVVADIFQSFLELRSLSGVCKRLAGRGVVSRSGGAYSPPVLRQILENPVYCAADADALAYFTAQGSDVCFQAADCTGQYGLLAYNKRDYAQKRSPRRPPAQWIIAVGRHRGLISGRQWSAVQRILAENVPTGRDPALTHNSCALLSGAIRCGLCGGRMFAKRRSGAGADPTRYDYICGAKLRLGTAACPCQNLAGPGTDDLVWRRLAPHAAVSPSRLAAALEPLRRDLARQARDEAREGTALRLRQCSKELDRLVALLAREDLGAEATARIAARITAVEAQLARLKEADAPGPDGGCQEAKSPLGSGPLPDLKLPERRALVRLMARRILWDGEDLHLFLAGTPPEKVALSLAAHSRH

SEQ ID NO: 5334 - protein, 541 aa, unidentified
  source 1..541: note = uncultivated organism
MQFFIYSRKSVYTGKGESIENQIEMCRQYIHNKFSDVTDADITVYEDEGFSAKNTDRPQFQQMLRDIQLKKPDFVVCYRLDRISRNVSDFSALIEDLNERDISFVCIKEEFDTSKPMGKAMMYMASVFAQLERETIAERVRDNMLMLARTGRWLGGTTPTGYTSEKQREIIMDGKVKTSCKLKDNPDELRAVDVMFEKFLELRSVSGVSKYLIKQGIKSRSGKFYSLPGIKEILQNPVYCIADKDALDYFTAQNADVCFEEKDCSDRYGLLAYNKRDYKKKHAPRQSMDKWIIAIGKHKGRVSGKKWVAVQNILEENIPTGKKPAKMHNDYSLLSGLIYCEKCGSRLFAKPRVGKRATPGLFDYICQNKLRGGTDLCDCQNIGGQQADDMVCEHLMTYTDESSGIYKLLEKLKHELQGQKQENPLGVIEVRMSQCNEEIDNLVRTLSQGDLNPAFVQRVNIRIGELDKELSGLKQEHERLQSNAERMADKEMQVELLAAALSSLKNNFSDLSIHEKRTLIRLLVKKIVWDGKDLHIFMDGE

SEQ ID NO: 5335 - protein, 521 aa, unidentified
  source 1..521: note = uncultivated organism
MTGELRVAAYCRVSTDGEDQVHSLESQRTYFLDYIRAHPGWTFAGIYADEGVSGTSTRRREAFRSMMADAEAGKLDLLLTKEVSRFARNTVDALACTRALKALGVGVLFLTDGIDTRDNDGELRLTLMASMAQEESRRTSQRVKWGQKRRMEAGVVFGSDSTYGFHTKNGALTVLEEEAEVVRHIYCKFLQEGKGTYIIARELFEEGVPPPRSPSGRWSSSMVLRVLRNEKYAGDLLQKKYVTVDYLTHRKVVNRGQEEQILLRGHHTPIVDRETWDAVQRELDRRSAARGDGSKYSNRYWCSGKLRCGACGGTFLPRSARRPDGTVYRAWGCRGRLRPAPGTAPCSMPMVNHRTLETCVRFLLSRLGLDLEAMAEELADDILRLSASPGQEEAARLRERLSALERRQARALEGYLSGVLSGEELSALREQCGLERQALERRQKELVSPPPPPDEAALRAAVTAALSSPQEVFRAAVEEIVVRPGCLQIRLFSLPETFFLRYTTRGAGESYVTTVEEFRVL

SEQ ID NO: 5336 - protein, 542 aa, unidentified
  source 1..542: note = uncultivated organism
MEKELRKRAAIYIRCSSDEAKKEGYSPEIQEEKLKEFVKISSWQLDEKHVYNQDIGCSGSTDKRPDIQKLLVDARNKEFDIVLVLRQDRFFRNLKLLLNTVGELRDLGIEFKSISEGFDTSTPSGRAMFNNAGVFAEWQREVNLESRNEGMLKAMKKGKWLGGTPPYGYNLNKETQKLEIDKEETAIVKMLFEWLADDKLSEYKIQQKINAMKIPTKFDRLGRKKKTGSECWWNRRTIGRILRNEIYTGIFYYRRWKYLGRIKGQSNLRPKEDWIRIEDENLKIITRELFGKTQQQLKKNKELSPRNTEQIYALQHKIICGFDGYRYQCATRHYSNRAGHSETKYYFCCGIRPYFTPKHCSAPSISDSRVIPPVWEKLKEILANPKAMMRDLNDYLNRGNRRSQIQKELASIKNSLDSSDTSRERYAELYAEGSIKKEFYDKKIQECEREAERLKKEEEKLSQLLLSEEEKEKRTSSAKELYRQLKEHFENTTYEIKREILQRLVGKIVKTDDKLDIEFNLPFTYSPLQLTPGVCSDSRRMD

SEQ ID NO: 5337 - protein, 601 aa, unidentified
  source 1..601: note = uncultivated organism
MRVATYTRISTDEEHQPYSLEAQETRLAAYIASQDGWELTRRYTDRMTGSTLERPELQRALADARVERFDLLLVYRVDRLSRSVRGLAQILEEFDHSHVIFRSATEPFDTGTPAGRMMVQMLGVFAEFERATLVDRVIAGMERKAAAGGWLGGPNPYGYRYNPAVAMLEPDESESTTVRAIFDLYVTKKLGTRAVANWLNSHGHQTRAGRPWSAVTVFDILRNPVHVGRIGFRGVSHQAPHVALVSQDAFDAAQTMLAARADSAWKRRSNTSDYLLSGVVRCGKCGNRFLGTVAHGRNGPYRYYTCFSRNRYGQHGCQADRLPADAFERAVLASMQTTYSDSDLIDRAVAGARKKANTALPSMRSDLRSLEAKIAKAEQALQRYFDAFESGSLTARRLAGRMEELEQRLAELRTQRETLQDELADISITPPTAGDLRAVIGAIADAMDNGMPSQRKALMQQLVSEIRVESRSEIFPTYRLPAPPVRVISGVVGRRGLEPRTSALIDLERSATESGTLHETAGVIGLGLWLASGDHDHHEEYSDYGNDDPEASHVGVSLTGARRHGIGLAVALVVRVFDAATFAEHRDFHRVEQRVQKLHAI

SEQ ID NO: 5338 - protein, 617 aa, unidentified
  source 1..617: note = uncultivated organism
MDRSRLEQSFNSLDAQREASEAFIASQRHEGWRALPAHYDDGGYSGGNLERPALKSLLEDVDASKVDTIVVYKVDRLTRSLTDFAKIVEALDARGVSFVSVTQQFNTTTSMGRLTLNILLSFAQFEREVTGERIRDKIAASKRKGMWMGGTVPLGYDVKERKLIVNQADAKLVARLFHLYIELGCVSKLKARLDQEGIKSKERTSAAGNRSGGTSYCRGALYQILKNRIYLGEILHRGQNHPGEHAAIVPRELWDRVQAQLKSDNQGRRYGLKVNFPSLLVGLLQDSDGNRFTPCHTTKNGRRYRYYVCQAASDRGEAANKPTRVPAHDVERQVVLRLRSFLQSEKDVMDALCLPEDLPTRTQQIMAAAARKFDQLSSGAPAVVKDFVRKVVHHVVFHPDRIEVEVGKQKLCAGLNGDQHTSSIRPATQRPERASGDVIRLEIEARVKRCGGEMRLVLPPDHRGQVPSHPASSLLKALARARTWHEWILAGEVSGRRAIAQRLGLNERYVSRVLECAFLAPDIVEAILDGRQPPRPNRCQIDSRIAVELERTTKATRALIAAPSAINYRYYRYRYRQLEILSLLRPENSLFGSTSLRRQTQRNECYRRDGVVFYSPK

SEQ ID NO: 5339 - protein, 564 aa, unidentified
  source 1..564: note = uncultivated organism
MTTHERAALYVRVSTRYQVDKDSLPFQKKKLKEYCSFLNITEYEIFEDDGYSAKNTDRPKFQEMMYKIRNGQFTKLIVYKVDRISRNLLDFATMYNELKEQHVSFISMNEQFDTSNAIGEAMLKIILIFAELERQMTSERVMGVMLNRAEEGLWNGARMPVGYKWDETIKFPTPDEDEVKIVQYIFDEYEKTHSCTQVLRSLANKGIKGKRGGNWTSKGIHDIIRNPFYIGTYRYNMRESARGKLKPENEWIIKENNHTPIISPEQFKRCNEIMDKNGNSRNTAGFRKNVNIHIFSNKLKCAYCGSGFYAGKDRPRANGYKPSIYRCNRRSALMDCPARTINDITLGNFVFNYIANLINVQNNFSNYYDISKFEKALLNGNEFSELSINKTDLKRTYNIMLYQLYNGNKLNILDVTVDDNNKDYNAEQLDIYILEKNKCKKAIERLTDIYIYDPDSMSKAQYTLKRKELTDKIETLENKIAEINSQHSNITSTNDMTFIKKASAFLVSQKFILVQEHINFSELVMTVDNIMLKDFINQIVDYILVKDGKVVGIKFINGLEHHFE

SEQ ID NO: 5340 - protein, 551 aa, unidentified
  source 1..551: note = uncultivated organism
MQGVLLMYHNIKGLRTIALYRVSTDKQDEAMQKKSCRDFCETNELKIIDEYTEIDVSGFKTPLKDRYELIKILMRAEKKEFDILLIYNNDRLTRRSDEAPHILQVLSNNEIRVFETSTDAEIKTDSHMDKLINFFNSWTAEFESIKTSMRVKSSFADKNEEGNFLGGLPFGYRLINTNYKNKKGKYINKMIIDENEANIVRKIFDLYINKNMGTVRIANYLNENNYLTRKKKEALDHNIDIKENQCLWRASTITRILRNPVYIGQKAYNKTKSTRDEIVKNKREEYKLQPYNEELKIISNEDFYQAELLLEKRKKRKNVQVSTATISDNALCSGLIYCRCGAKLKTGYSISKYHRKKDNKDIQLKVYYYYCPNSKVNKVKHKEITNKNIYSVLRYDSIIDKIILYELRTFNDRRYKQVFDEKISSNIHTKQNELNNLIKLREKLEKLIIKYEIAIDECFVNGEKDKVDIYINNINRNKAKLTKIDAEIQKLSNHNLNANIKIKTISTKNQDFSSLEDRYSNASLNEKKAILSKIIKKIIISEDEIIIDFMY

SEQ ID NO: 5341 - protein, 521 aa, unidentified
  source 1..521: note = uncultivated organism
MNQSSVVTIEPTVSCEKVLRVAAYCRVSSNSQDQLHSFAAQVQYYTKLINENELMEFVDIYADEGLTGTKTAKRDDFNRLVDDCKKGKIDRVLTKSISRFARNTADALMYARILRNCGVSILFEKENIDTAYMSSELLLAISGAQAQEESISISKNMRWSIEKRMQNGTFIASSLPYGYRLKNGEFEIVEDEAETVRLIFKSFLSGMGKYAIVKMLNESNIPKKSGCPEWKVKAVDYILRNERYIGDARLKKRYKTETLPFKTIVNHGEKPQYYVENMNAPIISKEDFNAVQKLLRNASYKSKSKHQKYALTGKIICECGKTYKPITINDKQYWGCPVHNNDSTKCRSRRIPEKDIYEAFITMANKLRNNYKQILPTAIAQTEKIQLKSGKTALRIKEIDREIAELNGKHLVIARLNTKGIMRAAEYTEQSSKITSKTNALRCERRRLLNEQDENSILSGMRKLNYILSAQKEPLTDFDQMLFESIVQQITVPTNTEICFNLLGGLKIRESIPEQRRCLRI

SEQ ID NO: 5342 - protein, 533 aa, unidentified
  source 1..533: note = uncultivated organism
MKKQEAKTLRSAIYTRVSTDSGLEQDFNSLDAQREASEAYIKSQSHEGWKLVRTAYDDGGFSGGSLDRPALQKLLEDVKAKLVDVIVVYKVDRLTRSLADFAKLVELFDAHGVSFVSVTQSFNTTTSMGRLTLNVLLSFAQFEREVTSERIRDKIAASKKKGIWVGGTVALGYQVVERKLVIHDAEAATVRMIFERYLALGSLLALVRELNVKDVRTRKRHLANGRTIGGVLLTRGPLAHMLKNRTYVGELNHRGASYAGEHKALIDKDLFDAVQLKLAENLQTHHAERAASNSLLLGKFFDDAGCTMSPTYARKRGLRYRYYVSRALVEGRTKNAGSVPRVAADEVETRVVAALRSLPGAVVPDDTNSLESRTSIRDLIDRVVLSKADLTITLSAATAVSSGQTSVNIPWERKRGRPKREVLLPKTGATSDSRPIRFDTRATLLRALAQGRLWLNELLTGKVPDTETIAAREDRSKRSVQMTMSLAFVAPDIIEAAVAGRLPNGIGIMRLVDLPPNWAMQRRRLGLAPRLER

SEQ ID NO: 5343 - protein, 571 aa, unidentified
  source 1..571: note = uncultivated organism
MSSDTKSAIRCAIYTRKSSEEGLEQSFNSLEAQREACEAYISSQRHERWRGIATHYDDGGYSGGSMDRPALRQLLADIDAGRVDTVVVYKVDRLTRSLTDFAKIIERFDAREVSFVSVTQQFNTTTSMGRLTLNVLLSFAQFEREVTGERIRDKIAASKRKGMWMGGTVPLGYDLCDHKLIVNADESVQVQKIFKQYLDAGCVAKLKSRLDRDGVRSKVRIGKSGKKSGGTAYSRGALYCLLQNQIYLGMIPHREAVYQGEHQAIISQELWASVQTRLEANNKFRRDGGKAKSPSLLVGLLYDDHGSRFTPFHADRNGKRYRYYVSQTKIHHLGMGQSSPARIPARDIENIVCVRIQSLLSSPEQLLQAASAESDEAAVSKALIVAGKQMATSFGEKSFSGQREFLRDVIGRIVVHEGSLILSIQPPKLRELLLGARSGCAGADGNTNSDSFVLTIEAKVKRCGGEVRLIIPADSGAETARRPVHSLIKAIARVHQWPKQIISGAFKGRHSIAQITGIEERYAGRILQCAFLAPDIVEAILNGRQPANLTVQKLLKAVPLAWMEQRKCLGF

SEQ ID NO: 5344 - protein, 503 aa, unidentified
  source 1..503: note = uncultivated organism
MSALPILANQPKRVGVWVRVSTEDQAQGDSPEHHRIRAGHYCAAKGWDVVETYDLAGVSGKSVMEHPETKRMLADVKRGHITALVFSKLARLTRNARELMDFSDYFRAHNADLVSLQESIDTSSPAGRLFYNMVAAMAQWEREEIVDRVRASVAVRAKLGKPLGGRATYGYMWDDKRLKPDPKEAPVRRLIYELFAEHKRRKTVARLLNERGHRTRDGHKWSDTTVERLIRDPAAKGLYRSNFTRNLGRKWELKPESEHIFTSVEPIVSEELWQQCNDILDKRRASKTKPGKPSVHVFTGTLRCACGGKMYVFSNSPKYVCAKCRNRIPCEDLEELFRERIRDHCVNPDTLTAYVRNVDATLAEKRQLAESIRQEIARLREESEHILKLYMGKKITADRFGELDAPNVERKKQLEAELPQVEAQIALLQIDGLSQEHLAAEANNLYDRWPKLTITEKRDMVDLITRSITVGNEEVTIELIHFPSFQEAEIRQRSDRDSSRPRA

SEQ ID NO: 5345 - protein, 526 aa, unidentified
  source 1..526: note = uncultivated organism
MIDVNKRSKEIRCAIYTRKSTTEGLEQEFNSLDAQRESCSSYIASQRHEGWVEIDKQYDDGGFTGGNMERPALKQLLEDIKAGMIDCIVVYKVDRLSRSLMDFSRIMDTFDKSGVSFVSVTQQFNTTSSMGRLTLNILLSFAQFEREIISERTRDKMSAARRKGKYIGGRPVLGYDIDRATKKLIVNELEAERVRQIFDLYLECEGLIGTLEAIQTRGWRAKSWVTKTDKQVGGGQFYKTTLHALLTNPIYIGKVTYHDEMYEGEHQAIVDPAVFAAVKKKLHSNRVSLGDRIHGKSPGVLAGLLRCSASDSMMTHSTSGGSGRGKRYRYYVCNKATKRGHKTCPRPSLPAEEVERFVVAQLQSLTIDDTLLNETCHRVSRTINDRGDAIRKELSLLNESLVNLERAIEAFAIPTGDDAREAKRLDSLASLTEQQTRDLRRRNDLQDQLAKIQAGVPDRQTIMRAIKNLEELWEHLTMGERSRLMSQLIARIEHDPTDSTLSITLSPLGLKSFATKNPNNEEAKKS

SEQ ID NO: 5346 - protein, 513 aa, unidentified
  source 1..513: note = uncultivated organism
MPVAKLIAPTTKQEIPKLRVAAYCRVSSNSADQRNSFATQEHVYTKYIAEKQEWELVDIFADEGLSGMKADNRPEFQRMIRMCELHQIDLILTKSVSRFARNVKEALNYTRKLKLLGIGVQFEEDGINTLAMADEMLLNTFAAIAQEESKSISQHQRLSIVKRMELGEYIDSNAPYGYRLINKTLSVYEPEAIIVRWIYQSYLNGWSISEIAKDLSVRDVPTKCGKSTWTSTRVSYILSNERYIGDCKYQKTCREAVVPFRQSKNRGQEDMFYAKETHAPLLDKQLFYQVQELLEKKKKQHCTEIPPRQYPLTSRIRCSECGAFYHRKVRNGTVKWVCSRHAADTTACNSGYYSEERIYDGIITMINKLRFCEEDILGQTIQKLEFAAAAYKRNNRAASQLSQSIAELNAKLLALERLRTKGYLAADIYHTQAREIRQQLDKLKTERYSSFESKILTMLEDVRKLKSLIDELEQPLEVFDEKLFHEIVTDICINHHDEMTVTLLGGLRFTEQI

SEQ ID NO: 5347 - protein, 575 aa, unidentified
  source 1..575: note = uncultivated organism
MKKKVQIGRSRMAEELARPTWSAQHTAAPKDTVKTEKQEQKVETISAAPVTQKTLRAAAYARVSTDLDSQETSIDNQVDHYKSLITSNPDWTLAGIYQESGVSGTKADTRPELQRLLRDCEAGAVDVIITKSISRFARNTSECLEMVRMLTGLGITLIFEKENIDTETMESEFLLTLLAAFAESESASISTNQKWAIRKRFQAGTYKGGKVPYGYRRTKKGYIIHPAEAATVRRIFYALAGGKGTLVIARELNEERIPTWTESYKGLEAQGKWRSNSIIAIARNEFYTGDSLYQKTFMENYKKCVNTGQLDQYLNEADHPAIIDHATFEQANAMIRSHGERLGREKAVKDTKRYVFSGRLICGFCGGHMRRGKDARAFYACGNHLHKRTVMVEGTEAPCPMLPVFEQDVKNAFATVLNRLAADPSILGVSDDGEAERERLEAQLQSVKRRQSVLHDRALADRYTAQLREKKAALDSKEKTILDALAKLEKKNPADDLKRAVVKRGVRESFTESDEKLFTSFVDHAVLWSKEKAQFHFTCGLVAEEDMRIEKVGRSYTEVPVRTEFDEQKGAFTWQ

SEQ ID NO: 5348 - protein, 548 aa, unidentified
  source 1..548: note = uncultivated organism
MTRIRCAIYTRKSSEEGLDQDFNSLDAQREACEAYVSSQRHEGWVLLKDRYDDGGISGGHLDRPGLQQLMQDIDGDQVDQIVVYKIDRLTRSLPDFAKLVERLHAANASFVSVTQSFNTSTSMGRLTLNVLLSFAQFEREVTAERIRDKIAASKKKGLWMGGNMPLGYDADGRTLQINPAEAKIIRTLFDLYDQHGTVSAVTKEADQLGLRSKIRTGRDGQTTGGVQMGWGQIHAILSNPVYAGRIRHKQQVFEGLHEAIIDPDRWETVQVKLTSASAKSRGPTTARNSRPDPSSLAGKMFDETGDRLTPTHANKKGRRYRYYVSHRLVDAAKSKRGRADDHSGWRLPARRLESDLATAIQTHLQAAVQTGRIMVDGAGDLQRLQASIAVLGRDALTLIDRVDIASASLTIRLDASTLQTALAIAAEQIEPDILTTTSPTKFRRRGVEARFTIGDQPPERDDILITNLAKADAWRRQIIAGKLLAEIAAEEAKPTTYIASMLDFGFLAPEIVMLCLAGQHPAGLTTNRLRRHGLPLDWAEQQRLIADL

SEQ ID NO: 5349 - protein, 507 aa, unidentified
  source 1..507: note = uncultivated organism
MSKKQTNGNLALEQQRVIVIPAHDEIVARKLRVAAYARVSSASEDQLNSYRVQNQYYSELISGNPDWEMVDIYADEGITGTSVEKREDFQRMMQDCRKGKIDRILVKSISRFARNTKDCLAAVRELKELGVSVQFEEQGIDTSKVSSEMVTAIMASLAQKGSESISGNVRWGVQNRMQDGTYMTASVPFGYELCDKKMKINQEEAQIVRQIFDLYLSGVSIEKIVLELNAGCHEISDKKIWCKTAVSYILGNERYIGDRLLQKFYMTDTLPTKQVRNNGEKAQYYVENTHPAIIDRERFHAAQALRVCRKKRNGCAITMRQSNLRGNCFCGMCGGKLRSKEENGIIYWVCKTHSKDKKSCANSPVQEKIMEQAFCRLYYKLKHHGGPIFTQMLSNLQKIRYSRMLWSEDVISLNKKISDILSQVQFLTQLQQMGGVDPDSERQFHIEADYFIDATGDGTVSAKAGVPFSVGNGNHETLGNSILYITPTICHILRRSSAAAGASSTNG

SEQ ID NO: 5350 - protein, 550 aa, unidentified
  source 1..550: note = uncultivated organism
METKKKTIRCAIYTRKSSEEGLEQDFNSLDAQREACESYIKSQQHEGWTLIEKQYNDGGFSGGTLERPALKDLFQDIEDGKVDTVVVYKIDRLTRSLMDFSKIVEIFDKRSVTFVSITQQFNTTTSMGRLTLNILLSFAQFEREVTGERIRDKKAASAKKGMWISGIAPIGYELVNKKLVIDNDNKEKVKFIFEKYLELKSVITLKKYLEENNINTRNDKCFSKGNLYRILQNKTYIGLISHKSNDYEGEQEGIIDKTLFDRVQDLLTANRIRNKNCVNSTNPSLLAGKIYDDKGNYMSPSHSNKNGKRYRYYVSQALLQSRRNEAGSISKIPAAEIESVVAEEITNFLSDTKNIQQYIENYDIHKQKELLSMKKDRINNYFVRSVLSKVVLYKEKIDIILCKIQLLKTLEAITYDKQLPEELKEESKEPIFITKEIRISQTSRNGSVLIISDSEKSEVNVNSQLVKTIARSHYWSNLLLFGKVNNAREINKIENLTSHKYVYKVLELKFLAPEIIEKIMNGTQPRDLNIEKLFAVKTLDWIEQKKLLCF

SEQ ID NO: 5351 - protein, 640 aa, unidentified
  source 1..640: note = uncultivated organism
MNTEIKCAVYTRKSTEDGLEQEFNSLDAQRESAENFIACQKHKGWVCIPEHYDDGGFSGGNTERPALKKLIDDIREGKIGVVVVYKIDRLSRSLLDFSELLTLFEQYQVSFVSVTQDINTSSSSGRMMLNILMTFAQFEREVIAERIRDKIALSKKRGKYCGGPPIMGYQVEPKTKVLLPHPGEAPQVREIFEKYAAVASLVEVTAWANRRKYHKRAWISGNGKKHSSVPFTPNSLSRMLRNPVYAGYVRHKTVKYKGEHEAIVPEELWNRVQEILDSRKCDTQRNSTRHLHPLAGLIFCGNCNSHMSPTYTYNHKRKYTYYFCQQNARSGENKCPLKRVPAGDIEEALLRQLSRLFQMPTLMHVTLSSLRQKEAENRKQYSARLAELESLWEKGSPVVMNLSKSDATALRPIEEEMCQLRTRLAAMKESINENDILKAMLDINGLWNFLFPGEKHELVRQLIARVDIYESSLSFELRMDGLKALADELVDGEFFTQVHTQVDGMNDDDLMDLVLEHDTIKITLPLLLKRMNGRKQIIVPSRAGERAVQETMIRAIGLAHRWNEMLLKGEVRTISELAARVGCQHPYASRIMSLNNLDPAIVTAIVEGREPEGLSLAQLFAQGIPEDWMEQRRLFGFTHL

SEQ ID NO: 5352 - protein, 562 aa, unidentified
  source 1..562: note = uncultivated organism
MENKKVAIYSRKSKFTGKGESIENQIELCKTYIKSRKPDITDSDISVYEDEGYSGKNTHRPQFQQMMSEIKKGNICTVVCYRLDRISRNVADCSSLLDELTDYGVEFCSISENFDTSIPMGRAMYNICSTFAQLERETIAERIRDNMHELAKTGRWLGGNTPTGYKSEEITERMSVDGKKRKAYKLTLIPDEAKIVKKIFSLFYDFNSLTKVETYLIQHGIKSKNGKNFTRFTIKAILQNPVYLIADDAARKYFDDKGVEIYSENSAFDSKHGIMAYNKTVQRSGKSNLIRDIDEWIVAVGKHLGIIHGAEWAYVQKMLDQNSSKSYHKPRSNTALLSGLLVCGNCSAFMRPKMYNTEYEKGEKRFSYLCETKEKSRRNNCDIQNPNGNVLDRAVCEEIKKLAENDSQFIRQLEKSKSKITQHSAEFNTSIENLKKEISDKTNELDKLIKNLGLISDKDTVEYIAEHIKVLRSEIEDSNKKLEKLNGVLTETNLSNDEFDILKTLLKSFAETFETMSIEQKRKAIRTFVKRIVWDGKNIHIYLYGSDADEFLSSEPQSADSK

SEQ ID NO: 5353 - protein, 563 aa, unidentified
  source 1..563: note = uncultivated organism
MAASALVSAGKRSTHSHGSVKTDQTRALSAIRLSVETDETTSPGRQRAANEGAATSIGASIIGEAVDLGVSASKTTPFERPELGSWLTRPDDFDALMFWRFDRAVRSMADMNALVTWAREHRKVIVFAEGPGGRLVLDFRNGVDLITQLILQIFAFAAEFEAQSIRERVLGAQAAMRGMELRWRGSRPPYGYIPVPLEGGGWTLAPATESIEGCGPAPVVVIERIIRDLMGDPAGKVAGKTVSTIAEELNAEGTPSPRDWWSLVKGRETGGRTGGAKGQRISRERFKWTPNVITRLLRSPALLGWKTHSGKPVRDSEGKPVMATAEPILTRAEFDAVGALLDSRSINNRERKDTNALLLAVIHCASCGGRMYLNAQEGKTPTYKCNSHARGDSCAAPVNVRGDWVDEYVSREFLRMVGALELTISRTIPGYDPQSEIDATLVEYEAHRAERGQQKSKAAQASWQRHMDALDVRLAELESAEKVEPRTEVIETGKTYADQWEDADTAGKRRMLLGAGAHLTVRRGTRGGWRTLDERRVDFDVTRTYFIEAANELVGEAALEMAA

SEQ ID NO: 5354 - protein, 516 aa, unidentified
  source 1..516: note = uncultivated organism
MKKIAIYTRKSRMTDTGDSIGTQIKLVKDYFRNQECEFEIFEDEGFSGGNTNRPAFQLMIEKVKSKKFDIVAVYKIDRIARNIIDFFKIFDTFEKENVSLVSISEGFDPNTPGGRVTMTMIAGMAEMERMNIKQRVKDNMIELAKKGKWTGGTLPLGYNSIRVFEAGKECSYLTINENEVTIVKDIFNWFIEGYSTRKISKMVNDKYSIYTSPTRISNVLYSPIYVKSCDIINKYLELNNYLVCGSINGKGYLTYQRTTTKTGTKRIDRDNKTIVAPSKHEAIIDEKTWIKVQERLKQIAVDPKPRISQYTFLAQMVKCGYCGSPMNVYRENRKNGSYVRFFKKTCKCNHTGKIRNGSRLTIEKAENYTLELLKTVQISGIESLIEKTSKNEYVNDRVNIKKIEREIKKLDELINGLTDKLAIAPINLIETLMNRIDMLINNKKNLQEQILILEQRNNFNITKKENINLLNNNIHHFLLNFDNLTNEQRQIEIKKIFEYVTWKGIEREFNVKIIEV

SEQ ID NO: 5355 - protein, 557 aa, unidentified
  source 1..557: note = uncultivated organism
MLQDTHQTILTGTVLQRAVVYGRVSGDDTKKEGRNLAGQLEMGRDYAAKKGYNVIAELAEDSRGDSGADIDLPQLNRVREMANRQEFDVLIVREIDRLSRNLAKQLIVEEELSRAGVRVEYVLAEYDDTPEGRLQKHIRATVAEYEREKIKERMRRGKRLKAKAGNVSTAGNPPFGYKANEAGNNLEVREGEAETVRYIFTLFLQGRTIEGISQELSRLGIPTPAELRKFGGVKKLTKFAQWGRATVYHILTNETYAGVWHYGKKQVKKYHKTDGTKGYKVTRNPKSQWIAVPVPAIIDADTFKFVQTQLSENVKLKGRPTGIKRLLSKRVVCGACGYKMTPESSRVKGVVKYSYYKCPAKRKPGFGRVCDNSTFYKQEQVDTAIWNWVVSIMSDEEQLERALNSNAAKRDAERQPIQRQYDAAQAKIEEFTTELNNTLPLLKTLKPGSRAYAAVLDDIDRLEDALNKLEAQAAKLEQQLNQTLDDGQKERIMKIAAKVRAGLDEAAKDFDLRRAVIDALDMTVQLLKEDGRLIALVTGYLGDMEVVELSNSIPYYL

SEQ ID NO: 5356 - protein, 529 aa, unidentified
  source 1..529: note = uncultivated organism
MKVGSARRIRCVIYTRVSTDQGLEQDFNSLDAQYEASQAYIRSQAHAGWTLLRIKYDDGGFSGGNTERPALQRLLDDVRADKIDVIVVYKVDRLTRSLADFAKLVELFDQQNVSFVSVTQQFNTTTSMGRLTLNVLLSFAQFEREVTSERIRDKIAASKRKGLWVGGMAPLGYDTKDRKITVNQAEADRVRLIFRRYLKLGSLNLLMADLRSRGIVTKIRKLKGGGTAGGIPFTRGPLAHLLRNRFYVGEVAFKGDILQGEQPAIVDKSLFDAVQAKLDRQVNSFKTTRQTSEALLAGRLYDDRGNRMSPSHTVRRGIKYRYYLSSALLQGQTKRAGSVPRAPAAEIEAVVSQSVRDYLKLADPIDDRSLVNTHIVRVDLKPEQLAISLAPYQKLGRRLTKSTNVLHVPWHKTPSTRRREILQPSTSETQRGRPIRPETRATLIASIARGRRWLDELLTDPNTTSERIADREKCSVRKVNMTISLAFLAPSLVKAAIDGRLPQGMGVARLCDMSAEWSRQYQALGLASP

SEQ ID NO: 5357 - protein, 520 aa, unidentified
  source 1..520: note = uncultivated organism
MAIYIRWSTEEQGQGTTLEVQQEACEYYCKSQGWKYRPELVFVDEGFSGATLDRPELSRLRSAVKDKQVECVVVYKLDRLSRNLLDCVTLVRKEWGETCALYSTKENFDTQSPVGQMVFNILVSFAEFERNVIRDRTQSGKLKRAQQGRNPGQIYPFGYKKGDDGNWALDGWDEEAQCFTGRAAVVRRIFDLYLSGVSARSISEQLRNDGVPSSKGGAWRYNTIGALLNNAAYSGQYVYGRRRGQKYRTEPLFTVDNAIPPIITQREWEQVQKLRSERATAPPRALGSQYLLSGLIRCGKCGGSLSGAGHEKENKYRYYICTNRVFLKSCDCAYINADKLEATVLEEVKSAISFENIQRQVEEMEEDLRKRVEQCTHAAREATEALANVDRKRKRLDQEFFAGNLDGKSLSRLTEGLEVEAAEARVRLEQAQADLREAQSTTVDIDQMVALARRVDAWAELSLDELKQALRDVIGSMTVYQQKVPTRSKKGNPNPVDIVWRPKLDLLYAVNHTGLRVAAD

SEQ ID NO: 5358 - protein, 536 aa, unidentified
  source 1..536: note = uncultivated organism
MKRKVAIYARVSTEHEDQLSALDNQVQYYDDILKKNPDWILYDRYIDEGITGTSTKKRKNFMRMMEDAKAGKFDLIITREVSRFARNTVDTLQETRKLKKIGVEVYFTEDNIWTFNDEDGELKLTIMATLAQNESKKTSQRVKAGQMISFQNGVFYGSGNILGYNKVGQNLEVNEEQAEIVRYIYSEYLNGKGTVKIADELTKKGVPTSTGLTTWSAPYISRVLRNPFYSGTIVYRKSYIPDYLEQKAKINYGEVEKVVVEGRHEPIISKEDFKKVQQIMDSHSRPIKLGKKQALGVPKNIWSKKLVCECGSNFNRKIYHKNKNETTYCYICYNKKTRPKNRFKDSCDMGQVPEWKLQYMAEAIFRNLTQNSDNRRELAERLFKGVDIDEHPEKKMLQRIDKLNQLIENETTKLDRLMDNYLDETLDINLYDMFQKKLSSRIEKYKLEILELEKKCSSLEPLDVRIENAKKSIRKLLDINYNGVDEKVIEEFVEKVIVHKDYFEWKLNFMNETIKLEVDGKSRKDGFLIERTSNSQ

SEQ ID NO: 5359 - protein, 557 aa, unidentified
  source 1..557: note = uncultivated organism
MAVRIIPAQPRVEGTSALQQEGALRVAAYARVSTELEEQESSYDAQCTHYENYITNHEGWTLAGIYADEGLSATTTKKREQFNKMIADCEAGLVDMVITKSISRFARNTLDCLQNVRKLKALGIPVIFEKENIDSMGASGELFLTIMASLAQQESASISQNTRMGWQYNFQQGKPMLVQSRFLGYTKQRGDMKLTIVPEEADIVRSIFRMYLEGYSAGDIILALEEKKIPTPGGKEHWLHSTVNSMLQNEKFMGDLLLQKSYVADFLTKRREKNDGVFPQYYVENAHDPVVPKEVFYRVQGEFERRREGSTINDRKYALSGKIYCADCGEKYSRCAGTEKYPDAVWRCRKKGCGRTVKEDDLKKAVIAAFNRTPERREELIRMQERLQWGQMDRISEEIAAVDERKAELENAISDYASAGTLDSRMVFLYGDGTEDVEAAIKGIRNEMENLACMKMELLTQKGELAMREAQIHSLFRLTEAIEKRDSPSDPEEEAAKPDPSCTTLEDFYRRTDDIDVKGRIRKYDKRLVRRFIERVDVKPESLVICFKAGVSVEVAG

SEQ ID NO: 5360 - protein, 550 aa, unidentified
  source 1..550: note = uncultivated organism
MHVALYARVSTVRQADNDLSIPDQLRQLNEWCKANGHLVVHEYIEPGASATDDKRPIFQQLINDAMQKPQAFEAIIIHSFSRFFRDAIQFGVYERKLGKNKVKVISITQQTSDDSAGEMMRRIINTFDEYNSKENSKHTSRAMKENARQGYFNGSKPPFGYIAASTETDGSHGRKKKKLEINEAAAGIVRMIYDLYLNGLGGKSFGVKEIAKHLTEKGLLMRGKSWRMQKVHRVLSDPLYMGNYYFNVTDSKTGQKRPPTEWVKTDIPVIIDAARFEQVRAKRELRAPAQNPPRITSSPTLLTGLLKCGVCGGSMTLATGKSGNYKYYKCTNRKNKGNHACESKNLPMGATDQQVLNKLADKVFTPERVHSMMTALRKRIKSSKDTQQQRVNELNRQLKQIEERQHRLLDAIETGVIELDETTQRRAQQLKSAREALLIELATVRREHSLPVDQLKASQVEVFAKTLKAKLLAKDSAIAKSYLNLLVDEIVVKDNTATIKGSYGALAHAVTIDDKKVGHLKQVPTSISVWCARRESNPRPLASETNTLSN

SEQ ID NO: 5361 - protein, 546 aa, unidentified
  source 1..546: note = uncultivated organism
MKKIRCAIYTRKSSEDGLEQEFNSLHAQREACAAYVASQKHEGWVLLPDHYDDGGLSGGSLERPALRQLLYDVASGRVDQIIVYKIDRLTRSLSDFSKIVDILDAAEASFVSVTQSFNTATSMGRLTLNMLLSFAQFEREVTAERIRDKIAASKRKGLWMGGQVPLGYDASGRTLKIRDDEAQTIRMLYDLYEEHGTVRAVKAEAARLGLRTRQRNAADGTVSGGGAFDRGHIHHILTNPIYAGRIRHKDKVHEGQHDPIIDPERWDRIQHVLQQGAAKSRGHKTAKRRSHLCGKLFDETGDRLTPSHAKTRKGVRLRYYVSHRLVAKSGEGDQDGWRLPADELEGRVADVLLQTISTPGFTADLLQNPSAEQVRRADARLSEMLKTTGQPQLLTLVNRIVVSPGEMLVQLSPEEIASCISAASDNINPDCLTITTPFRLRMRGVETKIILADQSRSRDEVLIRNIAKAHAWFERIKSGETFAAIAKNEGTPKRRIQQMIGLAFLAPDIVRDALDGKQPIGFTSDWCKNHELPGDWDAQRRLLAAL

SEQ ID NO: 5362 - protein, 526 aa, unidentified
  source 1..526: note = uncultivated organism
MMNTHTDTKTPHKTKAKICAIYTRKSTDERLDMEFNTLDAQREACEAYILSQKSEGWIVSPTLFDDGGFSGGNLDRPALNNLIEDIKNNRVHIVVVYKIDRLTRSLMDFSKLVEIFDEYGVTFVSVTQSFNTTTSMGRLTLNVLLSFAQFEREVTGERIRDKIAASKRKGMWMGGAAPLGYAIENRQLTINPNEAITARMIFDRYFKLGTVRALKCELDEKGILSPVRITKKGSETGGKPFSRGALHSLLRNPAYIGKIKHKDKIYDGLHEGIISSGVWSDVQKRLDNQASEIKNRTARKYMLQGLLYDPDGVVYSPTYTRKKNGTEIRYYISQNLLQYKDHPKRLFSRIPAREIEGLIDTSLRNALPNIMPIDRGLHIRGHLLKNHDTILPQGWVRGLVHKIVVDVGILTIHLKEDGLETVAKEYLSLNIQSDDLDLRPITVPYKTKRARSGVIVIEPKGGKKDPLDIPEADLIKLIQGLIWRDEHFDGMALKDIARRESRSEAYVGTSIYKGFDFFMATFSTAP

SEQ ID NO: 5363 - protein, 532 aa, unidentified
  source 1..532: note = uncultivated organism
MVNNLGRAAIYARVSSERQAEKDLSIPAQLKALKKYALERGWDVVREYVDEAESARTANRPAFKEMIAMAKNKDKPFDTILVWKLSRFARNREDSIIYKSLLRKRGISVISINEQVDESPAGHLLEGIIEVIDEFYSMNLSQDTVRGMKENASRGFYNGGFTPLGYKRIKQKEGMTEKTRLTPNEKEAHIIKMIFQMSSDGNGGKEIAKRLNADGARTRLGKHFSTTAINHILRNEVYTGTLVWRFKNSGYGSAGKIAAAEVIRVPKCHEPLVSNADFNRVQAFLTARRPTAYPPRTISSKYLLSGLLHCGKCGSAMCGSWGKSGQYFYYGCVQHQKMGKEVCSCRSISKDKIESFVFERIKDNILTEENIEQLVHLSIEEFTKNNSRFETQLSEVEQQLGQAQGRLTKLYAALESGKVDMEDLAPRIKEVRAQQKELEDKRNELLDGKNEDAPRTLDSDKIREYVASLKTFLGSSSFIEQKSFLKSFIKRIELNEPQVVIDYTMPLPIKGLTATEEVLYIDGVGSPTRIRT

SEQ ID NO: 5364 - protein, 562 aa, unidentified
  source 1..562: note = uncultivated organism
MSEKVFRTAIYTRLSKEDGDKVESNSISSQRSLCEDYIKKHKDLELVATFADDGYSGTNFDRPDFKKMMDLAKAGKIDAIICKDLSRCSRNYIEGGKLLQQTLPKLGIRFIAINDQYDSFNGNPQSDSFIIPFKNLINDTYAKDISVKIRTNLDVKRRKGEYVGAYTPYGYIKDPENKNHLIVDDYAAGIVVQIFSMYKDGLSICRITDRLNELGVLSPMEYKKSCGIKFDTVFRTNETAKWSYNAVHRVLTNETYLGMTVQGKQSSPNYKVHEMKDIDEADWIRVEDTHEAIITYDDFMAVKTMLGRDMRSASDSLDANVFSGFVFCGDCKQPMVRKVVPAGNKKYYYYVCSSNKRKEGCSAHSISVKELENTVFNAIRDYIDYVLDMEDALSYINSLPSADRTVFNYEAQIVKIQEEIERYQKMKLRLYEDLSDGVISKKEYMDFRNQYTRLIEDRESALERVKKESRDAKTVGNSERAWVALFREYENIEEVDRRVLMALVDRIYVYENHRVEVVFRFRDEFLAQQSYIEQFKEIIPEQYQVHILPQMVPQNQPVLMEA

SEQ ID NO: 5365 - protein, 564 aa, unidentified
  source 1..564: note = uncultivated organism
MTKVASLPCAIYTRKSSEDGLEQGFNSLDAQREACEAFVLSQKTQGWKVLGAYEDGGFSGGNVERPGLRRLLADVALGRVRIVLVYKIDRLTRSLADFAKMVELFDAHDVSFVSVTQQFNTTSSMGRLTLNVLLSFAQFEREVTGERIRDKIAASKRKGLWMGGLAPVGYVPGVGENQRSLSIDEPRAELVRAMYRLYLELGCVSALVAEVARRGWVTPARITRREGAAGGRPFSRGHLYRILSNPVYIGQIVHKDQVFAGQHPAIVERDLWDAVQAQMKANQQGHRTRVNSSQPSLLTGLVFDESGHRLTPSHAQKGARRYRYYIDQVAAEDEAATAALRVPAKELETAVIVAVSGFLKDRSRVMEVVGSVDAGLAHSRLKTAAAAGALLETAMASQQIEVLARLVKRVTVGKDSIWIEVRVASIWSAEVMPQDEAEDVHQIEVPVQLKRCGMAVRLIVRPAGESATRGVDAKLVALISKAHDWFERLSSGRCGSVQAIAQEEQIASSSYVTRVIYLAFLAPDIVQRIVRGEQPVDLTADRLIRMGPLPMAWEDQREMLGMSG

SEQ ID NO: 5366 - protein, 547 aa, unidentified
  source 1..547: note = uncultivated organism
MSQKLRCAIYTRKSSEEGLDQSFNSLHAQREACEAYVLSQAGEGWSALRTTYDDGGFSGGSMERPGLAQLLSDIAAGKIDVVVVYKVDRLTRSLADFAKIVETFDARGVSFVSVTQAFNTTNSMGRLTLNVLLSFAQFEREVTGERIRDKIAASKAKGMWMGGTIPLGYDLRERKLIINLVESELVRDIFARYLAGSSAASLAEDLERAGVRSKAWTTRAGRPMGGKVMGKGAIVHILQSRLYLGEIVHKGQVHTGEHEAIISREVFDTAAAQMAARAALRRSRPSRAVAGPLKGRLFDGLGQPMSPSFAYGKAGKLHRYYIAMALQRGVKLAQADGFIRRVSAPAVEGFLVGILNRISTRDDVETADLQDVVHRVELRADETHLIIDSEMLFPGENPELVLAAVRKALVEGEQAVAERGQQNAIRLVLPQRLQLRGGRTSIRGGSADERPRRINPGLVNALKRAHAYLLELKASPFSSREDLQSAVAPATQHDRQVCRLALMSPDIQRQILVGDQPAGMTLRNILKTPMPLAWADQMAWLETISRG

SEQ ID NO: 5367 - protein, 510 aa, unidentified
  source 1..510: note = uncultivated organism
MAQVQIIQPYQPQNDALEKVAAYCRVSTDSKDQLNSYRTQIGYYTNFIAQHPGWELADIYADEGITGTSLEKRDEFKRMLQDCRAGKISRILVKSVSRFARNTLELIETTRELKDLGVVVVFEEQGIDTSQMLGEMQLTLLAMAAQEESTSISKNMRWSYQKRMENGTFLGCRSPFGYTLENGKLLPHPQQALIIQEIFERFLAGEGKQAIADDLTIREIPTRFGNTQWNIAGIHYILANERYCGDALLQKTFTSGFPARKQRNHGQVNQYYAADTHPAIISEATFRAAQELIKKRDNGQRTRLHAELPIVCPECGYTYRKVKSRGKEYWVCSSRNRGQSHCLSPRLNESEIKMAFVNLVGKLYLYHGELFSPTLTLLEEIAARQERGNAKLYELNTALADLNEKAHTLQRLHNKGFIEDADFREQSDALASQRKKLSDQRAQAIRGSKALETFDKLRDLQEQLAALPEIPWEFDMDLFDQLVEKIVPISNTELLFKLKCGLELKEVIPQ

SEQ ID NO: 5368 - protein, 518 aa, unidentified
  source 1..518: note = uncultivated organism
MEKVAIYCRLSEEDRNKKQETDDSNSIQNQKAMLLEYAIQQGWDVYSIYSDDNYTGADRNRPEFKRLLEDAEEHRFDIILCKSQSRFTRELELVEKYINGLFAVWGIRFVSLIDNADTANKGNKKIRQVNGMINEWYLEDMSENIRAVLTNRRKNGFHIGAFALYGYQKDPEQKGHLIIDEEAAAIVREVFTLFSQGYGKTAIARMLNERGVPNPTEYKRLHGLRYQQPKRKNSTLWKYFAVSDMLTNEIYIGNMVQGKYGSVSYKTKQNKPRPKDDWYRVEGTHEAIIDRDLWDRVQSIIASRAKPFDVGTVGLFARKVRCANCGYTMRSSKNRGKHYLQCSNRHVAKDACIGSFIAVDKLEKIVIKELNTLSQRYLDQDELERSVEFNQNLEQQKEACLKTKAKLQKQLEDNSNYLLALYKDKVKGLVGEKDYFTLANDFSKERERTERQIKEADCYLEDLEAQMLAGDQRKEIIQRYTHVEHLTREMVEILIDYITVGKRVPGTQDVPIEIHWNF

SEQ ID NO: 5369 - protein, 541 aa, unidentified
  source 1..541: note = uncultivated organism
MKIAVYTRVSTEEQVREGTSLDVQREYLEKYAQREGYEIYKIYSDEGISGYSDKRPALQELLKDAKLCRFNLVIVYKIDRFSRNLKDLLNLVDELSNSGVGFKSATEPFDSTTSAGKLMFQQLGSFAEFERNRLAERVMPGMIKGVQLGNWQGARYSPFGYDYNKPEKVLEVNDKQAPIVKMIFEMAIADKPIRYIREYLTKKGYRNRNGNYFTAKLIRDILRNRIYTGKLVWNKCHYDKTQTTPKGYRYIKNDPDKVIISQGRHQPLVSEDVFEQAQKALAKRRIEHKKRAGDYPLSAVMFCAKCNHKYHGISSIRNHRTGEKSRWYRCIGPYKSFIKCSNKAVKAEEIEPKVSVLLATLLRSDRLKPSRWKTVTDALRQDCQPIDEKERLRLQNKLKKVQTKQSKLTDIYLENMLGEDVYHDKITTLRKGEEELKKQLALQALREIERERSEDYMHRVEDFLAGYQPNKKSLNCYEQKQVLGLLFKNIKIARKDIFSFEFFAPFNSLFLEQEKNEKCLKNQRLMKNRRPEYISAHLDVR

SEQ ID NO: 5370 - protein, 552 aa, unidentified
  source 1..552: note = uncultivated organism
MSGTTIRAALYARVSTEDQAENGFSIDAQLDQLRRYCELYGREIAGEYVDRGVSGKSLKGRYELQRLLQDAEDGKFHEVIVWKFNRMARKNIDLLQIVELLEKNNIAFHSFTEKFDTSTSMGKFALQMMGAVGELERNTIVDNVKMGHKQRARTGKHNGKVPLGYRITKTKDSGRSRDSEIVVIEEEATLVRKIYEQYASGHGLKAIANDLNHRGYKTKAGKPFSICAIRDLLDNPMFVGKIRYNRYENWAERRRKGKSTETILVKGEHPAIVSDELWEKVQLLRGKKSAMPKKRFEGEYLLTGLIRCPECGAAMTASRTVNRTKDGTKIVRMYYSCGRFRSQGSAVCHANSVRKDEAEKAVTERIQQAVAKPDILKKVVQSVNERRLGRIKPLRDELAAVQARIDKLEGNKHKYLGLYEMDEMDRDMFTDRVSQINKELDAELTRRSKLQLELRDDQAEPVSYELVRSLVGRFDALLSRSPFPQRKTLLHLIVKRITLDDRKRVGSVELAFNEETEKHFLSIAPSAEPMAEGAFPLSGKAPELNHTLTIVV

SEQ ID NO: 5371 - protein, 531 aa, unidentified
  source 1..531: note = uncultivated organism
MRAAIYLRVSSAGQEDNWSLATQEDSCRAYAAAKGWAVAAVYRDVHTGAEVFERPGLTQLRAEMRAGAFDVLLVHALDRLSRDQNHQGLVLSEAEHAGVLWDSATEDIDDSPTGKILRAVIGGMAELERLKIMERTQRGKRARVAAGKYNPGQKAPYGYVWVDPVTKERLAIDPLTSPIVERIFNGIAGGGSARGTALELNRDGVPTPTGRGKDWYATTISIIVNHPVYVGEARAYRWTVEKERGGRKRVRPQSEETHVVLPGVAPAIVTPEIAAAARERLGRNRQEATRNNKNPEDALLRAGYARCGYCGRPMTITRHRQTNRVVYRCNPGNRDRFGCPHFGINADILDSAVMGRVEEVLTRPEIIAVELERLRRDDPTAADLDAVETRLEAIERQRGNLTRKLALFDDDKAAAPLIAEIGSLTEQLRALHREREALEAQRHGWVQAQEQLADLERWCRIQSTNLGLLTYEQKRLALFALGAEVRVWSTDHDPRYEISIRLEVANPDIAKTTARRAPTATWRPRRRGSTG

SEQ ID NO: 5372 - protein, 592 aa, unidentified
  source 1..592: note = uncultivated organism
MKVALYTRVSTEDQAREGFSLEVQRDYLLQYAKNFGWNVFCSMSGRDVYMDDGYSGGNMDRPAMQRLLFDAKNKHFDLVLVYKQDRLSRKLKDLLALLEEFETLGIGYKSATEPFDTTSSAGKMAIQMLGSCAEFERNRLVERVFPGMVVGVKKGHWQGARYAPYGYRYNKEIKKLEVHDEEAKIVKEIFDMYISGKSTSQIAGHYYNLGIKSRQGGKFYTKFISSILKNKTYLGMLVWNKKRYEKKEKTHNGEGKGYKYVNNDPSKIIEVKDCHESIIPQEVFDKAQKLLDRNRTNKVVRFRNNVYHLSGVLKCHECGRNYRGLTLTKNHRTKERRPWYCCSSVGVSYVKCKNKSVTADGINKQVWDIIDTISRNLHVIEELGDMIKLSATEPEQCYIEQLEETEKALAKNLEKQKALYEVFSEDKINIDIYKDKAELLRNEEKKLRQDIKSIQLKILEKRNAVNLVKATQDFLLKLRSNPNTQQMDYLIKTFMRIIFKGIYIQNQEIVKVDINQPWKMCYDEALKVRHSEPKAKNLAEDEILRPFGAQDDNVGACGLPQDDTVGKGEKCRKKRKKSTEESVYFCVPSDAR

SEQ ID NO: 5373 - protein, 560 aa, unidentified
  source 1..560: note = uncultivated organism
MRKHENCIAIYSRKSKFTGKGESVGNQAELCREYIRIHYGAEALKHLLVYEDEGFSGGDLNRPGFKKMMEAARKREFQALIVYRLDRISRNISDFSGLIEELSHLDIDFISIKEQFDTGTPMGRAMMYIASVFSQLERETIAERIRDNMHELAKTGRWLGGTTPTGYASEAEETVFADGRAKRVCRLKLLPDEADKVRMIYSLYLELGSLAMTETRLLKLGIQTKNGRAFTRFSIRGILQNPVYLTADQDAYRYFEKNGSEVCSGTEAFDGVHGMMVYNRTRQEKGRTTEFLSPEQWIVAVGRHPGLISGRQWMAVQESLERNKTKAYRKPCKNEALATGLLFCSCGSRMYPKAGRRRKEDGSRPYTYVCRTKERSRGNLCAGSNVRGKELDTALVEQIQGLEEDKEHFLSCLRQGRSFCLSGMDSGQIQLLAAEKEREGIEKKLQSLADSLSLFQDKGVREKAVRRMEELGGKGRELDLEIQHMKTAAYQRELSDSEVQNQGKMLCSFKNSIGTMTTEQKRAALDVLFRRIIWDGNAAHAVLAGAADEELNGLSGIEGC

SEQ ID NO: 5374 - protein, 561 aa, unidentified
  source 1..561: note = uncultivated organism
MSTKRRHRCAIYTRKSHEEGLEQDFNSLVAQREACEAYILSQAGLGWEMSNKIYEDGGISGGHLERKGLQELLADIRAGLVDVIVVYKVDRLTRSITDFGKLVDVFDANDVSFVSVTQAFNTTNSMGRLTLNVLLSFAQFEREVTAERIRDKIASSKQKGIWMGGRVPFGYQNENKQLFIDEQEAKIVRQMFALYLQHRKIRLVKEELDCKGMKSRKRISKQDKTTGGLPFSKSNIACILSNPVYAGKIKHKDKIYSGNHEAIVTLEQWNTVQALMADRRVQKKNFNHQKSPALLNGLLLDGDGNKLLSHYAIKDGKKYHYYVSQNADDNSKNTASLRLPMKMIERTVVELLKQTLSKPYYLFEALDLDDVRAETTSLIIQKAKELAEQIKEDDVAKTKNLIQKLILKINVDKNQLVLILRPETLSKLLELELPTNKPVKVERDVNIRRRGQEIKLVIGGLEANTENRNEGLIKLVASACLLRTELEAQNVSSIRDFADQHNIDHADAKNLIPLSYLSPSIIEDLMAGHQPVELNARRLKSLAYHLPLDWSEQRQVLGFGN

SEQ ID NO: 5375 - protein, 532 aa, unidentified
  source 1..532: note = uncultivated organism
MRTAMYLRISSEDEDLRTGEKNESESISNQRSLLREYVCSHADLSGSEILEFCDDGWSGTNFERPAVKELLEQVRRGQINCIVVKDLSRFGRDYLTVGDYISRVFPFLGVRFISVNDGFDSSNPLDIDSLDTSFRTLIYDLYSRDLSRRVKSAKKARAERGAFLSPYAPYGYVKDPEDKNHLLVDAEAAAVIRRIFQMAADGTKTWQIAAALNGDGVLSPKNYKIETGCTRTPWRSIQEENFWTANLVAKLLRDERYIGKTVYGKRSRDIVGSTHTVKISRNDWVVVPDRHEAIVPEALFEKAQICMREYREREVMTGGGNPLKRKVVCGVCGHAMQRDNKKNGSYRCVTKRLNTGFDCSEEKVPEADIQEAVVDTVQVYAQYAVSIDRLLQTRQEQRLLDRKQAQRRLQTLQSRKARLDKRLQDLYERLVEGEISRESFAAQKKALTAQAEEISRTVLELERKMSGSDDNSNAVIEHFKSYAGITALTREISIDLLHSVTIYPDGRMDIRLNLADEIEALLETLRRESCTA

SEQ ID NO: 5376 - protein, 576 aa, unidentified
  source 1..576: note = uncultivated organism
MAEHSIKRCAIYTRKSSEEGLEQDYNSLHAQRDACEAFIKSQSGEGWRLIKAPYDDGGFSGGTMERPALRQLLAGIRQGLVDVVVVYKVDRLTRSLADFARMIELFDAHGVSFVAVTQQFNTTTSIGRLTLNVLLSFAQFEREVIGERIRDKVAASKRKGIWTGGSVPLGYEVRERRLLINSEEAPIVRQIFERYLELGTVRKVMRDLSARRIASAIRVSKTGNRRGGKSFGRGALYHLLSNPVYVGEIRHKDERHPGQHEALISRELWERVQIQLRSKPGRKSETRETEAPRSPLTARLFDENGEPLYVQGCAKGRQRYRYYVSKALVRGDGNSNENGWRLSAAEIEQTVASVAVALLSDQNVIVTAAEHSNIDQGRLSSVLKYVRALIERLQSAGQSDSVLREMVERVQLSATAIRLSLAIRLPEQGGPATDTISLTKDFPMQIKRRGVEMRMVLAGESGAVRFDRSLLRAVGRARRWSQQLLSGQCPSIGSIARRERIAPRYIRDLMPLAFLSPKIVKAIVEGRQPAELSIISLARRIDVPLLWTEQQQALGLGDSIRCEPTDFAEKSSAGTS

SEQ ID NO: 5377 - protein, 546 aa, unidentified
  source 1..546: note = uncultivated organism
MYIAVYTRKSKFTGKGDSIENQKKECDRYIEFNIKPTLSAEDEIVIDYYQDEGFSGKNLDRPQFQTMMKKEKIRPYDYIVVYKLDRISRNVGDFATLVKELDAFGTSFVTTKENFDTSTPMGMAMLNVTAVFAQLERDTIAERIRDNMHHLAKKGRWTGGTTPLGYKSVKNEYIDDAGKIHSYYTLEIDEDQSLVTKTIFEQYFKIQTLNGLETYLKDKGITTQTGKQWDKTNIKRVLTNPCYCAADADGVRYFKQLGCQVVINEDEFSSERGIIPFNRTNSVKRKANPPEQWIITISTHKPYLSGKEWVHIQEIIQEHGRASFTGKFNNEIPHNTNAILSGLIRCECGCAMRPFTYKSGRVVYICENKHRYGNKVCTCPPIDRNFIEGYILNTILSYNDPNSPINLQISKLSQSAGKLIEPYKDSIKDLKKQKRENERQMSNCSKVLSSGLELCDTLINEMNKRLNELSKANDEIDQKILSLSDYELIEQKAQQTLKTFEDASKYLGDNFNSYDLKTKREIIRKFISKIIVRKDRNIDIFIRECI

SEQ ID NO: 5378 - protein, 514 aa, unidentified
  source 1..514: note = uncultivated organism
MRVATYTRISTDEDHQPYSLDAQADRLGSYIASQDGWELTRRFTDQASGASTDRPGLQRALVEARAKRFDLLLVYRVDRFSRSVRGLAQLLEDLDVAGVAFRSATEPFDTTTPAGRMMVQMLGVFAEFERATIVDRVIAGMERKAARGGWCGGGRPFGYVSDPATGFLVPKPDEAPLVPLIFDRYAHARVGARAVAVWLNEAGHRTKAGRPWSHTSVLTVLRNPVYVGKVYFRGSLHDGPHEHLVDEKLFARAQQLLSQRGEDYSKRASATSEFLLAGLVVCTRCGKHFVGTSAVGNRYRYRYYTCFSRQRYGTKYCDAERLPADQLEATMLDATRRTYEQTDLFDKAVAATRVRAESLRANHEQELAFIDAEVAKAEEAIERYLGAFESGTLSEHQCGARLEKLAAKVTDLRGRRVELQAAMEQAAAEVPSAEELAAVRAAIEAAFATGSVPNRKALLQSLVHEVRVDARDHIVPWFRVPGGPEPKVRALVGLAPPAGLEPAAHGLGNHCSIL

SEQ ID NO: 5379 - protein, 604 aa, unidentified
  source 1..604: note = uncultivated organism
MDNNKAGIYIRVSTEDQAREGFSLGEQEEKLRSLCAYKEYDVYKVYCDAGISAKDMEHRPQFIEMLEDMKKGKINYIVAYKLDRVTRSVRDLEELISLLEKYNCYLVCDRDDVNTSTANGRFFVRMLTVLSQLEIEIVSERTKFGLNGAIKSGHLPGKIALGFKKENKKTVIDETTAPIIRRIFDLYLTGKTYFQIATIFTEEKVLNKKWRDNTIEQIINNRIYCGDYVKHKSKKQKIMNNEEDLIFTDVIDPIVPRYVWEECQLQKSKNQRTYTRDRVYTFFQKIKCPNCNRILKCKGSGGKKRKYMYYNCEHCHFNINEKAIEREFEKIVCELLLFDETYNNYCLPLFAEKETTRDRNSYDIEINELNEKKQRIKNAYMSGAVELEDFKEDLRVVNERLNILNKEKQKHSGSCIKRSYNVENIMVQRDISRIFMNQKEFKEFTIQEWNLMSVRDKQDFISRFIESITFDKDPESSNGIKVKDIKLKSVYKEKVNQLTNLGLAEIPIELNFNGVNQIVTLSQPLTRTQFNNYVKELQDKNIKYYEHPSFNYSINDIPDEIVFNVKDKNDKIFKLIPILDDYTNINNPNNKFKLAIITSNIIQK

SEQ ID NO: 5380 - protein, 564 aa, unidentified
  source 1..564: note = uncultivated organism
MSEKKTLRCAVYTRKSSEEGLEQDFNSLEAQREACEAYVRSQANEGWTLIDDRFDDGGFSGGNIQRPGLEALMKMVRDGNVDVIVIYKIDRLTRSLTDFARLAETFDKHGVSFVSVTQQFNTTTSMGRLMLNVLLSFAQFEREITGERIRDKIAASKKKGMWMGGNPPMGLDAVDRKLVINGEADTVRRIFSLYLEEGTVPALLDRLVSEDIRTTKRAIGSKGRTIGGKLFTRGHVYKLLTNPIYIGRISHKGAVHPGQHEAIIDLTTWAAVQQKLADNTQGARTRRRRALQRESLLAGLLVSERGNRFVPMHATKGSRRYRYYVEELPRSTADHGARLEAVRLPAPEIEAATVDTIAGFLRDGGELMRQLADLSPDQARLAVKAAREVSERLSRRGSAPDQLVKSLVKRLVFRRETLRVELSGSAMRHALLGEQGTNNDPEGNRRDGDEPDVILSSPIDFKRRGVQLKLVVDGERSDRALDLPLVTAVSRAHCWAQMLMSGEARSIDEIAEREAVGATYVGQLLPLGFLSPAVVDRILRGVQPAEATAARLVWKTEVPLQWQG

SEQ ID NO: 5381 - protein, 559 aa, unidentified
  source 1..559: note = uncultivated organism
MARKSRAIVETVKPKYRVWRIAIYIRLSKEDMRCFDESESVSNQRKIIEEHIAGLNDGDEYIIVDEYVDDGISGTTDDEREDFQRMLSDIKAGRVNCVIVKDLARSFRNYSDQGYYLDDYFPRYNVRFISLYHQPLDSYREPQNMRSIAVPIQGVLNENHCAETSDKVREVFDMKRRNGEFIGAFAPFGYLKDPEDKNALIVDEEAAQVVRDIYNMFLDGMSKNAIVRELNDHGVLNPAAYKRHKGLKYQNPFVDPAKPALWSAISITQILTNRVYCGDMVQGKYRVKSYKIHVQEKMPEDEWYIVENTHEPIIDRATFEKVQRLLLRDTRTAPQKKNVYLFSGFLKCADCGKSMSRSLNHGTVYYYCRTYKDQSKSACTKHTIQHNRLELAVLYAIQQQVYLAVDYTETVERINRAPLVKSQSKKLAETVEQKERELAKIQRYKQAAYQDWKDGEITRTDYRHMTEDYEQQAENITGIIERLRTEQAELENGVDVENPFLKAFRQYQNIDELTRDVLIELVDHIEIHEGGNISIVFRFADELRRIQEFIEVNDHSEAV

SEQ ID NO: 5382 - protein, 539 aa, unidentified
  source 1..539: note = uncultivated organism
MTRPAALRCAIYTRKSSEEGLDQAFNSLDAQREACAAYVLSQAGEGWTALPALYDDGGFSGGNMERPALKRLLADIDRGGVDVVVVYKVDRLTRSLGDFGRIVERFDGRGVSFVSVTQAFNTTTSMGRLTLNVLLSFAQFEREVTGERIRDKIAASKAKGLWMGGATPLGYDPDGRTLKINPEEAELVRRIFRRYLELGSVHRLREELEAQGVRSRLRVTASGKTRGGVPLGRGALFHLLSNRTYLGQVPHKEVFHPGLHPPLLDAELFEAVRVQLTANAGSRRRKAAGLEPLGPVAPLAGVLTDEHGRPMSPVSARGKSGQVYRYYVSSPAQVERDGRPARRVSAPGLEQLVLARSREVGVRLDEADPWAGLRVAITSVALGPQALTITYQRAQLSQEEQTDQPTGGQLVFETDWAILTGPALPKNPSGPRILATPAGVATATKVERNCSLMRALARAEAWRWMLVRGEVVTLATIAQQECLARNYVQRILRLAFLAPDLKLAILEGCQPAGLTLDRFMRRDLPLAWIAQRSLFATAA

SEQ ID NO: 5383 - protein, 520 aa, unidentified
  source 1..520: note = uncultivated organism
MKKITKIENTASPKDAIKKKRVAAYCRVSTNSDAQLESLETQKSHYEHYINSRDDWQFAGIYYDAGITGTKKNKRPELLRLIEDCHAGKIDFIITKSISRFSRNTTDCLGLIRELLALHIPIYFEKEKINTGSMTSELFVSVLSSLAESESVSISENNKWSIRRRFETATYKIGYPPYGYEFDGEEMVINPKQAVVVRRIFHAFLSGKGAPAIARELNQEGIPTKRTGHWAPNTIIGMLTNEKYVGDCLYQKTYSDSQFLRHHNHGEMTQYLVQDHHKAIIPRETFEAAQAFIQQHGCEKGIAKGAKKYQYRYAFSGKIICGECGDTWRRRIHAYKGNKYIAWCCFTHLQDKTKCHMRYIRDEALKVAFLTMLNKLIFSHRTLLAPYVKALKNAPNNDILQQIQELKTLLSQNTERSETLTKLMAQGIIDQVIYAQETNILLTQADAYRRQIEALKNTASLSMKHVTEAVNLLHFTEKATLLTHFDDDLFKKFVDRIKIYERNNATFELKCGLHLTERIR

SEQ ID NO: 5384 - protein, 581 aa, unidentified
  source 1..581: note = uncultivated organism
MANNEGVGVTGGEAAAVGARSVQIAIYTRKSNDENLNGAVTSLDNQKTCARSYIAIQREKGWTEYPEAFDDPAESGKNLKRPAIKRLLKAVEEGRVQGIIVYKLDRLTRNSKDFHYLLELFEKRNVAFISATESIDTKSPQGRLMTAIMVQFAQYDREMDVERSKDFHLARAGKGLWCAGLPPLGYDIKDKLLVVNEGEADLVRRIFTLYLEHESSIRVAEELNRLGYRRKTYKTLIGKLYGGKPFDMDAVGRTLRRKLYIGLITNERTGKEFPGQHQAIVAPDVFERVQKLLAGHNHRGGEIHYAANRHGFLLKGLIRCGMCGGVVAGYARVKKGKTYRYYKCLAQRNGISARCSFGSVNADKVEEYLIEKLAAVGWDRAFLERVTRKADVLSKASIRPLEKEKREVDDRLQGVLREIQGLLNLAKQGGASRNAAEEVGRLEETKRTLEAHSVQLEAQLAFRKRVVYDVDVVQGALQRFARFFNRIPLSLQVQIIGLLIREVMVRKDGIDVKTHEIAISDFQRALGGKKAVAFGPHQTLRRREANATDTSTHPQPVKGTAVVNLRLNWRGRRDLNPRSPP

SEQ ID NO: 5385 - protein, 582 aa, unidentified
  source 1..582: note = uncultivated organism
MEQVSMTQTPQVKMIPTLLQRDHQRAIEAKERWEKARASTPAPAATPDDLLPVRSAQPVQIVIAPAVAPKKLRVAAYCRVSTGTAEQEISMENQRFHYEQVIQNNPDWEFVDVYWEAGVSGTKRESRPALQRLLADCEAGKINLVLTKSISRFARNTSDCLEMIRTLKELGVTVRFEKENIDTGSMESELLLTLFSTFAEEESHSISRNTAWTKRKQFQEGTFKYSIAPFGYRLVGGTFEIDPVQAPIVREIYDRVLAGIGTPTIAKELNARGIATGTKKNDGSPGVWHAYMIGGMIPNVVYLGDVLMQKTFRDEHFHLFKNYGERPQYYCDGHHPAIIDRETFELANAALRQRGKEKGNVPMADRRRRDNPHSNRYAFTGKLKCGCCGGSMRRITQKVHDGKQYHWGCTIHIEEKEKCWMRREYEETIQNAFITMLNKLIFAEDVIFEIYLTALKNEHSIKQRKKIQELKTRLNQISSEKNRLSILIAKGCEPVSFRAKKLELEAEYSQLLNELEQLQRDPAQMKITQELREQLDAWKKRKTDGFPEKIFARIVDFAIVRTSVEIEFHLKCGMVLTEVYSG

SEQ ID NO: 5386 - protein, 543 aa, unidentified
  source 1..543: note = uncultivated organism
MSEKVYRTAIYARLSQEDGDKVESNSIVSQKAICEDYIEKHDDLETVEIYVDDGYTGVNFDRPDFRRLEDDIRMGKIDAIICKDLSRFSRNYIDGGRYLEKIYPAMGIRFIAVNDSYDSLTSDPSSDSFIIPFKNLMNDTYSKDISVKVRTNLNAKRRRGEFVAAFVPYGYKKDSNNKNKLIIDDYAGGIVCRIFSMYKDGMSICQIADRLNEMGVLSPMEYKIAEGIKFSSTFRIGTVAKWSYKAVKRILTNEIYIGVLVQGKRGTPNYKVRKQQLRDKSEWIRVENTHEALIPYEDFVAVQTMIGRDMCTSRINVDDNLYSGFLFCADCGQPMSKKIVPSKGKNYFYYVCTTHRRHEGCSSHCISAKIVEKAVDGAVKAQIANVLDMSGTLEYIENLPASDRVAFNYDAQIAKLEEIIDKYKKMKLRIYEDMTDGVISREEYTDFRNQYCLLIDEKNTSLENLRREKNDMELNGNTERKWITLFRKYKGIDVLTRRVLMALVDKVIIHENHCVEVLFKYRDEFQRLEELIEDNKELISQAR

SEQ ID NO: 5387 - protein, 526 aa, unidentified
  source 1..526: note = uncultivated organism
MNTLKTQDSSAITPQREIVRIKATATQNHTKLRVAGYARVSSDSTDQLNSFSAQVNYYQRLIEKTSGWELGEIYADEAVSGVSTDKRADFGRMLTDCQKGRIDRIITKSTSRFARNTLDAIRVIRELKDMGVTVYFEKENLDTATLTSENLLTLYSLFAQEESLSISKNCKKGARMRMEKGVYVSSNPPYGYRLIDNQLEIHEHEAEVVRRIFTEYLGGSSITRIAQGLMEDEIPFKNGRLKWRHQAVSTIIKNERYVGDMLLQKTYSEDALPYRKCKNKGELPKYYVRNTHEPIVDRIQYELANILLKERGEHINSECGEYPLSRKIKCSECGTTYRRKITNQIPYWVCRQHDNNKDDCGGERITEDAVHGAFIRLYNKLKQNYASILLPMLSGLEKLQELKTRNNPEISTLNKQIAELSEQNHVMNGLLSKGILDSALFISQTDELNRKVRSLKIAKARLLAEQESDGVLDKTEDLVEIIENGPDQISDIEVMLFHEMVDKIVAHDTQTVDFILINGLVLTERM

SEQ ID NO: 5388 - protein, 582 aa, unidentified
  source 1..582: note = uncultivated organism
MAKKQRCYIYTRVSTELQIDGYSLEAQKERLRSEAKHRKMQVCGEYSDEGKSGKNIAGRPEFKKMLSDIKSGKDDVDYVLVFKLSRFGRNAADTLNSLQFMEDYGVNLLCVEDGIDSAGAAGKLIISVLASVAEIERSNISEQTMAGRQQKARDGKWNGGFAPYGYKLVDKEGEKAKVLVINEEEAELVRLIYKLYLQGMGLSRVAKWLNDNGYTKKIRQNGSVSLISSAFVKGVLDNPVYGGFIAYGRRKNEKIDGTRDEYHVVKQDKDSYKLYEGQHDAIIDRETWFRVQAKRELNAFKREKTHSKEHEHMVSALLKCPVCGASMYGVVNRKKKKNSDEFYTDMWYYTCKNRKLVSGHLCNYKKHVRQDELNAEVIALVKYVFGGENDMKDQILKKLDSDDSVKELLEEKTRLEKEKNSLVSKKTKQLRRINDLDIDDEFYDDLMKTYKDGLYEINEQITVIDNNLYQNELAIQNAQGENLSVEVYKRIIDEMIDNIDDMTDADKKMLMNLLIEKIEIYTEKQKDGRWIKSVQFKIPLNIDGKAVDTLYFDDDEDDTEGDENSLRQSRHDETVCLLSKKP

SEQ ID NO: 5389 - protein, 567 aa, unidentified
  source 1..567: note = uncultivated organism
MARKSRRNTTIEAPMRNVAEHIYRCGLYARISVENEKKREADTIGNQLQLLKDYVAEHPDLTIYDIYSDDDISGVDFVRPEFSRMMNDLRDGKLDCIVVKDLSRLGRNYLESGEYIEMVFPFFQCRFIAITDRFDTKFNQADFSVQLKNLANEMYAKDISKKICSAKRTAQEQGKFTSGRAPYGYQIDPEDKQHLIVDEETAPVVRQLFELLADGNTIHGIATMMNELGIPSPGRILYERGIATTDKFKNSRWYMPTIRRILTDEIYLGWMVSGRYRSTYQTTGQKGTLRLPREEWIVTKGTHEPIVTEDLFDRVQEYFVKTKEIYGQTALYNSKNKKSSIFTSHLRCGECGKGMYLRFKKSGDGIRKGWYYCPMHENYNSSYCTKKAMKQEDLEAVVLKLIRAQIQLFTDSRELCLSLNKREVNKTKYKIYCTHIRDIQSQIDKYVGLKASLYSDFVDGIITQDDYISMGQQYAQKADELRIFLAELEREAVKYSLTFAAGGSWAQLVEKYHDIQVLTEEVVDAFIDEITLYNNGHIDVKFNFKDEMDEVIHLAAIRRREVDRYAI

SEQ ID NO: 5390 - protein, 601 aa, unidentified
  source 1..601: note = uncultivated organism
MAFPRLCGIIIVGHNVRIGGGFVTAKNNRKYAIYSRKSKFTGKGESIENQVELCRQYIQLHEMNVSQQEILIFEDEGFSGGNTNRPQFQKMMKAVRQNQIKAVVCYKLDRISRNVGDFAKLKDEFDDYGVSFISIRDNFDTTTPSGRAMMMMVSVFAQLERENTAERIRDNMHELAKSGRWLGGITPTGYTSAQTVGSVTVDGKERKAYKLEIVKSEAETVKLIFSKFLETNSLTQTDTYCLQNQITSKNGKAYTRFSLRSILQNPVYMIADKDAYRYFQELGVEIYASEADFDGKHGIMAYNKTIQKSGKTNKARDFDEWIVAVGKHKGLISGKDWVKTQKMLEQNRSKSYHKPKSNVALLSGLLYCGNCGSFMRPKLTKRENAAGEKIYTYLCEGKERSRGKRCQSKNVQGNVLDKMLCEQIKLLARDDSEFMRGLQFLKQKIEGSREDYDCQLDALQKELRENQEKIDDLVSSLAKTKDTPAFAYITAQINTLHEKTVKLQERIGDLESLLNNRYDADNAAQGIQDLIKSFAASFDTMSVEQKRMALRSFIRKIVWDGENVHVFLFGDTQSEIDFSSLCREADKTAGTEQGSGNKAPQ

SEQ ID NO: 5391 - protein, 537 aa, unidentified
  source 1..537: note = uncultivated organism
MPKYLATNYVRISYTDDKSCESDSITNQKKYIEEYVKRNPDIEVVNVRVDDGYSGIVFDRPAFKEMMEDIRSGKINCVIVKDLSRLGREYNETFTYLRRIFPALGVRFIAINDNIDTAKESVTDDLSISFKGVMNDEYCRDISIKVRSALNVKRSNGDYVGATPVYGYKKSDDNKNQLVIDEYAAGVVRDIFKMRIDGYSADRIADELNRLGILSPRQYKKDRNIPLPKNGYCDRENSKWSATTILRILKDEVYTGKLIQGKQGTPNYKIKELVNRSKDEIFVTDNAHEAIISRHDFDLVQRLMQIDTRISPKKDKLHLFSGILICGCCGNRMTRKTVTYTGSKYFYYYCPTGKKNGCDGSNMVKETDLIKCVTESIKAHIRSVASVQELLSRIDSQTINKDMCDKITAQIKEIKKQLDKCNEYKSSLYENYVSGILNKDDYKTLKASYSNDGKRLGTALQELEKELDECMNNTSKRLQWIEHFKQFENISEIDRSTVIQLIMSIHIYDKKHLQITFNYKDEYEQAVAALEAYKEAK

SEQ ID NO: 5392 - protein, 573 aa, unidentified
  source 1..573: note = uncultivated organism
MTAPLAKRLRCAVYTRKSTEEGLEQAFNSLDAQREAAVAYIASQKHEGWELLTQLYDDGGYSGGNVERPALQQLLKDIHAHKVDVIVVYKVDRLSRSLSDFAQMMTLFDKLQVSFVSVTQQFNTTTSMGRLTLNILLSFAQFEREVTGERIRDKFAASRKKGMWMGGVPPLGYRIQDRLLLIEEGEVELVKRIFNGYLETHSILKLSETLNTEGYTTKRWQSATGRWHGGDKIKPSYINQLLRNPLFAGMVVHKKEIYEGQHTAIIDEETWKKVQGTIQHRERSDRHRWQSFFLLKGKIKTAEGYVMSPSSSHRTSKHSNAPIKKQVHYYVSQKAATQGYKSCPIKNLNATRMDELVLNHLMDYLQNHSPDAAERLSSFDDDTNKRYWQRQLIDSVIVGTDKLVITIDKLQIAALIKDFPETAKTKKIQTNPVKLVWHFPVIQDEEDKAILTLGIMIKRERSLRLMLAPDGTDLTLPMQPKVDPTILTALGCAFGWRQMLDNDKNLSLKKLARQCGINDRFLAKRLSLNVLAPDIVHQALSGTLPASVNLTRLYEVAENLSWPHQRQMLGLNQ

SEQ ID NO: 5393 - protein, 586 aa, unidentified
  source 1..586: note = uncultivated organism
MEIENEKSKNRMVLLLRNSSKKQAEKKITEDGKIEYDIPLQRSILTPWAERMGYTIVKELVEGGISGFKISAEKRDAVIELKAMADRREFDVLGIYMSDRLGRIADETPLIVSYLNARGIRVLSYTDGEISSKTHDEKLMTYIRYWQAEGESIKTSKRIKDAHGQAVEQGKWRGGHPPYGYRTVSKGTLNGKGRPIFDVEIDPEAAEVVRTIFRLYREHYAFKGIAKYLNDNEIPTTTGALWSWTQIEDILHNKLYIGIYELGKKAKKIRAVSPVMQHLVIISEEEFYEVQELIKKNTKVPNRGRPTIRGASLLSGLLYCECGRKYTSQSYRHLKKQKDGSTRLYELHTYRCGAFRTPKIGQCYKLPIKADMLDDLVVRDAKNFIIAADFEKLLHSDDDSVQEREVMMSEQLKRISKEKTQLEKELHKLSDEVCKVIMGESQWSQSVLSKLIDSKEQELSDIVKKQEEVEIKLKELSAYLAERKANLSELNNWAERFDIQDIPAKKAMLINTIDRITVFDDKVTVKYKFKCNYLRGGAKFDIGNDKAVGEVPSGVFPCLTVVQGMSQPSRERLSSSVPLRKIPMPP

SEQ ID NO: 5394 - protein, 539 aa, unidentified
  source 1..539: note = uncultivated organism
MKIAIYSRKSKFTGKGDSIGNQIDRCKDYINFIFMEEKNIEIEIFEDEGYSGKNTDRPAFKKMMHMIKMKELDAVIVYQLNRLGRKVKDILETIDIFKEYKCALHSVTEKIDTSSPMGTMFLTILASISQFERDDLIQRITDNMYLLARDGRWLGGQAPLGFNNVRQSFIDGHGKTRHYSSLVTNDKEIDKVIQMFELYLEFESVSRVHKHLLKNKVRGKKGGYINKSSIMSVLINPTYVMCNEDVVEFLEEQGFIVTKQEEGKGVLTYCKKTSDKTRNAPKIAATSKHDGVIPAEKWIKVQELIAKNKPNKPNRGNSNSALLSGILRCKCGAAMNVIKASQLKDGTRPYYYACSMKIDSGNTICNMKNLNGAIVDKKIVEEVVGYDSSKVIQELDKILKNDCLINSNIETDEINNNIQQLKNKKGNMFLQLQTLDSNLDKEMILEYQQIIRDINFQIKELEESLDDVIQKNAAIVNEEIDVKAIKDKISNFQSTFDLLDHEDKKKVLRKIFHEIVWDSECNTISITYTSKNLKMLEEL

SEQ ID NO: 5395 - protein, 505 aa, unidentified
  source 1..505: note = uncultivated organism
MIRKADTFTSKPPSIRCAIYTRKSTDEGLDQAFNSLDAQREAGEAFVLSRKHEGWVCLPERYDDGGYSGGNIERPGLKRLMADAEAGGIDAVVCYKVDRLSRSLLDFSRLIEVFDRRKVMFVSVTQPINTADSSGRLMLNVLLSFAQFEREMIADRTRDKMGAARRKGKWTGGFPVLGYDVHVDGGRLVVNEEEAETVRQIFLTYLDIRSLQATAAELNRRGWRTKSWATRTGTFHEGVSFNKAHLSRLLGNPLYAGRVSHKGETYEGEHPAIVDEAVYERVQATLAANNVSGGARAKNRYGHLLRGLLHCTACNCAMSPSVTRRNGKAFKYYVCGNATRRGWASCPHPSLPAGEIEGAVVERIKCVGRDPDLLRDTLAEIRSLRKTRVPALTAERRRLDREVFRLRDRGDAGDQIGKIEARLVEVGEELAVLQDASIDKQDLARALALFDEVWACLFPREQERVIALLIERIDFDAARETVAITFRPTGIRALAVEIEAQEVTA

SEQ ID NO: 5396 - protein, 573 aa, unidentified
  source 1..573: note = uncultivated organism
MKTIRCAIYTRKSSEEGLEQDFNSLDAQHAACAAYIVSQASEGWSRVGSRYEDGGISGGTLQRPGLMRLLEDIRAGLIDIVVVYKVDRLTRSLLDFSKLVETFDQAGVSFVSVTQSFNTTNSMGRLTLNMLLSFAQFEREVTAERIRDKIAASKQRGMWMGGTPPIGYRPDGRSLAIVDEEAALVRRVYALYLELGCVSDLHAHLLRERIDQPVRISLTGRTYGGGPFHRAQIYRMLNNPLYIGLICHGEQRYPGNHPPIIDMALWEKVQGQLSGNTQGEQQAPTVRDPGLLVGKLFDADGTPLVSNHSTKGKVRYRYYVSRHLQHGSMGANRSTGASANGIRIPALEIEPLILAAITRQLGDPIGLATALGYDLGGPNAARQLTQRAEQLANILATGRPTAQQSPLSTIVRRIDVHPEAVQLTIATDALRAALKLSYAPAVDPASTPPTDIGITLPVRLKRSGMAMRLVLDANVPAIPKSPDAQLLAAINKGRAWWRQLQANPEMTVAALARAEKVGPTYVDRILRLAFLSPKIIEAIISGSAPANLTLERLKDVKLIALDWSEQHRLLGIA

SEQ ID NO: 5397 - protein, 549 aa, unidentified
  source 1..549: note = uncultivated organism
MDTIKGIKMPSIKCAIYVRKSTEKGLEQDFNSLDNQEQACKAYIMSQTFQGWEYMRTYSDAAISGGTMARPGLQDMLVDIRNGKIGCVLVYKIDRLSRSIFDFKSMMKEFDKFECTLVSITQSFDTNSAMGKLTLNMLLSFAEFEREVAGERIRDKIRATKSKGMWVGGVPPMGYDVKFHKLVPNEDEVPIVRKIFETYLESPSLSDCRVRLIENGIHGKKWISQNGNTMGGNPINVSMLHKILTNKILIGKIQNKRSGDIFNGEHPAIIDTELFNAVQEKLKQNNNRGNAKCVRATSLLNNKIQTTSGAVLKNSSGRKGFKQYKYYRVGKNSLPMGHIDKIVIETIKHFLDSDMNFMTAEKRLAFKQVKYADTIIKPMIDKIIYQDHKLTIFINNEDLRYLDSFTDKNYMNTNNTPMDNCYLTGDGKHIIIDAEISLSNTSSIIYKHQCGEHSILTKAENNNTLVRALAYAWKYKREIENGTSVRKLATKLKRDHRTVYKYLNLCYMSPRIINTIMEGNTPARVNLQRLFDIASKYEKFNNQELEFYK

SEQ ID NO: 5398 - protein, 518 aa, unidentified
  source 1..518: note = uncultivated organism
MRNTKELRAKGQEARAATKPVRAALYVRVSTQAQADRFSLPAQRKVLQKLAQDRGWNALLYDEGGVSAETIEARPVFRRLLDDVAAGRIDLVAVIEMERLCRASDLRDWARITTTFRDAGVLVATPERIFNLETAEDDFEADLRGILSKREKRKLLERTKRGIDEARDAGRFCGGRPPTGYKLDYETRKIIPDAEMVPVVERIFASDLPDYQLEKMLRREGTPITGGTIRRIRTNVFYLGLRPNSEGKLIPADWSPIISQELWERQQAGGPKPKPRGSAYLLSGMVRCRNCGGPVVGQPIRPAKDGTKLYIYRCNCPRRCSKPGRMLTGWLVDMFVVDALERYIQGPPSLTDRFKEALAQRQSLNAGDFAKRREELRAKAKDLEEREQRLVASLENGSMPERLVGKRIKAIAKERGELQLEIDSLKAMMNIPSLPDVQEILGLAEDLSNATKAQRRHLLRRLTASIEIDGPERLLVVRWGLGGESLYRIPHLRGGARRRVSQLVLKVQALLSNQSLRN

SEQ ID NO: 5399 - protein, 545 aa, unidentified
  source 1..545: note = uncultivated organism
MKPALSKGLRCAIYTRKSTEHNLDLEFNSLDAQREACEAYIKSQAHEGWRLIPQHFDDGAFSGAALERPALQALLDLVRTRKVDVIVVYKVDRLTRSLADFAKLVELFDENNVSFVSVTQSFNTTSSMGRLTLNVLLSFAQFEREVIGERVRDKIAASKRKGLWVGGPIPLGYASRDKKLIIVPEEAETIRLIFKLYLELGSVRRLAEELNRRGIRTKRQVLSSGRSRGGGSFWVGPLRHLLKNRFYVGEVAYKGEIHPGEHEAILDRALFEAVQEKLKDGAVVREISRSRSASILSGKLFDDRGSRMSPSHANKRGIRYRYYVTQAVLQGRPVEAGSVARASAPDLEGIVIKGLREHLACAEATQAAIESEDRELIDRHIERIVVRPDIIEVLLKDSAPDPQAQNAESESSGDPEREYLAPITLALPWSVPVFQLPKGILHAPAATHAMTIKTRDTLLTAIARAKRWVDDLASGNAASFADIAEREGKVERHIRFLAPLAFVSPRAVAAIADGNVSADLTVSELAKALPLSWAEQDSRLTEPKI

SEQ ID NO: 5400 - protein, 525 aa, unidentified
  source 1..525: note = uncultivated organism
MARSSAPRASANGSNETLATKALRCVIYTRKSTEEGLQQDFNSLDAQREAAEAFILSQKREGWQVVADHFDDGGYTGANMDRPALKRLLGAVEAREVDCVVVYKVDRLSRSLMDFARIVEVFDQNGVSFVSVTQQFNTTTSIGRLTLNILLSFAQFEREIISERTRDKMSAARRKGKWIGGHPVLGYDIDPKAKKLIVNPAEAEQVRTIFGLYLELGSLLPLLQEADRLALRTKRWTTVDGKVRGGHRIAKGTMHGILTNAIYTGMVEHQGCLYPGEHERIIDQNTWDRVHENLRRNNGDNGASLKNKFGALLKGLIFCVPCGTPMIHTYTMRNSKRYRYYVCHNAQQKGWKNCETKSVPAQAIESAVLDTIRRLGTDPKLAEAVAAEALAQVARRRREVDQESENQRGDLRQLNQRLAREAADTSVDTGARFERIAALQHEIETTERRLAQLGTERRDLNRDHINANDLYRTLAEFDAIWASLTTKEQEQMIHLLIAKVGYDGRTSKVTVHFSNQGAKELCQGK

SEQ ID NO: 5401 - protein, 578 aa, unidentified
  source 1..578: note = uncultivated organism
MMRDIAQNHQRKRCAIYTRKSSEEGLDKEFNSLDAQREAGKNKILSQRHEGWELINEHYDDGGISGGTMERPALQRMIEDIKAGKIDVVLVYKIDRLSRSMLDFLGMIKFFDEYNVSFVSVTQDLNTDSAMGRLVLNVLQSFAQFEREIASERIKDKIALSKQRGMWMGGTIPLGYDAIDSKLHVIEDEAKIVSFLFDSFIETQSPTETVKLAKAQGYKSKARRTSTGKHYPARDFTKSSLYQILRNQIYIGKIEHKEKGEVYDGQHDAIISDEIFNQAQSVLNTNPKYRQRKSKNDRPYLLKGLLKDPKGYSLTPTYSKKKDKIYRYYVSTHAIKTTYDNCPLKTINAQFLEEIILDQVKRALTNVEWVQRMQSHGDKAVTLPDIRKGLKNFDIMWAELFPAEQARIIQLVIDNIIVHPDKIIITFHPSGMLSVLHQFMPDLKTHGDIDDQMVMEIPVQFQRKAKRKRITTPDGRNVVDMSNENIDEALIKAIARAHRWQEMLDTREVKSIREIADQENLSGTYTQKVIRLTDLAPDITSAILNGKQPQSLQINTLIKGKPLPLDWNEQRMRLGFII

SEQ ID NO: 5402 - protein, 529 aa, unidentified
  source 1..529: note = uncultivated organism
MTTSLKTVRAGVYARISSDRDGEALGVERQLTDCRKLCAERGWTIVAEYVDNNLSASAEGVTRPEYERLLEDIANRELDAVAVWDLDRLTRQPLQLEQFVRTCEQAGMTRLALIGGNVDIGTGDGLLVARIKGAVAAEESRKTGQRIRRKHQELAEKGLYHGGGARPFGFEPDGVTIREDEAALIREAAGRILKGGTLYGIRKDWTERGVPTVSGKPWSVQSIRRTLIRPRIAGLRQHQGEVLGEAVWPAILDKETWDAVCVVLTDPSRRQPPPSRKYPLRGVLVCGECGRALVAVPRRDRRIYGCRKDSGGCGHVAISAPRVEAYVTTVIIALADVPGLREELSREAARDVDQVRVLVTENAADEAKLAQLGDDYADGALPRDEWLRLTKRIRDRVEARSTQLASLRGQSALGRLNGRVHDGWDDMSTEDQRATILSLVRQIKVNRPARQGVTQSADSRLEFEWRWDTLNASLGGPPYGLNVEKLVANLRAGVADIEAVRQHPQSHPVEAWKAVAAKVPTLIMTKREK

SEQ ID NO: 5403 - protein, 580 aa, unidentified
  source 1..580: note = uncultivated organism
MSGKKVQIGRSRMLEELARPTWEAPVGKEPRTEKKPDRPTQKVETISSAPASNRKLRAAAYARVSTDLDSQETSIENQREHYLHLIEAKPDWELAGIYEESGVSGTKADTRPELMRLMKDCEAGAVDVIITKSISRFARNTSECLSMVRTLTGRGIRLIFEKENIDTETMESEFLLTLLAAFAESESASISTNQKWAIRKRFQAGTYKGGKVPYGYRKSKKGYVIHPAEAATVRRIFYALAEGKGTVVIAGELNADKVPTWTESYKGLEPQGRWRSNSVIAIARNEFYTGDSLYQKTFMDEGYRKRVNTGQLDQYLNEADHPAIIDHDTFRRANEAIREHGEAYGRQAAGEANRYVFSGRLRCGCCGGSMSRGRDTKPFYACGNHTHKRPVSLDDGKQAVCPMLPVFEQDVKNAFATVLNRLSAEPSILASRDTAEHDAEERANLEAQLQSIRRRQSLLHDRALADRYTAQLREKRAALDREERTVTERLAQMERKSPVADLKKAIRKRGIQEAFTESDEALVAAFVDHAVLWSKEKAQFYFTCGLVIEEDMYVKKVGRSYTELPVKTGFDDRKGAFTWQ

SEQ ID NO: 5404 - protein, 515 aa, unidentified
  source 1..515: note = uncultivated organism
MLPAAYDDGGFSGGNMERPDLKKLLADISAGKIDTVIVYKVDRLTRSLSDFARIVESFDSQGVSFVSVTQQFNTTSSMGRLTLNVLLSFAQFEREVTGERIRDKIAASKKKGMWMGGPVPLGYDLSNRQLVINSAEAETVRSIFARYLVLKTVTDLQIELEHSGVRTKRRVTLSGREVGGVVLCRGALYHLLGNPLYVGKTAHKGKLHDGMHEAIVDRETWDSSRELLRENAVKRRRRKNLPSGRMLHGKLASQDGRLYTPTHSSKGGRRYFYYTLVGAVGAGSTKSGRRLPAAEIEARVVDAVAAFLGDSPNIVTNFSGLSIPGARMLTSAAAHRSTLLKEGAEQERAQLIIRIISNVVVQSDALEIHISKDALGAELLGAGKEGFAGEIALRARCHFAKRGNEVRLILESGAQQSSPNSTVVRAVAQAKTWYEWIINGEVFTMRQLAKRTGLHRKYVSCLLDLAVLSPDITEAILRGDHDPSLTVAHLTATLEVDWERQRLPRLGDSSSGSAG

SEQ ID NO: 5405 - protein, 503 aa, unidentified
  source 1..503: note = uncultivated organism
MRDDRRQPTRVAFYTRISTDEDHQKYSLGAQKERLEAFCKAQWGDDWRLHKVYRDTESGTHMNRPGLEEMLYDAEAHAFDTLLVFRVDRLSRKVRELAQMVDELTKHGVTLKSITEPFDTANAAGKMMLQMLGVFAEFEHATIVERTKVGMEKKAKGGRFVGGNVPYGYILDPEKGLVVHEEEALIVRKMFKMYVHGREGASAICNQLNGAGDRNRNGRKWGRRVVLYMLRNPVYVGKIRWREVFYEGLHNPLVSQALFEKANEVLQERHEDLKGRQWHNGDERLLTGAIKCARCKSHMFGGGGYKNGVHIPYYVCSKRFNDHDCEQDYVRAELLETAITEDIKVMFRDEEFMARVSAEANQRLGAEKPALEKEIGKVEAQTARAQAAMARYFEAFEAGTLRADLCNEKVRDLRARIEELEAEKRDLEARRERLELPTLDRGMLAAIVENFERVMAEGPNPQKKHLLRRLVKKVLVHDRRTVEVWYGLPNPHGFEDCNNWLLG

SEQ ID NO: 5406 - protein, 567 aa, unidentified
  source 1..567: note = uncultivated organism
MSKQISKIYHAAIYVRLSKEDGDVSTSAKAESNSISNQKDFIRNFLADKKDIRIVKEYVDDGYSGSNFDRPSFQTMMEDIKRDIKRGVIDCVVVKDLSRFGREYIDSGRYIERLFPALDVRFIAINDNYDSVTGKSQGDEIIIPFKNLINDAYCRDISIKIRSHLDVKRKNGEYIGAFVPYGYEKSDDDKHKLVIDTYAAGIVKEIFRLKLHGMSQDAIATQLNNEGVLAPMEYKQSTGSGYQTGFLQNEKSVWSSVTVRRILENEIYIGNLVQGKRTTPNHKVKQEVVKPESDWIRIEKNHEPIISDRDFEIVQRLLGMDTRISPDSDVVYNLSGIAVCADCGSPMTRKITTAGDKKYAYYICSNHKLTKQCSQHSISVSLLEDTVLEMLKLHIKNVMNLEEILDYIGKIPFQQLDVKSLEARKQKKLEEVEKCKRLKTSLYEDMKDGILTKEEYLELHEAYLKKAKEGEEIIRQIERDIALILEEKDDKHLWMNYFTEYKDIKELTRDVVVKLISEVRVSENKEIEIVFDFDDCYKKLLESVEKLGYQVDKEPGGQLNISRREAV

SEQ ID NO: 5407 - protein, 570 aa, unidentified
  source 1..570: note = uncultivated organism
MMLDKNNQEERKVAVYIRVSTQEQKIDGYGLEAQKNKLLDYIQNNKAQNYVTKKEWLFIDTHTGSDLNREGLQKMLQAVKEKKVDAVIVWKIDRLSRSLQHLLTIFEDFEKNNVSFVSVQENIDFRGPIGKLIFQIFGAIAQFERELIKGRTQMGRLASAEMGNYTGTFVPYGYKEVPNPNGRGKKLAIEPEEKKMVREIFEWYIYDGLGLGEIKNKLNRLKVPLGKDKKNRNGKWTERKIRTMIHNSIYRGEYVANRKDERGNELPRDQWTIVSIPPCISEFTFQQAQQVCGDRKGTAGYVSYLLSGKIVDVSVEPHYKFVGCKRSKGGYSYRRKQFDKGKVRFPVFEVPAKVIEEYVWGKITEALKEPKIFIEKYLAREYSDVSRITKLEDVLSNLRQHKINKGMEIARVEEGYNSGVYDDEKAKRQIGQKNKELAATEAEIQSIEDELGFIGAVEMEVSKLKEASKQVKYRIDSLNNEQKKVLVRLFVDKIELNRRKLEKGWKIDAQVYFKFNPNKFPNDVTGDRTEKGDKQSKNSKKTSSEDKNGATCRNRTDDMLFTKQLLYQLS

SEQ ID NO: 5408 - protein, 519 aa, unidentified
  source 1..519: note = uncultivated organism
MNLRTSLAALYIRVSTEEQVGGFSLDAQREALLDYCRKNQTDVYKIYVDAGISGKSIEDRPALRELLGDAKNGRFQQVVCLRLNRLSRKLSNLLHIVEVLDKQGIALHSLTEDLQTDTPMGKFSLQMLGAVAENERRQIAQNVRLGMQRRNRLGKWNSGNQVLGYRWVAHPVDPRLSHAEIVPEEADKVINMFECYASGLGLKTIANKLNLAGHRTKRGKAFHSVSVRGILTNVNYIGKITHVDDKGKRIVTNGEHEPIVALELWEQVQKQLSGRSCPPTKQITRHFLLSGLLKCPTCGSSMVPTHVTRHRKNGTSRINHYYVCNRYNSGGRSLCQPNLVRADVAESWVSDRIRHFLSHPTVAERLVDEIKARRDKRMMPVQQAMKRIDAQIDAQKKRSLRCYELFEDGHIDGPELRKRLDEIRAETSLLEEERAQLERTVHAHPERTIPAAGIRQALDNFRTLLQNASPEHQKKLFWSLIDKIIVPEDRDITKAVIQGTSALLSLEIPPIQTKGEKQA

SEQ ID NO: 5409 - protein, 512 aa, unidentified
  source 1..512: note = uncultivated organism
MSEVIVIQSDLRKTEKQRLRVGAYARVSSNSPEQEDSFHNQVRYYTKYITSNHEWEFVDIYADEGITGTRQDKRDDFNRMIQDAEDGKLDLIVVKSISRFARNTVDCIRAVEKLNKLGVAVKFEDGGLNTSTPTDAAAIKVSSALAQEESQSIALNVRIGTRNKMRNGTYIQVNAPYGYSYKDKQLIINEEQAEVVRKIFTEYIAGKGTTEIAKLLTELKIPNKNGKEKWSASAISYIISNVRYKGDALLQKSYTDGFPFKKIKNTGELDMYYLHNVNEPIVSAEIFDMAKALLEKRQKKFTHKTYGDAGIFTKMIYCKNCGTPYKHKGDGVWTCRTHDVSIEKCNAQPVTEELIKKAYILMYNRLKANYKHILIPFINQIEAMKNNQSEKDAIAELNIQIAQVSERVMMINRLKDNNLADPSFYMQELNECDRRMMELKARKNKILHENRYSKIVTDTRGLVKELEKSDSICTFDTEGFKRHIRKLYITDDEITFVLKNGIELEIEKQEVP

SEQ ID NO: 5410 - protein, 512 aa, unidentified
  source 1..512: note = uncultivated organism
MDGRIDAIYARQSIDKADSISIESQIEYCKYETRGAPFQVFADKGYSGKNTERPDFQRLCMQIRQGVVGRVICYKLDRFSRSILDFASIMELLQAHQVEFVSCTEKFDTSTPMGRAMLNVCIVFAQLERETIQQRVSDAYHSRSLKGFYMGGRLPFGFSTEPFFLDGRKTSRYLINPDEARILRQMYSIYSDPLSNCGDVVRFLENARIQNPRSRDGSWIRNHIGRMLSNPIYVKADLAVYAYFQSLGTEICSDISLFAGTNGCYLFSRTNRDGPDQLIVAPHEGIVDADLWLQCRNKHTSHPSRRFGGYAKNSWLAGKVKCGLCSYAMVIRRSVKKSGKEYRYFACSKGCQNQDNYTLSFRAEDIEAAISEEIKRMLPVFIPRPRTADPTVSKKTKDLNRRLLITRDEIRKLADKAELSEDELLQCFNQKIRILKSREMALQSELNKLNRDTPPPGYSNARIPDWENMDLLQKKRIADLLILQIRLHTDIEICWKLNPHPESDAKENPTAE

SEQ ID NO: 5411 - protein, 549 aa, unidentified
  source 1..549: note = uncultivated organism
MKMRKNKRKEIVRCAVYTRVSTENQAEKDYSSLESQKEHILNFIKSRKFEGWELFGIYEDAGFSAASLDRPELQRVLRDIRKGLIDVVLVYKIDRLTRSHKDFYYLIEFFDKYNVELVAVTQKFDTTNAMGRLLRSIMLDFAQFEREMTAERTRDKMRVRAKKGLWNGGCLPLGYDYDPEDKKLIINPKEAKIVRFIFETYLKEGSISKVVKTLNEKGYKTKNGKDFICTSTRHILENPIYAGKIKYGGEIYQGNHEAIIHERIFEEVQRMLNRNKKECKSIKQNKYDFLLRGLLRCGYCGSNLTTHYTLKNGDKFFYYKCTRIQHRDKTACLSKPLPAREFDNVMVESIGNMAKDNRLLKRMLERSNRIVLNEIEELRKEEIKLEKGIERKSEEIRKLLNLFLLDKNPPIEVREEVNKRSKEKEELEKKLEEIRLKIRRKESTVIDFEIIKKGFEGFYKVYPSLEPKERQALARLFIKEVKIFNDKIDVEFLEFPELAHREPLQILKEPSIRGAILMAVSNSFNVSFRLIRTREKAGKIKLSLSPILD

SEQ ID NO: 5412 - protein, 506 aa, unidentified
  source 1..506: note = uncultivated organism
MKAALYCRLSKEDDKNGIAAESESIQNQKALLLQYAQERGWTVTAVFSDEDYSGADRDRPGFRRLLTAAHARQFDVLLVKTQSRFTRDMELVEKYLHHDFPLWGIRFIAVLDHVDTGIQGGKKARQINGLINEWYLEDLSENIRAVLDYKRQNGQFIGSFPVYGYQRDPDDRHRLLPDPEAAAVVRQIFAWYLAGEGTKQIADRLNREGIFSPARYKQQRGLLTAPPGEGRWTRTAVSRILRDRQYTGDLVQGKRRKLSYKSKELLTLSPEEWMVVPETHPSLIGKEAFAAVQDRLAAHTRTDGRGRRHPLAGKVFCLACGAPLNRVSVTSTGKRLSYLRCSRHCTDPEACTPHSVRLDRLEEAIGSRLQELLRRVCPPDALPEPSRAGLRDPRHWQAEADKAQAEIDRRDQALRQLYLDKASGLISREQFQTWSAAYREEQADWEKRRDLYLALREESSAVPAPKIPWEEDPLPPALLAAFLDRVSVGERDRRTGEQELQVVWRL

SEQ ID NO: 5413 - protein, 536 aa, unidentified
  source 1..536: note = uncultivated organism
MDKKKVRCAIYTRKSSEEGLEQDFNSLDAQREACEAYIKSQMHEGWFLLDKQYNDGGFSGGTMERPAFKELLKDIENDKIDIVVVYKVDRLTRSLMDFSKIIDVFDRHETSFVSITQQFNTTTSMGRLTLNILLSFAQFEREVTGERIRDKIAASKKKGMWMGGKVPLGYLKEDKKLVVHNEDAQKVQMLFDKYLELKSVPKLMHYLKENKIKTKTDKYFSKGQLYHLLANKIYIGKITHKDKVYDGEHDAIICDETFEKVQKLLYENKVDKTCGVKSSSNSLLASLIYDDLGNKMTPSHSNNHGRRYRYYISRALKNNEETGSVSKIPAGEVEKFVIETTKEFLQDKEQIQKIVSEYKISKQNKLIYIAQNIQDYSEPKLIKTIIHKIMVSKNLIEITYNEASIKNVLNVLANNQEIVVPDKNEELTPIVISKNIKITQPSRNDNILILNAKEYDTPEPNPYLVNAIVKSFYYHKQIQAGKTIEDLQTEEGLKDSKYIRNIMNLKYISPELAKQILNGTQPKELSLQKLIGIIKI

SEQ ID NO: 5414 - protein, 1217 aa, unidentified
  source 1..1217: note = uncultivated organism
MDEKDKAMWVHTLWDPLEKIDQSPLHSKKDGIKVAAYCRVSLDSLNLSKSLESQVSYYTHYINNRKNWKFVGIYFDNLVSGRKASLRQGFTRMLRHCDEGKIDLILVKDVSRFSRNAKELIEIVERLKEINVTVYFEAENIESTRSDTTYLLKTFASIAQAKIEEISYNVKWGYEKRTLEGKADIRDMYGYDKAEVDGETIIKINEEEAQIVREIFAMYLNGYSSYKIAGELSRRNIKTKQGKKLWRSSTIAGILSNISYTGDILVRKTIQDMLTNKIRSAKGIEDQYFIENHHPAIITKEVFEQVQEKIKKNGKPISPPTRRYNPLLKRVHCGNCGCKFNRNKNRGKDYFKCISKMTNKSLCVSPVIKEDDIIKIMLGGFKERFDIENPKIIRLLQRLLIKINQNDHFEFHRLKALNQIQLAKSLRGVEYTDEDIEQMEESYKEFEKELVKIEDDRKFRLEAIKWLDTVENFEAFENQATIEYMRGWIKEITIYSLNDYKIHWIDGKNTEIGSCISIKPELEEPLVDENLIKLQIKGSFEENKITLEKGGDIQNKEGVMMQAAKRLKPEEPKSDLMFLNIKKQISNSVVMQTTVPIPSKKKLKVAAYIRVSTESDQQEISLKTQYTYFLYYILRDPQYILADIYIDDGKSGLTTKGRTEFNRLIDDCVAGKVNLIITKSLSRFARNTLDTLEYLNLLKNLDPPVNVWFQKENLYSLDEKSDLLIKLLSVIGQEESLNMGESIAWAKRSLAKRGIVNPGRLTYGYYYGENKEWLINKEEEKVVRRIYKEYQEGKEILKIAKGLESESIPSPSGQKNWESKKIKDILSSETYRGNYVFQKFYNPSGLIKIKTKNQGELPMYFIENHHQPIIDSDEWENIQTIMEIRDKERQTKIEKYLPDTKKNEAFSKKLYCEKCHSYLGYIRQVDRGKNNKENRHWRCYSARKGRGCDSIHLKQEYIEENFSQCLMDIKHNEAFREYINQYKESEKITPEEEKLRERLNLEREELNQKLYAEVEGELNKKGKDAKKVDKLIDRIMRLRQQINTFTQREEQLELIEEDVAAIMRSLKDYKDNTKTATGYYMKAPKFNKEIFEEHIEKGTVADDGKIIYKFKSGFEWAAPIDYSNFQIKARRKIAAKRAKERAEYLKGPEVKELLEYCIEPKTFKEMQNFLGKYAAYHSFRKHILEPLLKQGIVKMTIPDQPVHRLQKYYSVDRKKRN

SEQ ID NO: 5415 - protein, 537 aa, unidentified
  source 1..537: note = uncultivated organism
MDEKLTQIKKPISCAIYTRVSTNDGMEQEFTSLDAQREAADSYIASQKSEGFFALTDRYDDAGFSGATTERPSLQRLITDIKVGKIGCVVVYKVDRLSRSLLDFSKLLEFFEQNNVAFISVTQHFNTNSSMGRLTLNILLSFAQFEREIISERTRDKMGAARKKGQWMGGRPALGYDLDKEHHKIVVNKAEAQIIREMFDLYIQKHSLLAVAMALNKKGYRTKQYLRKGKISGGIPFKTVNMMWMLRNMLYIGKVNYKGKQVFQGQHEPIISEEVFNKVQQILNENKREIKNKPQKNIGLLSQLIRCKHCDSAMIYSYSFKDHRWKYFYYYCSNAQKRGYANCPTKTINAQRLENQILICLRQICGNKNILLGTWEILPFTQQRETILSLVKIILFEAETKTVFITLYGSPKVHECKIDLETSIFQAIPKAVALQKEPKLRQFLILAYQVQELLDQGKAKSPKQVAQWLSMTRTKMYVLMNMTMLAPSIQEEILFSNNNLIRLIPEYKMNQITREISWHKQKQMWQQLTAGLAKQSS

SEQ ID NO: 5416 - protein, 566 aa, unidentified
  source 1..566: note = uncultivated organism
MKYINETENNPETKAKVVAIYCRVSTTEQAEEGYSIGEQERVLMDYCDKNGFDIYKTYADKGISGKDIKHRPAIQELLRDASEKRFNLVISWKINRMSRKLTDAIKIVEILEKYGIAYRSYSEPFESDTPAGRMQFQLMALLGEFERNTIAQNVKMGMCAKARSGEWCGGIAPLGYDWVPMERTEQSVRRKSRLEVNEEEAETIRKIFELYASGKGYKAIVNHLNKEGYKTKRGNPFSVAQLKGILMNPVYIGKVRFDVRRNWSEKRRQNINPNPIIAEGIHKPIISDELWNRVQGIMKQKSGKPSRIYDGEYPLTGILRCPECGAGMVISRTTNTLKDGTKKRIVYYACGAWKNKGTAVCHSNSIRVDKANAVVFHELEKVFSNEKFLKMILAKVNEENRRQTAQAEKEWASAEKELQQYENRRKKAFEAYEDGILTRDEFLKRKNEIAGESECVQKRMMELTTLTGQKRQKEIPYETVRDILQNFSRVLNSDGIERGLKKQLLHMLISEITIDKRKEIDTIHLHLTGELVQFLQSADGTTLRGVPPDFLCDKMGHPSLDLEFAI

SEQ ID NO: 5417 - protein, 536 aa, unidentified
  source 1..536: note = uncultivated organism
MDKKIDKEKPIIKCAIYTRVSTSEGLEQEFTSLDNQRESAESYIQSQKAEGWIALPEHYDDGGFTGANTDRPALQKLIEDIKAHRISCVVVYKVDRLSRSLLDFSQLLEFFDQNSVTFVSVTQHFNTQNSMGRLTLNILLSFAQFEREIISERTRDKMGAARRKGKWIGGCVPLGYDLDKVNHKLLVNLEETKIVREIFDLYLKEKSLLSVAKILNSKGYKTKVRKLADGKQGGGVKFSSTSIEKILKNSYYTGKVKYQNVLYPGEHERILDDETFMKVQDAMHTNPSKFRSHPPIGKKFGLLSKILRCKACDSSMYIAHSVKDGKMRYSHYVCLNASKRGYQECPTRLVNTGLMETKVMECLRKLSNDKRLAPDVWENSTLDEKRSVLLEFVKQIWYDGGTGILEIVLNSENKPHIYNVSKDELKYRPITPKDRLIQAEPQLRQNLLLAHQIQQLIDKKKTKDIKEVSSWLNLSQQRVNQIVSLLFLAPRIQEEIFVQNDSCLSEIPEYKLRTITDELDWDKQYTMWQKLVSKAS

SEQ ID NO: 5418 - protein, 550 aa, unidentified
  source 1..550: note = uncultivated organism
MGDAIFIYSRKSKWTGRGESVENQIQMCRDYIARNLADAKDSPVFVFEDEGYSGKNTKRPQFQQMMKEIRRGACRYLVCYKLDRLGRNLIDLAALVEELNRLEVSFISIRESFDTTTPLGKTMLYMAGIFAQMEREQIAERVRDNMVMLAKSGRWLGGNTPLGFSSRQVRSVKMDDKVRTSFVLKENPEELLTVRFLFQEFQEKQSFRKIEEYLWENGILTRRGKEYTSTAIRDILTNPVYCAADGDAYDYFLELGCQVCFTREEADGSCGLMAYARTSSARYKNKENPPSQWIIAQGKHKGEIPGKEFVRVQRMIGANKRNGEAYQRIRNEVALLPGIVMCSCGHAMRPKYYKKGREAENIPRSFYYLCTCTDSTHGERCTIPNVPGNELDLKVCQALFKAAVPARRGKEKEGCHEKTEEDRSTADRRKFLEQALKEKDKKLEGLVELLEAAELSQELVRCTNAKAKKLEREKEGLKEQLQALEDNGKEENTEFAQDAGADFFTLFQRLPVPKKREVLKKLLDRVEWDGKTAKIWLWGSEGGEKTKEEI

SEQ ID NO: 5419 - protein, 569 aa, unidentified
  source 1..569: note = uncultivated organism
MVDSRKTAIYSRKSKFTGKGESIESQIDLCRTYINLNFPDVKDEDILFYEDEGYSGGNTNRPQFQKMLKECKQNNICRIVCYKLDRISRSIADFIKLTDELELHKVDFVSINDKYDTHTPTGKAMLSMTMVFAQLERDTIAERIRDNMLYLARDGRWLGGNTPTGYRSTETIGSITLDGRKRKARMLELVDDEAKIVKLIFSKFLEFKSLTKTETYMIQHDILTKKGKLFNRFAIKNILRNPVYLIADEQAWNYFNALDIEIYSDREHFDGIHGMMTYNKTKQQTGKANEVNDISEWIISVGKHKGIIKGAEWVEVQKLLNQNKSKSYRKPRSNVALLSGLLYCGKCGSFMRPKLSQRRNKDGNLIYDYLCELKEHSRCKKCNIKRPNGNELDKLVCEEIKKITSDGSDFMKHLKQNFKNMNYNSETYQEKLKDLRNSKNKYEKQINNLLRSLAENEDSSASTYIINQVNELDTKINEIQKQINENLELANNISSSEQDFEILTELFSNAAKGIDEMSVEQKRNALRSIIYKVIWDGENAHILYFGEENQEIDLSNGGNNLEPQRVDCK

SEQ ID NO: 5420 - protein, 516 aa, unidentified
  source 1..516: note = uncultivated organism
MKQAQKNCAIYTRKSTDERLDMEFNTLDAQREACEAYIVSQRSEGWLASPEQYDDGGFSGGSLERPALNRLINDIKAGKVDVIVVYKIDRLTRSLADFAKLVDVFDEYGVTFVSVTQSFNTTTSMGRLTLNVLLSFAQFEREVTSERIRDKIAASKAKGMWQGGRAPFGFDIENRRLITNVDDAPIAKQIFELYLELGSVRALEAELKSRGIKSRERISEKGRTYGGQYFGRGALYGLLSNPSYIGKISHKGIIHEGLHDGIIPQDIWDTVQAKLQEQAPHPRGQTNTRHSNLLTGKIFDEDGAPYTPVFTKKKGKQYRYYLNKSLDDYKNHPKGLIARLPAHEIEATVEAIIRTHLSHKSKLLKILPLHAEDDDHVMQHIIDHQSSIRAAQLFSKSISKVIVKRSSLVIQIDISALRDVISENLKLGLPEIFSEEVIELTTTYKTRKANSGAVVIEPEKYRDPLDLPQNELENLVKGLVWREEHFSGSPLQMIADKYGHSKSHIHINILKTLKTA

SEQ ID NO: 5421 - protein, 517 aa, unidentified
  source 1..517: note = uncultivated organism
MGKVIGYARVSSDEQALHGVSIDAQRQIIQAYALMHQLPEIEVYVDAGFSGKNTNRPALQRLLADVRAGGVETIVVWKLDRLSRSLRDTLTILEDVFAPAGVTLFSVTEAIDTSTPSGRMMLNMLASFAQLEREQDSDRVVMAHKHLAKDCRYLGGHIPLGYLVDEEKHFQLDPVTAPIVRRVFEMYLSDAGYTQILRYLNGEVFQFAHRKAPWKKSDLNYLLNNSIYAGIYVHRLGADKRSKVTSPETVRVPGGVPAILTEEEWLRVCDKREGNRKDWRMMNKKHLDLLAGLTVCAVCGERCRIASRGKDRNGTIQRYYYCPSGCIGYVRIEKAEAAVIASAEALLADADIFRKASAIYNQYADGSAEDNAAEARPLQDQLRELAKRRANLVDFIAAHGDTSDALAADLRTITAEQQRLTDRLAALQRPPVRVNPERFLDALQNVKKETPRELCREAIHTVFSRIRCSQDRIEADLAIDCVVEMTRLHTVYCAGRCSVVVTHRGKGVFRRVLRGKG

SEQ ID NO: 5422 - protein, 513 aa, unidentified
  source 1..513: note = uncultivated organism
MPQVRVIQPISEQAKKLRVAAYARVSSDSADQLNSFATQVAYYTDFIQSKDEWEFAGLYADEAVSGTTADKRDDFQRLLADCRAGKIDRILVKSISRFARNTLDCLQTVRELKQLGVTVEFEKEGIDTGNMGSEMLLSILGSAAQEESLSISKNLKWSYRRRMRSGDFITCNAPLGYFLKDGALVPDPQEVPIVQYIFSSYLAGHSMDEIATFLNDQEAKYSRKEMTRWYRTSIRYILSNEKYIGDSLLQKTFTPNELPLVNIRNRGQLSQFYVKDSHPAIIPLEMFEAVQRLMKRRAATHTAKPKPGGFPLSHMMKCGFCGSTFQRHLKKEGARWCCYQHRKDKSLCVMEVVAESEVYQTFLLMYNKLLDNKNLILRVMLAQLIELQSKTTFARPEIVDLNQKISDLARQNHSLSRLQAKGCIDSAIFIERSNRNNKLIEELRFELRQLQEPDRVSETIDQTNLLLDLLDDAQPMLEFEPSIFKSMIKEITVYPEKFSFVLSNGLVLCEMRR

SEQ ID NO: 5423 - protein, 526 aa, unidentified
  source 1..526: note = uncultivated organism
MKRRSGAAAPPAAPASPKRRCAIYTRKSTTHGLDQEFSSLDAQWEACASYVKGQPGWELVQERYDDGGFTGANLERPAFQRLMADVEAGKIDVVVVYKIDRLSRSLLDFASLMERFRKVGAYFVSVTQPFLSADSDAMAQLLLNVLISFAQFERQMIAERIRDKVVASRRRGIWTGGNVPFGYRIEGRKLLPDPVEAGVVLQMVEAYERDDSDCALARELAARNVATRKGRPWTPQSVARVLTNPVYAGYITLGDELFDGEHTPLVERKRFERLQELRAAKEGPGCHRDHAKGQRNPEYLLRGILFCGCTHEDGSACGYAMTPSSTRKGSTVHRYYRCIARNKVAVGACPSRPLAAKQVENLVRQQVVDVARRLDEKGRKEGSTVDAAVARHTGRRIQELKERRQELRRKLDERERELAAIEEEGGDTHKRLTKRHGEPSKLREELRSVQAQLGHLEQLVLSGAWIAEQLRALDQVWDRLLPINRLRVVRSLVERVDVDSTTGEVRVTLKDWVSEALAGREQGHAA

SEQ ID NO: 5424 - protein, 539 aa, unidentified
  source 1..539: note = uncultivated organism
MATVVKAQLTHGAYILARYSTDHQKEDSIEVQVDRCRRWCEDRGLPVLDVFADAAVSGMKDTRPEYARMMRQLRAGGADTVVVYDQSRMFRKMSAWFAFRSELDRLGARVVSITQPMIGGDLRDPSNFMSEGITAIFSQSWALQTRQKVVEKMRFMAESGQFTGGKPALGFEVRDGRLVICEAEAAVVREIFSAYAGGASYREIIAGLNAAGRRTKRGGAFGTNSLHDLLKNEKYIGVLSYGRVGRDPDGRRNSHAAAGADVIRLENAIPAIIDRETWEKVQRRMAQNKKQQAGRPAAAREYPLKGKVFCGECGAAMTVTATNVRGQKYYYYSCTGKKRRGDCDNIAMRADKLEQRVADLVRLILGDPANLDGLISIMREEREKVQGDMLERLSTLTARRADVQAEIKRGVDAVFAGLNTPELTARVNSLEAEKAQLDHDLQQLHAAARGSDLTDDELRSTFSRIIGTREGDAALLSVVVRVEIGREEVTVWTLLDADPDGNFDFSHDGGRFIKILGDGPPAPRIYLNGGLLRFSFRRN

SEQ ID NO: 5425 - protein, 545 aa, unidentified
  source 1..545: note = uncultivated organism
MATRLRCAIYTRKSSEEGLEQSFNSLHAQREACEAYVLSQAGEGWTALKETYDDGGFSGGSMERPGLAKLLADIAAGRIDVVVVYKVDRLTRALADFAKIVEAFDARGVSFVSVTQAFNTTTSMGRLTLNVLLSFAQFEREVTGERIRDKIAASKAKGMWMGGVIPLGYDLGDRKLVVNPAEAETVRQVFNGYLKAASAKDLVAQLAAAGVRSKAWTTRDGKPLGGVIMRRGAIYHILQSRLYLGEIVHKGLVHPGQHQALVSQELFDAVAAKLASQAARKRDRPIRAAPGPLTGLLFDANSQPMSPSFAYGKGGMLYRYYIAMALQVGVTPERDGGLRRVSAPAVESFLVETLRRLGRRTDLEASDIPRLVMRLELRNDETHLVVNTTMLFPGEHPELLLTTLRQRLREGEQVVTEQGVAGRLRLVLPQRLKLRGGRTIISGAADEPRGRINSGLVQVLKRAHAELLNLKASPLTRPAEMNAAVAPATQHDRQVCRLAFMAPELQQQILTGRQPTGLTLRRMLKSQMPLAWADQKAWVDAISRA

SEQ ID NO: 5426 - protein, 575 aa, unidentified
  source 1..575: note = uncultivated organism
MSHTDMNKSKHRLRCAIYTRKSSEEGLEQDFNSLDAQRESCEAYVKSQQSEGWDTLSGDYDDGGFSGGTLERPALQRLLADVEAGQIDVIVVYKVDRLTRSLSDFVRMVESFDAHSVSFVSVTQAFNTTSSMGRLTLNVLLSFAQFEREVTGERIRDKIAASKKKGMWMGGFPALGYEAVDKKLVVHAQEARTVNHIFKKYLELGSVLRLKGALDATGIVSKARKTKAGRVWGGKPFARGALYAMLQNRIYLGEMVHKGHSYPGKHEAIVDQELWERVQKTLAAGRVTRQSGAGARDPSLLAGLLHDDLGERMTPTHAVKKGKRYRYYVSRSLILNPRTIAKGGRRIPAGEIEQVVTGRLRKLFANDKELLEAVETLVPDGIGQNRLIGAAVQLSKEWPGLEQSKVRDLVLALVPRIDILPDRVDIRVSPAGLVHILSGRTNDPAEEGTELDAHLTLNVPARLKRTGMEMKMLVDGQTQNAGKADRSLLLLIVKAHALRDKLEAGGGMDVGEMTRRWGSGRAYITRLLRLSFLAPDITKAILEGRHPKDLTAARLMRETRLPLTWQEQRESLGFV

SEQ ID NO: 5427 - protein, 558 aa, unidentified
  source 1..558: note = uncultivated organism
MRAAIYSRKSKFTGKGESVENQIQMCKEYAIKFLGCINEDFLIYEDEGFSGGNTNRPQFQRMLNDARIKQLDMIICYRLDRISRDVSDFSQLINELERYNVSFISVREQFDTSKPMGRAMMYVASVFSQLERETIAERIRDNMMQLAKTGRWLGGTTPTGYKSEVVVTTDSSGKEHRMSKLVSISEEVSIIELIYNKYISFKSITMVEKYLAQNRIVTKNGVDFGRFSIRFILSNPVYAIADENLFQYLSTSGYDMNSNLEEFNGINGLMGYNKTSQAESAHSERYRNCSEWVFAVGLHPGIVPSEAWIETQELLLQNKCKSYRRGKKTKYLLSGIIRCANCGSFMRPKASKRLNENGEAIFYYLCEMKEKSGKLRCSITNIKGNVLDDMVMKELKHIVMDYPPICDEIYCNGIRNWHGKDKIKSEIQLLQDKRDSSDLKIKKLIKLISKEENDDIQVAMLYQLRKENDDKEAYNTRLFELSSVDTLSDISNENLELLAQSLLSSSESFWNIMSVDIKRRMLKSIVKNAVWDGVKLDVFLRGEERAWANSQNVSVLRG

SEQ ID NO: 5428 - protein, 557 aa, unidentified
  source 1..557: note = uncultivated organism
MAKKLRCAIYTRKSTEEGLDQAFNSLDAQREACSAYITSQKHEGWQELPSLYDDGGFSGGSLERPAVKRLLADIEIGEVDIVVVYKVDRLTRALADFARMVAIFDAAGVSFVSVTQQFNTTTSMGRLTLNVLLSFAQFEREVTAERIRDKIAASKAKGMWMGGVPAIGYRPENRMLVPVPEEAKIVLHVFERYLELSSVRKLQAELKRAGRVTPLRVTQKGKTSGGCTFSTGKLYHVLSNPIYVGRIRHRDKIYAGQHEPIVDQDIWDKVQAILADNRNSHANRSKARNPSPLAGKLFDPAGNRMRPVHTTKSGRRYRYYVSPELIEGSVETGAKGWRIPGAELESILSQTISKHLDEPKIRLSLIGDQGGPDRMEVLLSAIDDLLMTLQCSGSRQSKTSLKKIVQRVDFTEENLSAQIDIGGAFHRAENFNDVDYPTLQISAPIKLARRGGELKLILKGAAGDASNPDPNLIKTLLDARRRYRSYTGEAEMTLSQIATHDITDTADVSRSLQLAFLAPDLVAGILDGRQPPELTATKLKRLDKLPLLWEDQRALLV

SEQ ID NO: 5429 - protein, 525 aa, unidentified
  source 1..525: note = uncultivated organism
MAEVLCIPKTKPERTGYQIRSIRVCAYCRVSTDADGQYHSYDAQMEYYRGLIQKNPAWKFCGIYADEGISGTSRWGREDFRRMLEECEKGRIDLILTKSITRFARNTVDTLSTVRHLKEIGVSVYFEKEGLNTMTEESEGILTIYGAVAQQESENISQNVHWSAVNRFRHGTFVISRRPYGYDKDEEKELAVKEDEAVWVRRMASMYMNGVSGVRIAEYLNGNQVPAPYGGLWSSEAVLRILFNEKTVGDCLHQKTYSTGMVPFRTEKNHGKKPQYFIRDDHEGILSRDEQMRLQQIKEYRLGRQARAKSCGSEGTYILSGKVVCGECGRAFIRKKEQRRKGVSIKWRCPGHRSEACQCFTNEIWEADIERMFVNTFNTLKEHADEILDPVIRGMRKMQETNGLHEALGTLNQKKLELKEQRHILRQLKANECIDSALYFEESRKIERELSRCRSEEKQLHSRGTHQDTITGLQATLHQLQGYDGKMQAFDGDQFILLVREVSVGKERELGFHLRCGLNLYEPVI

SEQ ID NO: 5430 - protein, 565 aa, unidentified
  source 1..565: note = uncultivated organism
MRETSIFPNYVFNKETGWRENLPANMEEGTRVLCLYRVSTDKQLYHNDNNEADIPMQRVRCREFCEQRGWTIICEMQEEGVSGHKVGAENRDKIQLIKEYALQKRFDILLVFMFDRIGRIADETPFVVEWFVRNGIRVWSTQEGEQRIDSNVDKLINYIRFWQADGESVKTSIRTSNSLKILTEQGYFTGGVCPYGYEFVKSSRLNKKKQAVNDLAVNDEEAQIVKQIFEWAQFAGYGAQRIANLLNEKGVKNRSGKNWHPSTIQGILKNSLYTGVLQNGDASATRSDLLIVSKATFEKVHEMLAARSRKNEAIRSAPLNTRGNSLLSGMVFCGHCGARLCVTTSGKGRKKRDGTDTVRTRYTCQTKSRTHGDCDGQTGYTVERLDKMIEAIVLSLFERVERMDKSEIVGKSFQDSTNLQKALLQKVKREYEKAEEDLTKLKCEVVKAITGESSFSAELLSSIIEEKDRECHELKEAYHKAEQELKNSANKLAKMGEQYDELLEWSSAYKNATMAAKKMIVSNLIERVDVFRGYKLKIKLKISSEQFFSGLSLNELNEESALIPA

SEQ ID NO: 5431 - protein, 565 aa, unidentified
  source 1..565: note = uncultivated organism
MNRLHCAIYTRKSSDEGLEKEFNSLDAQREACAAFIKSQKHAGWVALPDLYDDGGLSGGTMDRPALRRLLADIKAGKVQIVVVYKVDRLTRSLADFAKIVDVFDVHGASFVSVTQQFNTTTSMGRLTLNMLLSFAQFEREIAGERIRDKIAASKAKGMWMGGNVPLGYDVKDRKLSVNEVEAETVRMIFRRYADLGSARVLGHELDRLGIVSKRRESAGGVLSGGNRFSRGALYTLLQNHLYRGEITHQGKVYLGQHQAIIDTELWQAVQEKLSGNRQARALETNAEEPSLLPGLIVDAQGQRMTPTHAVKKGHRYRYYVSTSLITGARSDHAKGWRIPAGDIEGLVLDRLRAFFASETNVGEALSGFDLDASTLRSALSEAKQLAESWADLPSNKVRELVRSVVEAVEIQDEKIVIVLKRNEIASVLLGNTFSLSPMSESDAFELCIEAKLQRVGKGIRLVVGGGIAEKSNGQLAALMRDAHATCVALMTGRDATIDAMAQRLGIKRDYLSARLRLAYLAPDIVRALISGRYPPELTPARLVSICKDLPYDWQLQRAVLGFETR

SEQ ID NO: 5432 - protein, 538 aa, unidentified
  source 1..538: note = uncultivated organism
MTKVAIYTRVSSDEQVKGYSLDLQEEKLLDFCKIQDYEISKDHIFREEGESGAKKNRTQLDRLMQSAKDKEFNLVLVYKLDRFSRNLKNLLELVGELEESGVSFKSVTETFDTSTPMGKYMLQNMGSIAELEREMIRERMVSGQIKAKQSGKYAGVAPYGYNLNKEKHCLEINKEEAKIVKKIYRWLVEDRLTLYMIQSKLNSLAIPTKYDNLGKKKPVNGASFWKKRTIGRILSNEVYTGEFIYNKMLHAYHKRLKKYEGMSVRPEEGWIIIKTPKIISKETFNLALEQLKKNRNFSDRNKRREYLFTGLFECGICGGKYGASYDAFRKHAIESHRKRYFCNNSRIYTRQEKCKTPSITESRLEEPIWNKLVQTLSNPQLAFDQLEKIQKKRLKESGVEEKMKELDILIEKKRSGIDKLLDLYINGGLDKVSYETRARKLEEELKRYKNELERYKYQFVSEKEKGLRVNSIKNMYEQFKDNLENIGYNDKRELLRMLISRAVIKGKEIDIHCNIPYRFAFAGQAMNMSSCKTNPRKK

SEQ ID NO: 5433 - protein, 539 aa, unidentified
  source 1..539: note = uncultivated organism
MAANERKYLRCAIYTRKSSEHGLEQDFNSLDAQREAAEAYIKSQAHEGWRLVKARYDDGGLSGGTLERPALQSLLTDIRSRKVDVVVVYKVDRLTRSLADFAKLVELFEAHGVSFVAVTQQFNTTTSISRLTLNVLLSFAQFERELAGERIRDKFAASRRKGMWMGGTIPLGYDVKNRKLVINEQEADRVRLVFRQYLAVGCLAKLRTDLEQRGMRSKQRILISGRAQGGGSFGRGALYHLLQNRIYRGEAVHKGVAYPGEHKAIVDEELWRAVQDRLAANRTIRRKSRIETGALLGGLIYDDRGNIMSPTYSIRRGNRYRYYISSALLHDRRPDAGSLARINADDVERLVVAVLGRELSRPELLADGPSAGWSAETRTLVRDTVERVVIQSGQVQITRRPAATSAAGDPPDEDGDPRQVHVEPLPAPRPRARKEIIVPGGRDSPPRRLNQALILAIARAKSWMRDLRGGKYADTMDIARQSQLSDAHVRRILRFGYLAPDIVEAIVEGRQPRSLTVKRLLQGIPCAWADQRTAFGLAR

SEQ ID NO: 5434 - protein, 520 aa, unidentified
  source 1..520: note = uncultivated organism
MKRRCAIYTRKSTEEGLEQAFNSLDAQREACAAYVLSQAHEGWELVNEHYDDGGWSGGNMARPALQQLLADVAAGKVDVIVVYKVDRLTRSLADFARIVEALDKAGASFVSVTQAFNTTTSMGRLTLNVLLSFAQFEREVTSERIRDKVAASKRKGMWMGGPVPLGYRLENRKLLIDENEAETVRLIFQRYLKLGSVGALANELAQTGVRTKLRSFGNGRTVGGVVFTRGPLAHLLQNPVFAGKVRHRGELFNGEHEAIVDQETWNKVQQLFATNRRERLHGTRVRSPSLLTGVIADEDDRPMTPVFTTKAGRQHRYYVTRLKPGEDRRCTWRVPAGDLDRAVLDCVEAALTRRAVERSGEALEEPMALHSCSVPEQRRALLENDVRVQLRSTEIIVRFGKDADDQVHIPATLGRRGNELKLVLNGGDVTQANVDPALLKLISHAVLAQQAALTGKQDPIVSHYSKRHLWQLLRVSWLAPNIIAAITEGRQPPTLTGRRLLRAADLPLSWGEQRRFLGFN

SEQ ID NO: 5435 - protein, 527 aa, unidentified
  source 1..527: note = uncultivated organism
MKTGSTKLVRCAIYTRVSTDQGLDQDFNSLDAQYDASQAYIRSQAHAGWTLLRGKYDDGGFSGGNTDRPALQRLLEDVGAGKIDVIVVYKVDRLTRSLADFAKLVELFDQHNVSFVSVTQQFNTTTSMGRLTLNVLLSFAQFEREVTSERIRDKIAASKRKGLWVGGMAPLGYDTKDRKISVNEHEAKRVRDIFRSYLKLGSLNLLMPDLRKRGIVSKVRTLKTGETVGSIPFTRGPLVHLLRNRFYVGEVVFKGELLAGEQPAIVDRDLFDAVQAKLSEQRNGHTTTRLKSEALLMGRIFDDRGNRMSPTHAHRRGIKYRYYLSSAIFNGQAERAGSMRRVPAAEIEALVIQSVRENLKLNDPVGDRQLVDTYIVRVEIQPEQLVIFLAQTEQHKRAADKDILRVPWQKPPSKRRREILLTGPVSPQNARPMRSETRATLVASIARGRRWLNELISDPAATKESIAEREGCSVRKINMTISLAFLAPDLVKAAIEGRLPHGMGLVRLSDLPVEWSRQHQVLGLASQ

SEQ ID NO: 5436 - protein, 526 aa, unidentified
  source 1..526: note = uncultivated organism
MARNSAPRSAANASIVPAENRAIRCAIYTRKSTEEGLQQEFNSLDAQREAAEAYIASQRGEGWQVGTEHFDDGGYTGGNMDRPALQRLLAAVESRSVDCVVVYKVDRLSRSLMDFARIIEVFDQHAVSFVSVTQQFNTTTSIGRLTLNILLSFAQFEREIISERTRDKMSAARRKGKWIGGHPVLGYDIDPKGGRIVVNPGEAEHVRTLFGLYVELGSLLPVLQEAERRGLLTKQWTTEDGKVRGGQRISKGTLHGLLTNAIYTGMVDHKGTLYPGEHGRIIEQNTWDRVHETLRRNNADNGASLKNKYGALLRGLLFCVPCGTPMVHTYTTRKSKRYRYYVCYRAQQQGWKTCETKSVPAQAIETAVLDSIRRLGSDPKLAEAVAVEALEQMAQRRRAIDQESDIQRTRLRQLNHDLAKEAADTRVDSGGRFERMATLQREIEAAERRSVELAAERSDLDRDHLNADDLRHTLAEFDAIWATMATKEQEQMVHMLVAKVGYDGRTGKVTVNFSNAGAKELCQGKC

SEQ ID NO: 5437 - protein, 551 aa, unidentified
  source 1..551: note = uncultivated organism
MIAKKKGVEPERNGPLQVAFYIRVSSDKQAKKLDGSLDTQLDLLNKLVEYKKSTGDDWAVAERFVEGESEGRRRGKSGKDTNRPTFQKMLQAAKAQLIDVIVITRIDRISRSVVDFLLLVEELTKYGVKVVSLRENIDMTTPTGKFQTILMIALAQHEREMISARVKEKVEWRAERGMPIGPPPIGYRMKDKMYVIDEEYAKHVRECDRVYLEHESTEAVAREFGKMGFRTPGGRPYSVPLICRILRNPTYVGKLEYEGHLYDAMWEPIRAKATHDRILKILDRNGEKNRSARRQAVDYVYLLQGLLRCGSCGHMMTPQPAIGRNGRYYPYYSCTAAEKFAGTVCPFRYVPAEAADRAILEFMKKLALKPDLVETFARRANEFTSQTLGKLREDLERVRQQLAAVRIKIGNYLDAIGEGGKAALASVKERLEALEAERLELETSETRLKAEYQAESAQEIVVQDQVETLRMFDRLIKENEARWDRLKVLIPRFIDYVVWRTKDKGEGSIEVGLLQSPVALAPELDVAVQPPPGGRNSEPEAIVSSEPNPTA

SEQ ID NO: 5438 - protein, 535 aa, unidentified
  source 1..535: note = uncultivated organism
MIKQIRCAIYTRKSSEEGLEQDFNSLDAQREACEAYIKSQMHEGWVLVDKQYNDGGFSGGTMERPAFKELLKDIENDEVDIVVVYKVDRLTRSLMDFSKIIDVFDKHETSFVSITQQFNTTTSMGRLTLNILLSFAQFEREVTGERIRDKIAASKKKGMWMGGCPPLGYKKEDKKLVIHEEEAKKVQMIFDKYLELKSVPKLMHYLKENEIKTRTDKNFSKGQLYHLLANKVYIGKITHKDKVYEGEHEAIITEEIFEEVQKLLYENKVDKTCGTKCASNSLLAGLIFDDKNNLMTPSHSNSHKRRYRYYVSTALKNYNDGEVGSISKIPAGEVEKFVVETTKEFLQDKEQIQKLIKDFKVSKQNKLIYMAQNIKDYSEPKLIRAIIHKIVISKNSIEIILNENSLINVLNALANNQKIVIPDKSKKFNPITITKKIKITQPSRNDNILILNSKEYDTPELNPYLVNAIVKSYYYHKQIREGRTIQDLQAEEGLKDSKYIRNILNLKYISPELTEQILTGTQPKDLSLQKLIVSL

SEQ ID NO: 5439 - protein, 567 aa, unidentified
  source 1..567: note = uncultivated organism
MSSPPAKTTVRCAIYTRKSSDEGLDQEFNSLDAQYDACSAYIASQKHEGWKQLPDRFDDGGISGGTLERPALQRLMAEIDAGRIDMVVVYKIDRLTRALADFVRLVERLDAKGCSFVSVTQAFNTSTSMGRLTLNVLLSFAQFEREVTAERIRDKIAASKKKGLWMGGLAPLGYSPHPDPLRRELVIAEGEAETVRRLFHLYAAHGCLRLVEEAARTEGITSKARSTASGQRSGGAALSRGQIHYLLTNPIYRGLIRHKSALHQGQHPAIIDAGLWDRVQAKLQLAGSKPRGRRAQHGVQSGARAQQGMAAPLIGKLRDETGDPLTPSHTQRHGRRYVYYVSNRLLAGGTDPTGWRLPAEALHQLLRRTLAHRLEVAATEHRLLVHPDASRAAAVAAKGIALADRCKDGSDPLCFDLIATIALRQGAMEIALSPAPLAAALGIPMGDLAPDLLRLTAAFARKRRGVESRLISGPTEPSPDATLIRLLAKAHRWSREMRQGTSLTEIAQREGHSDSYIRTRTPLACLSPKIQAAILAGTQPPDLSLEHIVRSGIPLDWAEQEAKFGFR

SEQ ID NO: 5440 - protein, 543 aa, unidentified
  source 1..543: note = uncultivated organism
MLPKQTEYKVGMYLRLSKDDERAGESLSIENQRRVLKNYIGEQGWTLYDEYVDDGISGTTFERPGVQRLLEDAKAGKINLILCKDLSRFGRNYIQVGQYTDYIFPMYNIRFIALTDNVDTANTESAGMDMMPIMNVFNEWHSANTSKKIRAVIETNAKAGKYMTTFSSYGYDKGSDEKCTPVIDPEAAAVVRRIFEMRVSGMGYKSIAAVLNDEHILIPTDYKYKKLGKEIGRKSEHLWTTHTVRCILQNPIYIGTLVQLRNTTVSYKNHKHIDRNEENWAVVENNHEPIISMELWNKCREIDASNSRGKKTQKGEMYPLSGFCYCDKCSSKMKLTGNDNDKNRMTAYSCGRYSRFGTKYCTSHFITRRAIEGIVLADIKRQIDFVMNDAQAREKYLARKRKSSAEQEHSDKKRLKDTEKRINELNRLIQSIYEDKVAGKMPEDMAFEMLEKYQAEKKALQTEYEEMQKRTAEAQQDEDDVDEYIRRLKSYAGAEELTRQMCLELIEYVIVDENPKDKKAARDIHIYYKLIDKPLTNKSNALA

SEQ ID NO: 5441 - protein, 580 aa, unidentified
  source 1..580: note = uncultivated organism
MAESEKTPRRSAKKARCAIYTRKSSEEGLEQAFNSLDAQREACAAFIASQKHEGWTVLPTLYDDGGFSGGTMHRPALKRLIIDIEAGQIDVVVVYKVDRLTRALSDFAKLVDVFDRRGVSFVSITQQFNTTTSMGRLTLNVLLSFAQFEREVTGERIRDKVAASKKKGMWMGGMPPLGYDVKNRKLVVNEDEACIVVDIFRRYLVLKSVHALRDELADAGIKSKRRMRPDGTAYGGQTLSRGALYLILQNCLYRGEIAHKGHSYPGEHLAIVDKPLWDDVQAVLAANRVERATGARAKHPSLLTGMVFDETGERLTPTYAVKKGARYRYYVSTSLITGAGRNRSSGRRIPAGNLEGLVINRLHTFLADPGAILDAIDNDSHNGSGCSQRIERGRQLSESLGAGAPDTVKAMFMALLCRVDIRADRVDITLSRCRLSELLAGSIDLTMQHQALANAPGDFLMLTVPVNLKRVGREMRMLVENADDQTAADPSLLRIMARAHAIQARLIQNPKLSVHDIAREERVSAAYLYSLLRLPWLAPDITTAIINGRNPPQLNAQTLMRLTPRLPAAWAEQRKLLGFH

SEQ ID NO: 5442 - protein, 532 aa, unidentified
  source 1..532: note = uncultivated organism
MTARTPAKTVRCAIYTRVSTDQGLEQDFNSLDAQYDAASAYIRSQAHAGWTQLRAKYDDGGFSGGNTDRPALQQLLADIRSGKLDVIVVYKVDRLTRSLADFAKLVELFDAHGVSFVSVTQQFNTTTSMGRLTLNVLLSFAQFEREVTSERIRDKIAASKRKGLWVGGMVPLGYDSRDRKITVNQAEAERVRDIFRSYLKLGSLNALMVDLRKRGVLTKARRLRTGAAVGGSPFTRGPLAHLLRNRFYIGEVAFKGEILPGEQPPVIDRRLFEAVQARLDQQITNHKTARSRSGALLTGKIFDDRGQRMTPTHATKGAVRYRYYTSSALVQGQADQAGSIARVPGPEIETVIVGAVRKHFSLPPDIDADHVIQKHVLRVEVHLGKLIVQLTGSPASATIAKRKKSPTQIEVPWQKPPATRRREILVPPSATSHLTPRPIRSENRTLLVASIVRGRRWLNELTTDRDVTTATIAAHERCSERKVNMTISLAFLAPDLVQAAIDGRLPHGMGVAKLANLQASWARQRNVLEILH

SEQ ID NO: 5443 - protein, 577 aa, unidentified
  source 1..577: note = uncultivated organism
MTKQTRVIAIYSRKSKFTGKGESIENQIELCRQYIASHNGTNAAETAIVFEDEGFSGGNLQRPQFKHMMVDAKAGKLSAVVVYRLDRISRNIGDFANLIEELSNLKIAFVSIREQFDTDSPMGRAMMYIASVFSQLERETIAERIRDNMQELAKTGRWLGGITPTGYASEQVKRVTVDGKVRKSCKLGLVPEEADTVKLIFSEFLKNNSLTKTDAVLLVQGCLTKNRKRFTRFAIKNILINPVYMTADEDAYDYLQKNNVELFSEKAAFDGEHGLMAYNRTLQKAGRANQIRPMSDWIVSVGNHPGLISGVQWVKVQQMLNQNKSKAYRKPRSNVALLSGLLICGDCGEFMRPKMTNRVTADSEQFYTYMCTLKERSKSQCCHIRNVNGNQLDKAIIEQVKQLSEDNGEFMQQLEKGRKSLKGNQEEYEQRLSQLQAEQHGNEEQIKALVLSLTKAAGTAAEEYIMQQIEELHEKNKLLTRHIEEVKQLVDRHNLSDHEFDLFRDMLSSFRNTIDGMTVEQQRAAIRTCVRKVIWDGENVHVYLFGSDGDIDDKSMTLLEEYSKMPDESIPLGENSK

SEQ ID NO: 5444 - protein, 557 aa, unidentified
  source 1..557: note = uncultivated organism
MRREGKKYVMYLRVSTEMQVDGYSLEGQANCITRYADREEMVHFGTYEDAGKSGKSIEGRPEFKRMLNDIKNGLGVDYVIVYKLSRFGRNAADILNSLELIQSYGVELICVEEGIDSSQTSGKLLISILSAVAEIERENILEQTMNGRKEKARQGKWNGGPPPFGYQLVNNELVIDEEEAEVVRLIYDRFVNTKAGYGGIAKYLNLQGFKKRPHQRHSIEDWSGHFIKIILDNPVYCGKIAFGRRTKEKVKGTKAEYRRVETDDYILSNGKHEGIVSEEMWNKAREKRIATGVKWECKQGRERSHLLTGILRCPKCGSIMYCNRHEWTNRDGTYKDVYYYYCGHSGGKRGKICDYKAKLRKTDIEPLVIEAIKLLVANETFAKEVQRRISQEIDTTQIDTEIANYEKKLKEVIANKTRLEHEIDTMPMEATHRERKIADMTKRLDSLYDTISEIESCLADANLRKESIEKERVTVENIYEMLKTFGAFYDIMTEEERRDLVSYLIKEVQIYPNDEEAKIPLKSIEFNFPVYVNNEEVNKVLWEKDSSFEVLSVLTIK

SEQ ID NO: 5445 - protein, 564 aa, unidentified
  source 1..564: note = uncultivated organism
MTRQHVRCAIYTRKSSEEGLEQSFNSIEAQQEACRAFILSQKHEGWVALNNRYDDGGFSGGTMERPALKQLLSDIQADKVDTVVVYKVDRLTRSLADFAKMIEIFDSHTVSFVSVTQQFNTTSSMGRLTLNVLLSFAQFEREITSERIRDKVAASKKKGMWMGGVAPLGYDCVERRLILNQVEASTVRKIFRQYLRLGCVKKLKDFLDHKQIHSKIRTSSAGRTCGGAAYSRGAPYHQLNNRIYIGEIVHRGQSYQGQHRPIVQRELWNKVATRLHANNQAHRMGKSHSTPSLLGGRLFDGKGARFTPTHTVKNAKRYRYYTSQTVIRHAGTKPVITRFPAQELERFVKSQIHLLLQAPEKCVVGMENSPSKDAAAERARELAREWPKLEISKLHEFVRNILKRVVLGLTTVRIEIDKTKLLRTLLAENSEALQSLRTHKLDILNLASDFQVLHRGGELRLTTPQNGSCFEGAPVPSFAKVIARARDWYERIVAGEVSTIGQLAEEVGLTRRYVRRILQCATLSPQITEVLLTGKHRPNLTLKEVLHSMPLNWREQEQRLFRPL

SEQ ID NO: 5446 - protein, 537 aa, unidentified
  source 1..537: note = uncultivated organism
MSARPVRCALYTRKSSEEGLDQAFNSLHAQREACEAFVRSQASEGWKVLPDVYDDGGFSGGNIERPALKRLLEDVDAGKVDTIVVYKIDRLTRSLADFARIVDRLDRAQASFVSVTQSFNTTTSMGRLTLNVLLSFAQFEREVTGERIRDKIAASKAKGMWMGGLPPLGYDPPTDRAARTLVRNEPEAEQVRTIFSLYLELGSVSALEARLAQESMRSKVWVSAKGTRSGGVPFSRGALFHMLRNRVYLGEIVHGESCVAGCHPAIVEPEVFAKVQAQLADNTRARNDRPLRSAQLPLKGLVFDADGNPMSPSFGYGRGGRVYRYYVSAPLQQGRKVEPRDGVLRRVSAETLEEAVRTQLATVMPGEDDRSLADLLKPVRRVEVLPQDLRIAFEARALPRDVRERLHPCDTHADRRVLIGPVRCQARGGRTWVLTPACGSAVRNARRDPVLVRGLRKAHRVGADLGWKAADGSFSGKVVPTNQYDRRLWRLVFLAPDIQEAIMEGRQPRWLTLDQLLKMRIPTAWTEQRHALGFDEK

SEQ ID NO: 5447 - protein, 535 aa, unidentified
  source 1..535: note = uncultivated organism
MAQKVVKKITKIEPVSSYLAPESVDVKRVCAYCRVSTNSADQKNSFESQMSYYTRLIQEKEGWVLVGIYADEARSGTKIERRDDFQQMMQDCRLGKIDLILTKSIARFARNTVDSIQAVRELKSLGIAVYFEKERINTLTQKSEQMITIMSSIAQGESESISTNNKWAAVRRFQNGTFVISSPPFGYENNEDGELIVKKEEAQIVRRIFLEYLSGRGAYTIAKGLEADKIPTIRGAKEWQDCVVKGILLNCAYEGDLILQKTYTTEGVPFIRKTNRGELPQYFIQDDHEPIITREEAAAVRQIYAYRREQRGVEDTSVYQNRYIFSGRIICGECSTNFRRQKIYIGKPYEKIQWCCYQHIKDSAKCGQKAVREDLIQEAFIRLWNRLASNYEEIIIPMLAALKSLQSNPEQEREIRKAENHIQELKKQSHMLSKVLTEGSIGSAIFIEKQNRLDAELRDTQRKLRQLQNQKAFEWEISQTEYLATIFRNRPPIIETFEEELFLLLIDQVIVLPDRQLLFRLKNGLELQEDIKEEG

SEQ ID NO: 5448 - protein, 546 aa, unidentified
  source 1..546: note = uncultivated organism
MLENEPSKPLRVAAYARVSTDRDDQANSFESQMNYFNDWITRQEGWNLVNVYADEGITGTSTQKRQQFNQMILDALSGRIDVILTKEVSRFARNTLDSIAYIRKLKEHGVIVIFMLDGIDTSQPDAELRLTIMAALAQEESRKTSERVKWGQKRRMEQGVVFGRGMLGYTVRNGQLELEPEGAVAVRQIFHKYTIEGKGSYVIARELKEAGIKPMNPDGRIHYENDWSTTIILRILRNEKYVGDLCQKKTWTKNFHDHKKRYNHGNEDTVYIKNHHPKIAIISRELWDATQAELKRRALTKEQKSKHSNRYWCSGKIWCGVCGERFVSKRKPLKDGTTHVSWRCFNHTKAAAFKSAECKNNHSVNEKTLLSIMGYILEFLVSNKEQIKQELLAEIEAFGIEHISAPTDTTALQITQIESRKSKLMDSLLDGLINKTEFTFKNSELDAKLNALKGHLDCMESKFQTKQQGIEKINRISEKISSILDFAFKEGSCVLNSTTSKIVVYQDKRVEVYMVGIPCSFIVTYKTSGRSETYKTTITGFDINRL

SEQ ID NO: 5449 - protein, 562 aa, unidentified
  source 1..562: note = uncultivated organism
MERSKKMVRCAIYTRKSTEDGLEQEYNSLDAQYDACSAYALSQRHEGWTVVKDRYDDGGFSGGSLERPGLKRLLADIEAGKVDIILLYKIDRLTRSLSDVAKIVEILDRKGASFVSITQSFNTTTSMGRLTLNMLLSFAQFEREVTGERIRDKIYASKRKGIWMGGPVPLGYDVVDRKLVANEVEAEQVRHIMHLYLQASSVPELVEVLAKNGSHTKVQQRKDGGTRGGVHFKRGNLYHLLSNRIYRGMTVHKGEAFEGEHEAIVAQELWDQVQARLAKQGQGGSSRKVSARTGVLAGLIYNAEGTPMVLTHTQKGNRRFHYYANRYEALGDSPASRVSARDIEDIVSAQLSQTLASGSQIQNILLDGTYNVEQLHNVISRCSLLASELETAKYSRKQEIFRNVLDRVELYEDRVVIKIDNRSLLDAVGADGAIQPSSSDLIIEREAIRLRRGKALRLVIPATLGGDGISLRDDKLVGLIAESRAIMAEITTNPDKSVPTLAAEQGRCRVRTMKVAKLVCLDPDIVTAIVEGRQPLKLSPSKLLAADLPLAWADQRRVLGFG

SEQ ID NO: 5450 - protein, 565 aa, unidentified
  source 1..565: note = uncultivated organism
MNRKIRCAIYTRKSTEDGLDQEFNSLDAQHEACAAYVTSQRGEGWSLLPARYDDGGVSGGTLERPALRRLMEDVDAGRIDMIVVYKIDRLTRSLSDFARLVDRFEAAGCSFVSVTQAFNTSSSMGRLTLNMLLSFAQFEREVTAERIRDKIAASKRRGLWMGGVPPLGYDTHPDPNTRSLVINDAERGTIETLYHLYDELGCLRAVEQDASRRGLRSKRHVFSSGRKQGGGLLSRGQIHHILCNPIYAGRIRHKDNVFDGQHAAIIDAALWESVQARLQAASARPRTRSKETEHKTCVGSPAPLIGKFRDPTGDRLTPSHTRKGHRRIRYYVSNRLLSGRDPTGWRLPAGRFEASVATAIADHLEQSAKRHALLGAPDVGAGPRLGDRAMELAERLRAGETDLLPVIVHEGKIGTDHLAISLNPTALSGLWEVTPGDLSDTVLTLTPAFETRRRGVETRIVVGDTAREPDRTLLRGLVTAHKWAADLQSGCPLSEIARREKVSAAHIRTRAQLAYLSPRLQRAILQGTQPTDLTLEKLVRSQLPLDWDKQERQLGLRVTQAFPET

SEQ ID NO: 5451 - protein, 535 aa, unidentified
  source 1..535: note = uncultivated organism
MKLRVAAYCRVSTDKNDQLNSLESQKKYFTDYINDQSGWELIGIYYDEGVSGTSTKMRAGFNRMISDAKAHKMDLILTKEVSRFARNTVDALSYTRLLKELGVGVIFMSDNIDTRDKDGELRLTIMASIAQEESRKTSERVKWGQRRRMEQGVVFGRDMLGYRVKKGRLIINPAEAEIVRLIYHKFLIEGKGAYVIARELSEAGIRPKRAKEWSSTVILKILRNEKYAGDLCQKKTYTPDYLSHAKMYNRGQEEMVYIKDHHEPIISREVWDKVQAELKHRSPTFGEKSKYSSRYWCSGRLLCGECGHIFVSRTKKLKSGDTYRAWRCHAAAKHGAKKAGKDGKTIGCDSKSVNEKVLTAGVALVLRKLRGNIDVLAEEILKELREVQSSDIEIDMDLLHRQIENIYKKKRRALDLALEGTISKEDLKRQNEYYDSQIEKLRTQIALTESMASQNGRSLSRIETYINEIKRILSFDGEDTLVFREVLDRIVIERESYITIYLNHIPFGIRLHYNTNGRLNNFCVSFDNIEVVQSL

SEQ ID NO: 5452 - protein, 529 aa, unidentified
  source 1..529: note = uncultivated organism
MTRQNGKQPPPRTRLRCAIYTRKSTEEGLDQEFNSLDAQRESAETFIQSQRGEGWVCLPDRYDDGGFSGGNMERPALKRLMADVEAGKVDCIVVYKVDRLSRSLLDFARIMETLEKRNVSFVSVTQQFNTTHSMGRLTLNILLSFAQFEREIIAERTRDKMCAARRKGRWVGGKPMLGYDVAPNGGRLVVNETEAHRVRAIFECYLDIQSLIATARELNKRGWTNKQWITRKGHKSGGNPFTKVNLFQLLTNPIYLGKVRHKGTLYDGAHDAIVNEQIWLRANALLRRNSGNGGPLGRNKYGALLRGILYCDSCGVAMIHAMTAHGSKHYRYYVCGKAQKQGWDSCPTKSVPAGEIERFVIERIRHVGNDPELAAEAFRQAQAESRRRMTELENEKSALDADLARYSARVRQLMEQLGPAPDRQSPLTAELANLQERMRLAEQRVTEARNEIIAKGLELVDERELAMALTIFDPVWESMSWREQMRVIQLLVERIGYDGPTGRLSIRFRNAGIQTLNQELDAESEVAEP

SEQ ID NO: 5453 - protein, 525 aa, unidentified
  source 1..525: note = uncultivated organism
MVFANYGRKSVYSDRSDSVDNQFRMSREYADFHFRGQVDSFLHYSDEDFTGANTKRPDLQRLLDDVRANRIDVLIVYQLDRLSRDVRDFANIYAILEEHNVHFVSVKENIDTTTPIGRAMMYVTVVFAQMERENIAARVSDNMLGLAKKGYWTGGNPPVGYVRQRVEVSGRKHVTIIPDPDGIAYTMNIYDTFLDGGFSLQALETYFKHKGVRTLTGAFFSTTQLHKILTMPYCVQATPAVYDFFEAKGCIMDPDSPRDRWDGTHGVMVYGRTTEKNKKHQLNPPEKWLVCLGYHEPFMPAEKWLAVQSRFAANKFDKTMKYDIPLLKGALRCSCGSLMQVSRKKKQNGGVSSWYYCLKRMRQGVGVCRCGQIKIDILDEKVLEVFRNIEHDPSVIRNYVSSSSPRPAVDSSSITQHINSTTAKIRRLAGNLALNENSAASKYIIEEMERLDQELSSLKKQRLEASNQERMNQIEENSLDEKVADISALLKDFDNYTAAERNEVARRVLSSCVWDYEKQTLFLEF

SEQ ID NO: 5454 - protein, 531 aa, unidentified
  source 1..531: note = uncultivated organism
MKTDIPSTTTSQIRCAIYTRKSTDEGLDQDFNSLDAQREAAEAFIRSQRGEGLVALPERYDDGGFGGGNRDRPALERLLADVRGGAVDCVVVYKVDRLSRSLIDFAHIIEIFDKRNVSFVSVTQQFNTTNSLGRLTLNILLSFAQFEREIIAERTRDKMSAARRKGKWIGGRPVLGYDIDPRSSRLIVNGDEAIQVRMIFRLYLDHNTLMPVVREIDRRGWRTKQWVTKAGASHGGKRFTKGRLFRLLTNPIYIGKLDFEKQRYEGEHEAIVEAEIWEPVQQILRRNGRHGGAEVRDVYGALLKALLRCTSCNAGMVPTYTANNSRRFRHFVCPQAHQGAQPRTISEVAIKAVVAKQISRIGSDPRIVARTMTKAEQQRHTNIADLTLEREVARRALAGMGIELRKLIRLVDCCDQTPTESAIAVNEHIGQAERRLKDLSQELASLENQAIDEDDLRTTLPQFGQVWESLNSREQIRIIGTLIEGIAYNGETNRVRVSFHSTGIREMCRGAGKNIRGARSRSGSDSIGNSS

SEQ ID NO: 5455 - protein, 515 aa, unidentified
  source 1..515: note = uncultivated organism
MRNSIKFTPKNTATTGSMATLEAEVFRVALYIRVSTERQANEGDSLEEQESELRKYCDFRKFNIHKLYIERGKSGGNTKRPEYQKLVKDIQNRKINAVVVKKLDRLSRSLLDFENLMRLMNENEVEFISIKENFDTTTAMGKAMLRVALVFAQLEREQTSERIADVMTHRASLGLFNGGRRLFGYSIVEKELIPYPKEKQIVELIFSKFLETRSTSAVMHYLNDNSFKYRDGKLWDERQIQKMLQQESYIGKVNWGKQVYIGIHQPIISEATFEKVQSIFASKTYTKAKNTTGAMLAKKVFCAKCGSPLAPSHTTNRHKKKYFYYRCTGSKDKSQKCQRPHFSLTKLDARVSEIVLSLSEEFSPIENKLLKHNDKITNQIQDHEKTKHHLEGTLNQLKQKKDKYLDTLMSSQFLSKERELINAKIGEMETEEKQLQTAISKQEAVIHQTKEELLSIADIKKLFITYRAEHPFSDSQNHRSQLINLIDRIDCKKEALEIKFSLIPEKEIFHTTGSE

SEQ ID NO: 5456 - protein, 513 aa, unidentified
  source 1..513: note = uncultivated organism
MKAVIYARYSAGKDQTSQSIEGQVRVCQGYIEARGWELTRIYADEHISGKTDKRPQFQAMVDDAERRSFDVLVVYGSDRFSRNKYHSVSYKQKLKDLGIRICYAAENIPEGPEGILLESIMEGWAQYYSDELSRKVKRGMNESAMKCRSNGSHRTFGYYTDEDRRLRIREDEAPAVRAIYKMIAEGGTIAGCVRWLNDHGYKSTMGREFKINAVRHILSNKRYIGYYKFDTIEIPDGVPAIVDKELFYDVQERLAQNKKFMTKKRTDFILSGKLYCGKCGEPMSGCSGHGRSGEKYSYYRCRSRDVKNVPKEALEDLVAEYASEFFRDPVQRAELLEVLYYYLSEKNEPEEKYGLPKKRISDLKRKKDNLVEVIAETGNRALVSKLEETEAQIRALEDEISEAKKVRIFSRLSKEELGILLDNFLSRLDKDDLDLCNKKIIDVLVRDVILYEDDILITFNVPITSEDPETFKEVRGPWFANYDNWWSNRTPGRTVIMHNGCPGIFRPRKKART

SEQ ID NO: 5457 - protein, 599 aa, unidentified
  source 1..599: note = uncultivated organism
MRKNAAIYCRVSTEDQAKEGYSLGEQLEKLKELCKYRDYNIYDTYEDAGISAKDMEHRPDFKRMLEDVKKHNVNVIVAYKLDRLTRSVRDLEVLIAELERHGCSLECAMDDINTSTANGRFFVRMLTVLSQLEIERVSERTKFGMVGAIKDGHVPVKKMLGFMRDGKKLIINPAESEIVERIFNLYLQGNSYQQIANIFNEEKILNKKWYDTTIQKIIANPLYKGDFVNGKSTGTPVLYENVVEPIISKKLWEDCQEQSRKNTRNYTRRNDYIFFQKIICPNCHTIMACKAPGGSKKKYIYYKCKDCDTFVREDKLIELLIEQITTIIEYDITVREYFAPLLKHKVENTNELLEKEINNLKDKLIRLKDAYLNKVIDLEEYNQDKNNLEIRIKEIEKKQQEEKELEEYNFTFEDIMLKRDLESIKTLINPLYQSTFEIKWNELSLQDKQALIMSYIDSIEVIKKNDKLEIKKVNFRKTFIEEYANLFNKGAINRFQDVSVNGETIQIEVCAPMTRKEIENHIKRLQVKHPIEYHEIQKEKINDHQFCLKYTRENKFHEPFKMIPIINKKGIKNVTHYGILEAFVPPVRYINVDKIEVEQ

SEQ ID NO: 5458 - protein, 516 aa, unidentified
  source 1..516: note = uncultivated organism
MASKPEKLVRCAIYTRKSTEHGLELEFNSLHAQREACEAYIKSQIHEGWTALSKRYDDPAYSGGNLERPAVQRLLKDIEAGLIDVVVVYKIDRLTRSLSDFAKLVELFDKKAISFVAVTQQFNTTTSMGRLTLNVLLSFAQFERELSSERVRDKVAASRKKGKWTGGSVPLGYNTKDKKLVVNQDEAKVVRMIFARYLALKSFRTLIDELNDKGVVTKKRAITGKIVGGIPFTCGPLAYLLKNRTYLGETSHKESWYPGEHEAIVDPTLFNSVQDLLKNNSVTRRQQRSDNQSLLAGLLFDDRGNRMSPSFTTKRGVRYRFYVSSAILTGRRDQAGSVKRASAADLEKSIVSALRERFTQFEDVSNQDLISANIERAVVSQAKLLITLKTGEANGNLIELTRPQLPTLPRARIEIDDCRSIGEPDVSLIHALARAHLWLKALSDGVYQSIEELAIAAKWNPKVVRKVLRLAFLAPDITEAIILGSQRKSLSVSELQAVAAHSWDEQRRLLRFPVAA

SEQ ID NO: 5459 - protein, 513 aa, unidentified
  source 1..513: note = uncultivated organism
MRVAVYTRASTDEAHQPYSLDAQTARLDAYIASQPDWQRVATFSDRISGATLDRPALTKALTAARAGRFDLLLVYRVDRLARSVRGLAQILEDLDTAGVAFRSATEPFDTATPAGRMMVQMLGVFAEFERATIIDRVIAGMERKAAKGGWTNGPPPYGYRINGDYLEPDPAEAAVVVTVFDRYTRRRMGAQAVATWLNDNGHRSRAGRRWSHVSVLTVLRNRAYIGQVYFRGAHHDAPHQPLVDTETFDRAQQLLADRGEHVSKRASNSSDYLLGRLIVCTRCGKRYVGMSAHGRSYRYRYYTCHTRHRYGTDACDGDRLPAGELDTAALNGVLALFGDRDLFARVAADATARRSAERERRQRELDIVDTDIAKTEQAIERYLLAFEAGSMPETQCGPRIRDLGAKLVQLQDRRAELHQQLDASAPAGPTDDQLAAARDHLRSIIDDGDDTHRKHLLQALVAEIRVAARDHITPVYRVPHAQQVDTVRAPEGLVVRGGVEPPTFRFSVGRSTN

SEQ ID NO: 5460 - protein, 549 aa, unidentified
  source 1..549: note = uncultivated organism
MAEKTYNVGIYCRLSNDDEREGESVSIENQKLLLQRYVRERGWNEIDVYIDDGYSGTNFQRPGVQRLIADAKSGRINVILVKDLSRFGRNYIEFGQYTDYLFPSIGCRFIALNNGVDTEKSDSSNDVMCFVNLFNEFHSRDTSKKVKAVKKACAENGKYMGSYTPYGYLRDPNDKHHLIIDEETAPVVRRIFAMRASGMGYFAIAAALNDEGIQSPREAYYQARGQANPHRSINMWSNTTVKTLLRNEVYIGNLVQGKFGSMSYKSHKLVRKSEEEWIRVEGTHEPIISRETWDTVVSIREKRVRKTPTTDGIKSIFTGLVYCADCGFKMRNKIDRSTARDGRAKRYSYFICSSYAKSGKSACTIHSISENALYELVLTDIREKAQCVEYDRESMLAQIIRIKDQEQHNRLISYEQELRSASARVIELERLMKNLYEDKCTGVVPQAVFQTLVQKYEAERAQKAAALPDLERKVKAQLENRQDARRWAEIIQHYTNIEALDETILFELVDRIEVGETTKQGNTRTCEVKVFYRYVGNVDAVMAETEAAG

SEQ ID NO: 5461 - protein, 574 aa, unidentified
  source 1..574: note = uncultivated organism
MTDPIKKIRCVVYTRKSSEEGLEQAFNSLDAQREAGMAYIASQKHEGWVCIPTHYDDGGYSGGSTERPALQQLLADIQAGKIDIIVVYKVDRLSRSLGDFAQMMTLFDKHNVSFVSVTQQFNTTTSMGRLTLNILLSFAQFEREVTGERIRDKFAASKKKGMWMGGSPPLGYMVQDRMLIIVPQEAELVKTIFTLYLECHSPLQVAQSLQQAGHTNKRWQTATGNWRGGGKITVSHLNKILRNVIYVGKVQHGKQSYPGQHLPIIDEALWREVHDSIQANDTSSRHHWHSHFLLKGKLKTHEDYCMSPSTTNKVNPENKSAIKKKMRYYVSRKALTQGYKHCAIKTLNADLLETLVVSHVMHYLFATCLHVFRFITLLAKDTERSHCLRQLIAAVTVGPERLDISINKSALSQLASDDHSHTTQLDANPPTIFHQPDIVEGTDIVKLLLPIQIKRMNGRRLIVSHEGKDLVLPAHAQPDPVLVQAIGRSFGWKKLLEQSPDLTLRELAKQCGYSDRYLSRQLPLTGLAPDILHRALSGTLPSSVTLYELEEASAFLSWHQQRSHLGLNQATKHQ

SEQ ID NO: 5462 - protein, 518 aa, unidentified
  source 1..518: note = uncultivated organism
MIRPATKTVRCAVYTRKSTDEGLDKDFNSLDAQRESAEAFVASQKNEGWVCLKDRYDDGGYSGGDMDRPALKRLLADIDAGEVDAIVVYKVDRLSRSLLDFSRIIETLDRHSVSFVSVTQQFNTATSMGRLVLNVLLSFAQFEREIIGERTRDKMSAARRKGKWIGGMPILGYDVAPEGGKLVVNEDEAARVRAIFDLYLEHEALIPTVQEMARRGWTNKQWRTKRGKERGGQPFDKNSLLRLLSNVTYRGKVNYHGQTYDAEHEAIVSEDLWRGVHGRLRRNGASRGGGMRNKHGALLKGLLQCTPCGCAMAHAFTARGNKRYRYYVCVHAQKRGWDTCPTKSVPAGEIERFVVDQIRAVGRDPALVAETLQQAQRQQKESLERLEAERRVLDRELAQLNDGVRLALDAASRDEAARGRLADLQDRIRKSEQRAMEVRQEMAALEREQVDERDLAAALSLFDPVWDSLAPREQARVVQLLVERVAYDGRDGQISLTFRPTGIKTLAAEIASREEVTA

SEQ ID NO: 5463 - protein, 513 aa, unidentified
  source 1..513: note = uncultivated organism
MPQVKLISPITRLEIQKTRVAAYCRVSTNSSDQQNSYANQVRVYTSLIQKNKEWELVEIFADEGLSGMKAQNRVEFQRMIKMCEQHKIDLIIAKSVSRFARNVKESLEYVRKLKLLGIGVRFEKEGIYTLALGDEMLLNTFSAIAQEESKAISQNQRLSIVKRMQCGEYVDSNAPYGFRLIDKTLVVYEPEAVIIREIFSKYLCGHSTPEIARELNSQGIKTKTGKSVWRPSKVAYILGNERYCGDSKYQKTFRDTTVPFKQSRNRGQEDMFYASMTHTPLIDRDTFDRVQCLLKKRQDTFGKSTTQNIYPLTSRIQCSECGSYFRRRIASGTAKWGCSRHIQDRTLCDSNYYSEERIYDAFTAMVNKLRFSECDILGQTLLRLESAELKKKQKSTAAKELSRSIADLNAKLVMVEQLHSKGYLKDEVHKAQVQEIKNQLQQLKSERKSEFSSDISVMINELERLKKLLDELEEPQDCFDEKLFSEIVQSININRCDEMTVTLIGGLRFTEML

SEQ ID NO: 5464 - protein, 514 aa, unidentified
  source 1..514: note = uncultivated organism
MKNQIVQKKIRCAIYTRKSVAEGLEKEFNTLDAQREAGENYIRSQKHEGWIAVDKHYDDGGFSGGNMERPALRELFDDIENGKIDIVVVYKVDRLSRSLMDFAKIIELFEKHNVSFVSVTQHFNTKDSMGRLTLNILLSFAQFERELISERTRDKMSAARRKGKWVGGVPILGYDISPDGSGLVVNRAEAESVRTIFDTYLDTRSVLRTLEILEEKNIRMKSWRTVGGKMHVGKAFTKSTLYYLLKNTAYIGKIRYKGEIYPAEHEAIIDAEVFEKTAERMSSNFRERTSAKVRTKTEGLLSGILYCGHCNRPMTNKYTCKGGSKTYRYYVCQNAVQKGWKSCPYPSLPATAIEDFVVGEISGISTDEKLSAEVVGNFTKSVRAELADSAARENALEKALSEIRAELAGCTDSPKTEDLRKEEIRHSEALEICRKRTEMLGKKCSKSEAELKRIFGNFDGIWANLNFKEKYELLGLLVEKVVYFGEKGEISVFYRENGIDIETAKNGNQKQNIH

SEQ ID NO: 5465 - protein, 543 aa, unidentified
  source 1..543: note = uncultivated organism
MQGGTRVYCLYRVSLARQADHIRNGDQIQTDISMQKEACRKYCQEHGWEIVNSFTEPGVSGYKNSVFDRDSVKDILYEANEKSFDILLVYTLDRLTRRDYELPMLMQRLHQKGISVWSTQEGEIPYNTSTDHLLLYMQGWKAYGESERISQRITTIQEQIVMRGEYRGGAVPYGYKLVESGEISKQGNKRHLLAIHEPEAVVIRMIFSKIIDEGYTMYEMTRFLSQMERPADTRKMVWRSATLHVLLRNRIYIGQQRFQNEYSLPFQRLQIVDPKIFNRVQELTTIRKKRLPGKRSIVEPPPVYHDLVYCGCCGSHLVFNHAFDKHKDGSYTTRYYYRCYNKERFSDPCKGASTFSARQVDADVRMKTASLVRFLLESPAEELVNNSVELARTEYLVQRENLQKKLAVLNEQLETLQTKLTDMLRLYGVEATSELQLVYHDVRDSRDSVYKSLLRVKPEYINNEHLRRIKEKNLQKIILECECWNSLNWKEAEELTPRFFERIEVHQGYQLDYKIVPEIQQFLPFICNLTDEAEVLKAENQDA

SEQ ID NO: 5466 - protein, 578 aa, unidentified
  source 1..578: note = uncultivated organism
MRLGLYARVSTEKQEKQETIQSQLTALREYAKDERHGLVGEYVDNGYSGELLDRPDLDKLRDDARKGLLNGIAVHSPDRLSRNFAHLCLLKDELAKHGVKIIYLNRPDRKDTPEDRLLENVEGVIAEYEKAKILERTRRGKLHKANSGVIVGGTAPYGYRYVPGDKNKREPGRYELERSEARVVKLAFRLLVRDGMSVRAIVRELTSQGIKPRKGKHWRTSTLHRILRNETYIGITYYNKHMAVEPEDGNGGNGYRRIKNASLRLRPKDQWIPIELPESLRIIDEKTFRQAQKQLEVNSGASPRNSKHEYLLRSLLRCGECDSPMYGTPCHGKRYYRCGNKHRTFPEPKRCQVGSVKAEPLERAVWAKICEAISHPELVASQVEKLNRRARKENATAARDLKAIEKELAAADEEENRSRDLNGDGLIPRDKLTDQLAMAQDKTKRLGEEKRALMARLEEVGLRSLNGDDVVRYCESVRTRLKALSRDFEGRRRILGLLVDNVVLQGKTVRIRGIIPATPPGKGPEHGQNPCRTASLSSRCYDPHGVGDLPLHNLLRQADRRAGYTDEVDTGRHDLTTC

SEQ ID NO: 5467 - protein, 530 aa, unidentified
  source 1..530: note = uncultivated organism
MNKVRCAIYTRKSTEEGLEQEFNSLHAQRDACEAYVRSQTGEGWIANASEYDDGGYSGGSTDRPGLQRLLKDIHRGEVDIVVVYKVDRLTRSLSDFAKIVDLFDRHKVSFVSVTQAFNTTTSMGRLTLNMLLSFSQFEREITAERIRDKIAASKAKGLWMGGRPPLGYDGQGRKLVINPGEAELVRHIYVRYLELGSVLTLTAELKTRDVRSKRWTNKQGELVGGAPFSRGALYHLLANPVYRGTICHRELRYENSHPAIIDETIWNAVRTKLDANVPDLPSSPRLAAQNLLQGLLFDDRGNPMRTVHSTRRGQRYRYYVSTATLHKEGGFPGSLPRMSVGVLDSFVVEKTAPALSPNWRPSEPTEDRIRSAILRVTISEKHAAILLRADAASAGQKLEHANVRDVQDGVELSIGIRLKQRQTAIVIEAQGSCIPAPRIDRALLRALCLARAWSGLLASGEVASVRDLALKHGFCNHYAAKLLPLAWLAPDLARAIMDGEQPKSLTLGALIKQSMPMDWNEQRALFASFR

SEQ ID NO: 5468 - protein, 537 aa, unidentified
  source 1..537: note = uncultivated organism
MKVFIYSRKSVWTGKGESIENQVEMCRQYIANRIDGGKDAEIVIYEDEGFSGKNLDRPQFQKMLADSKRQKPDYIVCYRLDRISRSVGDFAPLVEDFIARDIGFICIKEQFDTSTPMGKAMMYIASVFAQLERETIAERVRDNMLMLARTGRWLGGGPPTGFTSEKVEEVVVDGKVKTSCKLKWNTEEIEIAKMIYEKFLEVHSVSGVSKFLMRSGIKSRSGNYFSLPGIRDILSNPVYCIADKQARDYFLAHDSDVCFSEEACSDKYGLLSYNKRDYSKKGSPRLEKSEWIIAVGKHKGIICGRDWVSVQNILEANKPESRERNMHNDYSLLSGTLICKKCGARMFAKPRSNGKGLFDYICDNKLRGGITVCDCQNLGGQQADDLICRYLLDYAKEDSGICRLLEQLRQKIKAEDQSGKIEAIKRQIQKVEAELDRLAASMSQPELAPALVKRVSDRASELDRQREVYRAEQERLQSNEQAHSDSELQLDLMVHILAHFQESFDNLSIHEKRELVRLLVQRVEWDGENFDIFLYGE

SEQ ID NO: 5469 - protein, 535 aa, unidentified
  source 1..535: note = uncultivated organism
MGVNNETKRCAIYTRKSTEDGLELKYNSLDAQYDSCAAYIRSQEGMGWSLVEKRYDDGGFSGGNTRRPGLTELISDIEAGLIDAVVVYKIDRLSRSLSDFADLFRIFEKHHVSFVSITQQIDTSNAAGRMMLNILMSFAQFEREMSSDRIRDKIYETKKKGMWVGGGEPYGYVVKDKQLVLEPVAARGIEFAFNRYLEIGSTLAVAKELNATHPRNDGVRWSGRNVLTVLRNPLYEGFVVSKRTNEIFKGVHEPIVSTELFKSVQKAIDETASVQSGSRRSLLAPLKGILRCGTCGSAMSPAYSSYHGNKKRRYTYYRCSKSIKSSEDKCGLENLSGEAIEKFVFAQLEDVLRRDDVLAMIGDGDPERKDVLLDELDDMGKLWDRMLIGERDRIFHLLLNEVRVWRDRMEITFRIDGEAKRSVPCNICNDSGRTRIRTEEEVANESDGTERGIAKMFRKTHAWLELLTSGTYPSKKELARALGVSGTYITRTLRLQFISPDLVEKIMKGECSLSIEKISRVTSLIWEDQNRELKV

SEQ ID NO: 5470 - protein, 538 aa, unidentified
  source 1..538: note = uncultivated organism
MPVRSCAVYTRKSSEEGLEQEFNSLDAQREAGEAFIKSQAHEGWRLVKTRYDDGGYSGGNLERPALQGLLADIRAGKVNTVVVYKVDRLTRSLSDFAKLIELFEARGVSFVSVTQQFNTTTSMGRLMLNVLLSFAQFEREVTGERIRDKIAASKKKGLWMGGMPAIGYDIRERKLVINESEAKVIRHIFSRYAALRSVGKLGRELKSQGYLTRHFTSSSGRAYGGRPFSRGHLYRILQNRIYLGHVVHKEANYPGEHEAIIGQELWEQVQQVLAENRQALKTGAHFASGSLLKGFIFDDASNRMSPIHANKGGRRYRYYVSQPLLQHRPEEAGSAPRVPAHDLEKLVTDKIFEMLAADVRTRVATSNHKEGDERQLLVRRVLKRVEVSERLVRIQTDVAACLSEESGRGEAGASEPRTVEVPFDFVRWRGGTQIVPADGSQALNDRSNSELIRAVARGQLWWNQLLTGHARTVAEVARRAGVTTRYARRIIRASFLAPDIVEAILDGRQPAALSVLQLRMPPADWAEQRRLLGFAQTA

SEQ ID NO: 5471 - protein, 547 aa, unidentified
  source 1..547: note = uncultivated organism
MNLTAKPIRCAIYTRKSTEDGLEQEFNSLHAQREACEAYILSQRHEGWELVPDEFDDGGYSGGTMNRPGLAALMNALEEGLIDVIVVYKVDRLTRSLVDFAKIVEILDEKEASFVSITQAFNTTSSMGRLTLNVLLSFAQFEREVTGERIRDKIAASKKKGLWMGGPVPLGYVVVERKLIAEPNEAKRVRTIMRRYLESKSAPALLRQLEKEGVLTKIQHRTSGPHRGGIPFRRGSLFHLLKNPIYRGKIMHKGEVYEGEHEPIVDEELWDAVQAKLAKLAPPRMLPTNDSQDAMLRGLLSDQQGRPMVPTYTSKGIRRYRYYETRKDLVTTNNPESTRYAMVKLDMHIVDHLGILLSDQHALRRIANSNDGASLQTIFTQANLHKDALTQNAANLIKKLIHKISISADRMILEIDPLQFGITKPLEEVWRYEMALPKKKQFREAKLRINNSDDKVNIDPKLIVLLADAMKAQRLVLASPEIPLYEIAKSEGRCRKQLTQLVKLSWINPRIVESIVEGRQPARLSRKRLMDIDLPLDWKDQEQLLGF

SEQ ID NO: 5472 - protein, 509 aa, unidentified
  source 1..509: note = uncultivated organism
MNVAIYARFSSSAQREASIDEQVKVCKEYAEKNDYTVIKVYSDSALTGKTDNRPQLQKLLSDSSKHTFQAVLVYSIDRFGRDLVQTLLNEKKLSENNIVLISATEHFSNDPSGVFFRNIMMSYAQYYSDELSVKIKRGMDYNAERCLYNGGGVPLGYKISKDKHFEIDPNTAPIVKCIYEMYADGKTITEINSYLNAQGYKTANGVAFNKNSLHTILTNKRYLGYYIHSGKEIADGIPRIISDELFERVKEKLSKNRKAPARSRAKVEYLLTTKLFCGHCKEMMTGFSGTGKQGKIYRYYICNGTKTNPKTCDKKRVNKDYIENLVISECRRLLTAENIRRIAKEVVAIGEAEKDTSNLKRLKKLLSENERKHHNAITAIMESDIESVRKALGEQIPILENEHREIEKLIAEEETPYPKLTEDSIKFFLTQLKKGNIKDIKYRKTLINIFVNKIYLYDDRITITYNSGDEPVTISDQLLSELEEKDEKDKVLFKNGSGPPPKSRLYIQS

SEQ ID NO: 5473 - protein, 601 aa, unidentified
  source 1..601: note = uncultivated organism
MDNGVIYARFSSQSQNEQSIEAQVRICKEFAEGKDINIVNIYSDKARTGTNDARPAFQRMIADAKSGAFQYIVVYMFDRFARNRRDSIMYKEMLKEEGIKVLSALEPIAEDEGGEFYEMFLEWNAEKYSKRLSKRVRDGLDISVANGSYCGGTLIYGYKLENELIPGKANKFYKKVVINEEDAELVRLAFNYYNKGYTKKQIADMLNEQGYRIKGKLLKGKSFDKWLTNQKYTGTFTFGGRECSNMYPPIIDKETFNAVQERLAKNRYTLGGKETARVPYLLTGKLFCGHCGTEMVADGGTSKTGEQHHYYICKKRRSGKCDKKRENKDNLELYVTACVKEFLSNPENAETAVKDVLAYYDKRTDEQNLKSITAKIAKIRQEVSELTDAFVKAKSALLQNSIETKMAEYEVLLNDLETQKAQLELERGYKLTKKDLLVFVEELLKGDVNDKDYQKQIIDHLVSQVFVSDDNTVVYFNIRGGKDIEKLTIDDTKEVVEKVQTQSPLVRQRKPESDTRVFDLGFSFAKIQVLSAFFICRRAVILRLSVFVWECSYRFIRSSCRRFYAAKGSWATKRSVSGYWAKSLMYAIASSSIFSILSGWF

SEQ ID NO: 5474 - protein, 514 aa, unidentified
  source 1..514: note = uncultivated organism
MARITKIEPNKTVASKIKVVAYCRVSTDQNEQLLSLETQKAHYESWIRNHDEWEYAGLYYDEGISGTKKDTRPALMQMLSDCEHGLIDHVITKSISRLARNTTDCLEIVRKLLDLGISVYFEKENIDTGSMDSELLLSIMGSIAESESLSISENNKWSIQRKFKNGTFKCSYPPYGYDWDKKKGEMVINPEQAEIVRYIFAQTLAGVGTHDIAKDLAAKGVPTKKGGKWTGHTVNGIIRNEKYMGDCLFQKTYTDSSYKRHTNLGELDQYYVENHHEAIISKEEYEAANAVVDRRRQEKGIDPDSGKYQNRYPLSGRVICGNCGGTYKRKTYNRKVVLACTTHIEDKEKCNMKYIDLSDVERAFATMMNKLIFGRNRVLKPFYESIRDNNKTDAFLRIHEIDEQLELIAERKQNVKGLYAQGIIEPAMYAKGMNDLTAEMDRLTSEKDSISYGAKADLTLIEETRELLDYTKGAPMLKDFDAEIFERFVDKIIVKDRHHLEFQMKCGLKLTERI

SEQ ID NO: 5475 - protein, 564 aa, unidentified
  source 1..564: note = uncultivated organism
MPWNLQGISPDFNITNFEGEIQLNNNSAKIQAVGYCRFSSDLQREESIEAQKRFINLFASQSEYEIHGFYCDRAKSGKNMNRPAFQQMLKDSKSGTFQAIIVHKIDRFSRSTVDTLSTIDELKSRGVSVVSAYEHIENTPMGSLMLKIISGMAEYYVSNLGNEVLKGQRENAYKGLANGGRGCLGYNIVNKKYVVNEEEAKAVKLIFQMYGDGYGYNSIIDRLNAIGYKTKAGRSFGKNSIYAILGNEKYTGVYLFNQIARGDVHGKRNSHKMKLDNEIIRIEGGVPAIISKELWNMVQAIRQINPKGKSHNKYFYLLSGLIYCGECGSKMHGNPRNTGNGGPTYVTYRCNRRDNNHTCGNGEVRKEYIESFVIEELFDHFFNTTAIAEITRQLNKKLKESSNSSDDEYKEYNATLKILKKSRDNLVEAIESTGYNQSLGAKLKDLEKQIGDCETFLQKCEDRRNNIPVFTEEQVIQNLSKIKEFSKSSHKEEVRAMIQQYVERVTVFHDRVEVVFKVAFNANTESSTTYNCDSSISRFNLEQYSEANLLEKAETNEQEDLHTA

SEQ ID NO: 5476 - protein, 524 aa, unidentified
  source 1..524: note = uncultivated organism
MPQVPLAILEQAEVERSEELRAAIYCRVSTEGQEQDGTSLKTQMDACLQYCQGHKYDVVAQLSEAWSGLSIERPKLAELRELVRSESIDGVVVYSLDRFSRDPVHGVILMQELEKHGVVLEAASETVDNSEVGKLVFYIKGYAAKLDAERRRDATGRGKRAMLKNGKLPQGTGIGVYGYSWVKEYKKRVPIEAEAKVVQRMFDMVGRGESCFGIARKLNEESIPTKAGKRWEARTVSRIVRNPAYYGLTYFGRTKSVSGKQVAVAEDQWVLLPDTTQPIISRETFDRAQTALAKCRQLHAGKARHEYLLSGVAYCGYCGRPLVGSCLSRRYRYYRCSGAFDSASRRRVCDGRYIHADWLEEVVWEKVKGVLSHPELLLAEVRAQVEAGQEKVSTGELDREIAALKRKLKSYKAQERRLVSAFKLGFTPDVILDEMNQTKREKEADAARLEALEQTKDSLARTEELEVQLKELCSRIVADLDNCTSQDKKDAYAFLDLKVTATPEGVDIKGYVQPKLITIGQTWA

SEQ ID NO: 5477 - protein, 511 aa, unidentified
  source 1..511: note = uncultivated organism
MPSTARLAGRSLAQTPMRVAIYTRRSTDEANQPFTIDAQESKLDAYVASQDGWTIVARYCDDASGATTDRLGLGQALAAAGAGTFDVLLVYRVDRFSRRIRDLVVMLDELDSSGVAFRSATEPFDTSTPVGRMLVHLLGVFAEFERDVIIDRVVSGMEKKASKGQWTLGTPPYGYTVDPATRHLRPVLEESAVVEEIFHLYTVCRMGTRAVANELTRRGHRRRSGRPWSAKTVNDTLRNRAYLGTVAFRDVLAEGAHPPIIDGETFASADWLLAERRLNRTAAARVASDYHLTGKIMCPRCGKAYVGTAASGRNRVYRYYTCQSRNRWGVTGCDAPRIDADAFDDNVLAALRDFCRTRTDLIAEAIASVQTTYSASRHTVEAELRAVSARVVQKETAVDRYFADYEDGKIGRGLLERRVEKLGRDLRDLDRRRDELRLRLDTEPQSISDIDPVALSKTLDEVIAGAATTVRKSLCDAAIHELRLDLNASTATPVLRANILLVDERALDQDE

SEQ ID NO: 5478 - protein, 522 aa, unidentified
  source 1..522: note = uncultivated organism
MKNAVIYARYSCDKQTEQSIEGQIRVVCEFAAREGYNIIGEYIDRAKSAKTANRPEFLRMISDSSKHLFQFVLVYKLDRFSRNRYDSAFYKAKLRQNGVQVISATENLADSPESIITEAMLEAMAEFYSAELGQKTKRGMRESALKCQTVGAPPPLGYKWGEDKKLHIDEATAEIPRIVFRMYAEGKGKKQIADYLNERGFRTRLGGKFQVSTFACMLTNKKYIGVYSYEDIEIEGGVPALIDRDTFDKVQELVQRTKKAPARTRARVEYYLSGKLFCGVCGLPMIAVGGTSNNGEQHHYYKCKSHKTDAGKCGKKPERKSFIEWFVADSVLDLLNLDAHKERLADKIIEAYKTSMETDRSGDIEKRIAAIDKKINNLVEMIAETGRKSLVSKLDELELQKSELEEELCAAKIAGAHIPSRAEIVDWFERLRAADVTTEALRRQVLNTFVQKVFLWDDKAVIALTLNNTSETVEFEDIRDFEELKNELPEDSSFNKGVGSPLLDINELFVVRSCLCLKAFLK

SEQ ID NO: 5479 - protein, 570 aa, unidentified
  source 1..570: note = uncultivated organism
MAEQKQFRCAVYTRKSSEEGLEQDFNSLEAQREACEAYVRSQSHEGWKLLPERFDDGGFSGGNMQRPGLEQLMAVVRAGKIDIIVIYKIDRLTRSLTDFARLAEVLEKHGVSFVSVTQQFNTTTSMGRLMLNVLLSFAQFEREITGERIRDKIAASKKKGMWMGGPTPMGYDVRGRTLVINDADAAIIRRVFEGYLAAGDVPTLLEKLTTENVTTSQRTSAKGKHSGGRPFTRGHLYKLLSNPIYIGRIPHKATSHPGQHPAIIEHSLWDRVQAQLAANTQGTRTRRRRAKVEGSLLAGLLYTDAGNRMIVAHATKGARRYRYYVEERRSGDVSFAPTRLPAAEIETAAVAALAQMLSDRRELLTRLETPPIEQSAEVFASAANLATALSARLGSAQITVIRNVLQRVSLTPGALVLRCSGRQLAIALGLPASISINDGSNSDGDEREFTVHAPLIHRRRGVQTKLSIEGASGPGRPDLPLIVLLARATDWAQRVIDGKSSTLAEVATAEGLSMQYVSRLMQFAFLNPRVVEQIVEGRQPAEMTANKLAWITELPLGWHAQQLLLPGSKR

SEQ ID NO: 5480 - protein, 544 aa, unidentified
  source 1..544: note = uncultivated organism
MKSITEICYYAASYSRLSKDDGDKAESDSIKNQKELIRNFQKNHPEIKIAEEYSDDGFSGVDFERPAFKQMLEDIKTKKINCIIVKDLSRFGRNYIETGKYIEQIFPFLEVRFIAINDNYDSVKVKDQGDDIILPFKNLINDIYCRDISIKVRSNLNAKRRKGDYVGAFAPYGYKKAEENKNQLVIDEPAAKVVKRVYKLKIDGISNLDIARILNDEGIPAPYEYKKHTPEGKNYQPSFHVAGKTKWSVTTIIRILENEVYLGHLLQGKSTRPNYKVKEQIDVKSDEWIRVEHTHEAIISQSEYDLVQRLLMIDTRRSPGQNKVYLFSGVLYCAKCGESLVRRPISSKKGKYEYYGCYTKDRKMKCKGISIRESAIETAVLQAIRKHIELIIEMDKLYQFVDQIPIRQSEVKALDEQLQVLGNNLTRYKMVKASLYETFHEGLINQEEYLDLKSIYDKEEKEIEYCIHRLTGKRKRFLEGKSDNQQFVQFFKKHRNINSLDRRTLVMLVSKIYVSSNKKIKVCFSYQNEFEEMRNLINQVEEVI

SEQ ID NO: 5481 - protein, 550 aa, unidentified
  source 1..550: note = uncultivated organism
MRIATYTRISTDEVNQPYSLGAQSERLASYVASQEDWELVGTFTDQMSGAKLERPGLTNALRAAKAGRFDLLLVYRVDRLSRSVRGLAEVLETLDAAGVGFRSATEPFDTTSAAGRMMVQMLGVFAEFERATIIDRVIAGMERKSSKGGWCGGTQPFGYRAVKGEGRLVVDEVEAPLVPVIFDLYATKRLGSHAIANQLSAAGLSTRAGRPWQFKSVLTVLRNRTYLGQVHFRGTWSDAEHPPLVEKSLFDAVQAILAERGEDVSKRASNSSDYLLTGLVVCGGCGSRFTGTRATGRSSTYRYYTCGGRQRYGTKSCSADRLPAEALDDAVIHSLLAAYDDTDLFANAVAEAQGRALLGHSRHEGELAALDAELAKVESGIDRYLRAFETGAMPETICGTRVKELGSRATALRARRQELADQMDEADLTAPTPEELSVLRERVTEAVAEGSAASVKGLLQALIHEIRVDNREAIHPIFRVPLGGDHPEDDAVRAPSRPVEVSGLEPPTSTLRTCLWRTSADSGELSRQVSELSTRRRTAVNGGVRGMAAG

SEQ ID NO: 5482 - protein, 526 aa, unidentified
  source 1..526: note = uncultivated organism
MAAYLRLSRDDGSDGGFGESNSIRSQRDLLRNYIRGQDDMEIYDFYVDDGWSGVDFDRPSFRKMMADIAAGHVNCVLVKDLSRFGRDYIEAGRLIQKTFPAFSVRFIALNDDFDSLTADYNERALVVPVKNFVNDAYCSDISKKVRSHQKMKRERGEFIGAFAVYGYRKDASDIHHLLIDEYAAGIVRKIFAWRLEGYSNHAIAQKLNAQGVLSPMEYKKLQGDKYSSGFVSYAMAKWSAVAVKRILMNEMYTGVMVQGKREKVNYKVKAAREKPKEEWVRVENTHEAVVSAGDFEMVQRLLETDGRAYAGEKKSHMFTGLLFCGDCGKPMIRRINHYKEGEKVYFICPTKNKGLGCSRHSISEEDLKFLILEALRLKLLLFFNKDDMNRRFVKLETMRGTEALDREMEQLRGEWEKYKFLCAGLYEDLKQEIISEEDFRDFRKIYESRRRELECAIHKQEKIREETIKSRQVPEKILRGIKNNWQIDELDRNVLLTFFHRICIYEDNRIYLEFRAEVSYGAYIKE

SEQ ID NO: 5483 - protein, 561 aa, unidentified
  source 1..561: note = uncultivated organism
MTPRVHCAIYTRKSSEEGLEQSFNSLDAQREAALAFIQSQRHEGWHALNTHYDDGGFSGGNMDRPALKRLMADIRDGKINTVVVYKVDRLTRSLADFAKIIEQFDTMHVSFVSVTQQFNTTSFMGRLTLNVLLSFAQFEREVTGERIRDKIAASKKKGMWMGGFVPLGYDLRDRRIYVNPKEAQTIRTIYSNYLRLGCVMALKDYLDRNKIFSKSRTNGNGATTGGTSFSRGALYKILRNHIYVGEIAHKGGVYRGQHEAIIAREQWNQVQKLLIQNHQGKWRKARATKVSLFTGILFDATGNRYTPTHTNKSGRRYRYYTSQTVIQKAAQTEEPARIPAHDLEAAVTERILEFLKSPPALLKTLGHQGGKNGKYSELLKQGSERAASWTGISAQQRERFLKAILDRVVIHPDSVEVKMRKEPLVHYLAGKTSPQSNEYREFIFLHCPFRVANRGKALRLIVGNDQAPPQINTLAILKAIARARAWREQLISGEAHGVRHLASLNQLRATYVRRILPFARLGPASIEAILNGRVAPELSLESLVGRIPMAWKEQAAIIGSV

SEQ ID NO: 5484 - protein, 534 aa, unidentified
  source 1..534: note = uncultivated organism
MLPANNRPANGNTLVRCAIYTRKSTEEGLEQSFNTLDAQRDAAESYISSQRHEGWIALPEKYDDGGYTGANMGRPALKRLLEAVKTGAVNCIVVYKVDRLTRSLLDFARIMEVIDKHGVSFVSVTQQFNTTGSLGRLTLNILLSFAQFEREMIAERTRDKMGAARRRGKWVGGNLVLGYDVSPQGGALVLNQEEARRVVEIFALYREHRSLISVVQELDHRGWLTKAWTTGTGRGAGGKNFTKNRLYNLLTNIIYTGRVEYGGQVYEGEHERIVDDETWTHVQEQLNRNGRRGGGNYRNKYGALLKGLVRCASCDVGMVHTYTQKTPNKLYRYYVCVNAHQRGWNTCETRSVSAPDLERAVVDQIRGIGTNPLVFAEVLRQHGEQRRTNSGALESEKAAIERDLRKLGEEISGMAGLATNKGNGARVAIDRLADLHDKVASLDGRLAQVRYDLAELEGQRFDIGDLELALQRFDPLWEQMSSHEQERFIRALVEQVRYDGKSGNVTVSFKSTGIKHLCGLAHAEDHNHAEQQHR

SEQ ID NO: 5485 - protein, 565 aa, unidentified
  source 1..565: note = uncultivated organism
MNNVMMYQNSRRKENCDTWRVGIYCRLSKDDELNGESASISNQRDILTNYCNSQGWQIVGVFQDDGYTGLNTERPDLQRLLQACEKGLVNLVITKDQSRLGRNHVQTGYLMEEFFQKHGVRYVALYDNFDTYAGDNEIAPFKNVLNEMYSRDISKKVHASYHLQATKGKFTGVVPPLGYLKDPDEKGHLLIDEETAPIVRKIFQWAVDGRGINYISRELERQKVPCPSWWHRKRGNRTYYTKWEHKDPENGKYVWDESYLKDLLRNPVYCGDMASQKRYYRFKIGSQGDKAPDEWITVEDTHEPIISRDTFELVQAKIRSRKRQNTTGEYSIFAGLLRCAECGGALTIRKTNSKEPREIYSCSTYIHKGKAHCSQHRVDADDLYDAVLSKIRECARIAVGGCENMEERVRELCQEDEQDHRDSIEKLAAKQKDRLESLDRLIARLYDDLISEKISEATFDKMLEKTQKEQADIKQELGKNQKLLETEDKLDAQSQQWAEDIGSYIDITELDANMLNRLISNIVISEPQDDESNHSHAVEMEIHFNLSPIPELGTIERGSSSIRYF

SEQ ID NO: 5486 - protein, 563 aa, unidentified
  source 1..563: note = uncultivated organism
MEQNKETRIYRAAVYVRLSREDGDKEESDSIINQKDLINSYLSGRQDITACMECVDDGYSGADFERPGLKRMMKGIEAGKIDCVIVKDLSRFGRNFVEAGRYIDQIFPALGVRFIAVNDGFDSINGRTSSDRILIPFKNLINDAYCRDISIKIRSQLEIKRKKGDFIGSFAVYGYLRNPDDRHKLVVDDYAASVVRDIFKWKLEGASQQRIADRLNGRGELSPMEYKRFLGLNYQSGFQVNPKSKWSAVTVGRILRNEFYIGTLVQGKRTTPNHKVKKTVHRPSGEWVRVENSHTPIIDRDDFHAVERLLLQDMRVAPKEETVYLFSGLVFCADCRQNMVRNSVSRNGKTYVYYMCGNNRTNHACTSHRISETVLEDSVFNALKQHIEVVLDMERVLAYIETLPFRQEEVQKADAQLVKKQEETARYSRLKKSLYESMMDGLIDKAEYLELKAVYDAKMQEAQAAETKLKEEMENLLRNRSGHAAWIERFRRHQNITELTRHIAVTLIEQIEVHEGGCIEIRFKYQDSYECAMALIEGVNQVHPLETPCMQAEKKTVSEKGVL

SEQ ID NO: 5487 - protein, 542 aa, unidentified
  source 1..542: note = uncultivated organism
MKRVLCLYRVSTKGQVDQNTDDIPMQRRECLAFIDRMEDWVFFDERVEKGVSGYKVSAENRDAILDIRALAEKKKFDVLLVFMFDRLGRREDETPFLVEWFIDHGIEVWSTREGQQKIESRSDKLINYIRFWQAGGESEKTSIRVKAAHSQMTADGIWRGGKVPYGYRLVFKGRVGKKNRQLYDLEIDEVQGAIVREVFDLVVHEGYGTLRTANFLNEKYPNPDKVWTAQTVRSMIRNPMYTGRFHMNDTLSEPNEALRLISDETAQFAQYALSQRIPRKYTQQRQAENAAMPKDAPTKTSVYGASLLSGLLYCAHCGKKLVGGYCTKQQKNGAYHRPIYRCYNGSVKAKLCDGQAVYSAAKIESAVLDVVHQYFHSLSRTVDDVWQEQARRHLRSRLESQVKTAKANLERLHQQDARLRQEVMRSLMGESCFEPDLLKEMLSKNKAELADAEARLASLEAEKDAESARIRTLSSQIQQIHDWAGEFDSANNDTKKMILARMIEKITVDRYYNIVIRFFISPESFEGSAAATKEYPDMMKAG

SEQ ID NO: 5488 - protein, 507 aa, unidentified
  source 1..507: note = uncultivated organism
MSEEIDSRFNALYARVSTDDQAREGTSLEEQEERLRAWCRSQGWKDNIRLYIDDGYSAKSLDRPKLKELHKDVRAGKVARVLVTKLDRLSRKLTELLFLIETYEDHNVDFISTSEGFDTGTSSGKLVISILGAVAEFERIRISDRVVDNMLFSAKTAKWLTQPPYGYQINEKKELVIDPEESEIVKRVFHEYLTLGYGYFRIAKGLNDDNVPSKYEKGWSHRTVKLMLLNETYKGTYIWNRSGRKIKKVKSQKDDDVFIRGEVKKEVRYEKDQDEWIVIEDALPAIIDKGTWERVNKKIASNPKRQSQKIVASPHLLGGILKCGKCGAAMSGSFSGSKNKRYRVYRCAANKNKGVCTNKYYKAEEVEGWFKEGLMTLFKDGTRAISLSIKEKYKENIKSEIEQRASSAKARYNRQKEAYAAGIIELDDLKKEKEKYDKALEDLAKANDETKEYNLIDLETIVQNRIKQVVDAIDTMPIEDAKPIVQTLIEKVTVNDMKNINIEFATF

SEQ ID NO: 5489 - protein, 580 aa, unidentified
  source 1..580: note = uncultivated organism
MQRMTNPVRVAIYTRKSVEDAEDKQFNSIDAQRQMCESFVAAKAAEGWVALPERYDDYGYSGGDLNRPAYRRLMEHCEQGLIDKIIVFRIDRMTRSTKDFCEFDEKMKKLGIGFTSVSEPFVDTSSPMGELVVNLIVSFGQWERKTIQERIQRHFRSALDQGYFVGGIPPYGYKVENQNLVPDPDTAKNVPYIFQLFLKHGSTKKVAAQLQLEGIERFPGRPWTTQSLHNCLRNVRYVGDAKSHGKIVKGRQQPLITRELWNKVSNQLKDASDNPAKRVTSPESALFQGLVFCGHCNHPMSYRWSRKDTLGVRKYSYFVCQQDLRKGISTCPVRHVSVTTVQDAVEHEIESVMISSTAMLVAAANATTFTAEQIVAGFRRHTFWQCLSSADRRLIYRLFIRSITVFQSALELRMNIPVSAAIDELKKAHYIPREAASDANVLIDAEGCLFVRIPVAFRTVSGRKQIVKAGDGAVTAKPTQRELDDALAQGAVLKSFAKALAWMKMIDEGKAASVSQLAELVGTDRRYVLYTIRLATLSPRIIRAAMKGELPDGFSLQKVRKIETDDWEEQERLLGFPAIQ

SEQ ID NO: 5490 - protein, 546 aa, unidentified
  source 1..546: note = uncultivated organism
MTFTKDYVDRSTGTNNDRPGLESVLRDVEAGVIDLVLIYRLDRLTRSVVGLMEIVNKLEEHHAVLRSATEPFETMTPAGKMMIQMLVSIAEFEHDVLIDRILEGFDSKAARGEWLGGRAPYGYVLDGARKSLKVDAVEGAAVRRIFDLYLSGDGAKAVAEKLSAAGMRTRQGREWDQGSVLRILAGPVYGGYISHAGERHPGLHEAIVTVDELERVKRLRAERSNGGQLAAKAKMSTDYILTGLLECGACGGAYVGANAHGQNQSYRYYVCSLQAKRSNAEKCRNERVDADGLEQMVLGKVIETYADSELFERALSAAASSVPEQETKLAEQATASRTTLARTEKALERYYEAFESGALSAEDLGRRVEDLSVRLTAQRGELARVLEEQAHLGMSQAELVDLSTALTEVTRVLAAAGGHREKKRLLSALIASISIRRGRVIDVVLRVPTMRPGTSKKGSQVQRRRSNCRPEKTAGKIGEVDEIGEALIRKGLHSLETPVRMGSHIVEVLGIEPRSVRALVNILRAQLSVNCRGARRRQHRRTPVVN

SEQ ID NO: 5491 - protein, 581 aa, unidentified
  source 1..581: note = uncultivated organism
MNIQSKKIYHAAVYVRLSKEDGDVAGGGKAESNSISNQKSLVREFLKEKDDIEIVQEYVDDGYSGSNFARPAFQMMLEDIKKGLVDCVVTKDLSRFGREYIDAGMYIERLFPAMGVRFIAVNDNYDSLDGKNQSDEIIIPFKNLINDAYCRDISIKIRSHLEIKRKNGECISAFVAYGYRKMEDDRHKIEIDPYAANVVKDIFKLKLHGMSQDAIAKKLNEDGILPPAEYKASTGSNYHTAFKTKEKSEWTSVMVRRILTNEIYIGNLVQGRQTTPNHKVKKTVFKEESDWIRIEKNHEPIVTDRDFEIVQRLLDMDTRTSPDKECVYPLSGIVTCAECGMPMIRKTSKVSGKTYAYYMCATNKETKACSPHRISADKLEKTVLVLLQQHIGNILSLERIIEFIGTVPFQQIDMRKLEERKEKKLAEAERCAGLRTMLYEDLKDGIISEEDYKELHTAYENRRKNAQIAVRQIELEMEDVLNRKNEGFKWLDYFTEHGNIETLTREVAVSLIREVKVIDKTHIEIIFDYDDQYRECMEVIAGMENEDKSGNSGVSADGNLTGTSQQDSRYIRKENMEKEAV

SEQ ID NO: 5492 - protein, 587 aa, unidentified
  source 1..587: note = uncultivated organism
MEERKRKKAIYSRKSKYTGKGESIENQIDTCKHYLKNYIDTSLTDDDIVVYNDEGYTGANTDRPQFQEMMKAIKNDEFDTIICYRLDRVSRNVLDFANLYEDWQEHDVNFISVSERFDTTTPMGKAMLFIAITFAQLERDTIAERIRDNMYKLAKTGRWLGGNVPLGFMSEKMEKLNINGKKTSLFKLVPVDDEINVIKTIFQKFLEFKSQTQVESYLIQNDYKTKRKCDFSRWGVKNILRNPVYAIADKDVLQYFLDNDVEIYNEHDEFNGTRGIIGYSKTEKTKTGRVKYKDLQDWIVAIGEHKGIISGKDWVEVQNILKANEDKNYRKPIKNNAILVGVLRCSHCKSLMRAKLKQNKTANGDLRFDYICDLKIKSKGDKCSCKNVNGNEADELVIKGMQELAQPTSEFYKAIKEIATDNDYDNKNRNDELQLLERNYSKNENEIKNLANRLAIVDDELFDIVQSQMKELKCKNNEIATNIQKIKQAQPNQVVNDQETAKIVFEILNSYMSRFNELDIISKRNLIKLFVGNMETDGKNLYMDLIGSRNHTITTRPQLFDDDNNDNQEGLSATHNGQIVLSSDSSE

SEQ ID NO: 5493 - protein, 570 aa, unidentified
  source 1..570: note = uncultivated organism
MKANEKRYIAIYARKSKLTNVGESIKIQIEKCENYIRAQPTFDDTTKIKVYQDEGFSGGNTDRPDFQRLLSDCINNKVSVIVCYRLDRVSRSVADFSQLYQKLEEHDTQFVSITEAFDTSTPLGKGMLHISMTFAQMERETITMRIRDNMIGLAKTGRWLGGTRPLGYRSIHATIPNTLNGKVHYYHKLETVPEEELIYQTLVDKYFDKKSLTAVSTFSHQAGLKTRNDKYFSTYALRQIFTNPVYASADLDMYNYFKTLHANISMDISAFDGKHGLMVYNKTKQVNGSSHQQHPTDEWIVSIGEHKPFLTGKQWLALQELIENSKKRAYRQPRKNDALLSGFIRCANCNSFMRPKNYNRVDENGKKVYAYLCSEKEISKGKNCNMKNPRGSDVDYFVCEELKKLCEDKGTFMQQLNSIEKELTKESSDSLSEINLLRKNIKDIEKRINTLIQNLSQTTESITSQYINEEIQKLHSKKLEIEQQITTLETIENDKPDVLHELSSLQQKLSEFSTILDEMSIDDKRNALRKLVKTILWDGNTIHLYLTGSETPDSCSDIYDIPEPIGADCK

SEQ ID NO: 5494 - protein, 562 aa, unidentified
  source 1..562: note = uncultivated organism
MKAAVYCRVSTEDQEKEGTSLQTQIEACLDYCRQKGYTVSRQFSEAYSGLTLDRPKLNELRDLIRTDDINVIVIYCLDRLSRDPTHGVILTQELERFSVALEAVTETVDSTELGKLISYIRGFASKLEAEKIRERTMRGKLAHLKNGRLPQGTGIGIYGYKWDKATGRRLIIDHETETVRKIFSMAINGISTNQIAILLNKSDARTKSGSLWYPLTVRRILNNRAYTGKTYFGQTKRVSKTKVEAQPEENWILLPDITPPIITEEIFNQAKEALANAKQSRPLKPNSPYLLTGFIRCSKCGSPVGGTTLSGKYKYYQCRGARPTATRGKICDAGYIKADEAEGFVWERLVKLLSSPLTLLSMFTNMRYDSKRNILPMLDRQIKQLRNKLKTYPTKEKNLYDLLAHESVTKDYILEAVTKLKQSQQEDERQLKQLLEFRKKSAQTQQITVKLTEFSDAIRNSFSDNISLEEKRAMLEALQVEILAWPGKYRFSCFIDAELTSDYDEELESAFSEKVKELEEKHPEINFGDLIDHSKQLPEDTLIGKTANQLKKNLVTIEQTSA

SEQ ID NO: 5495 - protein, 692 aa, unidentified
  source 1..692: note = uncultivated organism
MKVAIYSRKSKFTGKGDSIENQVQLCTEYAKNLGVTDILVYEDEGFSGKNINRPQFMKMMEDAKLKKFDTIICYRLDRISRNVSDFSSLIDELSSLSIGFISIKEQFDTTTPMGRAMMFISSVFAQLERETISERVRDNMRELAKDGKWLGGQLPLGYDNEEVKYIADGKERRYFVLKVNEDEIKLVNDIYNKFLELRSLTKVSEYLYKNNIKGKNNGTITPSMVKDILTNPIYVKSSNLTHQYFELNDINVTGEPNGCGYLTYGKHKNGKKTDKSNWIYAISKHEGVIDDLTWLDIQKVVDKQSKRGCRTGSGKNGILSGVLKCAKCGSAMVLTYSSRGKDKENRSYYYKCNKKYTMYKCNNANVNGPEIENFVIDKIKVCDKDVLVNEYKKLKIDFSNLKKDNGMLDIQKQIDDKEKAIEQLVLNLSETNNATVSKYILSQIEKLGDEVDNLKVKLDDSSVVENNIDAEILNIDLIIDNLERFNKCIDEASVEEKKVLVSSVVDRVVWDGDNGEVIIVYHGFDEEQFKDNCLHLDTESICMNSLNATFIHNLYDYSDLPEDTFGQRLKKLRLLKGLSQYELGNQIGMQHSMIGSYERDEFYPTLDSIKKLGKVLNTNILCNKGYSNFLLNSSTFKDKLFKWRIENNLTKREASKLLGVSERGYGGWEEGVIMSIKTYDKIKNSLEIHNLL

SEQ ID NO: 5496 - protein, 562 aa, unidentified
  source 1..562: note = uncultivated organism
MKRDERKIVQRCAVYTRVSTDSGLEQDFNSLDNQREASEAYIKSQTHEGWKLVRERYDDGGFSGGSMERPALQKLLDDVRAGKIDVIVVYKVDRLTRSLADFAKLVELFDAHRVSFISVTQAFNTTTSMGRLTLNMLLSFAQFEREITGERIRDKVAASKRKGIWMGGAVPLGYRVEDRALHVVEDEAEFVRGLFRRYLELGSVVRLKTALDAENVRSPVRTSRTGRRTGGAPISRGHLYWILSNPIYIGRLRHKGQIHDGLHPAIIDLETWEHVQQRLASQTRARRVAQPDDHSFLAGKLFDDRGNRMGASHASKGGRRWRYYVSRAALSGRRQEAGSVVRLPAAEIEGRVARAVGTYLASRASLIAGHHINRSFLGGNVTNAPREQTRRPPTDPPTENDVRNAIERVTVSATQIEIVLSQSIVSEGQGRLLTLPWSRTSSRRRREIIQGVDELIQPLRAMRTKARDGFVKALRAAHRWLDELLSDPTKSIESLALREGQSERSIRMTLSLAFLSPVLAEAAMEGRLPRGFSVGRLTDLPMAWSKQWRTIGLPIQAQAELA

SEQ ID NO: 5497 - protein, 541 aa, unidentified
  source 1..541: note = uncultivated organism
MPKVNCAIYTRKSTEHGLDMEFNSLQNQEEACKAYILSQAFNGWEYYKTYSDGGISGGTMERPGLQTLLNDIQAGKIQVVVVYKVDRLSRSIIDFHKMMQEFDKYDCNFVSITQSFDTSNSMGKLTLNMLLSFAQFEREVSAERVRDKIAASKAKGLWMGGTPPLGYDIKDRQLIPNEQEKTLVKLIFTKYLELGNMFATAHWLNEQGYHSKAWVPRCGKPRGGRPFQKSGIQRILTNPVYIGKVAHHAKNKIYQGKHEGIVPMDIWEQAQEFIRRRVKDKNAFSTYQVHDSVLSRKLYDDTGRSFRLTTAKKQGKKFLYYYNGVGGHYLPVEQLDNFVLKTLKMTDFDDLEPLANRDALPDKQMRKWIDKVVCQSTGKTHYLSIFLNEKQIKADLSALPKISGQAEERALVPEKLDEKLYVRNTFIVDNVSSMKLQNGRARNILTVRQLNESLVRGLSRGWQLKRLLEKGKSLRECEAASGMNKRTIARYLNLCYLSPKILADILEYRNPRNMTLKELMTLGEGETGFREQEKAWISIIK

SEQ ID NO: 5498 - protein, 525 aa, unidentified
  source 1..525: note = uncultivated organism
MIATTEKKVVRCAIYTRKSNEDGLEQTFNSLHAQRAMCESYIASFASEGWTILPTDFSDAGITGGTMERPGLQNLLADIEAGRVDVVVIYRLDRLSRSLRDFLNMMEAFDRRHVSFASVTERIDTTSSAGRLFLNMILAFAQFEREVAAERIRDKIASAKRKGKYVGGRPLLGYDVDREKMRLVVNQEEAKLVRHIFGRFCQVGSCMKVAHELNAAGHRMKAWTSKKGRAMGGGTWLKTDVHHLLTNSRYIGLVVHKGENFTGEHEAIIDRHVWDRVQGILSKNRRYHANQTRKTTTAILKGILRCGCCNAAMVPTYTVRRGKRYHYYLCHAAGKDGHDSCAVKSVAAGQIESAVFTYLKDIFADPEMIARTFRATRTQTTEQRDAAAREKSAAEKRLADLRKAIGRLVRAVDGKSEGALSAELRSLNDEYADTERRLAELAAGPVGQDDMPSEQDVADALRTVEPLWEELFPAEKGRIVRLLVEMVTVRPDGLSIRLRPMGLITLAAEVAPDGTEEPKLEEATV

SEQ ID NO: 5499 - protein, 575 aa, unidentified
  source 1..575: note = uncultivated organism
MQKTVVRPIRCAVYTRKSTEEGLDSDFNSLDAQREAGEAYVASQRNEGWVLLPDRYDDGGFSGGTLERPALQRLLRDVEAGRINCIVVYKVDRLSRSLMDFSKLVELFDRQKVSFVSVTQHFNTTDSMGRLTLNILLSFAQFEREIIGERIRDKIAAAKKKGKRCGGLPLLGYDIVNGKLEVNPAEAKLVRHVFDSFLRIGSTTILARQLNEQGHTTKTWTTHQGKERKGGPWSKAHLYRLFRNRTYLGEVTHKGNVYPGEHQAIIPRELWDKTHSILTKNHHARTAKTKAETPALLKGLIRCGHCQTSMGITFTRKAGKMYRYYLCQNASKSGYGVCPVTSVAAGEIERVVVDHLRNVLRAPEIAARVSRVTESPLSHDEIRDALQNIDSLWGDLFPGEQARIVELLVESVAVEERAVVMTFRPNGLRSLALESRGIEQTGVAEVQTDDTITVRIPMEFKRRGGRKEIIAPEAGAATVEVVAAPQEPLVLALAQAHRWQELLRSGRYETAGDLAKHLRVSREFVTRTMSLNYLAPDIVQAILDGREPSGLSMGKLAGSLPLLWNEQRARLGFAC

SEQ ID NO: 5500 - protein, 546 aa, unidentified
  source 1..546: note = uncultivated organism
MYLRLSKEDGGLLRGGDRMESESIAGQRMLIRDFLAGHPEIEVVGEYCDDGYTGANFERPQFQRMMEAVRSGEINCIVVKDLSRFGREYIDSGMYLQKVFPMLGVRFIAINDRYDNARPGSAEDDLVLPFKNLMNDSYCRDISVKVRTNLEARRRSGQFVGSKAPYGYVRSPENRNRLAVDPPAAQVVQSIFRWKIEGMSPAQIAGRLNEDGVLSPIEYKRANGSAQRTAFQKAAQARWFAGAIYRILGNEVYTGTLLQGKTTTPNHKVKRTVRRDRSEWARTENAHEPIIARAQFDLVQRLMREDTRSPSGRKSVYPLSGKLLCADCGSAMVRRTARRGGRTYVYYICSGSRRDRTSCTPHEIREETVRDTVLAVLRAQMDAALDMEAALARMDALAWENRELQKLRALMDAQEEQIRRNRRLKAEAYADYRSRLLSREEYDLFQAEFDRKIREAEDAADRLRGDQGSILGGLSAQQGWLAQFRQYRRIPELSRSVVVSLVDRVVIHSGKTVDVQLLYRDQFAAIAEFLRERAAQGGQTPSGRAE

SEQ ID NO: 5501 - protein, 531 aa, unidentified
  source 1..531: note = uncultivated organism
MKAGSAKTVRCAIYTRVSTDQGLEQDFNSLDAQYDASQAYIRSQAHAGWTLLRAKYDDGGFSGGNTDRPALQRLLEDVGAGKIDVIVVYKVDRLTRSLADFAKLVELFDAHNVSFVSVTQQFNTTTSMGRLTLNVLLSFAQFEREVTSERIRDKISASKRKGLWVGGMTPLGYDAKDRKITVNVAEADRVRTIFRSYLKLGSLNLLMADLRKRGIVTKLRKLKTGERIGGIAFMRGSLAQLLRNRFYIGEVAFKGEVLKGEQPAILDRALFDAVQARLNEQVTNHKAKWMKSDALLTGRIFDDRGNRMTPSHARRGNVKYRYYLSSALLQGTTECAGSVRRVPATDVEALVIKSVRAHLMPSQPIDDRTLISSRVARVEVQPKQLVIHLTEEPKGTANRKKTRANGALHVAWQRTPSTRRREILLPEGMPPQHARPIRSETRATLVAAIARGRRWLDELTTDPSVTTESIAKREDCSVRKVNMTISLAFLAPNLVKAAIDGRLPHGMGVARLTDLPLEWSRQHELLHLPSH

SEQ ID NO: 5502 - protein, 530 aa, unidentified
  source 1..530: note = uncultivated organism
MNRQVTVIPAVIPQFVNKKTLIRKKRVAAYARVSTDFEEQLSSYEAQVDYYTRHIQSNENWNFVQVYTDEGISATSTKRRDGFNRMIADAMDGEIDLIITKSVSRFARNTVDTLTTVRKLKDKGVEVYFEKESIYTLDSKGELLITIMSSLAQEESRSISENVTWGMRKRFADGKVSLPYKHFLGYEKGENSLPVIVEKEAETVRLIYRMFLEGKTCGAIAKNLIDRGVPTPTGKQSWNPATVRRILKNEKYKGSAILQKTYTIDFLTKKKKVNEGEIQQYYVENSHPAIVPPEVFDMVQYEFQKRKTAKGYMTGHSPFSGRIVCGQCGGFYGSKVWHSNSKYRRIIWQCNHKFTNKDKCRTPHIYEDDLKRAFVDAFNNIIENKDEILREYVKIIDRLTDTSALDREDDKLREELETVTALLRNCVDENARSALNQAEYTQKYSELKDRFDRVQMDIAAVSNKRTEYAAKRQASAEFIQSLQNQEGLIDGFDEELWNAAVEKAIVDMSRGITFVFRDGSEIYGGVNSAG

SEQ ID NO: 5503 - protein, 563 aa, unidentified
  source 1..563: note = uncultivated organism
MTARRLRCAIYTRKSTEEGLDQDYNSLQAQRDACVAYITSQAGEGWTVVKTAYDDGGLSGATMERPALQRLLADIEARKVDVVVVYKVDRLTRSLADFAKIVEILDAHGVSFVSVTQQFNTTSSMGRLTLNVLLSFAQFEREVTAERIRDKIAASKKKGMWMGGVVPLGYDVVDRKLVVNEDEAETVRTLFDLYIRLGTVQAVKEEADHLGLRTKARKPNNGSRDGGVSFREGHLQKLLKNCIYVGEIRHREERYPGEHDPIIDRALWDAVQAKLEENAVKRHSETNSTSASLLTGMLRDENGILLRPSHASKSGRRYRYYISRQPENGAPRNATAWRLPAPAIETLVVQSICTFLGDGVRLSKTFGVTEMHAAQIEAMMAHAAQMKRRLETGNRAEMRALLLETVARVELQRDCIRIGLNASTMRLYLTVPEQSGRTEQHIAWLDMPVQLRRRGAELKLVLAGEHAGAGTPDPNLVAAIAQGHRWFEELRSSMAKSIADLVRRHGIHQADVSRILPLAFLAPDIIEAILEGRQPVELTAARLKRIGLPHAWADQRRVLGFTD

SEQ ID NO: 5504 - protein, 506 aa, unidentified
  source 1..506: note = uncultivated organism
MPQVQVIQPIQQQPKRLRVAAYARVSSDSADQLNSLSVQVDYYTHLIQENPQWEFAGIYTDEGITGTSTKHREQFNRLMDDCRAGLIDRVLVKSASRFARNTADALTAVRELKSLGVTVAFEKEGFDTETANGEMLLSMICAVAQEESLSISQNMKWGIRKRMQAGTYMNAMLPFGYDYNNHKIDLNPDNAKIILRIYQYYLNGKSIAEITAILNHDYPKGNGTWRPTTIQKMLANEKYAGNMRLQKTYMSDSLPLIKHKNCGQRSQYFVYGTHPPIVSEKAYEKIQHLLKQKSTKRNSPQNRPLSRMAYCSICGAVFSKKKAGEKFTWCCRNHLLDAGKCPTMPVAEQTIYTAFITMFNKLLVNREKIILLMLDDLTEIQRQQEESCQKVANANEEILLISKQLHNLTRIHALGVIEGEEYWEKRTLLEQQLAEKKAAQPQHQEGHEIALALNKTKQLYDILRIYHPLEEFDPLAFKRITTKISINNETIKFHLINGLTVSERRS

SEQ ID NO: 5505 - protein, 550 aa, unidentified
  source 1..550: note = uncultivated organism
MARTAKRYLNGRKLEYPRLSVYKTAIYARLSVDHDDKKSESIETQVEMLKEFIRHQNENADRNSELVLYDVYTDLGKTGTNFERPGFERLMSDIRAGQINCIIVKDFSRFGRNYIETGDYLEKIFPFLKVRFISVCDHYDSFAKDADSQELSMNIKNLVNDAYAKDISAKCCASKRACQKNGSYVGGMAPYGYHSVNENGIRKLVIDPETAEIVRRIFEQYTDGMPINRIIDGLFENGVHRISDYNRYHHVYCQDGEVLHQWGNSSIRAVLTRNNYYGDLVQHKYKSRFSRGEKWCDLVDEREWIISPEAHEPIISRDMFDKAQIRLKAAKEARSYVGWDKKDRAFYNVFYCGDCGRKMTTCRAREHVEYFCQASRYKDERRCQTKNISEDKLQKIVRSELSRQLQFLKIKKKDMTAISRSVLEDQLAIIRKELDKMETDYQKISDQSFQSFLMYKEGKVSLRAYLDAKKECSEWETFFQGRRKTLEQKIHMLQKQQKEEAKFLRSLLELEGTSRLNAELVEALIERISLYGDGHLEIVFKFQGVMADDR

SEQ ID NO: 5506 - protein, 534 aa, unidentified
  source 1..534: note = uncultivated organism
MNKDNNQEKQKIYCAIYTRKSTSEGLDQDFTSLDAQRESAVSYINSQKNEGWIALDDKYDDGGYTGANIDRPALQKLIEDIKAGKISCVVVYKVDRLSRSLIDFAQLLELFEDYKVAFVSVTQQFNTNTSMGRLTLNILLSFAQFEREIISERTKDKMGAARKKGKWLGGKPPLGYDHNKEVGKLVVNPVEAELIKKIYALYLQGYSLRLLARELNEKGFRSKSYTNQSGKTRGGQPFMKNSLNSIIQNPLYIGKVSYAGEFYQGQQEAIIDEDTYNRAQELLKKNRSYKELTRGNKVVTTLTSLLFCKHCNRPMFGTHTSKKEKIHYRYYVCIQAQKNGYETCKTRSVNALEIEKAVAEFFFTRPEGAKFKETWQHLTTQEQKSILISHIKRIDYDGVTKKFVITFVDGTTEEYGGDLKEVRHIITHTPKDDIVKEPKLRQRLILAHHAQKLLDSGQATSIKQISQWLHMSAIRLHLIIEMLILSPKIQEEILFGSNDIINAIPEYKVNLITKEPDWGKQYEIWRPLVTNPTQ

SEQ ID NO: 5507 - protein, 552 aa, unidentified
  source 1..552: note = uncultivated organism
MKTVRCAVYTRKSSEEGLEQDFNSLDAQREACAAYVLSQASEGWKLVNEQYDDGGLSGGSLQRPALQRLLEDIKLGKVDIIVVYKVDRLTRSLLDFAKLVEAFDAAGVSFVSVTQSFNTTTSMGRLTLNMLLSFAQFEREVTAERIRDKIAASKARGMWMGGVPPLGYRPDGRSLAIVEEHAELVRSIYRRYLELGAVRLLADALAQEGAGSPARETEKGFAYGGRRFSRGQLYHLLKNPIYSGKIPHKGKVYDGNHPAIIDQATWDKVQKQLAAHTQGTRTVWERSGSLLAGKLSDGQGAPMITSHTTKGNQRYRYYVSKAEASDEASAVRSQQRIPASEIEPVVVSALAAELAQPLALLEKAQIAINSDELATLGPKCAEISARLTSDRAAIRKLLSRVEAHRDRIEVYVSAAALAELLWLPEPSDLAHVVALTLQVRLRQDRKVGRLVEETGLAAVTKPDPGVIRYLLKARTWWQELSEGDIDINTLAKREGVTASYMTRIVRLQFLSPKITEAILAGKVRAEAGPRALMRTDAIAALWVDQERLYLPG

SEQ ID NO: 5508 - protein, 562 aa, unidentified
  source 1..562: note = uncultivated organism
MDRSKKLVRCAIYTRKSTEDGLEQEYNSLDAQYDACTAYALSQRHEGWTVTKDRYDDGGFSGGTLERPGLKRLLADIEAGKVDIILLYKIDRLTRSLSDFAKIVEILDRKGASFVSITQSFNTTTSMGRLTLHMLRSVAQFEREVTGERIRDKIYASKRKGIWMGGPVPLGYDVIERKLVVNEPEAEQVRKIMQLYLTANSVPELVQILARNGSLTKVQQRKEGGTKGGVHFKRGNLYHLLSNRIYRGMTVHKGEAFEGEHEAIVPEELWNQVQAKLAKQGQGGSSRKVSPRTGVLAGLIHDGEGRAMVLTHTQKGNRRFHYYANRYETLGDSAASRVNARDIEDIVVEQLSQTLASGNKVQNMLLDGTYTSEQLHNIIARCNKLATELGTAKYTRKQEILRSALDGIDVYDDRVVIRVDNRGLLNIIRADSAVQPTKVNLIIERQAIRLRRGKALRLVIPAPTSESNIQMRDEKLIALIVESRMVVTQLTNNPNKSIPTLAAEQGRCRVRMMKVAKLACLAPDIVTAIVEGRQPLKLTPGKLLTADLPLDWADQKRVLGFV

SEQ ID NO: 5509 - protein, 553 aa, unidentified
  source 1..553: note = uncultivated organism
MQKSTEGALYIADTYSRLSDEDGDKAESSSIANQKEFIREFLKSMPEIRIHAERVDDGFSGVDFFRPGFQEMMKDVRAGLVNCIVVKDLSRLGRNYIETGKYINEFAERGVRFIAINDGYDSANLQGQASTILLPIKNLMNDSYSRDISIKIRSHLEVKKRKGEFVGAFAAYGYLKSPEDKNRLIVDDYAAAVVRDIFRWKLEGMSQQGISDRLNDSGILSPAEYKRSLGMRYVTGFKCNPQAQWTAVAVGRILKNPLYIGVMVQGKFGRPNYKIKKNMDKPEESWIKVEGTHEPIISEVDFKTVNGLLRTDTRVAPQKQTVYPFSGLLFCADCKQNMVRKTVPAKGKKYYYYACSTNRADKTACSTHSISEPLLTAAVEACIQAHIESVINIEKTLAFIATLPAEEAGAKKVDQQIEKLKADHEQAMKFKLSAYESFVDGVLSEADFKEYQRIYTKKCEEIERAIENRQQELNAILEAGSSQSEWIAHFKAFRFTENMERKFLVKLVERIYVHEKNRIEVIFKYQNEYRAAIAYIERRIAGQGPAAARKEAV

SEQ ID NO: 5510 - protein, 529 aa, unidentified
  source 1..529: note = uncultivated organism
MTIKCAIYTRKSTEHGLDMEFNSLQNQEEACKAYIASQSFNGWQYCKTYSDAAISGGTMERPALKQMLDDMARGLVNTVVVYKVDRLSRSILDFHKMMQYFNKYNANFVSITQSFDTSTSMGKLTLNMLLSFAQFEREVSSERVRDKIRASKAKGIWMGGMPRLGYDVVDKKLIVNPAEAEQVRQLFEKYLELQSVNDLTQWADSNGFRAKAWTTAKGVLRGGKPITPNSMHKILRDKIYIGMIENKVSNNVARGEHQAIVSPDVFEQVQDALRANSNNTSHRRRSPNLLSRKLYNDKGVRFANQHACPKDKVGPYYYATRGFYLPAAQVDEIAMSVVADFLDSDMSALPQNVVMALKRIVWNDLSYLQRRELVRVMIERAIYSQEQLIFCININPRLYNSFLSTYHINHNNSPMEYTVNGDNVTIVRPVVLRRYANTRFGGGRNGTLSITENNHLILKAFATAWKFRELYERDGDIHRIFQEEHTSPRQFYRHLDIAYMNPDKVNEILSGKTHISVNDLFQIAKINQL

SEQ ID NO: 5511 - protein, 570 aa, unidentified
  source 1..570: note = uncultivated organism
MARKSKYSSNENVVNKKVWSVALYIRLSQEDSDNGTEKQESNSVTSQKTLLNEFIEEHDDLIVYDTYIDDGFTGTDFNRPSFQRLLEDMRSGNINCVIVKDLSRLGRNYIEVGNYIEQVFPLFNIRFIAINDSVDSFKNPTSTNTILVPFKNLINDEYCRDTSTKIRTSLNGKKKKGEFIGAFPSYGYIKNPKDKHRLIIDESVADIIRNIFDWNVNEGLGKIAICHRLNDLGILNPTGHKKLELGQNYNNYGIQDNTYTWTPSTIRNILNNEVYIGNTVQGKRRTKSYKVHKVEAVPKEEWVRVENTHEPIIDKETFEKVQEMSRRDTKVSQKTKELSVWAGFLKCADCGRAMNKKSSTNKSGSKYEYYICSTYRKKSNKLCTKHTIKEELLEKAVVQAINLHIDLLINTEEIIKQINQSSFQNLKNENIENMIMTKQNEISKISNFKRTLYEDWKNEDITRDEYLEYKQKYENDIERLKLNIERLQNEKQKYENQNQSSNKWIEKFKEQKGITELSRDIMMELIDCIYVHDNGNITIRFKFEDEFKRCQDYIENNRNVLELKAKAKAV

SEQ ID NO: 5512 - protein, 607 aa, unidentified
  source 1..607: note = uncultivated organism
MKKTAIYIRVSTDEQARSGYSVEAQKKNLTEYCKRYNFNLIDYYIDSGFSGAKLKRPELQRLVADVEQGVIDSVIVWRMDRLSRKMKHLLYLLDLFEKNDVNFYSMTENFDAKTPVGKLLINMLGSIAEFERESIIQRINAVKETRKMKKKLPLGNPPLGYKIENNQFIYDEKAHVIKKIFEMYIYGYKPKKIASVLNQEGYRTKDGNIFTRASVWRIVKNHTYAGLIEINGKLVKGNIEPIVDEQTFYQAQKIIESRRIEKKKNPEKHLLTGLIYCKCGSTMHSNASSNKRRYKCSAKVLYFSDSCDSKGVKADFIEYQVASLIQDIIKNNKSELLNPFLEKYNEMAKQQNKISEEISFLNRKKAELDQKLNKYFEAFEEGEIDNTVLKNRLNNLKQQKEQIEKKLLDLKLKSNEIDSIDEEKEKIKALLEQFEILWEVSDLTDKKKILSVLIEKIVVFDDYIDIYFTTGYQHRIKIEQSTPNYFIRPLEKWEVEVLKNTPTKKAKALLMLADGRKISEVAHELQVDFSKIQWLVRSYNKTGIKTCFVDFKTNMKIEFEDYVLENIEKLKHMTFDELMNHLQEKGYSVASNKLKNFWYKHFVSKKI

SEQ ID NO: 5513 - protein, 547 aa, unidentified
  source 1..547: note = uncultivated organism
MIRRCAIYTRKSTEEGLDQAFNSLDAQRESCEAFIASQRGEGWRAVKARYDDGGISGGHMERPGLKALLADIDDGKIDIVVVYKVDRLTRSLADFAKLVERFDKHEVSFVSVTQAFNTSNSMGRLTLNVLLSFAQFEREVGAERVRDKIAASRKKGMWTGGNPPLGYHNIDKKLIVVESEAAIVRELYTQYDRHGAVQEIIAHARRVGWLTKRRANGSGGLPLSRGPIYHILKNPVYAGLMRSGNQLYEGQHEAIIEREQWERVQEKISGRTQWRGPPKNKKSPLAGILSWKNQRLTPEHAKKAGRRYRYYVTGKNEFEKSKSIRLKADDVEAAVARAIDKWTADADAAANDILKPGASAQVSARVKKAVAWLAITESSPPSQRCQELRPFIKTVSLNEEVLALTLDVNAMLKDADADDALLEEFTIRKAVEFRNCKLGARLILGGCERPETPDESISTLLARAHRWKKAWFENPNRELKSIIKEDGGDATTTHRVLTLAFLAPDIVDALIRGDGSYAVSAEDLRRLSEMPTCWVEQREMLSARSKA

SEQ ID NO: 5514 - protein, 572 aa, unidentified
  source 1..572: note = uncultivated organism
MKKNKTASKRCAIYTRKSSEEGLEQAFNSLDAQREACESYIHSQRHEGWNILSTAYNDGGFSGGNMDRPALTTLLTDIKAGNIDVIVVYKVDRLSRSLADFVRLIELFDNHQVSFVSVTQQFNTSTSMGRLTLNVLLSFAQFEREVTSERIRDKIAASKQKGMWMGGQVPIGYDVLEKLLVVNESEAIAVRHIFNRYLALGCVRKLKAELDAEGYVSKARILNGKAAGEKPFSRGVLYALLKNPIYIGKTHHKGKLFDGQHAGIIDVSIWQQVQERISRNKHNNRTRTLAKDPSLLAGLLFDDMQHPMSPTHTRKQNRRYRYYISQATLQFKEKETGSVIRIAAHIVESLVIDTLLTLLSTAATLIDVIQLNVHSANDVQQLIENAAHLAKHWKEKTPSEHIILLKQLIHRITISKREMTIVISRAGLRSVIQANNVSNALEKPHTHEDEYVMKKPVQFKRCGIETKLILSDDKHAPAHPETIQAIKNAVTKALLWNDALCSDQVSSIKTIAEQENVTPQFIARRLKLAYLSPDIMEAIFKGNIPHTLSLGLLEKSIPLIWEDQRESFGFAS

SEQ ID NO: 5515 - protein, 509 aa, unidentified
  source 1..509: note = uncultivated organism
MAIVLYARKSVERENSISCETQIEYCRSVIRPNERDEKILTFVDNGYSGGNVNRDGFQKMMKLIRQDKISKVIVYKLDRISRSLSDFVNILQEFKAHNVEFVSSQESFDTSSPYGEMIVKILMVFAEFERTSIINRITQAYAHRSEMGFYMGGRKPYGFELVPTVIHNIKTKKLSPVPNEVEQIQYIFEVYAQESVSLRRLLDILIAENKKPLSGRDWTTSKLSSLLKNPIYVRADADVYNYYDRHSVQMITDISMFDGEHGAQLYGRNKHRANDSDWSDMKLVLLTHDGIVDSDIWLKCQKKLEKNKQIGNSISNNTSWLSGKVVCEKCGHTMTTIKGRVGREGKIRRYFNCTGKSHKKICTGVKATIYAEDLENMVYNCIGEKLSDIKEMKHSMVAGDTAAVNELKLKIKEIEKEEKQLIDSILAGGYEDALLALANQKAAQLKKDRLVLQERIDELKSRRDETHRAVDLARSWSKADYRRRKEVAMLLIYKIVISEDGSAEIIWNI

SEQ ID NO: 5516 - protein, 508 aa, unidentified
  source 1..508: note = uncultivated organism
MDDMLTTDYDGCGRCLVGVRRLSRKTDKTSSPARQADQILQATADIGGHIVAWADDWEVSGATDPLTRRGFGPWLRGEMGPYDGVVAASVDRVGRNVRDTLNTQTLLTGQGRVVVTADHVGVWDFSDPNQENEWLAKAWGSQMELRAIQKRNRDEAIRARKAGEPKQRPSYGYMYVRPAPMAKVDHVALDEVGAEIIREVARRILADETGKITIGTEAVRLTREGIPSPGDRRAQLYGRPVKGGPWTGHTLKHILCSEAALGYLMHGGRPVLGADGRPVRLAEPLWDRATHDALVTATAPRRDGTRAPKGMRLLTGAVFCGNCGARLHVTGRGNSRYAYECTARIRGIRASAQCRPAPAMALTAADALASGWFLARYGSGEVMRKVYDPGTGHAAQIAELEATRTRLREDRQAGLYDSAEDAEWYRTEYHRLGEEITALTALPERKPGVRLVPTGRTIAEEWDAADNARRREMLAEFEVRVVLHPMGHEPRVAVTGMEISLDGLEHAG

SEQ ID NO: 5517 - protein, 540 aa, unidentified
  source 1..540: note = uncultivated organism
MKAEPKKAVRCAIYTRKSSEEGLEQDFNSLHAQREACESFIASQRGEGWGCIATAYDDGGYSGGNIQRPALARLMDDIERKLVDVIVVYKVDRLTRSLADFAKLVELFDSHSVSFVSVTQQFNTTSSMGRLTLNVLLSFAQFEREVTGERIRDKIAASKKKGMWMGGRVPLGYDAYERKLIPNATEAKIVNQIFRLYLQLGSVRLLSEELLRRKIQSRQKSAGRSGVNFSRGALYDLLSNPLYIGQVRHKDMIYVGQHHGIVSRELWDAAQAMLQKVQMRKRGNGRSTEPSPLIGKLFDQSGQRLTPMHTKKGSRRYRYYVSLRLRDGGVDPEGWRLPASEIEKLLISQARALMNEPAEIVRAAGEAGVAIPDARLAIRKLEAGRQAESVVLSLVERVDLSKDGIILKLAVPVGKSMLKFVRRSPIRIQSRGVEKRLVIHGKGVEPRAVDRPLLKAVARAHRWFGWLEHGQAKSIKDIAIREGLVPNYVGRILPLAFLAPPIVESILDGTQHPRLTLKALMTDLKLSSDWTEQLAAVKAL

SEQ ID NO: 5518 - protein, 619 aa, unidentified
  source 1..619: note = uncultivated organism
MPSGARQGARSAKPGRHGQRSGTRSPSHAGGGGQGSGPPRRRCAVYTRKSSEEGLEQEYNSLHAQREACEAYIRSQQHEGWRLVPDAYDDGGISGGTMERPALQALLEAIRAGRIDIIVVYKVDRLTRSLADFAKMVEVFDANGVSFVAVTQQFNTTSSMGRLTLNILLSFAQFEREVTGERIRDKIAASKRRGMWMGGRTPLGYEVRDRKLVVGAEDAATVVHFYRRYLAQGCVRRLKAELDGRGVVSKPRTYAGGMQAGGTPYSRGALYALLSNPVYIGQVRHKGECHPGQHEAIVPAELYAAVQAQLAASNGGGEKRARYKVEPSPLAGKLFDEAGERLVPTHARKGERRYRYYVSANLLVSKDKHAGDAPGKERSKLESAMQHWPKEAPLGWRLPAREVEQNVAAALQTMMIDHGALVSDALEAGLPASDVPNLLNWLARSRLHPGASPQAERSVRAEAEGMLQRVELSAEGMMLNLALPMSGPGEGNPGGASAVTLRRFVPHRVRRRGVEMRLVIEGSAAPPRNDAALLKAVARAHCWFEELVSGRATSAQAIAHRLGVTPRYVQRLLPLALLAPQLVERIVGGRHDAELTLDLLCERGILPQRWTDQVASLAN

SEQ ID NO: 5519 - protein, 577 aa, unidentified
  source 1..577: note = uncultivated organism
MKIAAIYFRVSTDNQETEGTSLQTQLEACLKYCQDKGYDVRYRFSEAYSGLTLERPKLNELRELVRAEQIDVVVVYCLDRLSRDPTHGVILTQELEKHGVTLEAVIETVDSTELGKLIAYVKGFASKLEAEKIRERTLRGRRARAKAGRMAGGFHTTYGYDYIKVAQENGGRRVINDTEAQWVRKMFEWLVNDGLSSNAITHRLRALNAPTKSSPYWNRTSVLAILKNPAYMGKTYAFTTSKSKQFRKPKENWIEIANVTPAVITQEMFEAAQKQLEQNRRTAKRNRKREYLLSGHLYCRNCGRAYCGYVDRINRRYRCPGTQRIVVPVNRCTNKSWKADDIEALVWAQIERVLDKPELIISEIEKRQDTNQLGVLEAELQQVARQLRALDHDQEQLLQWALKGFPEDTVVAENKKTNAKRESLKTCKTELEAQIKAGQEAALNLPKLERFVELLRQKLTTLDYETKRMALDMLGIKVWLDGQSVEITGVIPIMDDVIVTTHSSGYQPAGGRARRASFLSTSSVLASDATQLLPQLLDQLEALGETAKQLKQALGSNGHRAEAISQIKEYLERQASK

SEQ ID NO: 5520 - protein, 523 aa, unidentified
  source 1..523: note = uncultivated organism
MPKVAIYCRLSIEDRNKQKCDDSQSIQNQKAMLREYCKERNWEIYDIYCDDGYSGIDRSRPEFNRLLHDCETGKIDIVLCKDQSRFSRDIVVIEQIINDKFLEWGIRFIGVADNADTDSETYSTMRLFTSAYNEMYVKDISTKIRRTLAYKREQGQFIGSFAPYGYQIDPNDKHHLVIDPETAPIVKQIFTLYVEGNGYRKIVQTLNEQGTVSPTEYKRRKGSNYVNGNADASNAKGLWTQSTIAKILSNEMYTGTLVQGKSHHVSYKNKKRKKVAPDKWVRIPNAHEPIIDIETWSRVQERLHSNTRVGKRSQELSPLSGKVKCAICGRPMKRNVYYNKAKTIKYYGLQCATYKTGAMNCPNRKSISGLVLEQKILDELNTIIEQYCQSEEIQLDNIHQKQLDTLKKQRSVLEERHQSAKNRLIAMYKEKLDGILSDEDYALFRESLTAEELSISEQINQITQQIKDCQKRLESAESQKALLQKYTHFEHLDRSIADEFIEMVKIGMLNEDGEREIHIYWKL

SEQ ID NO: 5521 - protein, 504 aa, unidentified
  source 1..504: note = uncultivated organism
MVAIYARQSVDKKDSISVETQIEECKKKISLSEEYEIFIDKGFSGKSTERPDFQRMLLKVKNGEISKIVIYKYDRISRSMYDFVNMQKEFEKYNTHLVSVTENIDTTTTQGKAMVNILMTFAEMERETIQKRIKDNYYSRGEKGFYLGGYAPFGYNKVDTYKNGKKTYTFEEKPNESCILKQMYIDYVNGKSLSEIARELNDKNVPTRRKRPWNENCISRMLKSPVYVKANADIYNYLLSLGGTMTNPIEDYNGEYGCYVYGDVSKRKGSKFVDLSNDFVTLGMHKGIIDSDLWLSVQQIFSHKKGHSNLGTGSLTWLQGLVKCKCGYTFYAKRFRPNKNKKEYKYLYCRGRKNNSCPYPKIMMNVSVIESIAQEALFNRLKELKNIKQNEIIKQSPEINKLKIRLSETDNKISTLMNNLANGESITIEYINQFIKKLDTERKSILDNIAELELKSSKTSQSQFDIDDIIKNWDNYDIELKKSIAKNVIDVIILEGKNVDIKFF

SEQ ID NO: 5522 - protein, 595 aa, unidentified
  source 1..595: note = uncultivated organism
MPTIKKLTGRDAIDMGLRSPSLQPNASKDAAQPGAMQNAAQQTAARGGPARRIHKIDAVSAVQVRPKLHVAFYCRTSTLLEAQQSSIEGQRQHFEKVIASHDDWRLVGGYIEEGVTGTKAEVRPELQRLLRDCREGKIDKILTKSISRFARNTTDCLEMVRELTGLGVSILFEKENLDTGTMGSDLILTLLSAFAAQESQSISQNIRWGIQRQFQNGTYEQPTVPFGYKRTPEGLSIIEEQAAVVREIFTLALSGHGAASISKALNERGIPTYAGKRWEPAQVLLILHNPFYAGDILYQKSYNDDAYKTHKNKGERDQYYLPDHHAPIITHEVFKGVEALIAQRGKECKNTQRTEAALYPFRSRLICAECGMPLHRLKSKTSIIYGCDGFKRKVGGCEKGTRIFEDTVKNAFTTVLNKLAFSQKLPPGNRILDVYINSIRQREREKNRSRLEEIDSAVEMLRVEIDRLAPTIRFKLENRAKLNELRTRVENLRREKQMIETQNDDILKAEQLRTYIYELSTEVDAVSTETDVASTETKVESTETDAAFTEFVERATVKKGDYIEFEFTCGLILRQSIALAPFTIDKDAVKKTSAA

SEQ ID NO: 5523 - protein, 525 aa, unidentified
  source 1..525: note = uncultivated organism
MNIAIYSRKSVYTSSGDSIENQIDLCKDYYLRMTNSDKINFIIYEDEGFSGKNIKRPQFQNLLNDIKSKKIQVLLCYRLDRISRNVADFSSTLELLQKYNVDFVSIKEQFDTSTPMGRAMIHIASVFAQLERETIAERIRDNMIELSKTGRWLGGIPPLGFDSIRETYLDEELKEKSFSKLIINEEELKHIELIYDKYLELKSLNKVSLFCMKNNISGKLGGFLERSGLGVILQNPVYVKSTYEVLTYLKNIGFSVFGEANGNGIFRYSQGTSEKIATVSNHKGVVDADKWLKVQVLIKNNLNPKLNSSISNVALLTRLLKCNKCGSNMIVKYGNKYKSNKRAFYYVCSNKSKSSGLKCDCKNIKGDIAEELILNAINIYNKEQLLKELSKITKSHKETPSTNNKDLLKNIDILEVKIKRLVQKLSLVDDLEISKIILSQIQDYKEEVKSLKSKLNDESTKEYNNSLSSSNLKNPLFILENFNEIIKEATIEEKRDILFSIIEKIVWDEEGQKLNIIYKKIQDSK

SEQ ID NO: 5524 - protein, 557 aa, unidentified
  source 1..557: note = uncultivated organism
MKNSALVYCRVSSAKQEEKGTSLESQASACVEYAEQNGYEVVKVVREVFSGAYLFDRPKLNEQREKIREGIFDAVIVYDIDRLSRNTAHFAIIADEIERYGGKLLFVNNDFENTPEGRLMMSVKSYVAEVEREKIKERTTRGKKTKFQKGELVNSSTPLYGYEFDNDNKRRVIKEDEAVIVRRIFEMFLAGKGIRGIYKKLNEENIPSPGTGKRKFKSAKYINIEKHGRTLWNKGAIHRILTESAYAGNTFAWKYMGVGGYEKGKRYYRIKKRDESEWIEMPKETTPAIVSPEKFSKVKDKLKKSKGEATRNKKRPELLRGLVFCGVCNMKMYPEIEHRQRKIYRCSSRNTIKCGGQSINATKCETAVWEHIAKIINNPELIKAEYGKIQTNGDDKNLKKIETEIEAAAERVKSIETEIARTYERAADATDERWARFEQVIEKKEKELKKSKENLEKTKKLKAGYKAKEQGLQSFYEFSLQARINLATFGFDDKRLALEALNAKVTGNSKEIRLNISLPEILKKQVNETNNASDRSARIGKDDAGETSADNFAAARI

SEQ ID NO: 5525 - protein, 577 aa, unidentified
  source 1..577: note = uncultivated organism
MNLGRAKTKSSTGRHAPRTVRCAIYTRVSTDAGLDQDFNSLDAQYDASQSYIRSQAHAGWTMVRTRYDDGGFSGGSTDRPALQKLLDDIRDGRIDVIVVYKIDRLTRSLADFAKLVELFDEHGVTFVSVTQQFNTTTSMGRLTLNVLLSFAQFEREVTAERIRDKVAASKRKGVWIGGMVPLGYEVRDGKPVIVEDEAKRVRTIFKTYLEVGSVGQLLPVLRKDGIVTKVRHLSTGKTIGGIPFSRGPLAHLLRNRFYIGEVSYKGEVCPGEQPPILDRELFDAVQVRLDQQRVSQDNARVRSDALLIGRIHDDAGNAMTPTHAQRRNVRYRYYVSTALVQGQSDEAGSVARVPAAEVEAVIIKGVRERLGDTAPADDRALIDSHVVRIDVQPASLVVALRLEDGDNGDQGELSVRPSGDWGDGGVNSDVSDPNPDLFDTPPPDDEALGYETSGYDVLHIPWTKPPTTRLRHIVSPQGAPDEIIIPSPTRLVASIAKGRVWLSELVTGQVLSIEEIAAREGCSVRHVNMTISLAFLAPDIVNDAIDGKLPRDIGIVRLSDPPAEWSKQCPPTTSTLR

SEQ ID NO: 5526 - protein, 522 aa, unidentified
  source 1..522: note = uncultivated organism
MSRTPSKKEPAASVRCAVYTRKSTEEGLEQEFNTRDAQRESAEAYIASQKNEGWTCLPEHYDDGGFSGGNMDRPALQRLLTDIEAGKVDCVVVYKVDRLSRSLLDFARIMEVFEQQNVSFVSVTQQFNTSTPMGRLVLNVLLSFAQFEREIIGERIRDKIAAQRRRGKWAGGTPVLGYDVDRSNCSPKLVVNAEEAARVRQIFDLYLQAEALLPVVEELARRGWCNKTWKTKKGLPKGGRPFDKCSLYNLLTNPIYIGKIKHKTDLYDGEHESIVPPDVFGKTQSMLHRNGRTGGVDVRNRYGALLKGLLFCSACNRTMVHSFTGRGSKRYRYYTCTRAIKNGRDTCPSKSLPAAEIEKVVVDQIRCIAHDRDLRTEVLQQARAHVESELKDLRLEQRGLARELARHHDDLRKLAIDAPASGATTARIADLHGLVARAETRLAELAKQVGDLERERLDEADVAAAFADFDKVWNALSPREQAQVLALLVARVEFNAGDSTIEVTFHPSAIKTLAKRDLEEAA

SEQ ID NO: 5527 - protein, 544 aa, unidentified
  source 1..544: note = uncultivated organism
MGSRNDSRQPERHRCAIYTRKSSEEGLEQDFNSLDAQREACEAYIKSQKSAGWLALPAMYDDGGFSGGSMERPALRRLLADIEAGQIDTVIVYKVDRLTRSLADFAKIVDAFDAKKVSFVSVTQQFNTTTSMGRLTLNMLLSFAQFEREVTGERIRDKIAASKAKGMWMGGATPLGYDIADRKLLINIKEAETVRHIFRRYAALKSVRALKGDLDAAGIVSKVRISRDGARRGGVSMARGALYLMLQNQIYRGKIVHKGTVHPGQHDAIIDEELWNEVQDALTTNRVERAMQSTATAPSLLASIVYDSGGERMVPTYANKRGVRYRYYVSQSLIKQGRAAVSETACRVPAADLESLVENRVCALLKDQTIIVAAGQSSSISVRKALIEQSADLARHWPTLPAIRKRVILHALISRIDVISDRVDIAVCPAMITHITKPDPDLQRLPARPAGSIEVLTIPARVRRTGMETRLLIESAQSDDRQPDRSLLRLLGQARRFHDMVAHNTNMSVAELAAATGVTRSYFTRIFRLNFLAPRITTAILQGR

SEQ ID NO: 5528 - protein, 588 aa, unidentified
  source 1..588: note = uncultivated organism
MKRKVRQAEQWDAGYPRVSTDMQMERDALQNQIQALEGHARAVGLNMHLYREEGISAKDTDRPALQRLLADVRAGRVRSVTVTKLDRISRSLHDLLDLVKVFEQYEVKFLSLRDNIDTSGPVGRFMLHILGAIAELERGITAERVAEDMKLRARRGKWNGGLAPYGRAMVNWRLITVPEEAETLRRMRLLLLQHRLWRGVTVALNRAGLRTRGWEPLARDGRTIRKGHAPAEWTAVSVKRVLLQPINDGTLVYNRRRVIGRVAVDRPEDEHVVIEGFCEPIFAREELAELRRVAKEIEGTPPRRTGSPHLLSGLLRCSCGTKMYGVKNQVVTKRGRYAVRYYRCRRSALAGTCSVRQIPADVVEPVIVRELRNLGLDRDRLRGLAGEAQATFEATLGPALERRATVAKELARAADRSAALIELAEDRLIGKAEFASRRAELDGERAALAAELARLDIEARERSASAIDIEWTLRSLHNLGDIFDEMRTVPERRQLLATCLDRAVLKPGEIELHVVTSPLVLAPPATGAGAAKVPGSCDSGTENRENQAANGWEFPDGAIRMPADAGENGTPIYGIGEWSDAPVATSAR

SEQ ID NO: 5529 - protein, 513 aa, unidentified
  source 1..513: note = uncultivated organism
MANVTYIAPVKAESSIHKIRCAAYCRVSSSSEDQLHSYTAQVKFYSEKFIGSETEELVDIYADEGISGTGTAKRTEFQRLIRDCKRGKIDRIYAKSLSRFARNTKDCLNTVRLLRELGISIYFEKENIDTAKTSDELMITVMGSLAQEESTSISHNMRWSVKKRMKSGTFVQSIPPYGYILDNGRLIINHDQAEIVKMIYQWYLSGMGITQIAKKLSEICIPTMRDNERWKPCTIRHILSNERYIGDSLFQKFYSTDTLPVRLVENKGERDQFLVKSTHEPIITRGTFERVQEIFKEREKQYYRGSGSKTVLTSMIKCNCCGSSYKRKVNRGKYYWTCKNHDINAEYCNSNVISEEMIKHAFISMCNKLIQHNREILLPLRRSLQELNIRRFSGNAQIIDIHKKIADIKEQRHVISRLRKKGFMDEKKYNEKLTELESQLSRQERELKKVAKADNEDDTLEQLDILIDSIEKQNGIITSFDEELFGTIVERIIVRDNCLEFILISGLALTENM

SEQ ID NO: 5530 - protein, 512 aa, unidentified
  source 1..512: note = uncultivated organism
MPQVEVIKPIQKHVTEKLRVCAYARVSTDSADQLNSFASQVQYYTNYIESRSDWELVDIYADRGITGTDAHKRDEFQRMMDDCRNRKIDQILVKSLSRFARNTADCIAAIRELRQLGVTVIFEKERINTRLMANEMLISMMSAFAQEESVSIAKNLRKGILMRMDSGNFRLSNLPYGYNHYENGRLSICDKEAEVIRWVYDSYLSGYGVNQIARKLPDQLPTAARIHGSKNGILYILSNERYMGDELLRKSFTSDTIPFRKIMNHGQQDQVYIQHSHEPIVEAGKFHAVQKLLAERREQFGCGEPRKTYLLTGKLSCKSCGAPLYRRVTGKGICWMCKNHVYQSERCTEKGYSEAAILQRARCLCRKLRTYRKELLEWYLQTLLKIESHDRACRPQVLELYQTINEILIQSHTLQRLYASGCIDSGFFISRKNELDHQLDENKARMRAAKETPCSDIIRQTRKMMDTLEQGPMPTDEVVWRQLIVKATVGEGSISFRMLNGLEITSPIEEEG

SEQ ID NO: 5531 - protein, 531 aa, unidentified
  source 1..531: note = uncultivated organism
MKTGPTQPVRCAIYTRVSTDQGLDQDFNSLDAQYEASEAYIRSQTHAAWTLVRNRYDDGGFSGGSTDRPALQRLLADIKARRIDVIVVYKVDRLTRSLADFAKLVELFDANGVSFVSVTQQFNTTTSMGRLTLNVLLSFAQFEREVTSERIRDKIGASKRKGLWVGGKAPFGYEAKDRKILVVEEEAEHVRTIFRSYLRLGSIDRLAADLRARDIVTKVQRLKNGKTAGGIPFTRGPLSYLLRNRFYIGEVVYKGEILPGEQKPIVDPDLFNAVQAKLAEQQNNHTKTRTKSEALLIGRIFDDRGNRMSPSHARKHGVKYRYYISRPLLEGRPKQAGSVNRVPAIEIERIIGEALRQETDTDLIAENHTLIATHVRRVEVRADQLVIELKPVTEDTHSDGVSNRKLIHVLWQKPPSKRRREIIAPASKTLSDARPIRADARARLIVAISKGRKWLDEIVTGDVADFAAIAARERCSVRCVNMTISLAFLAPELVKAVTEGRLPRGIGIGRLCHPPAEWSQQYKKLGLTSPE

SEQ ID NO: 5532 - protein, 526 aa, unidentified
  source 1..526: note = uncultivated organism
MARVKNIAQGSSVTVIAQRDLAPAKLRVAAYARVSSDSEDQINSYLAQVTFYTRYISEHEGWEMADIYADEGLTGMEASHRDEFNRMIEDCRDGKIDRILVKSISRFARNQEDYILHMRELLRLGVTIYFEKENVDTGKMTSEQAADIYGAFAQMETTSHSQNMRVSNRMRMEKGIYTLPHAPYGYRLVDKKLVIVPEEAEIVRRIYREFLQGRGRDDIARELTAEGVERNSTSKEWYGRTIGYILTNITYTGDQIWQKSFATDVLPFKQVRNKGQKPKYFAEDCNPAIISKEEFQLVQELIQKRLTNRKPLETVSSPYRKHIFCAVCGSMCRGKQINGKWYWVCHRRDRAKARCPVPQAAEEAITAALRRFYYKLWRSRDEILSPLLSQLRELQERELRSNRKLADIDAEIAKFTEQNLVLIRLKAKGYMDSALYLSELDTINARARELRKLRRSILDTTYEDRVIRQTESMLEYLETSSGELDTADSELFTMLIDCILLTEQREIRVRLKNGLELAEMLREEVV

SEQ ID NO: 5533 - protein, 514 aa, unidentified
  source 1..514: note = uncultivated organism
MTGSAKLLRCAVYTRKSTEHNLDLEFNSLHAQREACEAYIKSQMHEGWRLIQDCYDDGGISGASLARPDLQRLLGDIQAGKVDTVVVYKVDRLTRSLTDFAKLVELFDKHGVSFVSVTQAFNTTTSMGRLTLNVLLSFAQFEREVIGERVRDKIAASKKKGLWMGGPVPLGYVNIDKKLSIVPEEADAVRWIFQKYLELGAVGPLLQELDRVGIKTKATRRASGRVVGGGRFGKGGLNHLLKNRCYIGELSYRGQVHTADHEPILERELFEAVQAKLAANNVEKRLWIRSSPYLLTGLIFDSVGNRMTPAHTLKKGVRYRYYVSQAILQRRDKEAGAIGRVPAPEIETLVWQAVATRLALAGSPPIRETLEAKVQRITVQSQSVELAFWPSEDPQEANSIVPDISDSQLIPWAPKPPVAIKGIAHEAVPPSVAEPKAQEAILAAIGKARLWLSRLSDGVPLAQIAQEEGKGERQIRLLMPLAFVPPDTVRGLINGTVGTKTVTEMSKNVPLSWC

SEQ ID NO: 5534 - protein, 585 aa, unidentified
  source 1..585: note = uncultivated organism
MCAKAGYSKTAHDSKLKIQRAAIYIRVSTYWQIDKDSLPVQREEIINYCKYALGITSFEVFEDAGYSAKNTDRPAYQTMMARVRSGEFTHLVVWKLDRISRNLLDFAGMYEELKQLGVTFVSKNEQFDTSTAMGEAMLKIILVFAELERKVTSERVTAIMYSRAANGQWNGGKVPFGYDYDKATKEFSINEREAVVVRMIYDMYEDTRSLLAVARALNENSITSRKGKPWNPTTVSIILKNPFYIGTYRYNYRNENGSARNWTIKDESEWILTEDHHPAIIDAARWESIGLALYENRRGVKARNTYHRSNTHIFAGLLKCGNCGSGMPATVDRKRASGWRPSIYACSRRRRFSDCQNKYVSDVTLGPFVLNYIANIMKAQRSFGKTTSIETLEKKLLRGPLFADVEHVEGVGLQELYDMLRRGAVPTVEYASKAVQASVGTPEAQEHDLLAAERRRNERALARLKSLFLYGEDAITEKDYVLEQKRLTDAIQKIDDRLEEIEKNSSKQFSISDEFITKASYFIMTQKLADKREVNYESLVRKIDPKIIKDFVNSICQNFCISDGRIESIRFKNGMEHRFLYRASE

SEQ ID NO: 5535 - protein, 511 aa, unidentified
  source 1..511: note = uncultivated organism
MQDYLKCAIYTRVSTDIQAEREFNSCESQFDKIKSFINSQEGMEIFKVYSDPGFTGANLNRPALQELLEDLKGEQINLVIAYKIDRLTRSPKDFYQLIELFEQYGVNFISVTERFDTSTPSGRLLRNIMLTFAQFERELASERTRDKLLQRAEKGLWNGGIVPYGYRRENKRLVICESESKTVKAIFETYLLSQSLVSVYNKLKEMSVTYRNGKPFLKTAISYILQNPVYIGKVKYAGKTTQGIHQPIVSEETFEQAQRIHKDKKRTMKLYKGFALAGLIRCKECNSYMTPSYTNKRNGRKLKRYYYYRCTDTFKREWKSCSTKQVSADRLENYIFDNLKRISLDKQYLDNLCFSFNHRPEGGRIGVPQTSSEQVPDSSKNPAKNPLARYRSGLEQREEPLKISPEIFAQTLAALTKSFSEKKGIEKNLLAKKFIQSIQYSKNSIKLNLFSPVPDSSSIFSGKEKIRSKGAENSKNLVRNGMDGCPAWARTRNLSSKSWCVTITPPGKICL

SEQ ID NO: 5536 - protein, 558 aa, unidentified
  source 1..558: note = uncultivated organism
MREPPLNKPLRCAIYTRKSSEEGLEQDFNSLEAQREACEAYIKSQAHEGWILVPDHFDDGGFSGGNTDRPGLIRLMDKVRAREIDVIVFYKIDRFSRNITDFGQLAETLEQHGVSFVSVTQSFNTKDSMGRLMLNVLLSFAQFERELTGERIRDKVAASKKRGMWMGGPIPLGYDVRDKALVINEAEAATVRKIFELYLDLGSVRLVEEELRTLGLTTKSYVAKSGRQMGGLNFTRGHLYKILGNALYAGAVSHKGKKHKGLHQPIIDRPTWNRVQQLLRVNQQGERKRVNAKHPSLLSGLVVDEFGNKLTSTHTVKGGKRYRYYASTASAARGAHNRPTSSYRLAATEIEPVVIDAIVSLFADQPRLMTALGLKAAIPSEVSTALDLGNALSVELQQGLPTQQRALLEQLVNKVQVSKDHLRIELSPTGLRWRLLGDDTAVHEPVVLEVPMSAVRHGVETRLVVEAPHRTTDRPTRDDALIRAVACGRAWFEELASGKAASFREIAERAGVTDRYVSRVVNLAFLAPDVVEAILRGETPAGMTVRALTVDGEVPVVW

SEQ ID NO: 5537 - protein, 502 aa, unidentified
  source 1..502: note = uncultivated organism
MIAIYCRQSIDKKDSISIEQQEQDCKRLTFGEDYRVYSDKGYTGANTNRPQFEKMMNDVRNHKISKVICYKVDRISRSLQDFVGIYSEFEKNGVEFVSCNEQFDTSTAMGKATLQIIMVFAELERNMIQKRVKDNFYERAKKGLFLSGVAPYGFRKKPVKIDGINTSMLEIDEEHPEQMETIKFMYQEYLLTKSLGMVTKKVNEQGQRSNRGNTFSSVTVGRILRNPVYVRADADVYRYLKNKGATMNEPVEYYTGVYGLTIYGRRKEKTTMKFTDLTGDYVQMNMHKGVIDAKEWLMVQYELDKNKPISKNGKGKNTWLTGLTKCGFCGKCISAVGGQINGKRYVNCGGRKAHACFERTVHMTFDDIEDAVQESLLNHIREFNFTKIEREQHTAQKDNELKIELVKVEEEISGLMAKLANANDTLFRYINERIEELDTKRQELERKLDKNKENELTEISSELVIRALTEWDNFEFEEKKLLAQSFIEKVVIYNGDMEIIYK

SEQ ID NO: 5538 - protein, 565 aa, unidentified
  source 1..565: note = uncultivated organism
MKRTERRCAIYTRKSHEEGLDQAFNSLDAQREAGIDYIKSQKHEGWQVIDKQYDDGGFSGGNMERPGLTQLLHDIKRGAVDVVVVYKVDRLSRSLHDFAQIMSKFDEQEVSFVSVTQQFNTTTSMGRLTLNMLLSFAQFEREVTGERIRDKLAATKKKGLWVTGQPPLGYKTVEKELVVIPEEAELVRRIFDGYLEQGSLLELAARLNEEGYTTKRWLSSRDRWHGGKPLTPKYLHRVLTYPVYIGKITHKDIVWPGKHESIIPQKLWKQVQQAIDKRERQIRHRWEHPHLLKGKLRTHEDAAMSPGAVHRPGKVKGEKRLVRYYISQKAMKEGYKHCPIKTINAMHIDTLVRSMVLDHLKDASLEHLLHRDREVRDFWVREIIERVVLGPDEVSVDLSNERIEACRDVDWPDLTASKDDLLTCLYTPNVEQRRNKTVLTLAIQIKRLDGKRQLLSPDGQDLMMPSEPEAKDHIVTAIGRSYRWRERLMDPELSINQLAEQEGCSRQFFYKYLRLINLCPDLLKLALTGHLPPRITLIDLLKAADHLDWQAQLNYLNLDKSSLPG

SEQ ID NO: 5539 - protein, 620 aa, unidentified
  source 1..620: note = uncultivated organism
MVQGQLSDVEPASEEHDREVFIELNIKSIKYTKTTLFETVSFFASSRKKKGLLKKYSSANDGIKRESLIVIAAILAYILWKKSTFQGGTNYEHQAYIPRLVGAKSGSSKESNGSLSSALSTAASPTSSGRDAGGVRWTMDAIYARQSVEKLDSLSIEAQIDLCRKLSSGEVLVFEDRGFSGKNTNRPGFQSLMEGVQNGTIQRIFVYRLDRFSRSIADFGRVWEVLEKHSVAFVSVTEQFDTGSPMGRAMLNIIMTFAQLERETTAQRVKDNYHHRFSLGAWPGGPAPYGFTLGKCAGPQGGQASTLIVNEKADIVQEIFTRYREPGLSLRALARELTERGIPGPRRVAWDNVTLSRMLHSPLYVKASPEIYWWYMSKGVQPQQEIEAFDGEHACNVIGRRDRAKGMYSSAEHQMLTVSNHLGFIAPELWLEVQQKLEKNPQIQRSNAGKYTWLTGLMKCARCGYSIKVNYRKAENRYVLLCSGRSNFASCDASIQIDLRELERAVQQEVERVLAACPEEPVAAADSQVSKDILAVEEKIQRLVSALAESSAISASYISQEIERLHKERERLAAQAAQQNKKTERIDFSSLSFAEKKVVAAEFIQRIELDGENVNICWNF

SEQ ID NO: 5540 - protein, 535 aa, unidentified
  source 1..535: note = uncultivated organism
MADSREVRGSNALADNRNRVITIEATARPEDIAVRVAAYCRVSTDSLDQMNSFAAQMKYYMELITGKPNWKLVDIYADPGITGTSAAKRPDFQRLLSDCRKGKIDRILVKSISRFARNTKECLETVRELKSIGVGVCFEEQNIDTAEVSGELLTAVFAAIAQKESESISQNMRWSYLHRMERGSYLPNSTAFGYKVEGGKVVIDEAKAQIVRQMFQDYLNGANSFEIAARLNQEHILSKNGREENWTSGTILYMLSNERYIGDSLWQKTYCTDALPSKHVRNHGEREQYYAEETHPAIIDRETFYAVQKIKDKRREKGRIKGERHNSPLQGIMRCGNCGAVFTRKVSRGVTYWSCYTHCLNASECDMPRVREDEIKNAFLRMYHKLRSNNAQVLLQLQEDLRAIRNRRLLWSEKIVSLNQRISDITDENHLLAEMNSMGLVDPDIYIARSNRLAQDLKEAKQERDRLMNADDDKKGESTRDLLEMIESAPEYLDEFNQDIFAEMVDKAIIRSEECIECHLRNGLILKETMRRTVR

SEQ ID NO: 5541 - protein, 574 aa, unidentified
  source 1..574: note = uncultivated organism
MRDEAKPLVRCAIYTRKSSEEGLEQAFNSLDAQREACRAFIASQKHEGWRALHTVYDDGGYSGATMNRPALERLIEDVQAEKIDAVVVYKVDRLTRLLTDFAKIIDIFDAHQVSFVSVTQQFNTTTSMGRLTLNVLLSFAQFEREVTGERIRDKIAASKRKGMWMGGNVPLGYDAKDRKLVVNAREAEAVRKIYRQYMNLGCVSKLKTYLERNGVRSKERLSQAGHKTGRTVHSRGALYNILRNRIYLGEIEHKGQVYPGEHAAIVPRELWEQVQARLRTNDHAHKNRSRAAMPSLLVGLIYDDQGNRFTPAHAVKNGKRYRYYVSQAAIKNPGRCHRGPVRIPAGEIERLVCSRLRVLLGSSHEVIDALSLQGSNVAATQAALAVARQWSEHLGSAAPAETRTFIRSLVSRIVVHAAIVDVLLDKQALRSALLGSGGSSTPNKAHGGNDLLTMRLKARLARCGGEVRLLLPANSGGEIPVRPLRSLIKAVVRAHDWHERVVGGQLTGCRSIAHATGLDERYVRRILRCAFLAPDIVDAILEGQQPHSITLHGLLSDLPSDWVKQRQQLGFATK

SEQ ID NO: 5542 - protein, 501 aa, unidentified
  source 1..501: note = uncultivated organism
MDPTAKKPSRMDQYVRVSRVAGRSGESFISPDLQREQGAAWASSRGVEVAVVHEDLDQSGGKLERPGLDALMARIRAGETDGVIVSKLDRLSRLGVADALRLVEQITEAGGSIAALDLGLDPTTPFGEFGMTIMLALARMERRRMSEAWEHAKTRALDRGARMGPTPFGYTRDDDGLLVPHPKWARVVKRTFKIAADQGVDAALAYLRKQVPAYPSNGQPGVRPKRSADHRTWSAFTVRRLLCNRSYLGETRYGDRLVRDSHHALVDRVTFERAHPGDEKPQRRPAAVFPLSGFATCANCGEFLIGARAGGGGGRGLRTYRCRASLASWKGEHCDSPTNIMADRLESYVVEQVKQAYEQGGTPGLAASVADTGGRFEDVQRELEAAERELERFAADPTAAELLGQAAWTVALRERADRAEAAQVEYREHVDTMRAADIVIPPIELLDSLEPAELRTVLRSVFQTVRVARGRARGRGPVADRVELVFHGEPSSGVAALEDAT

SEQ ID NO: 5543 - protein, 632 aa, unidentified
  source 1..632: note = uncultivated organism
MRKIQQPAQSTGGRVAIYVRVSDQEQVITGSSLDAQETACRECAAYYKKDIEAVFREEGCSGKNMNRPEMRKLQALVATRKIQSIIVYKLDRLTRRLEDLLELIKFLNAHDVSILSKVEEINTATASGTFMVNLLGSLAQLEQEQIGERVRMVFEEKRRLEAFIGGYVPAGFKIISEGQHRFLRPDDSWGPIVTPIWGMVLRGSSGGTVAKYLNDRKVPVLRQGVLIPRMWGRKHVSDLLANRNCVIGKLVSEADYAAVQAELGLRPSPNSRTAERRRPIITSRAAKAYPLNGLIRCPKCEKGRISGTIGGKGRYYYRCSTEIETGACDMSPLAADQWERHIAGALVKAVKDDDQLIGVLCAYALRQDELMAPARARLGQAKLHKEAVVRNRDRIYQRLMGTDSSRKGAIEAIEHELDKAQAAVHIAVEDERAASEAIYTMEIGVETTRALIERVGAGLEGFAHAPAEVLRAVFAVTLSEIRLAPDLSEVELVLRRPSEEMLAVLKEAAPALKAAWAGAGAGSAETDADQPKSPAMVAAATASKPSRARALILGLKHGSPTHGAIQPKSAPNHAGLIAPKNANIPQFGATSGKSASAGPAQRNRPAGVTSGSGSRLSVSWLPGEDSNLRPID

SEQ ID NO: 5544 - protein, 565 aa, unidentified
  source 1..565: note = uncultivated organism
MEKMNQTEPEKKAYAAAVYLRLSKEDGDVCGRGRKEESNSITNQKRLIHDFLKDREDIRVFKEYVDDGYSGSDFLRPSFQEMISDMEAGKVNLIIVKDLSRFGREYIEAGRYLQKIFPAAGVRFIAVTDHYDSLTAGRTERNIVVPVKNFVNDAYSADLSVKIRSHLESKRGNGEYTGAYVSYGFLKDGDNHNRLRADPVAGENVKRIFRWKLDGMSNRQIAERLNALGVLAPADYKRSLGIRYKSGFQKNLASGWSPVAVGRVLSNPLCKGLVVQGKQGRINHKMKKMVARPESEQSRFVQEDLALIGEKQFGIMQELLKKDTRTTPGRDGVSLFGGILFCPDCGRPMIRRKTAYKGKQTVFYICKTYNVEKNCTRHSIKEPELIALVAEAVKAQTELAADAEETLKAAEEAMERMGKVSFSDSRLPELEKELAESAAMFSGLYADWMEGILSEEEYEEMKAFYSGRCEELKGQMKERKDRMGRAGDVIKEARQWLAGWKEIKEGMPNPAGKIRRGLVCSLFEKIWVYEGKRVEFSFLYQDRLAEVYALCGMLKEGPLGERGAV

SEQ ID NO: 5545 - protein, 554 aa, unidentified
  source 1..554: note = uncultivated organism
MNETKTPIRCAIYTRKSHEAGLEQNFNSLDAQREACSAYILSQKHEGWEEVPTMYDDGGFSGGNMERPALRKLMADIEMGLVNVVVVYKVDRLTRSLADFAKIVEKFDKQGISFVSITQQFNTTSSMGRLTLNVLLSFAQFEREVTAERIRDKIAASKKKGMWMGGVTPLGYDRDDKKLIINEEEAKKVRFIFDHFLECKNVRKLRAELMQQNIRTKIRTIKDGSIIGGCNFSLGSLYHFIKNPIYAGKIKHEDVLYEGIHEGIITFEKWQQVQGLIASNAIANQYRFMSKEPSLLKGLIFDINDRPFSPKHGTKKNGMRRYRYYVHRDIILGENENLPTFGNLPAQDIEEIVINIIKGILTRPDKLRRLAEDKTHQQHMIEQGTKRKEAIDAMQPEGLHKTISGLVCKVIMEENIVSVHIDRQALKTYLIKNELDTPKGYEKCSDVITIRQRITLRRFKHEMRLIIDNHDGSDVPTPNPSICKALARAFVWNEKLTSGSVTSVKTLCKEENLCERYVKSILPLAWLPAKLVEELLDGQHKEMKLGDLTTNNAF

SEQ ID NO: 5546 - protein, 509 aa, unidentified
  source 1..509: note = uncultivated organism
MRVTDITPKNANGETKERWAAYGRVSSKSAEQLHSFAAQIRYYKDYFKNRSDCELVDLYMDEGISGTDMYKRDEFLRMIDDCKRGKIDKIITKSVSRFARNTEELLNVIRLLKNIGVGVYFEEQNINTEKLNAEMILTFPGMAAQKESETISGNLRWSYKKRMESGEYNCTRTSFGFKFVDGELQIDEEEAVIVREIFDLYLQGYGMQKIVDTLNDKNTKKRYNGKKWYKSNLLYIFDNERYMGDAVLQKKCTTDIFPHKKVKNVGQKPKYYVENSNIAIVSKETFEKVQQLRQEKCRTIETKIKYPLSDKIYCAECGGVYRRENNNGQKVSWNCMRTSTGVSHCKSKRISEKAVCNAFINVFNTLKAYRTEIIEKYIFEINRLNESVSDIDEKIKEIDIKVANLSAKNLVITRLYTNGSLSVADYNERASEINAKLVELRVDRKKLIGEERNNQVVEIDELNEIIKYTPFISEFNEEIFNATVEKIIIGNDNVITFCLVGGLKVEEEV

SEQ ID NO: 5547 - protein, 520 aa, unidentified
  source 1..520: note = uncultivated organism
MASNAIKPLRCAIYTRKSTEHGLDLEFNSLHAQREACEAYIKSQASQGWRCIPEPYDDPAFSGGNLERPALKRLLADIDAGDVDVIVVYKIDRLTRSLADFAKLVEAFDAKSISFVAVTQQFNTTTSMGRLTLNVLLSFAQFERELSSERVRDKVAASRQKGKWTGGTIPLGYDIKDKKLVPHPTERKTVEYIFEKYLELKGFQKLIADLDAKGIVTKRRTTKLKKYQGGIPFTYGPLAYLLKNRLYIGEMAHKDKWYRGEHTGILNRKLFDNVQAQLKFHKVERRVKRTQSGALLMGKLFDDRGNVMSPSYSTKKGVRYRFYVSSALLRGRKADAGSINRIAALPAEAAITEYISREFAEHLGTDDSFRELLHRTLARIDLRKNSLRLSLLDPDQEDADGMGPSRARIVDLPWSYEPAKSPSPNPDSEAGPDPQLVNAIVRAHAWIKLLNDGIFDTIEDLAEAVKLNPNVLRQNIRLAFMDPRITDAIIEGRLTNLSVTDLAQCDEIAWRDQTAALLGS

SEQ ID NO: 5548 - protein, 551 aa, unidentified
  source 1..551: note = uncultivated organism
MKRRSVAVPDISGPLRAFAYLRVSTGRQKDHDLSIPDQRKQAVAYCAKQGWVLVAEYVEAGTTGTTEDRPEFQKMIDRACDDDHPVDAILVHSFSRLFRDAFGLEMYVRKLARCGVRVASITQVLGDDPTQVMMRQIIALFDEYQSKENGKHVLRAMKENARQGYYNGSAAPLGYTTTVVETRGDRVKKKLVIDVVEAETVKLIFRLYLRGDGRSGPLGLKATACWLNEHKYRTRRGARFGQGTIHIILTNRVYVGEAIFNKRSAKTLLEKPASEHVVVDVPPIIDQDEFDAVAATLKNRDPKVSAPRTITGPILLTGLARCATCDGAMTLRTGTSKSGLVHKYYACSTCARKGKTACKGRSIPMSKLDALVTNHLVERLLRPERLTAILASVAARRAELATQIDKRVAALQTQVAEAELKLKRLYRMVEDGVTDLDDILKDRLASIKHDRDRSRLALEGIRPPNAHSAPFEPEAIARFSRAMRENITSGEIPFRKAYIQSVVDRIEVDDGVIRILGSKATLEEAIAGRAVASVGVRSFERKWRPGRESNP

SEQ ID NO: 5549 - protein, 518 aa, unidentified
  source 1..518: note = uncultivated organism
MRSGTRSIRCAIYTRKSSEEGLALEFNSLDAQRESAEAYIASQKAEGWVCLPDRYDDGGFTGGNMERPALKRLMADIEAGKIDCVVVYKVDRLSRSLMDFARMMETFDRCGVSFVSVTQQFNTTHSMGRLTLNILLSFAQFEREIISERTRDKIAAARRKGKWSGGHPVLGYDTVSGEGGTKLVVNAEEAERVRRIFEAYLEMRSVRALARRLDELGWTTKTWTTKAGRAMGGQRFNSTTLFKLLTNVVYIGQVRHNEHVYDGEHEGIVDEDLFRRVQAHLKLNGTTGGGHTRNKHGALLKRMVRCAACGCAMPHHFASKNGTRYRYYVCASAQRRGYASCKGDAPSLPAHELEQFVVERVREHLQSDAMQGEAVRRAQEQIRRTIGEDQKQRKRVDRRARTLDDELRSLDALPTRSKAQAARAGEIRREVERLRGEAGDLDDRIARADLRLIDEDELLGAVEAFERVWEALTTAERERLIRALVERVEWDAASETVTVVFHETAEGPSEEAACAATA

SEQ ID NO: 5550 - protein, 670 aa, unidentified
  source 1..670: note = uncultivated organism
MRISASTNSSRAGRAADQGAPRATRPVGVTGTHARTREPARPRLEPARPGSEVDQMASRSTRSVIGIQRPTRRTQAEKGGLRAAIYCRVSAEEQTEGYSLDAQTRACRQLVEERGWSLVRECVEPGRSARAEDVTKRPTFLELVNSAVDKQVDVIVVHKLDRFSRNLRVTLETLAKLERAGVTFVSLSENMDFTTPIGKVLLALLGAFAQYYSDNLSQEVKKGYRERKAQGLYGGWIPWGAIKGPDGVPIPDKRPVADIQPKTTNYDGLLLAFRQTALGMTCREVAQELNEMGYRPSSVEIGARRVRVAELAKEGHSAESISALLDSDPVTIRRDMAAIALDKQWPKRGVFTKDTVHVILHNRFYRGELPDGNGWVRGRHAPLIDEELWEAAQHALARHRTNPKTVATTASVWSLSGILRCNRCGAKMHVQKSVKYGTRLICYGRSQTGQCNQPSLLAAIVETQIEAHLLSFTIPRDFHEKLLAADKHPGDSTDLPKKRAALETRLGRIRQLFEWADITESNYLKQRDKIQRELRELQPTFTQHARLEQLREFLSSLPLAWRHATAEERNRLARAIYDDVYVDGHRLVSVRPRDEVSPFFRLGCHLEGGTCGPEEIRSRLRGRLSIRKITPSELTFQVRHIGAQREWGRDQVRSAGAWSVRQFRTFDSRS

SEQ ID NO: 5551 - protein, 549 aa, unidentified
  source 1..549: note = uncultivated organism
MARKSRKNIAVLDAPKQPTMKVWQAALYIRLSVEFNGKRGDSLETQRQIMEAYIALCPDIEIVGLYTDNGTTGRTFEREAFQRMLGDIEAGKINCIVVKDLSRLGRNTIDTGYYIEKYFPLHGVRFIAVNDQFDSENGENSGNHLIVPLKNMINEAYAADISKKVRAQQNQAMKDGKFVGGRPPYGYRKDSDNCHRLLVNEDTAPIVRQIFQWIADGVALNEVVKRLNEGGVMSPGYYHASCGLFSYDNKLAGSGKWQTWTVGKILVDEVYTGDMVQGKHTNIGHKQVATKPEDWIIVRGTHEPIISRELFEKVQAIRKAAAEKYSRNGKNPYSPNILRGRVFCGCCGKSLHRQKGYKHYIYRCISNDRQGKSSCVGGVHCMPESDLFNMILMIIRQKAEVVMGEALRLKQCDGKIAAQKAQVGQEIADLGQQTQKNKALLAGLYESFVKGILTKAEYLEMQEDYNRKISGAVERVQQLQTRQAELERQVAQYTSMADKLAAVDKDTALSALLVNQLIGRVTVNSPDDVSIDFAFESGFERVMEVLGNE

SEQ ID NO: 5552 - protein, 512 aa, unidentified
  source 1..512: note = uncultivated organism
MKPPVSNAPKEVRCAVYTRKSVSEGLEQEFNTLDAQREAAEAFIASQRHEGWRCVEKRYDDGGFTGGNIERPALRELMADVEAGQIDCIVVYKVDRLSRSLLDFATIMGSLEKHGCSFVSVTQQFNTSHSMGRLTLNILLSFAQFEREIIAERTRDKIHSARKRGKWTGGPPILGYDVAPGGGRLIVNPFEADRVRQLFEYYAEHGSLAETLRWTREQGLKTKGYPRRNGTAKEPSDFSKSSLHALLTNVHYLGKIPLKGEVFAGEHEAIVSEKLWQRVQERMAGQSLKDLQPRRNKTHALLRGLLFTDPDGAPMYHTFTAKGNRRYRYYVYKEILKRGETASVTRSVPAGDIEQFVVERIKALGKSPQLAAEAIRQARIARREHVEQLEACADEIRGTVRRTEAEAQRLVGNRTNDGIRQLALARERVEHEESRLANLETEIARLRESVLDEKALISALSDFDEIWAALAGEEQVRLVELLIQRDRYDGDAGQVSIDFHPAGLDAVIRQAS

SEQ ID NO: 5553 - protein, 521 aa, unidentified
  source 1..521: note = uncultivated organism
MSRVRSAIYTRKSSDEGLEQEFNSLDAQYESCKAYILSQKHEGWTVSRERYDDGGFSGGSMERPGLKALLADIAAGKIDVVVIYKIERLTRSLADFARIIEVMEKHGASFVSVTQSFNTKTSMGRLMLHVLLSFAQFEREVGAERVRDKSAASKAKGMWMGGTVPLGYDAVDRKLVINEAEAATVRALFAAFVELGCVQRTLGWSREQGLTTKVRQRAGAQIGGTPFHYGALRCVLSNRTYVGEVEHKGKAYPGQHAAIVDSELFGRAQATLASRITEEMRRPKLASSSLLQGLIFDRHGRKMGPVHTTRNGQRFRYYVTHAKCIESGGTAAYRIAAETIERHCLKIMAEHMAGQVRSIDEGDAVAASTQTADGKRQLICDVVRRVVLGDAELTIELKDGVILRRSLERVRHGNDAKLIVGSQAPDDEPIASSQLVLLLKDAARARELALAKPKLSLNSLATKFGRSPERFKRLIRLSYLSPSIVAAILRGEQPAHLTSRALQHLDGLPLAWSDQEAMLLS

SEQ ID NO: 5554 - protein, 521 aa, unidentified
  source 1..521: note = uncultivated organism
MKKITKIESNPRDIANETKLRVAAYCRVSTDSEEQLISLETQKLHYDSFIKSKPDWEFAGVYYDEGISGTKKEKRAELLRLISDCENKKIDFIVTKSISRFARNTIDCLEIVRKLVDLGIFIYFEKENINTGSMENELMLTILSSLAESESVSISENSKWSIQRRFRNGTYKISYPPYGYDNIDGKMEINKQQAQVIKRIFADTLSGVSSHIIARALNNEAVPTKRGGNWTATTILGILRNEKYTGDLILQKTYTDDNFIRYKNNGEKGQYFVKDHHEAIISHEDFETAKLVIGQRAEEKGVVGGSNKYLKRYAFSGKIKCLECGSNFRRRIHGGKNNKYIAWGCPKHVASLEECSMLFIREDNIHQAFIVMMQKLIFGHKLILKPLLQKLKTGNTSDVFLQIQEIETKIEKNLEGQQTLTNLMTKGYLDAPLFNQQSNELRCEATRLKEKKEVLYHTINGGMAKVEDLVQLIKYVSKIKSFEAFDEEIFNQFVEKIIIISRAEIGFNLKCGITLKERMEG

SEQ ID NO: 5555 - protein, 542 aa, unidentified
  source 1..542: note = uncultivated organism
MNSRPIIRCAIYTRKSSEEGLDQAFNSLHAQREACEAFVCSQASEGWTVLPTIYDDGGYSGGTIERPALKRLLADIDAGRVNTIVVYKIDRLTRSLADFARIVDRLDKAQASFVSVTQSFNTTTSMGRLTLNVLLSFAQFEREVTGERIRDKIAASKAKGMWMGGLPPLGYDPPTDRATRSLVRNETEAEQVQTIFDLYLKLGSVSTLEARLAKDGMRSKVWVSAKGTRSGGVALSRGALFHMLRNRVYLGEIVHGEKSVAGCHPPIVAADLFAAVQIQLSANTRARKERPRRAAKLALTGLVYDADGHPMSPSFGYGRGGRVYRYYVSAPLQQGRAVEKREGVLRRVSADALEEAVRTQLASLLPNETSTGADRSIADLLTPVRRVDVLPEELRIAFEGRALPRDVRERLSVCDTHPERRVLVAAVRCQVRGGRTWVLTPTAPAELRKARRDPVLIRGLRKAHQIAATLGWRARDGAFTGLATPPSGAYERRLWPLVFLAPDIQRAILEGRQPPALTLDHLMKLRLATDWAAQRRQLGFER

SEQ ID NO: 5556 - protein, 614 aa, unidentified
  source 1..614: note = uncultivated organism
MKGQDSRKYAIYSRKSKFTGKGESIENQIELCRQHIKLHHDNVTEEDILIFEDEGFSGGNVNRPQFQAMMKQIRANQIQAVVCYRLDRISRNVGDFAKLKDEFDYYNVEFTSIRDDFDTTSPSGRAMMMMVSVFAQLERETTAERIRDNMHELAKSGRWLGGTTPTGYKSTQIVGSITVDGKERKAYKLDIIKEEAEIIKLIFSKFIETNSLTKTDTYLLQNNITTKNGKNFTRFSIRSILQNPVYMIADQNAWEYFDSLGVEIYAEQSEFDGKHGIMAYNKTIQKSGKSNQIRDMDEWIVAVGKHKGLIAGADWVKVQDMLNQNRSKSYRKPKSNVALLSGLLYCGNCGSFMRPKLSQRTNAQGEKIYSYLCETKERSRCQLCGSKNPNGNELDKMICEQIKLISEDSSDFIKNLESVQRKLEGNREEYDQQLNALKKELQENEQQIANLVETLAKTPNTPAFDYITEQINTLHEKNGKIKNRISELESLTKNHLYSSEEFDRTKELLKSFGQSFDTMGVEQKRMALRAFIRRIVWDGKNVHVVLFGDSEAEIDSEDLLEALSDSAGTKPEENAMPNARTAGGGSPQPKRGDSERNTHALSQSKKVGSGYFHE

SEQ ID NO: 5557 - protein, 519 aa, unidentified
  source 1..519: note = uncultivated organism
MSKNVTVIPPSEKNPDTLRVAAYCRVSSDSSDQLHSYASQIRKYTEEIGQHEGWELVDIYADEGLTGTRMEQREDFNRMMADCRKGRIDKVLVKSVSRFARNTKDCLAALRELMGLGVTVYFEKENINTETLTTELMVSVSGALAQQESISTSQNQRISYKRRMERGEFITCKAPYGYRIKDGKNLEIHEKEAAIIRLIFTRYLSGESTTEIAAALTDMGLRTRDGKEQWNTFAVSYILRNEKYIGDALCQKTLATDSFPFIKKRNQGEQDQYYVDATHPAIISKEMFDRANALIQRRSSTRGMSKKKYLLTKTIYCGLCGSVFSRKETKSGYVTWACRTHNDQSRKCPMGRIPEGEIYAAFVRMYNKLKLHEGIILKPVLTQLHDLNEALQRDNPAMLEVNKAIATASEQSYKVSTLRSRGLLDEAACSAKLLDIEAKLTELRRERRRLLKNEDIEEVMDTLRQTADIIHSGPEQLDSFDEALFSDLVEKITAESQTRIRFRLYGGIELAEQRPKVGR

SEQ ID NO: 5558 - protein, 559 aa, unidentified
  source 1..559: note = uncultivated organism
MGTILNTAVYDADIYLRLSKEDGDQEESDSIKNQRELILDFLKSRDDIRLHEVRVDDGYSGVNFERPSFQQMLQDIRDGKVNCVIVKDLSRFGRNHIETGKYIEKIFPCLGVRFIAVNDHYDSIKRGQQDSIIIPFKNLINDAYCRDISIKTRTNLEVKRKKGDFVGSFAPYGYRKSSADKNKLEADGEAAENVKKIFRWFLQGNSAYKIAEKLNQEGVLTPMDYKRDRGSGFYTGFKKNLRGEWNHVMVRRVLSNPVYMGTLVQGKNTTPNYKVSKRIRRDEEKWNKVENAHEAIISAASFRNVQAMLARDTRTSSLEDKVYVLSGVVRCGDCGGGMVRKTVPSKGKKFIYYVCGSHKGDKEVCSSHSIRVDILEKMVLKLLNIQIQCIADLDVVLRDLDEEKLKERASEKQDERIKRKKEEIQKYYKLKMDLYEDYKEELITREEYLELKEFYEQKVQFLEQSLRSLSDEALRMERNSRESNEWMDEFLRCGHLDCLSRETVISLIDRILVYEKKQGERYPRIEVVFRYEEEMRLFTEAYGAAGEEDSIYGKKEQKK

SEQ ID NO: 5559 - protein, 521 aa, unidentified
  source 1..521: note = uncultivated organism
MRKDDVARTSRQSRLPTESLAEPKRKVGIWIRVSTEDQARGESPEHHEKRASYYAELKGWDVVTVYRLEGVSGKQVSNHPEAKRMLADVRSGRITAIIFSKIARLARNVRELLDFADEFQAHGADLISLQESIDTTTPAGRMFYTMMAALAEWERSEISARVAASVPIRAKLGKTLGGAAPFGYRWQDQKLVVDEKEAPIRRLIFELFAEHKRKATVARLLTKAGHRTRKGFKFRPSGIERLIADPLAKGIRRMNYRESPGRGSAFKKPSEWVYVEAPSIVQEDLWEACNAILRAQKVPGAAPTKGGAHLFSGIVVCKCKTKMYVRTRGKSYVCQECLNSVGEEDLEAVFVDQLKGLVLSPTQMAETLEQADQNLSGKQQVLDSLETEKASVSAEMDKLYQLYLKDQISGQLFADRNTPLEERLRQLQDETPRLQAEVDFLRLQLRSSDEVLSEARDLYSRWPSLPFVDRRQIIEGITDHILVADNEITIQLAYLPSDSKPSAKDKTKGSQTLRDSSRRSE

SEQ ID NO: 5560 - protein, 583 aa, unidentified
  source 1..583: note = uncultivated organism
MAMSRRTDADRIIMSGVHTMKEVIYNVAMYLRLSRDDQDVRDDSIDSGGNIKSESNSISSQREIIRAFIREHEDMKLYDIYVDDGFTGSNFDRPEFKRMIEDIEAGSVNCVVVKDLSRFGRDYIESGRYLQKQFPQMGIRFIAITDNYDSMTADRSESAIVVPVKNFINDSYCRDISCKVRSQKKMKSQKGDYIGAFALYGYQKDEKNRCKYIIDDYAAHVVRNIFEWRINGISANAIAVKLNETGILCPSEYKRLNGDNFKSGFSINRIGKWQTGAVLRILTNEVYLGHMIQGKNERVNYKVKKLIHKEQNEWIRVENTHEPIIDEDDFRAVQNLLKTDSRLSPTSAESNFFSGILFCANCGEQMIRRANRYKSKVSITYICSTYNRGDGCTRNNLGDTLLRELVFAECFKYANMFLEQSYLLNEIKQKEANFEIISKYDGEITRLRGERDKFYALSSGLYDDLKNDVLTKKEFEKLHSTYTANVKQLDKAIQSQELLIRKLLKEGIAAGNRLEKFKGCLEINEIDRRTLVNLVHRILYHGDKRVEIVFNFYSEYETAVDVNSGRKQQEPDVVSMERRVKYA

SEQ ID NO: 5561 - protein, 504 aa, unidentified
  source 1..504: note = uncultivated organism
MNTPDPVPVAIYTRKSTDAKVEQEVHSLSVQRASAESFVASQQHRGWFCLPEKYDDNNISGGTLERPALQRLKQHIYEGRIKVVVINRLDRISRSLSQFLELTEFFEKHGVALVSVTQNFNTGDSMGRLMVQIIMSFAEFERSLIRDRVTERLHAARRKGRFIGGPPVLGYNIKPKGGELEIDELEAIRVRDIFDLYLQLRSVKAAVHELHRRGWCNKKWITRDGKVSGGNSFSTSSLHHLLSNPIYIGKVTLKGENFEGKHEGIVDPKLFERVQTMLAGNSVQSGNRRRNKHSALLKGLLTCKACNAPFVHTYTRKKSRIYRYYTCGHKRDHGAGTCPSPSVPAGEIESLVVEQLFSIGTNPEIQEMVCRQLSEAVEQKRADLVQRCKTARQQLDRIHRELASSREFDAPPALIHHLESKQRDAENLLERIAEEENLRVPSGQEIAEILNDMRSLWPSFNEGERCAFVRTMVSQVDYDAVDGNITLHFNDAGFLPDAARGGVE

SEQ ID NO: 5562 - protein, 502 aa, unidentified
  source 1..502: note = uncultivated organism
MRCAIYARVSTEMDGQKTSIDNQIDIFKGYAAERGWEITHIYTDKKSGTKSNRPGFKNLIKDGKEKKYDVILAKELSRLARNGGLSYELRDICLVHNIHIVCLDNSVNTIEGNMQNFGLFAWLYETESTNSSRRNKQARRAMAKKGKFIGSIPPYGYSCVEGKLIIRKDETPEVVRRIFNDYLAGKGMDTIAKDLFTDNIQTPSQVANKKNASNVWHSSTIKKILTNRHYCGDMLQLRTETISVTTNKRRTMDKDSFVIQEGTHEPIISYETFNTVEKMLKKRTKAATAPSIHLFSNLIFCEDCGKGMWYKATQKGYRCGGNIRHGERFCLNKNPLRSRDLEQVISRDIKDLFQIFKDESLMRSLENKINTKKHQIQEKLRNSEKKIFSLEKKKRSYIDLFTEKVISKDDLIELKISVDDEIDVVKMTMIDLERELTNCSNENYLQSLKNKLEQFLAVEELTPQMVNTLVDKITCSVNGEIRIHYNFENPFETQKEDSNLNG

SEQ ID NO: 5563 - protein, 603 aa, unidentified
  source 1..603: note = uncultivated organism
MSKENDKTIAIYSRKSKFTGKGESIGNQIELCRAYIRMNEGENAAGKAVVYEDEGFSGGNLNRPAFKEMMKAVKAKRHSAVIVYRLDRISRNISDFAGLIEELGRLKVDFISIREHFDTSQPMGRAMMYIASVFSQLERETIAERIRDNMRELAKTGRWLGGVTPTGYASESVRTITVDGKKKKACQLKLIPAEAEAVKLIYDVFSETNSLTKTETALMQRHIVSKNGKYHTRFSIKGILQNPVYARADEDMYQYFWDHGTDVFADKAEFDGERGIMAYNRTDQEKGQATVYKPVSEWIVAVGRHPGLIPGKTWVRVQEALEQNKSKAFRRPRSNEALLTGFLFCKCGNRMYPKLSKRVTPEGKPVYTYVCKLKERSQKALCNNKNVNGNILDAMIVDRVRHLDEDAGEFMEQLSRSRSFFTGDRTEYEQQKATLQQEKAETDKKIAGLVDTLANMETGDVRDLVAKRLEALSQESKAIENRIQELESLLNQHEMTDSEFDLLSDLLAGFKEGLQDMSIQQQRAALKTVIRRVIWDGVNAHVVLFGAGDGEIQYPEGLRKWTENPVEEDENDDLTPYLDVNYEENDEDMHLETPMTPWGEDSK

SEQ ID NO: 5564 - protein, 766 aa, unidentified
  source 1..766: note = uncultivated organism
MERQKQTIPVAAYCRVSTEDPSQEDSLEMQTAHWRQVASGRADWVLTGIYAERESATHADTRPELMRLIGDCARGEVRVILTKSVSRFSRNTVDCLSLVRTLKGLGVSVFFEKENIDTGTMASELLLSILASFAAEESRAISQNVKLGYRHRFQAGIYKYKRPPYGYTAPEGDLTAAPDEAAVVGEIFDAVLRGRRPAEIAAALTRRGVSTKYSASWTANTVTAIVSNLTYTGDALLQKTYKDDEYKSRRNLGQYDQYYVPDHHEAIVSREAFILANQCLGFSDPYARIRPAECDEADAGTGSRVQVIKASPKSADPEAGGLRVAAYCRGSTDQEEQESSYEAQRAHYRDLILGHQGWTLAGIYADEGISGTSLKHREGFNRMVADAEAGKIDLILTKSISRFARNTLDCLTVIRRLKERGIGVSFEKEGIDTLDGNGEVILTILASIAQQESASISQNIRLGIQYRFQQGIPMINCSRFLGYDKDRKGRLVINEAQAAVVRRVYRDFLDGFSMDMIAGDLRREGVRSGGGCTSWHTSSVRYILTNEKYAGDLLLQKTLIEDFLTHRLVRNKGQLPQYYVENAHSPIIPHSVFERAREELWLRASHGRKGGMRFGSRSALKGRTFCACGARMKRLRRSEPVFLCETCGVEVRERDARRQVLAALAALPRHAEALDALIAQCRAARDDGDRLARALARRREWYLLNLRPAEGRTDFEAACADEDDFRARTAKRVSGWSDDAIVRLLERLVPGVVVIFKGGLEVGTEE

SEQ ID NO: 5565 - protein, 558 aa, unidentified
  source 1..558: note = uncultivated organism
MQEKWNVYHAAIYLRLSKDDGDISFSSKKQESNSIQSQRELLTAFLRQHPEMELYGEYKDDGWTGTNFDRPDFQRMLEDVKAGKINCIVVKDLSRFGRDYILCGKYIEKVFPQLGVRFIAVNDGYDTLTATGTDSIVVPFKNLINDSYSRDISIKVRTNLEVKRRQGACIANFAVYGYAKDPEDKNHLVEDPYAAGVVRDIFTWAVEGLSPGSIASRLNQLGVLSPMEYKKSQGLRFKTQFKTSSQAQWSHVAIRRILQNEVYIGNLVQGKRTSPNHKTKKTVVKSQDDWVRVEGTHQAIVPQAQFALVQQFLGQDTRASALQQAVAPYSGRIFCGECGAPMVRKSSSWKGKRYVYYVCQANKENRDTCGKHSLREDVLNQAVLAIVQRQLETVLDMDRALQKLEAQSWEKEELEKISCTLEVQKELLHKNNTLRLGMYEDLQEGILTREEYSTLKEEIGDKIRGIEESIRKLETGKQEILQGLNSHQSWLAQFRQYAGVTEITRPLVVSLVEQIRVYQDGQVEVTFRHQDQFIRILEFLRQRGTRSNVVPLPQREVG

SEQ ID NO: 5566 - protein, 508 aa, unidentified
  source 1..508: note = uncultivated organism
MIVIPPRTDNAIKKLRVAAYCRVSTNHADQENSYETQVRYFSELFDNSSTHQLVGIYADEGITGTSLDSRVSFIKLLEDCRHGRIDRIITKSISRFARNTMDCLKCIRELNDLGITIIFEKENIDTARMSDEMMVTIMGGLAQEESHSISRNVLWSIQKKMASGTYRHARVPYGYEKNEKTGSLIVDPRKAKIVKRIFSMYLNGKGTTSIAIALNNDGIASPTGTKWNGVTICKMLRQEKYTGNTLWQKTYSEFMGPHFQINKGQKPKFYIQNSHPAIIDNETFEQAARLLKQNKTNNTVTKELPFRKKLICGQCGHMYTLKPGRIINWQCSHKYNTTKRCSNAEISDKALHIALEALCDKLHINGKIIFGRCIELLSKLESLKPGGTLSIANAYTQIADLKEQKHRLTVLRTKGHISDEKFMLMESEIERSIAELNGDIERLSQEKDTAIDDIRLIYETVKEYDGTIEYRERILSELVERIRITGSEIRFELIGGLSFTERNGAYEN

SEQ ID NO: 5567 - protein, 542 aa, unidentified
  source 1..542: note = uncultivated organism
MKRTTQSKPSGNLAVIYARYSSHSQRDVSIDQQVKAITEYAAQRKLTVVQVYADRAISGTTDNRPEFKRMIEDAKAEAWQYVIVYSLDRFSRDRFDAITYKQILKSHGIRVLSAMENISEEPTGVILESVLEGLAQYYSMELSQKIRRGLNDNASKCMVAASIPFGYMKGPDNKYAINPETAPIVKEIFTRVLKGENYIDIARDLNERGIRTKSKSEWNRSSFKFLTNERYMGIYIYGDIRVEGGMPAIVDPETFYAVQAEVERRQNPKGAIVKRRRANTVYLLTGKAYCDCCKSPMVGKSGTGRHGGFYTYYACKSMLDKNCDLKRVPQEKLEWFVAGVLKKFAMDQELVDLMVDISMKAQEERNNSSEMTLLRNELKQTESSINNITKAIEMGTISQALLDRIAELEKRRDTLKAQIATNEHRDKLDNLTREEMVAIFQLVQEGEIENKDFQELMFRLLLNSVYVGKETIKIVLKYKKDESSTIELPFDPDNIPEVEGSSKRIWWTLSELMQTPPSGQENIPVTLRVYHTFAVIEIPRVA

SEQ ID NO: 5568 - protein, 629 aa, unidentified
  source 1..629: note = uncultivated organism
MRKIGIYCRVSTEEQAKNKEGSITSQIQRLKMKVEEKNRYEDNKWGKLVGIYKDEAYSGKNTDRPQYQKLLDDVRKNKIDTVMVTELSRLSRSVTDFLSFVQELEDLGADFICLQYDFDTTSPAGKVFMTIIMALAQFERELTAERIKNNFHARALRGLSNGGTPILGYDKDASKSGSFTINKAEAEIVKDIFDLYLESSNIAEVVKILQKKELNNKSWIGRSNKVHGGKEFNTSAIWRMLSNYAYIGKREVNKNNKDADQETLKFEEKYQVVDATWDAIIPEETFNLAQEKLEQNKKVKYAVTYDFLLSGLLYCDECGKSLCGQSGTGRNGKYFYYGHVGKTDCKIKRYSAEELEKIIKKNLFDLIGSKYLSEEFLQISGELTNSRNNSKKIKKKSLGAKIEATQKELDNLLTFIALNDSATNSKTIMAKVEQKESELAKLREEETLLDNSEYIDDSAAVDSGYILENLKKFKSDRFRKSKLSKRREIMRSVFKSIHINPENVLRIDLWGQPDVNKASFADSKDKGVVLPFYKAGRPLEASFRKTASRGDSFEDIKKATGIGTFVLDSSGFLINDGSYTVLNGRSDWIRTSDPLLPKQVRYQAALRSVNLTRKGEFIMKSISFVHSFL

SEQ ID NO: 5569 - protein, 546 aa, unidentified
  source 1..546: note = uncultivated organism
MSYYTKTEQPPRVKTYRAALYIRLSKEDGDKTESDSVVNQKKILTNFVNAQPDIELSEYYVDDGWSGASFNRPDFTRMMADVYAQRINCVIVKDSSRFGRNASESGRYIGEIFPKFGVRYIAVNDAIDSGRSQGVAIDFLNNTMRGMINEYYVAANSESIRSTLDMERRHGYFIGSFAKYGYKKDPADHHKLVIDEVAAQTVRMIFELYLKGSGIRTIVRYLNENGIPNPSTYKQQHGFNYQSRAIGKSALWSDKTVRRTLQDEMYIGNMVQGKYRKISYKDKAIRACDEIDWIRVEGTHEAIISPDDFERVQRMLKIGVKTSPISGKVDLFSGLLKCADCGHALIKKTNRNPDKTYIYYRCSSHCKCKTACSAHTIRYEKLYNAVLATIQKMVDIAVNADEVLKEMQNHQTAAESLDIEKQIMMQEQESEKVKQFLADLYPDYKNGLLNKEQYLMNKQKYEQEQARLSQSIKRLKSSLGTPDSKDHSNAFIEHFKKCGNIDRLTRPLLTELVDKITVSENGDLDITFNFRDAFTDIEQVTHEKTA

SEQ ID NO: 5570 - protein, 554 aa, unidentified
  source 1..554: note = uncultivated organism
MDLNKTLYIYTRVSTTSQEEDGTSLETQRELGIKKSQDLGFEYQLFNEGGQSSSHDDFNNRPVLTELLSKIDEGHIKHLFVYNTDRLSRNKVTWNVIRFKLFKSNVTLYTSTGIYNSSSPTDDLLLGILSEISSYDNLLRTERTRLGKLNRVKQGYWMGGPPPFGYKLVNKKLESDEYESKWVNYIFEQFVKKITIREIKMGLLGNGVQTRRKNNVWSLGSIEKLLTNTHYIGFYYITDKKTNETVRCECEPIISVDLFNQTTELKQSRSLRRVKEGNQKKFYLLRDFLVCGVCGTRMSAKTQTDTTRSVYYCPRKERNYVNEHSEYYKKCTNNRYLKINLTDDLVWNTVVDVLSNSKQFREEIKGSVLGEQPSYRLQKIDIEKFKKSLKTLSNEIRDSEKLKKNVIFQYDVLQVQKLSDETQEISHKKILVNIEDRIRELEFKKYELNKRIHDLENKMDWVDWVSEFKKNLKKLSDSTEEEKHKLLIKIVESITVNTVDKQTHQLVIEFKLPYIDDELVWNNPTNKKLGYTITNGKKTKELELFDEKKYQKNQ

SEQ ID NO: 5571 - protein, 578 aa, unidentified
  source 1..578: note = uncultivated organism
MAESFKRCAVYTRKSTEDGLEQEFNSLDAQYEACAAYALSQKHEGWHLLPDRYDDGGYSGGNMERPGLKRLLEDVADGRVDIILVYKIDRLTRSLSDFAKIVDVLDMAKASFVSITQAFNTTTSMGRLTLNMLLSFAQFEREVTGERIRDKIAASKRKGLWMGGPLPLGYDVKDRRLVINEAEAELVRHIYARYLELGSVVELVDDLNAMGHTTKVQVRTSGPHKGGCAFRRGTLYHLLANPIYLGRIVHRDEVYPGEHEPIVPETLWQAVQDKLKANASGTSRRLKGQQPSLLTGLLIDSAGRAMTPSHASKGRSNSTPNGKGQTKTQRYRYYVTRPDQTKDEPAYRISARDIEQIVTQRLAAYFSVSGNVAALAPTDIEAHALQQVLAKADLTAATLRSGSVVARHQIITQILSKTILHDDRVALVLSDAGLADVLTIERSPLSAPIILSVAATRLRHGHQIRLVIEGEGQGPTATVKPSSSSTPHRDAKLGALLADAHAARKLVLAYPDTSLADLAKQQGKCRKHLAKLVELSCLAPDIVTAILAGKQPSSLTASRLRSVELPMAWNEQRALLLC

SEQ ID NO: 5572 - protein, 551 aa, unidentified
  source 1..551: note = uncultivated organism
MKNEKRIRVAFYMRVSTVEQTEGFSLQMQEEALKQHVERNGYKGWYTNAKWHFSEQGSGGDTERKELKRMLKMAKEGEFDLVLVWKIDRISRSLTDLLEIFETLHKHGVGFASLKEDIDFTGAVGKLIFQIFGALAEFERENIKMRTTEGKKMSAYQGNYVGGSIPYGYEKIKNPTKRGSKLNLVGKEAQIVKQIFNWFVYEKMTVTEIARELNKMGVSKGKSLRSTAKGTKWADVTVRNILKNEIYRGAYITNRFEVVQHKPKRSIERLQKDWIINEVPFVVNQATFSAAQLRLKSGSKGKRGGGKEIYMLAGKLVDIATGKGFVGYKSAKGTKNYRRKKVAGAKGLLSKNVSIAAKDMEGFVWDYVEKAISRPEVFLKIHKENSDNFKKTSALIAKHTIYENNYSKANEKIQRVENDFYEGNIDQAKRGALLAQFTQERDHSFEIMRDVDKQIKTLSLYDSACRDVKKFSENMKEGIGQLTYEQKTDIVNMLVEKVEIHEDEEKRILKVYFRFDQKAVASVISSSRTDLVHRQAKNAEKATDSFIGGGR

SEQ ID NO: 5573 - protein, 549 aa, unidentified
  source 1..549: note = uncultivated organism
MSQTQRIVRCAIYTRKSSEEGLEQEFNSLDAQYEACSAYIVSQKSEGWKRTPVRYDDGGISGGTLERPALRRLLADIEAGRVDLVVVYKIDRLTRSLMDFSKLVERFDKSNCSFVSVTQAFNTSTSMGRLTLNVLLSFAQFEREVTAERIRDKIAASKKKGMWMGGIPPIGYTAKDKELIVDPEGAKIVNRIFEIYLEMKCLNRLKREVDKLGYETRPSRPGSFARPYSRGHLYAMLCNPIYVGEIRHKEQRFPGRHDGIVDRETWDRVQTLLEGNSQAVRGKGRQAGERSPLTGRLFDETGDRLTPSYTKKNERRIRYFVSNRLVDRSSTRAADPSGWRLPAVQLEEVVASAISGALKKAKPANSADLGTIKRVTETLAHMTETGKKPLPELLDLVARVRVTPGMLEIELHRDKLASIFEASAKELPMGVASISAPFQRRRRGIETKLVYGYEPPKVDAVLLRRVARGYAWWDEIRSGKATFKEIVKRERLSRRFVAIHVDLAFLSPDVVTEVIEGRQSPYLTAQTLRATPLPALWAHQLKAIVRDAH

SEQ ID NO: 5574 - protein, 556 aa, unidentified
  source 1..556: note = uncultivated organism
MKRIRCAVYTRKSSDEGLEQDFNSLDAQFEACSAYILSQASEGWTATKSRYDDGGVSGGTLERPALQRLLKDIASGLIDIVVVYKIDRLTRSLLDFAKLVEAFDETSTSFVSITQSFNTTTSMGRLTLNMLLSFAQFEREVTAERIRDKISASKAKGMWMGGTPPLGYAADGRSLRIVDRHAELIRMIYARYLELGSVRLLEEQLQADGIAVPVRISGTGKSSGGGKFLRGQLYAILDNPIYKGEIKHGKNVYPGLHAAIIDADTWEQVRLKRQDNVRGYRSQYLASHQSLLAGKLVDEQGKPLIAVHANKGPKRYRYYVSHHLHHKTSDAAGWRIPAREVEGLITLKLQEMLKDPIALISKMQLAMPAPTDIARLLDHSANLTNELEVPSSGIAPKLVTRAIVNDKAIVVDLSGIETARLLKLELPTTERQYTVRIAAKLTRSGVAMKLVQHNGAAPVKGAAVDTLLKTIARGNALWQRLQAENLNITELAKLEAMTPSYLTRILRLAFLDPWIIEQIIAGRQPAMLDARKLTLSGELPMRWNEQRAFAGFSATR

SEQ ID NO: 5575 - protein, 537 aa, unidentified
  source 1..537: note = uncultivated organism
MKISNSMKAAAYCRFSSSNQREESIDAQLRAIYKYMDEHEYTPVGDYIDMALTGTNTDRPNFQRMIEDAKKGLFDVVIVHKMDRFSRNVRDTLNIESELALYGVKVISVIEQFSDTPEGQLQQIIQLGVGQYYSQNLAREVMKGLKENAFKAIHNGGIAPLGYDVDPETKKYIINEHEASGIRIMFEKIIQGWSYRELAEYLNLLGYRTKIGNKFSATSSFYDLLTNPKYKGEYVFNRSVSKPKQIGMKRSHRKNKNEEEIIRIPNGVPAIVDEETFELVQKLLKQRRRSKGQHKAKEVYLLTGLVECAECGSAYHGSSRIGGRNKSKYVSYRCSKRKKLENPCKCKEINKTLLDEFVVNQLYTTLLNPTNLQQLHEEINIKLKQKYEDMDQDLPQLQKQLDEVNQKISNLVQAIAMGGLGSLDTITQEIQRLEHDKVKLTELVQENQVKKESLTLTLDQLKQVLDESKEYMLSKHDDMVKYILSRFIHKIIVGNETVIVHYNYGGFYYDFKSIVLLESVTYQRDDMYMNSALKEVI

SEQ ID NO: 5576 - protein, 551 aa, unidentified
  source 1..551: note = uncultivated organism
MRPKIRCAIYTRKSTEEGLEQDFNSLDAQYEACAAYIVSQKAEGWRQVSKRYDDGGLSGGTMQRPALQQLLADIAAGHIDRIVVYKIDRLTRSLSDFAKIVDQLDAMEASFVSVTQSFNTATSMGRLTLNMLLSFAQFEREVTAERIRDKIAASKRKGLWMGGTLPLGYDKDRRTLAIIPSEATLITRIYADYLRLGSIGRVKEGLDLDSCTTRINIGKDGQPRGGKPFTKTHLHALLTSPIYAGKIKHKDKIYDGQHPAIINQEMWDQVQDQLSKASARRRGAGNIAMPSPLAGKLFDATGDRLTPSHTVRCGKRVRYYVSRRLLVGSRAKHPDGWRLPAAQLEPALASLIVNWLADERTAQDLLFTRSAAEIRNLHDRLKEMADRIRADAVTDIWPQLIGRCDLGVGKIKVQFDQDALADASSTPSVSNSGGALTLIAPFHLRKRGFETKIVIGGQAGTIDLKLVQNIALGLYWYEAVISGATFKEIALSAKVDIKRIRQMIEFALLAPRAIEDILIGQQPIALTTEWLKHQDLPIGWVAQHALIASAN

SEQ ID NO: 5577 - protein, 500 aa, unidentified
  source 1..500: note = uncultivated organism
MIDTANLHPELTTYLESLFSTPTVPDSAEGLKVLRVAIYCRISADDEKEGKGVARQLDDALRLQRDRYPNAASVERYIDNDISAMGSKEREHFERLLRDMAAGRLDVVIMWHTDRLYRRIEDLTRIMKAWEANQPFMSAVTIGHIDFTTPTGRFVAKQLAIVGELEVERVIERCRRKKQEMREEGRVQGGGRAFGYRQGGYEIEPREAARMRIAARRILVGGQSETDIARDWNRRGVTTARGTTWDGMKVRRVLTRWRNVGMVEHQGTPVGPAQWPAVLDQTTFVGLRKVLGDGTSLRSYRSPTKTLLAGIATCDVCGAVLYGAGTDARGKRRYRCSKSQHLKRVAAPIDKHVEGIVLGILSGPDAITLLGKGPSEDTVHELHVAAATRQATLAEANTMFAAGEIDRMQLRDITTKARARLIEIEKELATLTTGSVLDGLIGVPDVAHTWFGLDIDRQRAVIDHLVEVRVRRGATGGSVHSKNRAARFSSTIDVTPKKTI

SEQ ID NO: 5578 - protein, 542 aa, unidentified
  source 1..542: note = uncultivated organism
MKPQPRYIAALYMRLSREDGENESASITTQRKMLTAFAKENNFIIYDEYIDDGYTGTNFDRPSFNRMINDIEENKINTVITKDLSRLGRDYITAGQYTEVYFPQKQVRYIAINDGYDSENAVNNDIAPFKNVINEMYARDISKKIRSSFTVKMKEGNYIGNFAPYGYCKDTENKNHFLINEETAPIVKEIFYMASKGHKPADIAKHLNMKNIPSPLAYRCNKYHLDINKNKTDGEWRAGTISRMLKNIVYIGHMAQGKTTKVSFRLKTTIAKSKDDWFVVENTHAPIIDKETFETVQRYSQNRAYNKKNNFVNIFSGIAKCADCGKNMSSVGTRKKGSTANLECGAYKLKGAKACTNHFIDYDVLYKIVLDTLKEQISLSEQDKKEILNAVLKENSKAQRQNKTVDEIEKLQKKIKQADSKIEKIYDDNFSGRLSNDNFNKLLEKYENESKLLSEKLKQCQKNAKVQQSKSLEKQAYQKYFNLLNEYSDIKELNSELLFKLIERIDVYQGHYEKSGNKKTKRQKIKIYFRFIGKSETKEYIN

SEQ ID NO: 5579 - protein, 523 aa, unidentified
  source 1..523: note = uncultivated organism
MVSAAVYLRLSDEDRNKKSEADESESIQNQKSLLTDYCRQRNWDIFDIYCDEDYSGTDFYRPDFQRMLADCESGCINVVLCKSQSRFSRDMAVVETYIHDKFPEWGVRFVSIIDHADSLDVTNKKTRQINGLVNEWYCEEVSANVRKVLQHKREEGKFTGSFAPYGYLVDPEDKNHLIIDEMAAPVVRDIFSWYLQGWGYRKIAAALNEAGIPNPTSHKRRTNSRYVNSNESKSSSKGLWTVSTIYNIIRNETYTGTLVQGKSHTVSYKNKKRKRAAEEEWIKISGSHDAVIDAKTWEMVRQKLKSRVRAGRTDQELSPLAGKVKCAVCGKPMKRNVYYNKKTIRYYSLICGTYKTGAMNCSNKASISGMALERLLLEQINKLIENYCQQDKINVVNGIDESISRLIKLSESICRDVSENDEKLIRLYEDKLDGTISKEQYIMMSRRYTDKIEGLKARKESIRQSIEELEEKRSATEKRDMIIDRYSRIEKLTRTVAEEFIESVLIGEKNESGQREITINWNL

SEQ ID NO: 5580 - protein, 540 aa, unidentified
  source 1..540: note = uncultivated organism
MSRRTRIKASAENNQNDTEPSTPPVKKAVIYSRVSTEEQAKGGVSIDMQAAKLGHLAQVHDMIVVETISDPGFSGKNLNRPGMEKLLALARDGAMTHILIYKLDRLSRSIRDISQMIELFISQGISLVSATETIDTATPIGRMVCNIIGSFAQFERELIAERTQDAMEQMWKDGYWLTKVPFGYHRVGSKIMVQQPDQAPLVLELYKTVVEKRLTVRDASRLIQIDSRFASMRKWAPSGIHRVLTSRAYLGEVLRRGKWRLGLHQPIIDVSLYDEVQRLLEGRDNVGPIGYGDSVNILAGIAVCGHCGRKLTIRAGRRRGSKRDVDRKTPRYRYYMCSNHADSKPCPLETIPAELLENAVIKKMAEVGSNRRAVEAIVREIDDTYVKKTKTDRSKHLGMKTRVGTLDRKIKRLLDDLASLDDDDRSAREEMRNSLSVLSAEKKALSDTMNEIEARLFIKKRERTPADLLVSLLMRPQLYLPKLTLKELRAVMRGIVARATVWGPEKMEIDIAIPAGGSLYGAGGNPDLGEGFKLCSVLGG

SEQ ID NO: 5581 - protein, 601 aa, unidentified
  source 1..601: note = uncultivated organism
MDNERKIAGVYIRVSTEDQAREGFSLGEQEEKLLDLCKFKGYEVFKVYKDAGISAKDMKHRPQFQEMLKDMKEGKINYIVAYKLDRITRSVRDLEELISMLEENNCFLVCDRDDVNTSTANGRFFVRMLTVLSQLEIEIVSERTKFGLNGAIKSGHLPGILPLGYKKDGNKKTIIDETTRPIIERIYNMYLEGKSFQTISNIFNNEKLLSPKKWRDSTIQKIIDNKIYMGDYEQYKRIAKKENKEPVIYMNVVEPIISRAMWEECQLQKEKNQRTYNRDRIYTFFQKIKCPTRGRIMKCKGSGGKKKKYMYYNCEHCHLNYREDKIEECLMNFIYDLVEYDMAVKKYFFPVLADKKPKQTEEIDKDIKKLENQRNRIKKAYINGIVEMEDFEEDYKLIEQKLEILEQKKSELLNIDSITFSPQQLMADRDIEREKMIRLDTLNKTLKINWESKSKEEKQEFISKFIESVVLIKNKDNNLYLENLNFRKSFINNLMKFFEAGIFDVYVPVNIGDKEEYVKGSPNLNETQAKEYVERLNNYYETTMYEFYETIDEETNEPIGIVYPKENEKPIRILSVEDENAFDRKSKYEVVFYNTKKPVEE

SEQ ID NO: 5582 - protein, 543 aa, unidentified
  source 1..543: note = uncultivated organism
MEEIKCAVYTRKSTDEGLEKEFNTLEAQREAGENFVKSQKHQGWTLIPEHYDDGGFSGGNMNRPSLQRLLKDVAAGKVNMIVVYKIDRLTRSLTDFAKMVDVFDKHHCSFVSVTQNFNTADSMGRLTLNMLLSFAQFEREISGERIRDKVAASKKKGIWMGGCVPYGYQPINRKLVVKPEEAKVIKFMFEKYLEYKSPQAVGELLEEEKMKTFPRASIARMLQNPIYMGKIKHQGNLYDGQHEAIVSEDIFEAAQNVTVKKVKHKRVCLYKRNEIGIMRGLLTCGCCHALMTPTSTQARGIKRFYYTSTTARMYGYHKCSNGSIAVATMDECMIKIVSQLFQDPKIFQALLEKVAPNKSMELLRVLRTPEKVFYKLSDRYKHFIMELMITGVTVNAETMEINWTDLGLSLLPDHLLQKTTGHQTILPMPFVKHKGRTEIHLPENIEVEPHFDNELIKGICLGFKYQKMLDQKKMSIADLAITENTDASHIGRLLRLTSLSPTIIRTILKGHQPPKLYLRNLLRKTIPPIWEDQVKQFGFTILD

SEQ ID NO: 5583 - protein, 508 aa, unidentified
  source 1..508: note = uncultivated organism
MENKSERKTKTGVIYARYSSDSQTEQSIDGQLRVCENYAKANNILILNTYIDRAMTGTNDNRPDFQRMLKDSARKEWDYVICYKLDRFSRNKYETAIHKKELKDNGVKVISATEYIPDTPEAIIFESMLEGYAEYYSAELSQKIRRGNNESRRKGNLTGGRIPYGYKNVNKKAVIVEEQAAVVRYIYEQYAIGVFVKDIIAKLTAKGILYYGKPFVKNTVYKILKNERYSGIYRHNGEIFDNIYPVIVPAETFEKVRAKVFKNKYGKASVVMDYLLKDKITCGYCGQSIIGENGTANNGERKYYYKCRGRKSKVNDCKKATVRKEVLEKIVIDTIVNELKKPKMMDFIVGGLMEEQRRQAEQNTVLNILTREKRQTENSINNIMQAVEQGGATTTAMKRMRELETRITELEQKIIIEKSKTAVLLTEKQIRDYYESALRCEPKMLINLLIKQIILFDDKIQIIFTSPIQRSPENNRGFSFYSKKIEISYRVPYRANTVRIEFEIEMSV

SEQ ID NO: 5584 - protein, 567 aa, unidentified
  source 1..567: note = uncultivated organism
MSTRKRNAPNMNAKDAVTRKCGLYGRVSTLRQAKVEEGGLDTQFSCMEKTVDFENEKAIGETWEIVDRYREEGRSGKDLERPEFKRLMADVQSGRINTVIVYKIDRITRSLRDFYTLWETFEQYDVQFVSLYEKFDTTTAVGRAMLKLILVFAELEREQTAERTAATMQHRAEQGLWNGGVRLGYDLDQNNKGVLKVNPDEKEIVVKDFFKKCLELGSAGKVVQHLAKQGIRRKQYTNRNGKNVGGGPYYKQPVMNVLTDQVYLGKIVHNGQAYPGQHEAIVEEDLFMQVQDLIRRNSETRTNALAQEEHVFLLQGLARCGKCGSFMTPKWSSGRGGVRNFYYCCTRQSHSMGTECTTPYVPAGTIENFVVEQISAWAKDRDEIERAVQAACKFREIEVTNLTQELSAIRARLRETQAGLSQLVTAIQSGKSFRAVEERMEALEQDRTALEERINRLELERSSKEQETLSSDVIAETYCDFPFIVSRLREDGNLHGLKDLLACYIAAIDIHQEEEDPSSGHMNIMLFEEELPGWKPHLTQLNGAQEKTLTFQPLTGWNCERVERLPE

SEQ ID NO: 5585 - protein, 521 aa, unidentified
  source 1..521: note = uncultivated organism
MSTPPIQGPRRCAIYTRKSTTAGLEKDFTTLDAQREACGAFIRSQVHAGWVELDERYDDGGFTGANLERPAFQRLMQDIEAGLIDLVIVYKIDRLSRSLLDFARVMERLTKHGTGLVSVTQNFSTTDAMGRLTLNMLMSFAEYEREMIAERTRDKISAARRRGKWTGGLVPLGYSVENGKLIIEPDEAAIVRDIFASYIEHRSLFRVVDTLRDGGRKTKAYVSKAGNVRAAKAWTKHSVLRVLRNPVVAGLIHSDGTFFAGEHEPIISAEDFNHVKALLSGGGSRRSPVRNPAYLLRGVVRCARCGATMTPGSTRKGARAYRYYRCLTREKQGPGACASPPLPARPVEELVIQYIRDFAHQETSVSEIKRVVGARVYDRLTALRPERQKLIEQIGRTSARVRNLSQEVEDNAGKNVHAHAALLERLEQAARALQELQRELSRVEGEVSALDDSRSDADWVARILGDFDRMWSIMTPDNRRRLVEALVDRVVVDDRSGAVGVHLAVLSRPLPAPAFVAEGAE

SEQ ID NO: 5586 - protein, 561 aa, unidentified
  source 1..561: note = uncultivated organism
MTDIDKTLHIYTRVSTTVQAEQGTSLDSQRELGIEKAKQLGYEYKVWDEGGRSSHHDDIAERPQLNALYTAINKGEIKHLWIYDQSRLSRNDQVASIFRYACDKKGVTLYTKDGVFDLSSPTDKLLKQMLDAVAEFDNSTRAERTRLGKLNRVRSGMWHGGPPPFGYILENRRLIVNEDEAKWVKRIFLEVTKGTSIADIKKLLDSNAVAPRRKMGLWSLGSVAALLKNTHYSGFYVFKDSKSEEKIQVQCPSIVETATWNQAQFKRSPSVLRKPQKIATQKNFYLLRDLMFCGHCGRPISGRIIKSRAEYSYFCPSRERAWAEDGGVDEKKKWQRGNGCGFTRAMNIQRTDELVWDAVKSIHSESSILKEEVRVRELNEERALQSQTEAEYKALQTKVRQLQRKHTALSETLGNLEANRLLEQLNDTSYRTIKLRVSAEIREIEDQLTKARSDFNGATNGKKWRSWLKAFGQEVKDLDTKSDAQKKAYIEGLVKRIDVSWNDALREHELKLTFHLPIVKDGITWREIENYEGHGRRAKRYDLYEGLNTTTVNVKKKDGRG

SEQ ID NO: 5587 - protein, 539 aa, unidentified
  source 1..539: note = uncultivated organism
MIAAIYSRKSVFTGKGDSIENQIQICREYGENKLGINNFTIYEDEGFSGGNINRPKFQKLLQDITKKKFDVLICYRLDRISRNVADFSNTLEMLQNNNISFVSVKEQFDTSTPMGKAMVYIASVFAQLERDTIAERIRDNMLQLAKSGRWLGGQVPLGFKSEKITYLDTEYKERTMFKLTPIKEEMSKVKLIYDKYIQMGSISLTLKFLLSNNIKGKNGGDFSSMSINDILRNPVYVKSNNLVLEYLTNKGMHVCGTPNGHGILIYNKHNSKYKEKDISEWIAAVAKHEGIIVSDIWLEVQKKLDKNSKKDNPRQGTSKKSLLSGVLKCAKCGAPMRVSYGKQKKDESERAYYYTCTMKCNSGKSRCNNPNVRGDLLEKAVIDHISKLNKDVIINELESFKKESAYTTDNLIQNITKEIDNKKSEMDILLKNLSKANSAASDLIMSKVNNLGEEIKKLQSNLNNARTEKSNAAENKVNANIILDAINEFNTIFSNMDEIRNDEDTISKKRMLIETIIDKITWDGTTKKICIDLWGSKKK

SEQ ID NO: 5588 - protein, 521 aa, unidentified
  source 1..521: note = uncultivated organism
MFLAIYGRKSIYSDHSDSIDNQFRMCRECIDFKFPGENSIETYSDEAYTGANTDRPDLQRLLADVKAGLVDALVVYQLDRLSRDVRDFSNIYSLLEEHHVMFISIKENIDTTTPIGKAMMYVTVVFAQMERETIAARVTDNMLGLAKKGYWTGGNPPVGYVRKKITVNGKNHVTIEPDPEGAKYVVWIFDTFLNNHHSLQSMETSFRRQGIRTQNGAFFSTVQLYKILTQPFCCPATPEVYDFYEAKGCQMDPGSPRELWDGSRGVMVYRRSTNKNKKHQLNPPEKWLVCIGQHRPFLPADKWLAVQEQFAGNKFDKSMKYDVPLLKGVLRCSCGSMMATSRKKKLEGVSSWYYCIRRMRQGTEVCPRRQVKTDIIDNKVLNIFRAIEADPKQIYKFAAKNNQEPKVNVKAITAQITACEGKIGRLTATLALTDHSAAAKYIVAEMERLDLELQALKRERSMAQSNARKGQEAAQTLGAKAEAIGQLIRGLDGFTAVERNEIVRDVVKECVWDGQELFVTL

SEQ ID NO: 5589 - protein, 539 aa, unidentified
  source 1..539: note = uncultivated organism
MKATPVKPVRCAIYTRVSTDQGLDQEFNSLDAQYDASSAYIKSQAHAGWTLIKARYDDGGYSGGSTDRPDLQRLLDDIRARKIDVIVVYKVDRLTRSLADFAKLVELFDAHGVSFVSVTQHFNTTTSMGRLTLNVLLSFAQFEREVTSERIRDKIAASKRKGLWVGGPLPLGYDMKDGKITVVEDEAEQVRLIYRRYLELSGVNALVRDLKERDIRTKKKLLTTGATRGGIPFERGTLFYLLRNRFYIGEVRYKGDILPGEQPPIMERALFEAVQQKLTDQWTTRTSIRNAGDHLLTGLLFDDAGYPMAPTHATKAGIRYRYYVSRPCLHGEAKTAKVGSVTRVPATDIEDVIVKSLNEHLRSQSGMPASAITGHSAIAEMIDRIDVHKDRLTVRLRSLENPGTDDIKSTDNHLLSIPWQKPPFKRFRQILLPHGSSRNEVRPERPERRLRLVRAIARGRRWLDEIISGSVADNEQIALRERCSVRHVNMTISLAFLAPKLVRAAVEGRLPRGINIERLRDAPAEWSRQFEALGLNSKQ

SEQ ID NO: 5590 - protein, 557 aa, unidentified
  source 1..557: note = uncultivated organism
MKKKIRCAIYTRKSSEEGLDQDFNSLDAQREACAAYITSQKAEGWVLMPELYDDGGVSGGTLARPALQRLLSNLDAGRVDQIVVYKIDRLSRSLADFAKIVDRLNEADASFVSVTQSFNTATSMGRLTLNMLLSFVQFEREVTAERIKDKIAASKRKGMWMGGLVPLGYDPDGRTLTININEAKTIRKLYDLYLAHGTVQAVKVQADRLGLRSKRRTTPSGEERGNNLLERGQIHHVLTNPIYAGRIRHRKQIYEGLHSAIIEPSKWENVQQKLAANSGKSRGHKHTAHPSPLAGKLFDETGDRLTPSHTSKNGKRLRYYISRRLVTDKSRKHPEAWRLPAPQLEQAIASAGYEHFGEQSMLPNLIQDLKTNEVAHLNKKLESLVCMFFSGKTVRCWSDLIERINIAPGRLTIMLDANVVAKHLVLPIERLLPDALTINQPFQIRRKGVETKIILGNAPPEIDQTLVRNIVKAMEWFEAIKSGETFTQISTRAGTSKRRIQDVIDLAFLAPDIIEKAANGTLPLHFTSDYLIKTGIPVDWNMQRKMLRDPATTNVRI

SEQ ID NO: 5591 - protein, 562 aa, unidentified
  source 1..562: note = uncultivated organism
MDKVSNKVAIYIRVSTTHQIDRDSIPMQKSDLIAYTKLMLNTEDYVIFEDAGYSGKNTDRPNFQKMMSQIRSGAFTHLLVWKIDRISRNLLDFSSMYKELKELGVVFVSKNEQFDTSTAMGEAMLKIILVFAELERNITSERVTATMISRASNGQWNGGRVPFGYDYDYDTKTFSVNEQESVIVKLIHDKYEEMQSLVQEARYLNEHDFRTREGNEWSPVTLLIILRNIFYCGDYQYNTLKEGNRQKVKDESEWVIVESHHDAIISREQKQRIIGLLESNKRLSRRNKSTKYNHVFAGLLFCSGCGKAMGGSPATPRKGWSYSKYSCYSTRKNALLNCKSTSDAILGEFVFNYILNILNAKKASSSFNSYLDLEKMLLSGISFSNISGIREEGLTELYNMMQETDKNTDIFGKPKKSSGSKNISELSKLRTEKKKTEIALDRLTNLFLFSDKALSEKEYLIQKEKLIGTLDDINEKIGIINSNEWHQTISDTEFIKRASEFVLAKKLADRKYISYKSLALSVDAAVLKAFLARIIDSITVGSGRVEKIVFKNGIVQEFIYKQ

SEQ ID NO: 5592 - protein, 570 aa, unidentified
  source 1..570: note = uncultivated organism
MPKKKIEIIEPTQQRQTQKKKYNVCAYARVSTDSVEQKDSYDNQLHFYEERIKQTPNYNFVGIFADEAISGTTDKRPNFQRMIKYAEEGYIDIILTKSISRFSRNVADLLKYCELLRNHNVNVIFEENSIDLLSAQGTLMLTILGAVAQMEVENTSAHVNWTIQQKIRKGEYVGRANPLGYDIVDNQMVINKDEAETVRYIFQRYIEGAGCHAIAKELEAMGAKTKNGNTTWYGSTVMNIIKNEKYIGSITQGKTKTINPIGHIRKINEGEGVKSHVEDDHEAIISLEDWEKVKLIIEQRIVTYSDGSRKGTTNKTNRSIFTSKLVCGYCGKNYFRRVTHAGTPSEKIIWSCGTYAKKGKAECPKCKSLDEDYIKQSIVGMIKNLIDDNEALFYLSDDSLDKLLKNSKEKETQIKKQLSSYYSNYNKKMKMRSKLTDLLLEEKLSDEDYNEKREALTKELEQIQEKIDSLNAEIKSEADTFANRKQIIAYIKEGKAEGFNKDLFELLVDHIIIGGKRSDGVDDPYCLRYELRNLNLDTHMSSKLDDNGQLRYYSEYAIEEANKRAKKNKS

SEQ ID NO: 5593 - protein, 531 aa, unidentified
  source 1..531: note = uncultivated organism
MRRTTPSKTAGAKVLRCAIYTRKSTEHGLELEFNSLDAQREACKAYIKSQASEGWICLPKQYDDPAFSGGNLERPALKRLLKDIEAGSVDVVVVYKIDRLTRSLSDFARLVDVFDAHSISFVAITQQFNTTTSMGRLTLNILLSFAQFERELASERVRDKVAASRRKGKWMGGTVPLGYDAKDKKLVINQNEAKIVRTIFERYIALKSVPKLIGELDRKGIVTKMHQLKGKAIGGIPFNYGTVLHVLKNRIYLGETGHDGKWFAGEHDPTLDRKTFDCVQEIMKGNSVKRSKRRTESGALLTGFLYDDRGNRMSPTYAIKKGVRYPFYVSTALLKGRKKEAGSVARVSATEIERAAVMVLRKHAKEVGDDSTLSPREMIEHLVHRVAVRSTKIVIEIKKTASHASSSSIDIPWSGPPMGGSSEVIEPAEPRVGGAVLEQSKPELVQAVVRAHLWLKQLQDGTYPSIEELGRAVKIHPKNIRSGLRLAFLAPQMSSAILHGDNRGVASLKDLNQASDCPTWKLQSLKPQACL

SEQ ID NO: 5594 - protein, 541 aa, unidentified
  source 1..541: note = uncultivated organism
MIVALYARVSTTKQAEKDLSIPDQLRQIREWCKARNYEVALEYIEAGASATDDRRPVFQQMIAEACISPPPFDAIIVHSLSRFFRDMIEFGLYERRLKKYGVVVHSMTQQTSDDPAGEMARRIFSLFDEYQSKENGKHTLRAMKENARQGNFNGSTPPYGYRKIELDIHGNKGKKKRLELDPVEATMVNSIFQLHIKGHQGQQLGVRGIAAYLNDRGLTMRGNPWRKTFIHEMLSNRLYLGEYIFNKMEAKTKRIKPESEWITVNVEPIIEPEIFEQVSLKLEEHSPAKMPPRVANSPTLLTGFIKCGCCGASMTIATGKGGRYRYYKCSRKINDLSNGNRCQNSNVAMEKLDGLILHTVADKVFTPERVELMMKELQVNLKNAHLDQHEQIKMLTTEIDDIKRQSEKLYEAVEKGFLPLNASLQERVHKHDTRRQEILVELAGLRRQKEMPTTKLGKKHIGTFCTALKEKLLDRASSFGKEYLKLLVSEIIVDKKEVHLSGSFSALAGALTISTKQALGTVPSFVPVWLPISDSNQGQGD

SEQ ID NO: 5595 - protein, 510 aa, unidentified
  source 1..510: note = uncultivated organism
MAQVQIIQPYQPQSDALEKVAAYCRVSTDSKDQLNSYRTQIGYYTNFIALHPGWELADIYADEGITGTSLEKRDEFKRMLQDCRAGKIQRVLVKSVSRFARNTLELLETTRELTALGVVVVFEEQGFDTSQMYGEMQLTLLAMAAQEESTSISKNMRWSYQKRMENGTFLGCRSPFGYTLENGNLRPHPEQAPIIQEIFERFLAGEGKQTIANDLTARQVPTRFGNTHWNIAGIHYILTNERYCGDALIQKTFTSGFPARKQRNHGQVDRYYVTDTHPAIIPETTFRAAQELIHKRDNGQRTRLRAELPIVCPECGYKYRKVKSRGKEHWVCSLRNRGQSHCQSPRLEESDIQMTFLTMVGKLYANQGSILQGTLSLLEEIAARQEQGNAKLYELNTALADLNEKAHTLQRLHNKGFIEDADFREQTEALASQRKKLSDQRGKIIHGSKALETLDKLRELQRQLESLPEIPWEFDIALFDQLVEKIVPVSNTELLFKLKCGLELKEVLPK

SEQ ID NO: 5596 - protein, 519 aa, unidentified
  source 1..519: note = uncultivated organism
MRCGLYIRVSTDMQKEKGESLEVQLKRLHAYADSKEDWSVTEIYKDAGVSAKNMNRQEFSRMMDDIDQGKIDVILCTKLDRLFRNTRDFLNTTDSFEKKNIKFVCLEGSIDTSTPAGRVFSTMRAAFAQFERETTADRVRDVMRSRAEDGKWNGGVAPYGYYAEDKGLKINTGEEKAIKDIYALYLKDHSIRHIVHKFNADGIKTRKGELWSPTSVRRILTNPFYYGIVTYSKRSHTYSGELRRNKKFICSQGRHPLIISKESFDEVQEIIKQQTKNAPKANAKYLLTGVTYCGVCGSRMHGMAHRKLNKTHSYYRCSGHLHKGSAKCSGNTIRVDNLEDSVIKELKGFSVNFDRLRDALKDSTKLNSDNINSTSKRLEFMENRLIKIQSKRQKIFELYEEGNINKADFMSRKTVVDEEETLVNKEIEILKSKASGIDPTSYDLDYTFGLCKDMREVYDELDLSDRKELIRNLLTEIKVEKHHIAYSIPIQPRFISHTQGSGLLIKSRDTGRGSWRRPA

SEQ ID NO: 5597 - protein, 559 aa, unidentified
  source 1..559: note = uncultivated organism
MTQALISLEALANVQTRAALYLRVSTGRQADSDLSIPDQRRQLEAYCQSKDWETAAEYVEPGNTATDDRRPSFQSMIEAALTKPAAFDVIVVHSFSRFFRDQFQFEFYVRKLAKNGVRLVSITQDLGDDPMSTMMRQIMTLFDEYQSRENAKHTLRAMNENARQGFWNGARPPIGYRIVEAGQRGAKVKKTLEVDPLQAETVRTIYRWALRGDGQSGPMGLKTLATTLNDRNIRTRDGGRWGIAAVHLILTRSTYMGEHRFNTRDHKTRQPKPESEHAVMKVPPIISREEFEAVRAKLKARNPRWTPPGVSSGPNLLTGICFCAACGGAMTLRTGRGQAGGQYRYYACSTKARMGAAGCKGMAVSMDKLDEAVIAHLEDRLLEPQRLERLMEQLLDRRQEWADQRRTHVTELRKRATEAEAKLNRLYEAIENGMLPPSDGSLKERVDELTRIRDQARIDAERIVSSIERVAPTITADSLHRFATAARRKLRDRECGYRRDHLRALTQRVEVVSKTEARIIGSRTDLLRALAFSDDGNFTAVGGVLGFKPKWRTRQDSNL

SEQ ID NO: 5598 - protein, 544 aa, unidentified
  source 1..544: note = uncultivated organism
MIIAIYSRKSKFTGKGESIENQIQLCKDYATTHFEDVEFRIYEDEGFSGGNTDRPQFKQLLEDIKARKINVLMCYRLDRISRNVSDFSSTLEMLEKYNVSFVSIKEQFDTSSPMGRAMTYISSVFSQLERETIAERIRDNMIQLAKTGRWLGGITPTGYKSREITSIDINNKPRKMYALEVIPNEAETVKIIFDKFIEFKSITKLEYYLIQNDIKTKNNKNYCIASIKLIITNPVYVQADSFTYDYLISKGYAIYSPKNEFTGHNGLMAYNRTKQTKKTNISLKDASEWVIAIGQHEPIVTSSVWLQAQEIINRNKDKSIRRVKSTEALLSGLLRCQCCGSYMRPKKNRKSADGTHWHYYYICELKEKSQGKKCNVKNVPGHTLDKAIIKEIKSLSYDSSALSDKLSKDKIVISTSQESLEKSIKATEKQIETLEIEISNLISNLSESENSIANKYILNEINAKGAEVERLQSLVTKKRQEQQATDMQTLNIDLMQHTLSQISSIENASIELQRSCLKSIIENITWDGKDAHINLFGSKSLGEH

SEQ ID NO: 5599 - protein, 547 aa, unidentified
  source 1..547: note = uncultivated organism
MKNLQNIIKEIWVAIYLRLSRDDQNGNAESMSISNQRAMLIAYCEERGWKVYDIYIDDGFTGTNFERPGFQRMIEDIKQGYINVVLTKDLSRLGRNYVMTGQYTDFFFPEHGVRYVAVNDSYDSEKDDNDIAPFKNILNEMYAKDISKKVRSVRQTSAKQGKFMGSKPPFGYVKSPDDKHQLVIDHPAAEIVKRLFREFASGESGRNIATKLNAEGVDTPAEYYFKQTGKRATRGDSMGQWGSATIIQLLRNQVYIGDMVQCKRKVSSFKTKKRLVTDPENWVVVEGTHEPIIDRFTWDSVQRRMASTKRAPCNHTIKVSGKDDEINVFSGIIRCADCGAAMAFNRKVSASGAEHRFYRCSRYANSGSKSCSMHSIDADTLESIILSDIQYHARTAITDGEKLTQRLLSYSGQERQNEKNAQEKALRDTKSRMEFIEEASKRLFEEKISGNVPESLFRKMFADYERELTELESKYDDLRQRVQEANDTEADVQNWMKLIKQCVSINRLDRATAYRLIDQVAVHEQTDERGRKSQGIQVKYNFVGALC

SEQ ID NO: 5600 - protein, 541 aa, unidentified
  source 1..541: note = uncultivated organism
MTEKYLTGIYLRLSKGDDDVDGVGKSESNSISNQRLIIDRFLEKHPEMEVVDTYIDDGYTGTNFKRPELKRMMFDVDEGRINCIVVKDLSRFGRERIQTGTYIQKVFKEKGVRFIAVNDNYDTLTADGSENHLIMPIKALTNDNFSKDISTKVRSSMSVKREKGEHIGATAPYGYRKDPEDHNHLVIDPYAADIVRTIFSKRMLGMSANRIANYLNELGILPPQAYKDSKMNGKKKYTAKWYSKQVLRILENEVYTGCVVQGRVEKVSYKVNKLVEKPKSEWDIVPGMHEPVISRSDFEIVQSLLERDVLCNSSNPDGFLFAGMVYCGDCGSPMVRKTTRTKEGNVYHYVCKNYNFGNNCASHKISEEMLMKIVKDRMNEMIIRLCMYEKLRENISGCEINRDEVIEHDIEIEKLKGELRKYSSLKAALYQDLEEGLLSKKQFEKYRKQYTDKEVELQSAIEKQKEVINSVYDEGICAESLLKTFKKNPHVEEIDRIMLVTMLDRILIYEDDSVELVYRYSERMHKMNQILKYIELQKEGK

SEQ ID NO: 5601 - protein, 571 aa, unidentified
  source 1..571: note = uncultivated organism
MVKKETEAAKRARMLLRVSSDQQLEADGDLKVQRQIVFEYIQQNENWIFDGKEYFEGGVSGYKNSVEERDALQEAYKDARNKEYDILVVYKDDRIGRRMWDIGGYVMALKSLGVDIYTVKDGCISPETNDIMGQMMLALRYGNAQKSSSDTGMRVKDTAQKLVAGGKFMGGKAPYGYILENSGKLSNHGRLLKKLVICPYEAEIVKYIYHLSLNMEFGSLKIAKILNANEKYRQLAPKRQNWQGGTITSILTNPVYSGRVAYKRRERINGVYRTLKSKDRIIANEPNETIRIIDDATWNRVQEKRALRAGRYTKKLEDQNVTVISRNDGMLSLIDILYCGYCSCKMVNGSKYNYWTIKSTGERRKSKTPIYKCNQQWQGIPHDTSNQFRADKVDLIVFKVLSGYIENLQENEDIFRLINQKRNEEQRKKESELAKEQTKLQKIRSEIDFMNSKIPQAMTGSYDMNLKKLMSVIEEHEKREQVQENKVNEIRSEIEHLSVSMNEWAKMHQKLPTWKEVFLNAEVSQKRVLVNKLIERIDIRKDSINIRFKIDLNGLFQSRMSMGFEVPKQRI

SEQ ID NO: 5602 - protein, 500 aa, unidentified
  source 1..500: note = uncultivated organism
MRYAAFYGRYSCERQNEQSIEGQLRICQQYAEQNELKIVETYIDRATTGTNDNRPAFQKMLADCEKPVLWDILLVYAIDRFGRNSIEIAVNKQKLKKNKKTLISATQRTSENIDGTKNLDGILLENMYIGLAEYYSAELSQKIRRGLHENREKGLYSGGFIPFGYKVKDRKVYIDEDKAEIVRFIFRQYAAGFTVKNIVYDLNEKGLTKNGKPFALTTVYDILRLEKYVGICRYSDGIYTNIYPPILPMDLFNEVQMILAHNKKGSSSGKADFLLKGKLICGLCGANLQGESGTSKSGKIKYYYKCGKRKKFNSCKKSALPKEKFEILVINAIHRLLDDASNIEFLAENIMNANKTRLNNQSVLNTLLREREEIQKSLSNIMKAVEQGLINDTMKKRMDELEQQLKNLEEKIALEQLNQQKRLSYENIISFLQQGILQKPKFLILTLIQKIVVFEDKINIFFNYTNENNPDDSSRQDYLLPKCSTCYGMVEINGLEPSTS

SEQ ID NO: 5603 - protein, 518 aa, unidentified
  source 1..518: note = uncultivated organism
MAAAVKLIPPKAVQPDILRVAAYCRVSSDSADQLHSYAAQIKAYTEKINKHDGWELVDVYADEGLTGTKMDKREDFNRLLADCRKGKIDRILVKSISRFARNTRDCLASLRELSRMGVTVYFEKENIDTGTLTTELMVSVSGSLAQQESTSISQNQRISYQRRMERGQFITCKAPFGYRLTDGKNLETVPEEAVQVRWMFESYLSGHSLDWIAEQMTQKGVPTTDGKPFWQHTTVLYVLTNEKYIGDTLCQKTFASGFPFIKQRNHGERDQYYIENTHSAIVSKEMFEKTQELLRRKSSRKTTVRHPYPLTLKVRCGKCGTPFVRREGKSGLVVWSCRKHDKKASDCPVGRIPETELCAAFIRMYNKLKLNDSIVLKPVLRQLEDLNTALQKNNPAMLEINKAIAQATEQSYNISKLQASGLLDADACAAKFSAVNAQLTQLRAERRRLLKNDDIEDAMDTLRQTADAVRHGPERLDTFDEALFHELVEQIIAESQTRIRFRLYGGMELAEQLREVRR

SEQ ID NO: 5604 - protein, 583 aa, unidentified
  source 1..583: note = uncultivated organism
MSRTGPAGGRPNGAANSRCAIYTRKSTEEGLEQDFNSLDAQREACEAYLRSQKSAGWTALTDLYDDGGISGGTLERPALQRMLADIQAGRVDTVVVYKVDRLTRSLSDFAKIVDAFDAKGVSFVSVTQAFNTTTSMGRLTLNMLLSFAQFEREVTGERIRDKIAASKQRGMWMGGLAPLGYDVQDRRLVVNQAEADTVRHIFRRYTILNSVRALKEELEQDGVVSKARLDRFGRETGGKPLARGALYLMLQNRIYRGEIVHRDNCYPGLHQAIIDEALWHQVQAALVENRVERVTRSSATTTSLLAGLVYDDAGERMSPTHANKKGTRYRYYVSQSLIRRGRAKASGAACRVPAADLETIVESRVCALLRNEAAVFDAAGAGAADIAMRKALIEQAADLATRWPALAPAEKRAILHILVARIDVRRETVDVTLRPTTLPEIVNSDLDFKRLSASASAGGPTQVLSVSAKVKRAGMEMKLLIQGETEAARREPDRSLMRLLAQARRFNDLVMSSKGATITELAAKVGVSRSYFTRIFRLGFLAPEITKTIVQGRQPPELTANKLIRAGKLPSAWSDQRRHLGLD

SEQ ID NO: 5605 - protein, 505 aa, unidentified
  source 1..505: note = uncultivated organism
MLHAALYLRVSSAKQEEGSSLETQEAGCRAYAAERGYTIDESHVYQDIFTGIELWERPQLTRLREAIRRQQIAVVICYAIDRMARDPVHLGVVLSEADHKDVRVEFVTEVIDDSPEGQLIRFVRGYAAKVEHEKIRERSIRGKRARVLSGKLVGGAPELYGYHMDRERGIRTINESEALVVRRIYHDYVIDCASMNEIARRLNADDVPSPTAGKREYRSGRIPRWNQQSVRYILLHEAYIGESYAWKWRTTGKTRVVELRPRHEWIALPEGTTPPIVPKGWWDEARRKLETNRGEHARNRQRPALLRGLIFCAVCGHRMWVDAYHQRLYYRCPSKTVTGTRCGSVIVQAKLVEDAAWSHVRDRILDPGLIERDLAATGADVSDTLAEESQAISRRLSQIVRGQERLLARYSDAETIPWELVEREINRAEDEKTSLRAQLADLEARRSTRDASQRQQLTIADWCTRVARNLDSLTFDERRQVLEILALRVMANGANYTFTLDPQVF

SEQ ID NO: 5606 - protein, 505 aa, unidentified
  source 1..505: note = uncultivated organism
MEKYDAIYGRQSVDKVDSISIESQIEFCQYETRGGVYKVFQDKGFSGKNTDRPDFQRMMDCIRGGEVSRVIVYKLDRISRSILDFANMMEEFQKYGVEFVSCNEKFDTSTPMGRAMLNICIVFAQLERETIQMRVTDAYLSRSRKGFYMGGPIPMGFKLEPYMLDGKKTSRYVVDSGPAEIIKLIYSMYAQPHTSYGDIVRYMEANGIRNPVSKDGTWGRTQLGDTIKNPIYVQADLELYRFFKNQGTEIHNSPEDFIGTNGCYLYEDKSAGNKARVLNGQHLVLAPHEGIVPSDVWIAARVKCLNNKSVSKPLKAHNTWLAGKIKCGKCGHALVVRRGNKGRVRYLRCVHRIGAHGCVGAGKLFADVVETNMLQRMKDHVEQYNVTSQPANWQQNPIVHELNIKLEQIAAEINSLMDKVSSANSILMEYINKRVSELDAQSKTYRQQLIELSATMSTPRHSMIELAERLNRWDELDYDDKRGVVDELVEKVYVTAQTVDIQWRY

SEQ ID NO: 5607 - protein, 580 aa, unidentified
  source 1..580: note = uncultivated organism
MLFEIDIPNMAALFVRKELIIMTKQSHYNVGIYVRLSQEDERAGESISIENQKKMLTEYVSQQPDWSLVEICEDDGYSGTDFNRPGVQKLLADAKAGSINLILVKDLSRFGRNYIEVGQYVDYIFPSFNIRFIALSDNVDTLERNSTAMDMMPIMNLFNEWHAANTSKKIRAVMVSNAKQGKYHAPVAPFGYLVGETEDRLPVIDETNAPYVRMMYKMRSEGASSPQIAKALNAQGVITPSDYTYQRLGKPNPYISNHLWNAAMVRDILENPIYKGCVVNQKYTTISYKNHQRYIRDSDEWIVIEDAFEPIIDKELWDKVQEVNKSCSHGKVTKSGVILPLGGLMYCADCGAKLKNNTTFHESKKRGKYKLVTYICNTYANHGKEVCSSHSILQRIIEGLVLEDIRARAKRVIEDEDGERQRYLAIKANERKQQTEDESRLLKQAESRLAELDTIISKTYEERMLGKLPEDLSAKMLEKYTAEQKALTAQAEQYRKARAQEQQDEQDVEKFIQRLKKWSDAPCLTRELCLDLIEFIVVHARPEDRNAPRKVDIYYKFISKPLAGSRNLLLPQNSVEIHQQ

SEQ ID NO: 5608 - protein, 586 aa, unidentified
  source 1..586: note = uncultivated organism
MATDKKNTNSDPSLPVYIIYARKSKFTGKGESIQNQIDCCKNKILQMAALSNTTLSEEQILIFQDEGFSGGNTDRPAFQEMMTLCRSKTQNIKAIVCYKLDRFSRSISDFSAIFNELNDKLGIEFASSQDNFDTTTPTGKAFIMLVTVFAEFERNILAERVRDNKEGLAKTGRWLGGQTPLGYKSVRKSYWHDDGLNRERTLCALETIPEEKELVQRIFHNYLKYQSLTRIQTDLRLSGIKSRNDKYFSSVAIRAILTNPVYMSADKDAWNYFEQHNCPLYSSLESYNGQHGIMAYNKTIEDTTRHSRNYLRDIDEWIVAIGEHEPFVTGKDWVTVQNLLQQNASKSFRTSTSSCGLLSGILVCGNCGAYMRPKAYRGINSDGTRKFGYLCETKDKSRRHECDMKNVPGNELDKLVCDKVKENAIHDLKLFQQQLSSGVGNPTPAAQSIQSKLESSKKQYNQVEKKISNLVTKLSEMEGAATKYIVNQINELDKEKQHLESEIDCQEKLLQQSLSPEIELEKICKRLTDFAYLFDTMTFEEKRRALRSLVNTIVWDGSEAHIYYTGTIPSDSSSYIKKEPLQQGCQ

SEQ ID NO: 5609 - protein, 519 aa, unidentified
  source 1..519: note = uncultivated organism
MQITEITAVKQKSDKPIRLAAYCRVSSDSEDQLHSFAAQIRYYSEYERKHPEYTLVDIYADEGLTGTDMKKRDELNRLIRDCKKGKIDRIIVKSVSRFARNTEELLTTLRLLKSIGVSVYFEEQGIDTDKLNMEMIVTFPGMAAQQESVSISGNMRWSYQKRMESGDFNCCSPAYGYSLIDGQLVPKEDEMKVVCRIFSLYLQGVGTQNIANLLNEEGIPRRYSQKKWYASTIKYILTNERYMGDALLQKSFTTETLPFRKVRNKGQLPMYYVENSNPAIVGRDAYKAAQDLMQTRKSNKGCKRKPAPLTGKLRCPECGRVFRRQLTNGIVYWLCCGKSAGATDCQYRRVRQDAVYDTFMTMADKLKDHREELIGTLIRQIETMRDKTSGIQDKVKQIDKEIADLAAQNLVITRLHTSKVLPAAEYTMQTAEIGNKITALRVERKKKLAEDEDDAWLQSLIELNDILEESELTAGFNEELFEQIVESITVDNYTRLTFHLLGGIELTEQINEKGWCRSA

SEQ ID NO: 5610 - protein, 541 aa, unidentified
  source 1..541: note = uncultivated organism
MANVRCAIYVRKSSEHGLDQEFNSLDNQEQAAKAYIMSQTFQGWEYIKTYSDAAISGGTMVRPALQEMLTDIRSGRIDCVLVYKIDRLSRSIFDFKSMMKEFDKHNCNLVSITQSFDTNSAMGKLTLNMLLSFAEFEREVAGERIRDKIRATKSKGMWVGGKPPMGYDIKFHKLVPNESEIPIVRKIFETYLESSSLSDCRLRLIEQGIYGKKWITEKGKTIGGNIMGVSILQRFLTNPIFLGKLPNKSSGDIFEGEHPEILDIELFNNVQEKLKNNNNRGDAVCKRAPSLLNNKIQTTSGTVFKNSSGRKGIKQYKYYRAGKHSIPMGHIDKIVSDTVRQFLDSDMNFLPSEKRLMFKQIKYTEAIINPMIDKIIYQDHKITIFINSDDLKYLDIFTDKNYMNAFNNQMENCYLTDDEKYIVIETEISIASTSSIIYKHQCGEKLIMTKSENNNTLVRALAYAWKYKREIENGMSVRKLATKMGRDHRTVYKYLNLCYMSPKIINTIMSGNAPATINLQTLFDIASKYEKFSEQEIEFYK

SEQ ID NO: 5611 - protein, 536 aa, unidentified
  source 1..536: note = uncultivated organism
MEKNTDKEKPIIKCAIYTRVSTSEGLEQEFTSLDNQRESAESYIQSQKSEGWVILPERYDDGGFTGANTDRPALQKLIEDIKARRLNCVIVYKVDRLSRSLLDFSQLLEFFDQNSVTFVSVTQHFNTNTSMGRLTLNILLSFAQFEREIISERTRDKMGAARKKGKWIGGCVPLGYNLDKEKHKLFINPEEANIVRELFDLYLKEHSLLEVAKIANSKGYKTKVRKLADGKQGGGVKFSSTSIEKILKNAYYTGNIKYQNVLYPGEHERILSDEIFIKVQDAMHNNSAKPKTRAPIGKNLGLLSKLLRCKACNSSMYLTHSVKWGKIRYAHYVCLNAQKRGYQECPTRLINAGLTESKVMEFLRRLSNDQRLAPEAWGSATLTQKRLTLIDLVKEIRYDGGTSILEIVLNSTQKSHAFNVTKAELKYRPVTPSERLIKSEPQLRQNLLLAHQIQQLIDNNKAKDIKEVSGWLNLSQQRVNQIVSLLFLSPRIQEAIILQNEPCFFEIPEYKLRNITDELDWDKQYAMWQKLTQKTT

SEQ ID NO: 5612 - protein, 515 aa, unidentified
  source 1..515: note = uncultivated organism
MNKNKQLSGNGQTPRVAFYTRISTDEDHQKYSLGAQSERLEAFCKAQFGDQWRLHKIYRDTVSGTHMNRPGLEEMLYDATAQSFDVLLVFRVDRLSRKVRELAQMVDELTKFGVTLKSITEPFDTANAAGKMMLQMLGVFAEFEHATIVERTKVGMEKKAKGGQFVGGNVPYGFTLDPEKGLLISEEEALIVRKMFQMYAFGREGVHTICHKMNEAGHRKRSGEKWDKRVILHMIKNPTYVGKIRWREVVYEGNHDAIVSEILFDKAQALLKDRVESLSGRRFENGDERLLSGIIRCARCKGHMVGVTTHKKERRYPYYLCNKRWNTHDCDQDYVRANLLESAIIQDVKTMFRDEQFIARVWKEANKLVGKEKPALEKEIGRIEDQSARIKARIDRYFEAFETGSMKPDLCNQKVQDLKAQLQELDAGKRELEARRERLELPSVDREMLSRLLDDFEETIEKGTNQKKKHLLRQVVKKVLIHDRRTVEVWYGLPNQNSVSTPGHLAPWAGLEPAT

SEQ ID NO: 5613 - protein, 536 aa, unidentified
  source 1..536: note = uncultivated organism
MKQAKAALYARVSDPHQEDNTSLDGQLKACREFATRQGWTIVTEVREIMSGAFVLARPEFNALLKLAGKGKIDVIVVDIPDRFGRGDAVAKLELLAETNDVRIVYANRRFDDSTIEGFVQKSADALVSGIERIKIAERTANGRRSRAREGRVIASSLRPYGYKIVSEYDDRGRKVNCVFEIVPDEAEVVRQMFHWFVYEYLSVYAIAKRLTKMRIPTLTDKDGRKRAKKVRGPCEWSRSTVNKMLRNETYAGVWYYGKREVTLHDGTTVRQVSQKREKDDPNCIAVSVPNIVERGIWEMAQARFAENKRRGAFKPTKHQYLLRSIVFCIRCGSRMTGWTNTYGIGYYKCRRNYPSYYERRCTCRSPRKDKIEPLVWDYICEVMLDEDELFRQMQRKRQEARKTQKVFVDSIAALDIVDKKDHHRLNSLLDLYLEGGISKDAYLQKKRSIERALEEREHERADLKARLSHAGALSESDERELRKLRNKIVQGLEQVDFDAKRQLLEMLRVRCVWNDETRELTVSGIFGGDKILSTSS

SEQ ID NO: 5614 - protein, 552 aa, unidentified
  source 1..552: note = uncultivated organism
MKLATPKAQRCAIYTRVSTDQGLEQEFNSLHAQREAAQAYVKSQAHEGWKLVRDHYDDGGFSGGSMERPALQKLLADIKERRIDVVVVYKVDRLTRSLTDFAKLVELFDEHGVSFVSVTQSFNTTTSMGRLTLNVLLSFAQFEREVTGERIRDKIAASKKKGIWVGGVVPLGYLVRDKKLLVNQEEARTVRMIFERYLALGSLPALQRELRIQGIVTRRRTLSSGKIIGGVHLTNGPLAYMLRNRLYLGEINHRDQSYPGEHQPIIDLRLFDQVQVQLDENLRRRRLKNERSQALLLGKLYDDRGNRMTPSYAIKKGVRYRYYVSCVLAQGRKEEAGSISRIAASEIETIVMDAVATLIPASEEPAESDRHGPATSEDRPLPNTPARIEGRPEQPADKVSVERYVDRIIVGIRSIEVRFVEGAQAAAQCSSITIPWQPVPFRRKRGLIQPVDGARPIRAEAQGRLLAAIARGRSWLDEILSDQAARLELIAAREGLPERSARSILSLAFLAPDIVKAAVTGTLPRGFSVSRLIDLPANWAEQRRGLGLSARS

SEQ ID NO: 5615 - protein, 528 aa, unidentified
  source 1..528: note = uncultivated organism
MPAKNITVIPATIDPHTRIPKVATTFRKVAGYARVSTDSEEQLTSYEAQVDYYTRYIHSRPDWQFVDVYTDEGISATNTKRREGFNRMVQDALDGKIDLIVTKSVSRFARNTVDSLTTVRKLKDAGVEVYFEKENIWTLDSKGELLITIMSSLAQEESRSISENVTWGQRKRFADGKVSIPYGHFLGYRKGADGLPEVVPEEAEIVRSIYRMYMEGKSSNAIATYLTKQNIPSPAGKPSWQRCTVESILRNEKYKGAALLQKKFTVDFLQKKMKVNEGEVPQYYVEHSHEAIIAPAEWERVQAELARRKSSTKRTISSSPFSCKIICGDCGETFTPKVWHSTSKYRRTIWRCRAKYEKGEHCTTPHIYESDLKQHFITALSQLLTDRTALLEDGRLIQQDLLNFDAIDAECNAIQQELDVVTGMIQQMVKENASQATNQIDYTNRYNALVDRYENLQLRYDSLQAQRQRRQLQAAAMDDCLTALEEVDLLQIQFSDVLWNTVVDHVTVCKDKQLVFHFKNSADISVQM

SEQ ID NO: 5616 - protein, 520 aa, unidentified
  source 1..520: note = uncultivated organism
MSTQPKSTGPKNRCAIYTRKSCEEGLDLEFNSLHAQRESAEAFIASQQHEGWECLPDRYDDGGFSGGSLERPALNRLLEDIKTGRIDCVVVYKVDRLSRSLLDFSRIMETFDKHGVSFVSVTQQFNTTHSMGRLTLNILLSFAQFEREIIGERIRDKIAAQRRKGKWAGGVPILGYDVDRSNASPKLVINAEEAVQVRRIFSLYQELGSLLPVVNEVNKRGWQNKVWKTKKGLTRGGKAFDKCSIYSLLTNPLYAGLIRHKDLIHKGEHESLIEPEVFEAVQKQLKHNGRGQGNHLINKHGALLKGLMHCTACDRAMVHTFTRKDEKVYRYYTCTNVIKNGRGKCPSPNLPAGEIEQAVIQQIRAIGADVEIQNQVAAQLKASQSKQLDELQTNRRQLERQLSRDHAEIGKLAVLYDPTGATSARIADLHVRITKCESDLSRIVASLTELERRATEKGEFAEAVLDFESIWESLNSREKSRLIRLMVSRIEFNAKDTSIAVTFYPDALRSLKVKRKDDAA

SEQ ID NO: 5617 - protein, 544 aa, unidentified
  source 1..544: note = uncultivated organism
MPTVTQINAKDRMDLGFVRGMAVPERKPAKPKPVTPATMSAAPKIRKISAKAPVVKPKLKVAAYCRVSTFQESQEGSIYAQRRHYESYIKANDEWELAGIYFEQGLSATKTESRPELQRMLADCRAGKINLILTKSISRFSRNTSDCIAMVRELKALGVTIRFEKENIDTGTMESEFMLSLLSCMAESESHSISQNGKWAIRKRFEAGTFKQAIAPYGYRKEGSDLVIIPEEAAVVREIFDSILSGHGISAIADDLNERGIPGPKGTPWLASTVRDITRNPAYIGDQLYQKNYVDDNFQQKRNKGELDQYYNEGHHEAIVDRETFELAERNIRQRGEEKGTRAGGKQTRYAFSGKLICARCGATLKRNSMKYYAIYTCPNHCGCEPEENIRNAFMTCLNKLAYSQKQHPEKRILDTYIGEIEEAEKREIMERLQEIDAALQENQLKADVLTAVALVNHFTPEEHAKKMELLKENDTLRREKVMLGTCATNTVKAERLRAFINHWDGSKFPDEVFTELVENAVVDSGYSVTFHFTCGLELKEGLS

SEQ ID NO: 5618 - protein, 579 aa, unidentified
  source 1..579: note = uncultivated organism
MQKLNDRLYRAAIYLRLSQEDGDISVSDKSESNSISTQRDLIQAYLQKQPDITQVAEFCDDGYTGTNFNRPGFEDMMSAVREKRIDCIVVKDLSRFGRDYIESGKYIQKIFPMLGIRFVAVNDGYDSADTGNQSNDFVLPFKNLINDSYCRDISIKSRTNLEVKRRNGEFVNNFAVYGYMRSPDDKHKLIIDEEAAKTVRNIFNWKQDGWNAQQIANHLNKLHVPSPLEYKKKCGHNYRTSFKTKTTAQWSAVAVLRILKNPVYIGVLEQGKTTTPNYKVKMRVVKEESKWARVENAHEAIITPTQFELVQLCLGMDTCRAEGNEEIYPFSGMIYCEDCQSPMVHRAATSNGKKYHYYVCSGNKRDKNSCTTHNIKCELVEEVILATVQAHINMAIDIDNAMREMETLDWERREVRKIGAQIEALEAEIEKYTTLKMSLYEDLKQALISKEEYFSFKEDYDVRIDSIKVQINRLVSQRNAVENGLTDTQGWFAQFRRYENIDKLTRNAIVNLIERVEINDQKEIHVRFRHADQFAAALDYLKMQKQRQSKRTIISIEEVGWNGKDIPQTAKTVAQSISY

SEQ ID NO: 5619 - protein, 598 aa, unidentified
  source 1..598: note = uncultivated organism
MGTKREEKISVGKESPPGKRRVETLPKETPMRNPRLGQEKGKNPQDGLPPGKNPEKEGSGLTAGLYVRVSTLNQVDRDSLSTQESRLRAYCQANGFQVHNVYRDAGVSAKDTNRPELEALMGDCRMGKIQAVAVTALDRITRSLRDFIKLMDFFEEHNVRFISISQNIDSKSPFGRFMRDLLVLIARLEREVDAERVSNDMHHRAFLGKWNGGIIPYGYTTFKRIFDEATAKGSPEEEARKLAGELAPEPKKLYIDPEEAEIVRKIFDTFVTTRSIRKTTHAINSLGLRTRKGSIWATSSVHRFLTNPTYLGKIWYGKRKTDLETGRLKKVGEEGWMIVDGQHEPIITEELFAEAQGIMDPASRKPTRAYRTYLLSGLLRCGRCGGSMHGYTFAKKTSGKAYSYYKCHNHGSKGPTACKGMTVPAKDIEAFVIETLTGISKDTVFLQDREEMLAALREEARPEAASENLERLKKEEKETGARIDTLINRLEAGLIDDLDFSRHYEKLKARLRESRLDQEKISSAGDLQRMACEALNASFEEISSFGKNWEFLDDEARASKISTIVKEIKVFEDKLEMQVFLDVNEVFRTATGSWPQPA

SEQ ID NO: 5620 - protein, 518 aa, unidentified
  source 1..518: note = uncultivated organism
MIITDITSEKKEKQIQRLAAYCRVSSDSEDQLHSFAAQVCYYANYEKQHPNVELVGIYADEGLSGTSLKNRTELQRLIQDCEHGKVDRVITKSVSRFARNTHDLLQTVRLLKSLGVTVLFEEQGIDTAKLNSEMFLTFPGMIAQQESESISGNMRWSYKKRMESGEFNTCKPAFGFELVNGELVVNKEEAKVIRRIFNYYLQGLGKQRIAELLNNEGVPTKYGDKKWYHTAIHYVLNNERYMGDALLQKKFTTETLPFKLVLNHGEKPQYYVEKSNPSIISKDIYDMAQRLQKDRLVQRNKRNNHLLTQTIFCPICNRSFRKIKTNGKHYWISSGIENTECNCIHFRVKETAVFETFAIMTLKLIDNREDIIETALKQFNLLQHLYSDNQDLIEKIDSEIAQLSVQNHVLTKLYNSGILNSADFSMKSSGVSNRITELRLSRRKILSENKNDELIEEICELNMILSNNVPQAEFDVELFRAIVKRIDVINNSQIKFKLLGDLELTEIINEKWRCKSRE

SEQ ID NO: 5621 - protein, 501 aa, unidentified
  source 1..501: note = uncultivated organism
MSKEYRKIAIYARQSIDKKDSISIETQIDLCQKNIESKQYDNEVIIYKDAGYSGKNTNRPDFQKMMQAVRDNEISMIVVYKLDRISRDLKDFTDMWDMFEEHKVEFCSINESFDTSTPTGKAMLSITMVFAQMERETIQMRVKDNYYARVAKDGRWAGGPAPYGFVNAKTKDNKPTLKVNPQEMEMVQYVFDEYANKPNISLGQICKALAEKGYKSKRANGAFDNITLARMLQNPIYVVADEQLYRYFKLKKIHFLNDEEAWDGSHSAHLVGKRTNYNYRKYTSLEEQSIYITNIEGVIDSRTFIRVLERLEQNEQIKKNNVMTNMKEFQGLLKCSKCGYAIKMYSKPYLSCYGARTLHTCDAEYHNLDFEQLRKDLGSQVQVFLNQVAMDMLRVNTLRMQQKEEIETLNKQMENLMELASMGGKSVKSIHEKMEKIQKQIDEKELENYMNYRFTDRLHIRYNLPIKYKRFTDEEKKSVCQYLINSIKLHENGDLEIDWKV

SEQ ID NO: 5622 - protein, 730 aa, unidentified
  source 1..730: note = uncultivated organism
MTRAAVYARVSTADQVEGTSLGVQKNRCEAEIARRGWTHVETFVDGGVSGSKATRPQLDRLLEAVRAGEVDAIVVSKLDRLGRSLAHLAPLFAELDELQVAFVSLSEDIDSSSISGRAMRALLGVFGEMEREVIAERGVSGQRAKALAGQWPGGTPPFGWRLEGTGRAATPVSDEREREVIRTSYEAMVRDGLSTGETTTLLNGLGMHKRTGGPWTHQHLRRQLEKRSLVGETWWGLPTRPHGAGHNTKLGRDGQPKFGAPIRLKLPDPPLTVQEHDALLTALRQRAYGAKSPDQIYPNSGAAAVCGGRLGGVYRRDRGLRQYRCTNSRWTADGAARCDCPRFDADWLDAQVWAAVSDALADPAWLTQLADEYLGMREDGPDAAPAEDLDRKIRELQRARTDRAVAALTAGVPAGVIAAAVEEIDGQLAALTVRQRAVEAWRADTEARESHADALVRLAAQAADRLPGMDLERQREVLQLLGVRVTLLDATARPALRIDGELPGGGLELAPAPEGHGGPDVRDPDGEVPRRPGPHRRRAGQGASGVPGARGRAGPRRRPLRRWPAGPPGGRRAGGPAPARRRPRPAAAARGDLPGRAGRTAGSSCPCRCPRSRRTRCATGPALRPAGHRRPGACRRRPARRARTPGGGRHAGTGTCRPARPGAGRRGAALPRGAGRRPRAARRRVVVRSAQPAAGRAGVRPCRPRTAPRRVPARRRGRPRPRRARSPGRR

SEQ ID NO: 5623 - protein, 557 aa, unidentified
  source 1..557: note = uncultivated organism
MTQDSGGARRTIRCAIYTRKSSEEGLDQDFNSLDAQYEACTAYIASQKAEGWKASPERYDDGGISGGTMERPGVQRLIADIEGGRIDMIVVYKIDRLTRSLSDFAQLVDRLDAANCSFVSDTQAFNTSTSMGRLTLNVLLSFAQFEREVTSERIRDKIAASKKKGMWMGGMVPMGFDVDPDPNRRSLVVNPAEAAHIAKIFALYDEHECLAAVAEKAEAAGVRSKCRQFKSMQTYGGNPLSRGQVHFILTNPIYAGRVRHKTQVYEGLHDAIIDPAFWDQIQEKLQAHAARPRVRNAATGLLSQPEARSPLAGKLFDETGDRLTPTHSKRSTASGAKRIRYYVSRRLLQGAKDDPSGWRLPALKLDRAVCSAIADHLAEAGHQLLTEPDPIALYAAQDHLRRAHTRLKAHDTDLMQAMAAKITVSARRLIIDLNRAGLATQLDVVPGALEADALRIETSFELRRRGVEVKIVTGQYEGSPDHTLINAIAKAHQWLAETRKGVSLAAIGRRYGWTDSPVRQRIRLAFLSPQITTAILEGRQPPELSLQNLLTRPIPLD

SEQ ID NO: 5624 - protein, 713 aa, unidentified
  source 1..713: note = uncultivated organism
MVKTNTDVIAIYSRKSKFTGKGESIGNQIELCRDYIRLNYGEDYAESAIVFEDEGFSGGNLERPDFKRMMKLAHQRKFKAIIVYRLDRISRNISDFAGLIQELDALDIAFVSIREQFDTNTPMGRAMMFIASVFSQLERETIAERIRDNMRELAKTGRWLGGMTPTGYTSESVTTVSVDGKQHKACKLKLLPEEAETVKLIFDLFLEHDSLTAVEAELLRRHITTRRGKEHTRFSIKGILQNPVYMIADETAYHYFKEREADLFADLSAFDGVRGIMAYNRTDQNKGKTTVYLPINEWIVSVGEHPGMIPSRTWIKVQESLDRNKSKGYRKPRSNVALLTGLLYCSCGNRMYPKQLKRTTEDGEPVYTYVCKLKERSQRSRCNQRNVSGNTLDLAIVEQIKQLAEDNSEFMKQLDRSKKFYTGSRDQYETQLSDLRGKQREVEKKITALVDSLVEMKGSAASAVRERIETLQSERESIAAQILEVEGLTEEQTLSDSEFDIMRQLLLAFRDAVDDMTLEQKRTAVRTLVRKVVWDGEYAHVVLFGAEDPFECPDLADRFAPEEKDNDLLKNEQNDDEMVESESCLGKILPPSAHKTRWGEDSIFDAAAGVGGQLHAPVGHIGVHALDQPDGADGNQIIGVVALGVVLFGDVGHQTEIVLDQRISGLGVALLPAAGGVVLFLEGEGLRKGASRRQPQHQQRAAHHQHQGSRQHL

SEQ ID NO: 5625 - protein, 508 aa, unidentified
  source 1..508: note = uncultivated organism
MTKVRCAIYTRKSSDEGLDQAFNSLDAQREACEAYIKSQSHAGWMALPTQYDDGGASGGNMDRAALQRLLEDVDAQRIDMIVVYKIDRLTRSLSDFAKLVDRLDAAEASFVSVTQQFNTSTSMGRLTLNMLLSFAQFEREVTAERIRDKIAASKKKGMWMGGLVPLGYDKSETGLRICEAEAVTVRTLFQAYLDLGCVRKLKAFADERGLLTKTRTLQSGDIIEGRPFTRGRLYHLLSNPIYIGKIAHKDALYDGLHDAIISDQVWEKVQALRSANATSRKSRKNASNAAPLVGKVFDADGNKLSSTHASKSGRRYRYYVSSPDHENNWRIPARELEHAVSSALAEDTNLRHLLERERDPDSEPGDLLSVVTRVQIGETHLMIEALLRPGASPITITSPYAMRRRGVESKIILGVNAEREMDKVMVRRILRADAWVDQIKSGRPISEIARDEQITPEYITHNIDLAYLSPKILTAILGGKQRAEISAYQLSKVRIPATWDEQDRLFLS

SEQ ID NO: 5626 - protein, 537 aa, unidentified
  source 1..537: note = uncultivated organism
MKQPNNNTAIYMRLSRDDENYGDSVSIETQRTILTQFARENGFHVVDEYVDDGWSGTNFERPSFQKMMEDIESGRVNCIITKDLSRFGREHVMMDYYLEYYFPEKKVRYIAVSDGEDTEKGLSDFVPFKNLFNEWFAKDTSRKIKTSMNAKFRAGEHTCAYAPIGYKKNPDIKNKLMIDEETRWIVEKIFGLALLGNGASKIMKLLIADKVPTPGYLNYKRFGTFANIYAGAPDEKALEWNVGQVKSILKDETYIGNSVHYRETKASFKSKRRVYRDKSEWLTVEGTHEPIISKSDFDNVQGQMASRRREKKDFTTQIFAGLLKCSGCGWAMNYATHKRKDGTYGYYKCGKYSMYGKGYCSNHHIHYDTLYAYVLSRLQYWSKQAHTDEEKLLKRLLNAGDRESNAVRKKQENDLKRAEKRKSELDALFTRLYEDWVAGRITEYNFNMLSAKYQDEQAQLDEQLNGLRAKLNETKQTSTDAEKWISYIRETAYPTELTGPLLNTLIEKIVVHDAVKLEDGTKEQEIEIYYRFIGKIE

SEQ ID NO: 5627 - protein, 625 aa, unidentified
  source 1..625: note = uncultivated organism
MTFPSPTRSGKAKPIARRGLQLVETFVEPGASATNDRRPEFQRMIEAGTSKPSPFDVVVVHSFSRFFHDHFELEFYVRKLAKNGVKLVSITQEMGDDPMHVMMRQIMALFDEYQSKENAKHVMRALKENARQGFWNGSLPPIGYRTVAAETRGAKVKKKLEIDPLHADTVRLIYRLALEGDGTTGQMGVKNIVSYLNSRRIFTRDGGRWGIGQVHRILTRRTYMGEHEFNKRTKTKELKPVSEIVTVPVPPIIDKETFDTVQALLKARNPKVIPSAVISGPTMFTGLIHCAKCGGAMTIRTGKGGRYRYYACSMKARQGPTACEGMAVPMEKLDDLVADHLEQQLLQPERLGTILSSVLDRRQEQSERRRDHIAELNKRSAESELRLKRLYDAIEAGVADIDDPALKDRIDGLKAIRDQAKADAERAQAMLDNSGSKAITPQMVRTFAKTARKRIRLEGGGYRRDHLRALAQRVEVADGEVRIMGSKSRLLQTLTGKSGVNSVPTQGLKWRAGRDSNPRKACTFAGFQDRSNQPLCHLPVPRAFSGGGRGCPVPTRTHGCPHRGQGTFLHSVQGNQRRMSAGLEKLVEKPRFARLESLEHVVDVEHVRRGICWQHDHGIVRLLPI

SEQ ID NO: 5628 - protein, 548 aa, unidentified
  source 1..548: note = uncultivated organism
MKKVRCAIYTRKSSEEGLEQAFNSLDAQREACAAYILSQTSEGWTELPQLYDDGGLSGGSLARPALQQLLADIAEGRIDIVVVYKVDRLTRSLLDFSKLVEAFDKAGVSFVSVTQSFNTTTSMGRLTLNMLLSFAQFEREVTAERIRDKIAASKAKGMWMGGVPPLGYEADGRSLKIVPEHAAIVRHIYASYLALGNVRLVEQQLTAAGAVSPVRHTNSQRVLGGKPFSRGQLYFMLKSPIYVGDIPHQEKSYPGLHEAIIERDTWTRVQSQLADQTQGRRHGVGGAGQNPLTGKLVDAAGRKLTVSHTCKGARRYRYYVGQRTAAGAHLRIPAPELDRAVAECIAQALDDPFELMAKAGLSAGPVGLSRLAGLADELATKLRQRDYAALRSLVTQVRFPEDRLCIECDASTLANQLKVERCEDAPSTVQLTSNAWLKRSGHVVRFVQPGGAVLATAPTPSLLKLLLKARRWWGDLRTGEVDITELARRDGVSRSYITRVVRLAFLAPAVVDAILAGHTLAAVDGMMLTSTDGVHPLWSKQVQRLLPA

SEQ ID NO: 5629 - protein, 542 aa, unidentified
  source 1..542: note = uncultivated organism
MPTVTQINVRDRMDLGFVRGMAVPEKRPIKPKPVTPAEASAAPKVRKISATDPVVKTKLKVAAYCRVSTLQESQEGSIYAQRRHYESYIKANDEWELAGIYFEQGLSATKTESRPELQRMLADCRAGKINLILTKSISRFSRNTSDCIAMVRGLTALGVTIRFEKENIDTGTMESEFMLSLLSCMAESESHSISANGKWAIRKRFETGTFKHSIAPYGYRKENGSLVIDGEQAAVVRDIFSMILSGYGFAAIADELNARGIPGPRGTPWLISTVADITKNPAYMGDGLYQKQSVDDNFKFQRNKGELDQFYHENHHEAIISRETFELAERNVKQRERTGKPRTQHALSGKLICGHCGKTMKRASRKGYHVYECPGCGAEPEENVKSAFITCMNKLAYSQTLSPKRRVLDVFISGLDEETRTVERLKEIDAELQENQLQADVLTAIALVNHFTPEEHAKKMELLKQNDALRREKVMLATCSTSTVKAERLKEFVTHWKSGAFPEDAFEELVESASVTPGESVVFRFTCGLELRESLKAEVCAA

SEQ ID NO: 5630 - protein, 609 aa, unidentified
  source 1..609: note = uncultivated organism
MNNKVEVIAPTSKTMCLKGNVKYKLIRTCAYCRVSTDNEDQKTSYDSQRIHYKNMIEENPDWEFVGIYSDEGITGTQTKKREQFNQMMSDALNGKIDLILAKSISRFARNTVDTLNCVRLLREHNVDVYFEKENIHTLGLSNELFLTLYSAFAQAESESISENVKAGVRMKMKRGELVGKYAPFGYLYDKEKDLIYPDESKKEIVTYIFEEYAKGVGFRTIALNLNSLGISSPSNLKWCHASVRRIITNEKYVGDLRTGKYYCDNVITHKRKVNYGEKEQYFTSNHHEPIISRELWDKCQEILTIRSKIIKPDGNRDKFSRKYAFSSKIFCGICGERFIRRSYKIRSNNKEVAYWICRSHRNKIDCSNLIHYKQEELEDIFVLAYNKLFQDSDKYIHSFMKKVNEVINQEQDNFNHKNIQNEISKLENKLSNLVDLQLDGSISKEILNQKNIEISNKIKEYEQQLKDTENIEITRKRKHEKIDKISNTLKRYKGLTRFNEEVFNSLVDKIIIGERLENGDEDFYKIKFILKTGELINETLPNGKLDIGTNFGKYGFTITKQELKEKEDKVSVYVLQRHSYIKTCNFPFIIHNPQLLITKKEETIVSSKV

SEQ ID NO: 5631 - protein, 531 aa, unidentified
  source 1..531: note = uncultivated organism
MAEKKLTDGSLALEQKKKRVITIEAAEMSQDIKLRVAAYARVSSASDDQLNSFAAQNKYYTSLISAKDNWSMVDIYADEGITGTSVEKREDFKRLLADCRRGKVDRVLVKSISRFSRNTKECLESIRELKSLGVSIYFEKENIDTATMSGEMMTALFASFAQAESESISGNMRWSYQKRMQSGAYVPSSVPYGYTMIDGKMEIDVERARIVCEIFADYLSGLGCDTIAKSLSQHPTAGVDRKWQRSTVSYILTNERYTGDSLWQKQYTTGALPFKRVRNHGQQPQYYAECTHPAIITKEVFQAAQELFQKRKEKYGHEQTETAILTRKLTCGTCGSSFRKKGNDHKVFWTCVTHDRDRQACTMTQIPETEIHMAFMRMYFKLKNQGQPILGNMLSSLQTIRNRRMLWSTDVIELNKKISELTSQNQLLTTLKQQGLVDSDIFISQSNSLAEQIRATKLAKERLLDTERDEAIDTTKAIMEVIDGGPALLSEFDEGIFDDLVERIIVDSCDCIRFCLKNGLELKEPIERTVR

SEQ ID NO: 5632 - protein, 534 aa, unidentified
  source 1..534: note = uncultivated organism
MTIKCAIYTRKSTEHGLEQEFNSLQNQEESCKAYIASQSFNGWQYYKTYSDAAISGGTMERPALKQMLDDMAHGLVNTVVVYKVDRLSRSILDFHNMMKYFEKYGANFVSITQSFDTSTSMGKLTLNMLLSFAQFEREVSSERVRDKIRASKAKGLWMGGAPRLGYDLINKKLVVNPTEAEQVRHLFEKYLELQSVNDLTEYAQQKGIYGKRWETAKRKMRGGNPISKMSMHRILRDKVYIGQIENKKEGTFAKGEHEPIISNDLFNRVQIALANNSNNKSSSTRAPNILTGKLFDHNGTKFINQMTSGKGKRKIHYYATKGFYLTAACVDEIVVKTMTQFLDSDMSNLPISLATVLKQIDVTNMNFAEKHNLIQSLVEKIVYSQEQLIYTLSTDTAKLQPFMTENYMNTNTEPMEYIIGDNSITITEKVFLRKYVNTVYDRGKNGVLNVTDNNHLILKAFATAWKYRELYERDGNVDNIIHSNHTSSRQFYRYLDIAYMNPDKINQILSGKLKINVNDLFQIARNNQLFWTYI

SEQ ID NO: 5633 - protein, 502 aa, unidentified
  source 1..502: note = uncultivated organism
MTLYDAIYTRQSVDRADSISVESQVEFCKKEVVEREFRVYTDKGYSGKNTDRPAFQRLMGDVEAGLIRRVIVYRLDRISRSVLDFANVVDIFQRHHVDFVSTMEKFDTGTPIGKAMLMIVMIFAQLERETIQQRIADAYASRSRRGFFMGGPAPFGFDLKETVIDGVHTKMFVPNPQEAAIVRQIFSLYADPQTSLGDVMRYLEQNNLHSRNGKLFSRSRLRDLVICPAYGRFDHRMYEFFRAQGTIISNPPGDFIGINGAYLYTGRDAGRKTVSLQGQTLVLAPHEGLIDAETWLKCRSKCMNNKSVARPVKAKATWLAGKIKCAYCGYSLIAKVAHRKVKVDKRYLLCNHKYNTGGCTFGSVDADAVEAIVFAEMQKKLADFKVLTKTEQDGCNLQAVQKTTRIEELDAEITSLLEKIASANETVLRYINDRIAALDAEKQALALQLSQLEDTRRENIGEISGYLNRWDTLQIRDKITVVDCLIDQIRVTETSLEIKWKI

SEQ ID NO: 5634 - protein, 524 aa, unidentified
  source 1..524: note = uncultivated organism
MKKIRCAIYTRKSSEEGLEQDFNSLDAQREACEAYIKSQIHEGWVLVEKQYNDGGFSGGNMERPAFQELLSDIENDEIDVVVVYKVDRLTRSLMDFSKIIDIFDKHETSFVSITQQFNTTTSMGRLTLNILLSFAQFEREVTGERIRDKFAASRKKGMFMHGIATIGYIKKDGILYEDKEHSYKIKTIFKKYIEFKSVAKLQNYLNESQIYTRTGKSFRKGNLHRILRNKVYIGKIEHKNEVYEGLHDGIIDEKIFNKVQKIMDENSVKAKNSIGSKHVSLLAGKIFDDKGNIMSPSHSRNRHGACYRYYISQAIIQNRAHEAGTISKIPAGEIEQFVCEKIKELILNKEQIQNYIKDKPIKKQNNILNFLELYTPDVVFIRTVLNKTTIYQDKIRILIDRDLLVQAIEAVTYGKLLNFKSTGDYFLDFSYDVKISSANQKGTKIVIGHNKVEYNLTLIQAITKGFYYFKLLQEGKMTKEQKSSSHIKRLMKLRLLPPEIIEAILNGTQDKTLTIKELYTMAVV

SEQ ID NO: 5635 - protein, 534 aa, unidentified
  source 1..534: note = uncultivated organism
MQGNLATRKVQVIPAAPRVQLMQSSITQTRILRVSAYARVSTDQEEQLTSYEAQVDYYTRLIKSKSEWEFVGVYTDKGITGTNRKKRDGFNRMIKDALDGKIDMIITKSVSRFARNTVDTLTTIRELKSHGIAVYFEEQNINTLDGKGELLITIMSSLAQEESRSISENVTWGMRKRFSDGKVSMAYKYFLGYEKGKDGLPSIVEEEAQIVRYIYRMFLEGKTGVGIAKALEDMGIPSPMGSKKWSNTTVMSILQNEKYRGSAILQKTYTVDFLDKKVKKNKGEVPQYYVEHSHEPIIDPVEFDHVQLELKRRRANRGRHSSKSVFSSRIECSDCGAYYGRKVWHSNSEYRTEAWQCNGKYKGEHRCTTPHLKEEELKARFVKAFNQIMTVREGAIEACNITIEAVCGLTQLDQKIQAATDEISVLVELSKQMIKENAQTAQNQAEYQSRHSEMITRYNAAEARLNELNRERNRRIQMRQEIEWFMEGIKGREELLTEFDCSLFVAVVEKMQVYSDRRVVVRFKNGMAIETWDE

SEQ ID NO: 5636 - protein, 562 aa, unidentified
  source 1..562: note = uncultivated organism
MEEEKGCRAAIYARKSKFTGKGESIENQAELCRQYLALHYGKEAKDAAVVYEDEGFSGKDLCRPKFQEMMRDAGRGLFSLVVVYRLDRISRDIGDFAKLIQELNGYGIAFVSLREQFETASPMGRAMMYIASVFSQLERETIAERIRDNMRELAKTGRWLGGTTPTGYASRARETVEEDGRKRREYGLEPVPKEADMVRLLFEIFLETGSLARTLERLKAAGYRTKNEKELGRCAVKGILENPVYAAADRETLEYFQKRGARIFPGTGAFDGRGGLMVYNRTIQKRGVSHKERPVEEWIVAAGRHSPLVSGRDWIKAQKLLAGNRMRKPKSGQGSGSLLAGLLYCQECGRPMRAKLSGKPGPDGSRRFFYVCTGKEKSEGCSMANLPGKKADAAVLKALGGLAAERELLSQALEEELGLCRREDRRKEAKERAEDFAGQAETLWECLARTSDQQLQDQIMERIRVLENRKREMEKSFLRQIPESGVKAGEEPGLLLDFGKLLEQESLQWKRKAAASLVDRALWDGKAIQVYLKGACDSGMQNATDYDILKQECGGTALQGES

SEQ ID NO: 5637 - protein, 505 aa, unidentified
  source 1..505: note = uncultivated organism
MERYLMYLRKSRMDTDYEEISITETLSRHRITLEKLCKSKRLHVDEVLEEVVSGESLAARPQMMRLLEMVSTGDYAGVVCMDIERLSRGSSMESGYIMQILQVNGCKIVTPGKTYDLQNESDEQFADMKFMFSRYELKTITKRLVRGRNQSASEGKFMGSMAPYGYRAYKLPGEKGNSLMIVPEEAKVVQMIFDMYGQQGMGYNAIAYKLNDMHIPARKGEWSQTSVSNILTNEVYLGKIRWRREPVKKVIKDGMLSKKRIQNDEYELYDGLHEPIITEEQWERVKAAQKQRNHNPVNADRQLKNPFAGILLCGKCGAVMKRMIPDKHRNPTPWYRCTTRGCDCKIIKCAVVESEIKTAMEEWLDAYMVQIKADQQPEVDPVTAALETIQGQIAGLQHQQESICEYLEKGVYTIDMFTKRNTSLSKEIKQLQLAEADLMRQQSEQSQKEQQVAQIIPTTQHILESYPLLEIEEKNRLWKLVLKRVTVYRSPDDKLEVNIYPNLPK

SEQ ID NO: 5638 - protein, 515 aa, unidentified
  source 1..515: note = uncultivated organism
MTKRTPTPAPTTDTKRCAIYTRKSTTMGLEQEFNSLDAQRESALAYIQRQPGWKLVDERYDDGGFTGANIDRPAFTRLLADVEAGKIDVIVVYKVDRLSRSLLDFAKMMERFTAAGVSFVSVTQNFSTADAMGRLTLNMLMSFAEFERSMIAERTRDKIAASRRKGKWTGGPVPFGYSVKDKKLLVNEVEAQVVREAFTLFLQHRQMATVARTLTERGLLPRGSSRPPKDGLRWTKDAIARVLRNPLYAGFMMYGDELYPGEHPRLIDESTFRHAERILAGTSRELRLTGTNPDYVLRGLLRCGLCGEAMCPGSTTKKNGKTYRFYRCSKRDKHGKEACPARPLPAGALEDFVAQRITAATADGSLAAHVDASLKARIAGKREAIEKIRADLPGRVASASVAASKYTEDLGKFEGRARELVEAKLRAETDRLVAAERQLAETERDRLDLEVADREAEWIGAALRDFARVWKLMTPENQGRLLRALVAVVRVKEETGVVEVELVNFAADAGSQEAA

SEQ ID NO: 5639 - protein, 529 aa, unidentified
  source 1..529: note = uncultivated organism
MTRAKNQPVPTSPTVRCAVYTRKSTDEGLEKEFNSLDAQRESSENYIKAQVEEGWACLPDRYDDGGFTGGNMERPALKRLLADVEAGKIDCIVVYKVDRLSRSLLDFAKMVETFDKHNVSFVSVTQLINTSTSMGRLMLNVLLSFAQFEREIISERTRDKIAAARRRGKWSGGMPLLGYDVDPRGSKLIVNEDEASRVRAIFELYLTHQSLIATIQELDQRGWVNKRWTTRKGHERGGRQFTKTSLHKLLTNVAYLGKLRYKTEIHDGEHDALVDVHVWQRVQALLGRNGRTGGAAVRNKFGALLKGILRCTACDCAMSPTHSTKNGNKRYRYYVCTGAQKRGWHTCPSKSIPAGELERFVVEQIKCVGQDPTLLHETIAQAQHQGRSHLAALETERTSLERELSRWNAEVRKLLEQIAPDDRSAPTGDRLADLQDRIAGAERRATEVREQVLSLSRTIIEEREVAQALAVFDPVWDSLTPREQARVVQLLVERVDYNGATGKVAITFHPSGIKTLAEELNARNSEDAA

SEQ ID NO: 5640 - protein, 521 aa, unidentified
  source 1..521: note = uncultivated organism
MKPTIKPIRCAIYTRKSTEEGLDKEFNTLDAQRESGEAFITSQKSQGWVTLATRYDDGGFSGGNTERPGLKRLMADVEAGAVDCIVVYKVDRLSRSLLDFVQLLQVFERQKVAFVSVTQQFNTTTSMGRLTLNILLSFAQFEREIIGERIRDKCAASRRKGKWTGGRPVLGYDVAPEGRRLLVNAAEAEQVRAIFACYLEQRSLSAVVRVMRARSWGNKAWTNRLGKLVGGRIMSKSQISHLLNNPIYLGKSVYKDEIHPGEHPAIIDEATFATVQRELQRQDRTGGAEHRVKHPSLLRGLLRCAPCGCGMTHSYRSTRGTGRAYRYYVCQSKNAGHSADCPTPGLPAAEIERVVLDEIKAIGSDPDLVAEVLAEARRQADADVATAKDALESAEADMATQHAALRQEVKARGGPDPARLAEANEHLRQAEQDATLARQRLQDAQAGVLDGRRAKTALRQFTPVFEALSPDDQARLLQNLLTSVSFDAREGRLTLAFRPSGIAALAAQEEPIGPASMEAKP

SEQ ID NO: 5641 - protein, 562 aa, unidentified
  source 1..562: note = uncultivated organism
MTTEPKTTKRIAIYTRKSNDENLGNNVTSLDSQKTCCRSYINIQQANGWQEYAESFDDAAESGKSLKRPAMQRLLKTIGEGKVDGVIVYKLDRLTRNSKDFHYLLELFEKHNVAFISATESIDTKSPQGRLMTAIMVQFAQYDRELDQERSKDFHLSRAKKGLWCGGLPPLGYDSKDKMLVLNEKESELVRRIFALYQQHQSAIRVAEELNRLGFRRKTYQTQKGKPYGGQPFDMDSVLRVLQRKVYIGFVCNERTRQEFPGQHTPIIEPAVFEQVQQLLASRNHRGGEVHYAANKYGFLLKGLIRCGECGNAITPYVRPKKDKTYLYYKCLGQNTGQGKKCAFTSIGARKLEEFIVEKLAAIGWDRPFLEKVLTKAQKLAKQSIGPLEAEQRQLQEQLNTLHSEIQGLLGMAKAGGDSQEAATELKRLEAAKVELTARIAQTEATVAYRRRAVYDVDAVQGVFKRFALFINRVPVETRIQIIRLMVEQVIVSNNRIEVRLHELPVGVLHKALDKQVVFRGDGFAKRRGAETTTNKNCHRSSVAEFVENWRGRRDLNPRSLP

SEQ ID NO: 5642 - protein, 537 aa, unidentified
  source 1..537: note = uncultivated organism
MKAPPVRPVRCAIYTRVSTEHGLNQEFNSLDAQYDAASAYIKSQAHAGWTLIRSRYDDGGYSGGSTDRPDLQRLLDDIRARKLDVIVVYKVDRLTRSLADFAKLVELFDAHCVSFVSVTQQFNTTASMGRLTLNVLLSFAQFEREVTSERIRDKIAASKRKGLWVGGPLPLGYQMKDGKIAIVENEAERIRLIFQRYLDLGGVNALVRDLRERNIRSKTRLLATGATRGGVLFGRGSLFYLLRNRFYVGEVKYKDEILPGEQPAIMDRTLFDAVQQKLTQQWTTRSTTRNASDHLLTGLLFDDAGHRMVPTHATKAGVRYRYYVSLPHLHGESKTASVGSVSRVPATDIEDTIVNSLSERLVVQKEKPNSIITRPDRKVILEQVARIDVHEDRLVIRLKPAGDEGTADAADDLLSIPWLKPPSRKSRQILIPHDMPKSEVRPTRIERRARLVNAIARGRRWLDEIVSGSVTDVQQIAARQKCSVRQVNMTISLAFLAPDLVRAGVEGRLPRGIGVERLRDAPAEWSRQFEVLGLNPQ

SEQ ID NO: 5643 - protein, 574 aa, unidentified
  source 1..574: note = uncultivated organism
MEEKRVIIYARKSKFKETSESCANQINMCKNKISYMNLDPSNEGRTTYTVVKEFSDEGFSGKSFDRPDMQKLIQMIEKNEVDVIFVYKLDRLSRSVKDIFNFIDFLQQHNVDIVSVKEREIDTTSATGKAFFAINMVFAQLERDLASERSKDNNLELAKTGQFMGSYVKYGHTAIKEQIPGLEEGRGKTKTRLEWNNTEAEVVKNVYAMYLEGNNSYMRISNFLNENGIAKKSEWNQPQKNDKWIETNIRNMLRDINYCANTVEAYNYFKKQGYEFLIDIEKFNGEKSLQLYDGKITILNVSPIVSAKDFIKAQKMKDSKRTTRNHVLPYESNILLGSGILICNECKKHLGNSVTKRKSKNGEKEYGYYHCYNKDCRQYMKMKHIKMDALDKNVLDRLKKFYNNKELIKKVLEADYNKRNQVSEAEEKIQKLIKKLENLDKLIENMNTAIANLSENDDEDVQVLITNYQSQQINAIKKKKEIKAELESLNVEHEQEEERVYDIQELLERVEDFAEVLDNATEENKKKIVHFLVKNIVVRSDTDFDVNLYFYEDLPDFKCSGNEDTPQGVRWKKV

SEQ ID NO: 5644 - protein, 512 aa, unidentified
  source 1..512: note = uncultivated organism
MTAAIYCRLSREDEEKQSESESIQNQKSMLIKYALDKGWDIYNIYCDEDYSGIDRERPAFRQLIADAEARQFDIVLVKTQSRFTRDMELVEKYIHGLFAEWGIRFVATVDNVDTDIKGNKKARQINGLVNEWYLEDLSENIRTVFDYKRRAGQYIGGFPLYGYRKDPSDKNKLAAVVRRIYALYLAGHGTQSIAAILNRDGVPNPTRHKQAMGYPYRNGAAHNDHGLWNRTTVSRILRDQMYTGDLVQGRTKKISYKSKKMASVPQRDWIIVPDSHEPVISRRTFERVQEMLHARTRSTGLGEVHPLAGKVHCMQCGSAMQRYSNGRAAGKYSYLRCKLYATHKPLCTNHNIRLDWLEEEVLRRLQCHINRYFDPQQADVCAMEDLAQSDRKRRTKEQLRLKMELEQRIKALHDLYLDKSRGILEEEQFLELNRVYLADKKELIHRLEALALEEKEEQKAPGGRTKLETYLQEITEASALTRELAALFIQDVQIGERDDKTGAQEIKIDWLI

SEQ ID NO: 5645 - protein, 573 aa, unidentified
  source 1..573: note = uncultivated organism
MNFHTLLGLHMARTSKYSLTPALSAATPYNWHAGLYIRLSREDGDKPESESVSSQKALLDRFVEENGEIFLQECYVDDGYSGTDFERPAFQKMMADAANKTINCIIVKDLSRLGRNYVEVGRYIEYVFPAFGIRFISVNDRIDSFDSPSSVNNVIVPFKNIMNDEYCRDISLKVRSALDVRRRQGRFIGSFAAYGYKKDENDRSKLVIDEDAADTVRKIFKDFLNGYSIKGIASLLNERGVPNPSAYKKEKGLNCNRGKNFENSSLWSDSTVRRILSNEVYIGNLVQKKNEIISYKIHTARAVEEKNRIRAEGTHEPIISKVDFDTAQSLLKRDTRTSPSGSRLSVFAGFIKCADCGRAMVKRTVRQPKKTYDYYACSTYRRMHSKSCTKHAIRADALEKAVLSALNKYISLAVDFDTLIKKINRERKGGGESERLNAALSAKKRQLEITNNLLLDLYPDYKSGILSKAQYLALKERYEKNTECARKEIENTEKQIAALESGVDGGNEFISTFKKYGGINVLTRDVMVELIENIYVREDGSIDIKLKCCDAFALANEYFENRGRGASELKRNL

SEQ ID NO: 5646 - protein, 645 aa, unidentified
  source 1..645: note = uncultivated organism
MLETVVAYCRLSKEDGDDDISTSITNQKKIIEDFAIAHNMFIKDFYIDDGQSGYTMNRPGFNRLKNDLNNDKIHTVIAKDLSRIGRHNAKVQLFLENILEAGKRVIAIGDNYDSYITQSHDMVGIQTWVNEKYVRDVSTKIRKAIDAMQKEGKYISSVPYGYYIDPLQKGVYHIDKTCAMYVKEMFDMYLSGLGVGAIATSFTQRNIPTSSMITKQRLERQGKTYRGHISTKWAPNVIMAILKNDFYVGTLTLGKTKKRAINGKKVKQPEEKHYVFEDAHEPIIDKQTFRLVQETMLERTENKFRGKRIQNRPNIFSGVLYCADCGERMTSTSNRANTRYVCKTYNLYGTTFCSSHGILESELKEALIYFLEHCRNNLGEAIKDLDKLVKESVNEQSGDILELLESDLQRVELEAKVLAEQKMREIMKNPLMADTIDEMYSQMLNDKYAQINSLKTQIQDQQANVLQEDTMMQDLNSAMDIFNNIINTQEITRRQVSTIVDKIIVHEDGGLDIYLKGNLHELCTNYIQIKNTNKGKILATTLDYIEKHQDQFSPTAAFEYVKIYHRIGYNNYIKIFNLLQGYFEPNVGYNKGYKLKVPFKKLKHDFDHHIIDYDSTWVRKNNVTIEMIIKICQWVQGLQYKKRLF

SEQ ID NO: 5647 - protein, 520 aa, unidentified
  source 1..520: note = uncultivated organism
MITKKNVQIIQPTIGLEAEKLIRVAAYCRVSTDSDDQADSFLAQVKYYNDFFKAQSNMVLVDIYADEGITGTCMNKRDEFKRLIKDCTLGRIDRVYVKSVSRFARNSLECLETIRKLKECGVSVVFENDNVDTKTMNSELILYVKSAFAQSEALAGSRRVSTAYRMKMENGTFFTYNAPFGYRLENQRLVIEPSEAETVKRIFSLYLAGNGINTIAAIMNREIVAGKTHWSSTMIKYLLTNEKYIGDSMMQKTYTPQVFPLRNIPNKGELDKYYAENTHAPIINKEDFETVQRILQSRGELIKTQATKRLLTKMLVCDECGWSYKHKVQSNVDYWICSRKGNAGFECSGPNSPEQAVFDAFIRVYNKLRYFEKEVLDSALSMMSDLRTRLITENDEIREIDIEVAKLCEQNNRYERYREKKIMDDVSYMEQTDRLKARLTQLRSRRLKLLSENENEQMIEQLKMLKEIIQDYPKAIVEFDETLFTSIVSKIKVCHDGTLIFELKGQLSLKERIEVSRKCA

SEQ ID NO: 5648 - protein, 604 aa, unidentified
  source 1..604: note = uncultivated organism
MEENKKIAGIYIRVSTEDQAREGFSLGEQEEKLKDLCKYKEYEVFKVYCDAGISAKDMEHRPKFQEMLEDIKKGKINYIVAYKLDRVTRSVRDLEELIGMLEKYNCYLVCDRDDVNTSTANGRFFVRMLTVLSQLEIEIVSERTKFGLNGAIKCGHLPGIVPLGYKKDGNKKTIIDETTKDVIKRVFDLYLQGKSYQQISNIFNEEKVLNKVWYDTHFEKIINNKIYMGDYVQYKRIHKKVQKEPITYMNVVDPIIPRYIWEECQLQKEKNQRTYTRDRVYTFFQKVKCPHCGNIMKCKGSGGKKKKYMYYNCEKCHENIREDYVEQKCLELILELVRFDNEYKKHFLPLFADKENAVKEDTIDKDIENLEKQKQRIKKAYMSGVVELKDFEEDLKVINEKLEILNAKKEEKIKLGKIKEFSLEKILVNRDTEKLLFSETKDNEFNIFEWNIKTKEEKQEFISRYIESITFVKDKKEKYGIKVVDLKMKSLYIEKLNNLKDIGACDIPLSLVINDKETLIPLSTPIERKNLDKYIEEMKKEIDIKLYDNLMYENKDDCKIVTIEMGSNEKPYRIVPILEENNIENIENRINLGILTAPVYTISN

SEQ ID NO: 5649 - protein, 549 aa, unidentified
  source 1..549: note = uncultivated organism
MRIAVYSRKSKWTGKGESVENQLIMCREYILNNIDGAKVENIEEYEDEGFSGKDTDRPQFQIMMKNMNKHHYDYLVCYKLDRLGRNLSDLVNLIEKLNKRETSFISIKEKFDTSTPIGRAMMFFSGVLAQMEREQIAERVRDNMLMLARAGRWLGGNTPLGFYSIEEEIISNNKKRSFHKLVKSEDEIKMANFIYEHFLENQSLSKLVTYFYQRDIKTKNRNSYQIMSIRAILTNPVYCAADENAINYFKQLGCVVCIEDHEVDSTKGLMSYNKTTSSKYRNQPNPHSEWIIAIGKHESIISGEQWIKVQEILEINKKKGDNYRKVQNPVSVLSGVLYCKCGSFMRPKNYPAHRVDKKGNRTFAYLCSNKEKSKGTKCSVCNVHGNTLDDLVCEEVLNYINPESSVYKGLEKIKAGLKKSRNTSNSEVMILEKNLKEKNDMIKKLISSLGKSANEEEAFFNYIREEINKLDNECKQIKNQVSILNEEENVKEYDEIQLQLIESQLKSFSTVFENLSVLEKREYLRVILEKVVWDGENAHIFMYGEHEES

SEQ ID NO: 5650 - protein, 511 aa, unidentified
  source 1..511: note = uncultivated organism
MPKVTVIPPTVQRDPDKHRVAVYCRVSTASACQRNSCLVQMTYYQNKFQNSGREILTEIYADEGISATESQNREDFQRMMHDCRIGQIDRIYTKSVSRFARNTKECLQYVRELKTLGVSVFFEKERIDTANMSDELLLTIMGGLAQEESISLSQNLRWSIRKRMKNGTYRSANPAYGYNYVDGKAVIHEREAKIIRHIFSWYLSGNGCHKIVGMLNEQRVPAPSGRANWSTPTLLYILKNVSYIGDSLFQKIYTTDTPPFKKIKNHGEREQYYVTNTHEKIVTPQTFRAVQTLLNTRRREIPEKQANPLRGKIVCGHCSHKWVPKPEGKKTVWICQTHIRQPKKCPQKSVSQEKIQTAFVNMFNKLCACRENIIPPLQHGLAELATRKTAENSRVADIRNEIAELYRQNHKLASLRAKGLLDYVKFQENSSGLLRKIGRLKSELSKILSDNENETAVRQLAVLDKLLCQYPDGITEFSPDLFAEIVEKITINSRSEFVFHLTGGLKLTFSI

SEQ ID NO: 5651 - protein, 593 aa, unidentified
  source 1..593: note = uncultivated organism
MFNDSAAIRCAIYTRKSTTNRLDAEINSLVTQREVCSAYITSQKYKSWVELPQRYDDGGQSGSDLDRPALATLMQDIEDGKIDAVVVYKVDRLTRSLIDFVRLIDLFEQRSITLVSISQAFDTSDSMGRMVLNILLTFSQFEREMIAERVRDSLRARKRHGKIHGGKPPFGYQVINDGLVVDQHEAEIVRFVFAEFIRTERYIAVQRSVEAQGYRSSVKPLRKGGTRGGGPISSTIVHSILQNPVYVGEIKGHDGNYLGIHEPIISKDIWNAAVSLAQARRKPEPHAKNTDHFLAGLMHDELGRPMYLDVQRKGGKVFTFYASVDAHWSRTHYLKAYRCNAARFEDLILAALGEFLNDRIRVRSALKKMGVHGDEVETLAAVGPEAAGRLGRTSRSVVGEIVQALVCEIELGRERVSIAVRSIELKRFLQWDDHSVFRSRPSDWVLSDAKFEFSIEVRTTSAEKWPTLNIAPRDNQKMTNVDDRLVALIHSARDAQRLVDKHRELSIPDLAKMRRMRPSQFARLIRVNYLAPDIVTSILDGTQPPNLTRMQLLRTNIPTDWDLQRQLLGFPRPMREPPQYKGEGMWPRKTNAS

SEQ ID NO: 5652 - protein, 549 aa, unidentified
  source 1..549: note = uncultivated organism
MVKAAIYTRISNEEKARSESNSLGTQKEICEHYIQVQREKGWQFSALYEDPGFSGKDMHRPGMQKLMGDIRAGKVDIVVVYKIDRISRSLRDFYQFWEILKNHNVAFVSATQSFDTSNSTGMLMLNMLLSFAQFERELAVERTSARMASRAEKGRWNGGWFPMGYDYDKEKKILMINPADAQTIKKIFEMIVEGYKLSEVKNKLNELGYRTKSRAVVRRGGEAKSVGAQRFDEDHVANIIHNPVYKGFVRYKDKIFPGVHKAIVGEKLWVKANKALDSRSVKIVVHKDDHVHLLKGLIKCGDCGLSMTPFPAGKKDKKGEPYLYYSCTANHPDGKDSKCTIRAIPARPLEQTLKKVLRNLGQNKNLLESVMDEANKESKSSIKPLERDKVKIEDTIAKITHQIKRIVEIFKQQDLVSQEIKDDYKNLLSERERKQIALEKLQIDINRLRGKSVDFEIIQRSLQHFDKVIELMSPIDQKELFQLLVKEIKIYPFHPDKESKLEKGWFSTRINTKWYKANLSLYEIPPQELNLPGESSENREIGSGTRIRT

SEQ ID NO: 5653 - protein, 542 aa, unidentified
  source 1..542: note = uncultivated organism
MNKKVYRTAIYARLSRDDGDKAESNSIISQKLFCREYIEQHSELELVDTFADDGQSGVSFDRPEFRRMEQAIRDGKIDCIVCRDLSRFSRNYIEAGRYLEKIFPQLNIRFIAINDSYDNANGNIQSDSFIVPFKNLINDTYCKDISVKIRSSLDVKRRKGEYVGAFTPYGYRKDENNRNQLVVDEYAGEIVRFIFTMYKDGISIGAIADRLNSMGVLSPMEYKRSQGSNFESVFKAHETALWSYLAVRRILTAQVYIGDLIQGKTGTPNYKVRKLMKKDPSEWIVVEDAHEPLISHSDFSAVQTMLARDRRACGDPENAGLFSGFLFCGDCGQSMVRKIVPSAKKKYVYYVCAASKTGGCSTHSISEAKLTKAVFHAIHDQIEIVLELEKALDYIDRLPSIDRKALTHEAQITKLEEEIERCQRLKLRLYEDLADGIIDKAEYSEFRESYTKAIAQKKEALSRVRREYKDTLANGITERNWVTLFREYENIDELNRRVLMALVDKIVIHENHVIEILYKYRDEYKHAKEYADSFDEERSAAM

SEQ ID NO: 5654 - protein, 511 aa, unidentified
  source 1..511: note = uncultivated organism
MPAAPVKRCAIYCRKSTTAGLEQDFNSLDAQRESCEQYIRSQAGAGWKLIPERYDDGGFSGASLDRPAFQRLMADVEAEKIDIILTYKVDRLSRSLLDFARVMARFNEKGVAFVSVTQNFDTSSAMGRLTLNILMSFSEFEREMIAERTKDKIAASRQKGKWTGGRLPHGYDTVDKRLVVNPLEAVVVRELFTHYLEHRSALATATELNARGRTTKQGQPWSKDAVLRVLRCALVAGYMPLGDHLHEGEHEAIIDRQTFARAQAMLDGNGGPHADHGRNPDYLLRGLLRCGCCGRAYTPASVRKGEKTYRYYRCTTRDDMGRSACPARPLPATAIEGFVIARIGEAAADPSLLADVTVRLGSRTAERRKALETERRELPRAIAKLSTEGKQLMDAVASAAPGSRPLLDGRLDEVGKRLGEHQARLSVVERELAAVAEAEAEAGWVARAIADFPRLWDVMTQANRLRLLRALVHEVVVDDPAGSVTVALADLGAEVRSRTGKNDGEGEEQSA

SEQ ID NO: 5655 - protein, 567 aa, unidentified
  source 1..567: note = uncultivated organism
MKDVFAVYSRKSKFTGKGESIDNQIEMCREYIRKSYGDTAVKNMLIYEDEGFSGKNINRPEFKKMMLAASQKRFNTIICYRLDRISRNIGDFAKLIEELNKLEISFISVKEQFDTSSPMGRAMMYIASVFSQLERETIAERIRDNMHELAKTGRWLGGTTPTGYASEEVRRAISDGKFVKYNKLRLILEEAELVTLIFHKYIQTGSLTKTEAFLLQNKYLSKNGRNFTRHSIRNILSNPVYMVADDRAYNYFIKNGANIYSDKSEFSGEYGIMAYNRTEQNTRYNMPSLNNENQFNKAENYTEQCKEASSNIKLRAKKISDWIVCVGMHEAIISSADWIRVQDMLSQNKAGQYRKPKSNISLLSGLIICGGCGSHMRPKTYHRLNPDGTKRFYYLCSLKERSKGSNCSMNNPDGNETDNTVCNILNEIDYDVKVCKDLLSKAYGSLLKEDTDEELLQLKRLLHNYNNEITVLVKSLVKAKDCAAEEYILKQIDYTHKKIKRFEDNIVELENKPIDTNENELDVLVEAEAILQHDLRSLSPLQKNEAIRHIISKIVWDGDKLHIYFIG

SEQ ID NO: 5656 - protein, 568 aa, unidentified
  source 1..568: note = uncultivated organism
MAKKTRTAHRIRQIEEAFARRIAIYIRRSTDEDNQPYSLEAQETKLRAFVESQPGDWQIVKIYSDDASGATTDREELQNMLRAARAGLFDTVLVYRVDRFSRRLRDLVGLLDDLADAGVAFRSATEPFDTSTPVGRMLVQMLGVFAEFEREVIIDRVIAGMERKATKGLWNGGPVPIGYVKDAKTNNIVVVETEAAVVRLIFDLYTKDRLGTRAIANALNDRGLRTKRGRVWSSAAVEVVLTNRLYIGEKSFRDITVIDAHPAIITQDQFSKAQTILTRRGEEIGQRAANPSDYTLTGKIACPQCGRKYIGTAANGRSNRYRYYTCWTRNRYGTKQGCGIHRFSADHLEEAIGQALIDFYTSGHDVIDQAVSEFLTAHGQATGKVHEELDATKRQLKEASIAIDRYLTAFERGTFDDQDPDVKARLVDLRKQAKQLRADKARLEFELDKPPTGPSPKELALLRGQITEIIRSGGHRARKALFEALIEDIEIQSDDSVIPRFRIPTTRDDEGLTLESALDQNQPDGAVRALPTMVGDTGIEPVTSSVSRKRAPAAPIALDLDCRGGDGI

SEQ ID NO: 5657 - protein, 524 aa, unidentified
  source 1..524: note = uncultivated organism
MDEKQLVDGATALAEKQSRVIKIEPAEQPQNMLLRVAAYTRVSSDSEDQLNSFAAQNRYYTELISGKAEWRMVDIYADEGITGTSVAKRDDFQRMMADCRRGLIDQILVKSISRFARNTKDCLQNIRELKELGVNVRFEREGIDTVNVSSELITAIYAAFAQKESESISGNMRWSYQRRMESGEFNTCKAPWGFRLDGRKLKICESEADIVQRIFREYLSGKNPQEIADDLNASCLTERVWNYKAVDYILQNERYAGNALLQKRYTPDMLSRQQKTNHGEREMYFVPESNDAIISPEIFERAQVLRQKRSLGKAPVHSEIISQIRCICGARMRFKNVNSKWYLCCTNHDAKGDCLITPIRETQIYESFCRLYYKLKHQSIPILEQMLTNLQMIRNRRMLWSPDIVALNKRISDLSSQNQTLAFLKQQGLVDPDIFIAKTNELTKQLRQVKLEKEKLMDAESDMTALQTRDLIDLLEGGPEFLDSFDTELFGELVEKIIIEGNDSVRFCLKNGLELQESIERTVR

SEQ ID NO: 5658 - protein, 506 aa, unidentified
  source 1..506: note = uncultivated organism
MAVALYARKSVERENSISCETQIEYCRAMIKPDERDEKVIEYIDNGFSGGNINRDGFQNMMREVKRGKINKIIVYRLDRISRSLSDFVNILNVLKEHNVKFISSQESFDTSSTYGEMILKILMVFAEFERQSIIERVTQAYAHRSEMGFYMGGRRPYGFKLDETVIHNIKTKMLCPIQSEIEHIKYIFDAYSVPNVTLRRLMDNLAENGIVPTDGSWSTGKLSTILKNPIYVKADNDIYEYFLKKNTNIISDISEFDGIHGVQIYGRTKHVADDWSDIKVVVMTHMGVVDSDVWIKCQRKLEKNKQIGNSISNKTSWLGGKTVCKSCGRTMRVTRGGKKKDGTQTRYFSCTGKSHNRVCGGMKNPIYAEELENTVDEMIYGKIKALNYYRRKKTNINSTQINNLKNRVSEINCEQDKIVGLLINDEIETDMIKLLNEKARKLSCEKGELLSEIDDLENQESEIISISELSDKWKTATYEEKKATANVLIHKIVIDQEGNAEVIWNI

SEQ ID NO: 5659 - protein, 1346 aa, unidentified
  source 1..1346: note = uncultivated organism
MKEERLRPHSGMILHSQIRFDDDLLNENEAQTDKEPLSDELSGSNDSPLIYSTHQTDIAKRLWHQTLWEPVNELEKSALSGSGQGYKVAAYCRVSSEVSVQIRSLENQIRHYTYKIRENPNSKFVGIYFDSNSSGTTMKNRLSLKRLIRHAKEGRVEMILTKNVSRLSRNTKELLEIVDELRTYGVGIYFEAEGIDTATEYNRFLLTTYAALAQGEAEETSNAVKWGYEKNVVKGKPKFMPMLGYEAIEENGIKILRIKEDEAEGVRKIFDWYINGMQLAGIAKRLMSEGIKTFTGSDFWRGNTVKNILTNPAYTGNYVGRRKQRDLLTKQVRKNCTDQLLIENTHPAIISLSDYQKVQELIELRKPPAKDTKHKKPSSLSGRMMCGRCGFTISNYPTRGVNYWKCQPSDLKACAFVSLKENLLREMMAKALLEKYRHESSDEGFLKRIRKELEWVNQNDHFEFYRLKYITEIEMVEKLLDESLETQDVTDVKQYLKYLGANQDLNGHQYLEDIKQAYLDFEKKVIEIEDDRKWRDEALLSLSQVKDEATFLETAGIDVLRAWIRRMKIYSKDDYIVTFIDDSSIEIGSCEAYGEVMLEKVQGSAETWDTADDAGHVSINQHIMSPHITALKPLNLEPMLIELGKEENPLMKNNYANVIKIEPGNNQFLMNDLSRRIHGFESRGIPKTIKADKKLRVAAYCRVSTDREEQEVSLKTQIAYYTYRILKNPKYEFAGIYADDGISGRSTENRPEFLRLIEACREGKVDLILTKSISRFSRNLVDCLSTTQELKVLPSPVFVEFEKENLCTKDEKSDLLISLFAGISQEESVNLGESIAWGRRRFAERGVVNPSRENYGYRHGTKEKWIIDEYEADIVRRIYDESLEGKSYFKIASGLTEDNIITRKGNTRWYGGSIKFILTNPIYAGDVLYQKQYTKDTLTTKVVNNEGELPQYLVENNHPAIIDRETWERVQLEIKRRDGLFKLGMESYPKAQEENIFLKKFKCSQCGALYSPHRRFEKGTGKGPGRSTRKGPVKDTDIGTVTLTETGPDKETVKYEVILWNCYDRISPYSSVKCDSTTITQKYMEFHFMKTLFDIKDNEAFYREVLAFKESLSLSPEELEAEAAINTELDSLNEALYEAVGEEARRRGQDIQLIDSLTESIIKCQEELKVFQARQNQIEKLEAEAKWLTEELAQMDDTILEDPAFLDVFKNNPFRRDIFLRLVESGDVDKAGRITYHFTLGITWTIDFKYDDLKYFMRAYRTEGRNQDKLSLLDGPEVKKLIKFCKEPRSFNEMLAFFNELKFISEAHFRKIILYPLLEREKMKRLYPDEPYRKGRQYYSGKRPVI

SEQ ID NO: 5660 - protein, 517 aa, unidentified
  source 1..517: note = uncultivated organism
MATVKVIPPRTKQLERLRVAAYCRVSSDSADQLHSYATQIRSYTEYISQQDSWELVDIYADEGLTGTRIEQRTEFQRMMADCRRGKIDRILVKSISRFSRNTKDCLTALRELAKLGVTVKFEKENIDTGTLTTELMVSVSGSLAQQESISISQNQRMSYQRRMAKGEFITCHAPYGYTLCGKELRIDPEQAKTVQWIFGKYLAGWSSRKIADELTRKGVPSGAGNEAWSYNSVQYILKNEKNVGDTLCQKTYSMDCFPFVRKENSGQREQYYVENSHPGIVSREDFARVQELFKRRAENKTRSYRPHLFSRKIICGKCGSIFTRRSTASGYTCWVCRNHDKKSSFCEMGRIKERCLYEAFQRMYQKLKCHEKEILEPAQKQLHDLDEALKKADPMQQKLYQEIAELMEKNYKLSKLYTSDLLDADAYIARSNEISAKLSKLQEQRKQNQRSQIIWEKMESLRKVAELIQDGPEMIEEIEEQFFNSLVEKIVAETPQRIRFCLPGGIELTEQLGGIGR

SEQ ID NO: 5661 - protein, 550 aa, unidentified
  source 1..550: note = uncultivated organism
MNEYKYKTAAYLRLSKGDGDLDSSSRGESNSISNQRLIIERFLQDNEEFELAETYVDDGYTGTNFDRPGVQKMLEDIDAGFIDCVIVKDLSRFGRERIETGMYILKEFESKGVRFIAINDNYDSLTAESGDKHLVMPIKAMTNDFYSQDISNKVKASQSVKREKGEFMGAQAPFGYVKDPDNTNHLLVDPEAANIVRVIFAKRISGMSANEIAEHLKTAGVMTPSCYKEAHDPSYRNTSTKLGRSNWSAKQVLTVLKNETYLGSVVQGKTRRVSYKVNRRVNIPEEEWCIVPNMHEPIVSESDFNIVKSLLKRDTMKASGRTGSYLFSGLLFCGDCGSPMLRRLRRNKGGSHVSYICKGYTNKEGCSSHKMPADDLEKLVTASINNMMLTLCEYSELAANIDKIAVSKDEAIMQNEELAILREEIDKVETYRMGLFEDVQQGLISSEMYDRLKKQYDERINSINSSIEERTKMIDKLYSKGLEAETFINSFRNNPRIEKLDRVLLATLIDRILVYDNGPIEIVYRYSDEIKTLNQIISTGRKEGDEHDQN

SEQ ID NO: 5662 - protein, 549 aa, unidentified
  source 1..549: note = uncultivated organism
MRKNTTPIVKTGAVIYTRVSSERQVENMSLGEQEKACMDYCSNPARNYDVKEMFVEKGESAKSADRTKLKEMLAYCSRNRKDIGYVIIYKVDRLSRNVEDFLKIKTFLKALGIEILSASEPIGGGSNTDRLMENILASFAQFDNEVRGERSKVGIHATAAEGGWVSPAPSGYRNARTESKQPTLAIVESQYKPITKFFNEFSSGKYTQEEAVALSRRCGVETNKGEKLARNSVIKMLRSITYAGYVQNKATDYRPVKGLHEGFITLETFNRIQAILDGKSRPIDVSRKSKGLYPLKRFLLCGICSKALTASSPKGKTKSYESYHCHRCTIKKNGARVSVSREQAHEQFRAQLERAEPAPWVPDLFRVIVLRRWSTEFQDVQKRRHEIDDKIRDIEKKKNTFLDLLADKSISVEAYQLKESQLSAEKSSLTLERDELKDVESDKERVVDNAVEFLRGLQQTWSDLPFEHKQKFQSALFLEPITVFTNGSFGTPHFSPIIQQTTDIENHVTKNKIDPSAEKSIMAGVEGFEPPNAGTKIRCLTTWRHPNGA

SEQ ID NO: 5663 - protein, 516 aa, unidentified
  source 1..516: note = uncultivated organism
MIQAAVQTERDTVRCAIYTRKSHEEGLDQDFNSLDAQREACEAYVTSQKHDGWAVLPNRYDDGGFSGGNTDRPALQRLLREIEAGQVDVVLCYKLDRLSRSLADFIRLMERFEKHNVSFVSVTQRFDTKSSMGRLTLNVLLSFAQFEREIIGERIRDKVAAAKRKGKYTGGPPILGYDVDREARRLLVNAEEADLVRLIFRRFLVLRSTLKVAQELNSQGYRTKSWTTKKGTAREGKPWHKMSVHRVLTNRKYVGEVTHRGHVYPGEHEAIVNRRTWERVQTLLATNRHSRAGETRRKTAALLKGVIRCGHCGRAMGTTFTTRRGRRYRYYLCNRAEKHGRDACPVKSVAASEVERVVVEQLRHVFRTPELVARTFRAVQAKADEQRCVHRRERHNLETRAAELKRAIRRLASTGGEGFLAEEIETLNKELTAVEQRLKSIDDTPGETKVDLPTEQEVHEALRNVDPLWDQLFPAEQERIVRLLVKEVVVNTDGLVLRLQTNGLRSLVAELEGAPA

SEQ ID NO: 5664 - protein, 503 aa, unidentified
  source 1..503: note = uncultivated organism
MNNRENAVYARQSFDKKDSISIDSQIEFCEYELKGGSYREYKDKGYSGKNTDRPDFQRLLRDIEAGEIAKVVVYKLDRISRSILDFSRLMELFQRYNVEFVSSTEKFDTSTPMGRAMLNICIVFAQLERESIQQRVTDAWHSRCQKGFKMGGKTPYGFRTEPYVMQGIKTKRLVQEPTEAAFVKLMYEMYVDPQMSLRDITRTVTAQGMKTYHGKPLSRVTLSIILRNPIYVMADLDIYEFFKSQGTEIVNGAEDFAGTNGCYYYQGKGNTDNKHRNLQGQTLVIAPHEGFIPSDIWLKCRKKLIASQTYQPARKAKNSWLAGKIKCGRCGYALMSAHSNGILYFRCSIHADNNSCPGCGTIKLHELEAFVYSEMVKKLKEFKTLTGRTKAAKANPNLTAKQLDFARVNGEIEKLVESLTTAGTTLVTYVNAKIEELDAQRQILTREIAALTLDTIPPAQMDAISNYLDNWGNVSFEDKQQVLDYLITRIRATNESVEIEWKI

SEQ ID NO: 5665 - protein, 552 aa, unidentified
  source 1..552: note = uncultivated organism
MARKSRKNVETGTINNVALYIRTALYIRLSVEDNKKRGQSIDNQRLVLEDYIAGKPEFVVYNSYIDNGMTGTNFHRPGFQQMLADIEAGHINCVIVKDLSRLGRNSIDTGYYIERYFREHKVRFIAITDQFDTADPSNLHGGIMLPLKNMINEAYALDIGRKIKAQARQAMTDGEYIGARAPYGYRKAPDNCHKLLIDEEAAAIVRQIFEWAYAKAGINDIARRLNERGVLSPGHYKLTTGEITHARLAGSGKWQTWTVSKILDDEVYTGDLVQGKTKVVDHQQVQADDDNLIVVRNTHEAIISREMFETVRAYRRQVCEESKAKEISAYTPNIFKGKVFCAHCGGSLHRQRSHRQKGADVYFFHCLTNSRTARGACEGVTINEKDMISTLAAILKQELAVVLGSYALMFQAEADQREKRSALQRSIAARKQEIERNRSFIRGLYENYVTGILDSEEYFTLKAEYDAKTAAASGEVLALENGLAIMDKQFAQYKALERDAKTLENDFALTAALVDRLIERIEISHDKEFHMVFRFQNEFERYGEVIKKCVNM

SEQ ID NO: 5666 - protein, 592 aa, unidentified
  source 1..592: note = uncultivated organism
MNKKRTAGYVRVSTSQQVETGTSIEDQIEKINKEAEFRDWQQPKMYIDEGISGKSSHRPALQQLLKDNAEGQFDVIIFSKLDRLARNLRDTLNIYHETEKHGTVMVCLDNPVISTDGPMGSVMLQIMGAFAQFERDLIRTRTVAGRMNKWKKGEAIMGKLPFGYSFNKATSNIEIDEQKKKIVQKIYSLYLDNRLSMLDVASRLTDEGIPSPSALAGRKDASSHWNMNSVREILINESYTGIATNYNQYQYKWNKNNKSFKSKELKEETDWITFEFPQIIERSKFDLVQAKIQHNKVTPKKKHCGYENKFLAENFLRCGNCKAKMSKQSTGTRKYIYYACPWRRANEKQLKVKNQERCTLPFLSSDKVDAQIFSQVANLITNPKQYAAEWVRNKPIEELTEKVNSLSIKQQLLRNKLAKAIQIEVNTDDPELEKIYRKEREKLESEHQIVNRNLISSQNELLFHTDKIQKLDQFQKIFTYKRGNAMIMKIALKRALNNLPFEDKKKLVEAVISPETGGCVYVRELNEHDIGPSENYDDESQQEFKKDEKTLENHDNLHEKNFVLELDFTLETQRVIEIIRSMTKNATDLGGL

SEQ ID NO: 5667 - protein, 509 aa, unidentified
  source 1..509: note = uncultivated organism
MAIVLYARKSVERENSISCETQLEYCKMMIRPDEREEKIITFVDNGFSGGNVNRDGFQKMIKLVRQGKIKKVIVYKLDRISRSLSDFVNILQEFKNHKVEFVSSQESFDTSSPYGEMIVKLLMVFAEFERTSIIERVTQAYAHRSEMGFYMGGRQPYGFELVPTTIHNIQTKPLNPIPSEVKQIRYIFEAYAQESVSLRRLLDILVAEGKQPLNGSSWTTAKLSTLLKNPIYVKADSEVYDYYDRHGVQMITDVSLFTGECGAQLYGHTKHDPDAPDWSDMRLVLLTHSGIVDSDIWLKCQRKLEKNRQIGNSVSNPTSWLAGKVICEKCGHTMTTIKGKPNKAGETRRYFNCTGKSHKKTCTGPKVSIYAEDLENMVYDCISEKLADLKGMRHTTRRGDSAEINDLKLRIKAIEKSEQQLLDTMLAGGFNDDLLTLANQRAAQFKKDRLALQERIDELKCIGNETDTVVNLARSWKTADYKQKKAVAMIIIHKIVISEDGSTKVLWNV

SEQ ID NO: 5668 - protein, 515 aa, unidentified
  source 1..515: note = uncultivated organism
MSRRASFAVVPDPAKSAGPVRVATYTRISTDEERQPNSLEAQRVRLESFVSSQPEWGIQRRYKEQFTGTVVDRPELTRMLKDAKRGRFDVLLVYRVDRLARSIRGLAQIIDELDQAGVIFRSATEPFDTGTPAGRMMVQMLGVFAEFERALIVERITAGLERKAARGGWCGGQRPFGLNIASDRDSLERNPTEAPLVPVIFDHYVNRQAGSSALADWLNEQGYRTKNGRLWSSASVITVLRNRAYLGEIYYRGNWYPAAHEPLIPQELFDRAQAILAERCEGRSRRASNPAEYLLTGRIRCGRCGQAYVGTAAHGRSGRYTYYTCFTRARYGTKHCANDRLPAEQLEQAVTRRLWKVLQDDDLIDQTITQAYERLTQRDDEQQSELAAIQDKLAKTRAAMDRYFRAFEAGTMPEDTCAPRIASLGEQTKALEGRAADLAAVEDDEQPERANTAELDALRDTLQAALRDSTPARTKAVLQTMIDGIRVDARDHIEPTFRVPAVRIDYGYMGQFAVM

SEQ ID NO: 5669 - protein, 628 aa, unidentified
  source 1..628: note = uncultivated organism
MTGARFRRSGPKCPNCVSFSVHVDRSVKVLAMTLGMVTGMATHVGVYGRQSMGRENGSEVSTVTQREAGIERARTFEPEHIELYEDLGLSAFKAEVTRKDFDRLIADCKAGRINVIVVYYISRLSRREPLEIIPLVTELLHLGVVIVSVTEGEFRKNNVMDLIHLIMRLDAAYQESKNKSEAVTSAKKKARQLGGYVGGTAPYGFMLKAETRFTDAGKPIVVQIPYHEPTEAANIRQVWATIRRHFDTPTVGGKTHPGSLSGICIQMNDDAIPTRGQRDGKDRKDSRWGVSTLKRILMDPRIAGFEADPVFGVKEDGTPSTRVKSYRIRRDPETAEPIKFCEPIIPPAEWYELQAWLETRDRGRGLARGTSLLSGLRTPESDAVTQCECGRPFGSLNVTSKTSNPAYRCTRPRGGEYPGQHTGGVTIAQEYADEYVARRIFALIQAAERDADAGDVMREAARRFGSLSEPAETAQERRALVAERADAVRALEELYDERDEGGFRSAIGRRRFLKAETAANDRLEATEHRLAALGESDVPVLPLRQWLPDSPDVDPIGPGSWWHQATLEERRAFVVLFVERITVRKGTIRGGRRNDPLAFARQVAERMTITWAQAPDYTGSSVDLSGAA

SEQ ID NO: 5670 - protein, 585 aa, unidentified
  source 1..585: note = uncultivated organism
MRTKAIDLDFPTLEEIKETAAPSTRTIKKIDPVVRTVPKVRVASYARISTGHDDQKESIVIQRQHFNSMAKRQHDWIYVGCYWDVMSGTKKDKRPGLQRLLSDCRAGRVNLIITKSISRLARNVTDLLEMVREMTATGVRIIFDRENIDTGTMDSELLLTILATMANEESKSFAANNRWAIQKRFKDGTYRRGVAPYGFDLVDGHLEVNETEAETVRFIFDRMLCGIGCSTIAKELNEKGIPTKRIGEKRKDGVVHTGKWGAATIRGMIRNEVYMGDSRLQKTFKDTLFKTHLNEGQLPQYYYEDNHPAIISREAFAGANRVLDQHFKECGAVKDTAPTYTFTKKLVCGRCGALLWRCSDTRKANKRQYWLCSTHHKEGAKTCPMKRVMEENVENAFTTMMNKLHFCDLIVIAYRDLLRKGWRDRCGDELRSLEAGLAQNSINQLNLQAQRGTMDQAMFHTQMDILKAQEVETRAEIDLIMDSQVSEADKLMALVQAWGIKKTFKSDTFEALIDKVIVRDRETFEFHFKCGLRLTETVIYELENVPVFAAPVPTPQAQLLPPEEEEGPRRNVIKILPVRKMAGGL

SEQ ID NO: 5671 - protein, 538 aa, unidentified
  source 1..538: note = uncultivated organism
MGEGATRIFIYSRKSVCTGRGESIENQVEMCRQYIAGRIEGGGEAELTVYEDEGFSGKSMDRPQFQRMLSDARRRKPDYIVCYRLDRISRSVGDFAPLVEDLIARDIGLVCIREQFDTSTPMGKAMMYIASVFAQLERETIAERVRDNMLLLARTGRWLGGTPPTGFLSERTGEVVLEGKTKTACKLKWNPQEIGTAKTIFQKFLELRSVSGVGRCLAEQGVRSRSGKPYSLPGLKEILKNPVYCVADRCAREYFLARGAQVCFGEGQCSGKYGLLAYNKRDHSRRGAPRLPESEWIIAVGRHRGIVSGREWVAVQDALQAGGLPGERSRPFNGYALLSGVLRCKHCGARMFAKRRSGSGTRFDYICASKLQAGGRCTCQNLGGKEADEAVCAFLTGRVQMDDAGFCRLLRAQHERLGRREGGTPNEVEARLAKYEREIAQLVSSLSQPGVGPALIARVNSRVTALDEQLSALKMQKERLQAGCGDAREQEERLFHSLACLRDGFEGLNSQEKRELIRLTVQKIEWDGERCDVFLYGE

SEQ ID NO: 5672 - protein, 583 aa, unidentified
  source 1..583: note = uncultivated organism
MAKSTKRIMELINEQKVAIYIRVSTKWQIDKDSLPLQREELPKYSELVLGIKKHEVFEDAGYSAKNTDRPAYQRMMARVRSGEFSHILVWKIDRISRNLLDFASMYQELKDYGVTFVSKNEQFDTSTAIGEAMLKIILVFAELERNMTSERVTAVMLSRAEQGQWNGGKVPFGYDYDKGAGEFSINESEATVVRMIYEMYRSYHSLLKVARELNEKGLCQRSGKPWNPVTVSLILKSPFYCGKMRYNYRNEKKGLKNWSVRDESEWIVFDDHHPAIVSEEDWRGACKQLEVNQRNGPGKNRAYTRKNVHIFAGLLTCGCCGKNMSATLDRARSDGWRPSIYNCVSHRRFSTCNNKYVSDVTLGPFVLNYISNLMKARKSFGKSTSIETFEKKLLRGDVFADVEAIERQGLVEMYDLVKSGKSGVVLTSMTAGGESRDSSIEERALLLSERRRTERAIKRLMSAYLYDEAGMPEKDFILERKKLADSLAGMDARIAELDESIANSFDLSDEDFMAKASFFIISQQLVERRFINYAAYIKASDPKIVRDFVTSVIQNFCILDGKIQSITFKNGIEHRFIYKQPEA

SEQ ID NO: 5673 - protein, 517 aa, unidentified
  source 1..517: note = uncultivated organism
MAGRRVEAPTIRCAIYTRKSTEEGLEQEFNSLDAQREAGEAFIASQKSEGWVCLPDRYDDGGYTGGNMERPAFKRLMADVEAGHIECVVVYKVDRLSRSLLDFTQIMESLERRGVSFVSVTQQFNTTSSMGRLTLNILLSFAQFEREIISERTRDKIAAARRKGKWSGGRPVLGYDVDPRGGRLMVNEDEAARVRAIYELYLDHQSLIATIKQLDARGWTNKQWTNKKGRESGGAPFNKHSLHSLLNNVLYIGRLTYKGEVHDGEHPAIVDEETFQRAGQILSRNRVTGGREVRSRFGAILKGLINCVPCGCAMVPTHTTKQDRRYRYYVCANAQKRGWHACPSKSIPAGEIEKFVVDQVRGIGRDPALLVETLSGARAEAKARIEELEAEKSGLERGLKRHNAQMRELAGEIGSGNATTDRMADLLDRVRGAEERLAQVRDELDRLGRDMIDEDEAIRALEAFDPVWETLTLREQARVLQLLIQRVDYDGDKGTVSVTFHPAGIETLSREYAEENA

SEQ ID NO: 5674 - protein, 529 aa, unidentified
  source 1..529: note = uncultivated organism
MKAAIYSRKSRFTGKGESTQNQIEICKDYAKKQFNIDEFIIYEDEGFSGGHTDRPEFQKMIKHTKEKKFDILICYRLDRISRNISDFSNLIEILNEKNIGFVSVRESFDTTTPMGRAMMYIASVFAQLERETIAERVRDNMHQLARSGRWLGGNRPTGYESEPIIYIDNNMKEKKMYKLIPVKKDLDTVKLLFEKYLEFESLQKVETYCLQNNIKTKNGNDFHKNTIKFILTNPVYAIADEYIYEYFKANNAEICADKKDFNGKYGVIGYNKKLVRNNKFIKFNDVNEWIVAIGKHKGIIPGKDWVRVQKLFKKNRDKFPRTGTSHTALLSGLLSCKKCGSFMRVTYGNKIKGTDRYYHYYECNLRFNSKRKRCNNKRLSAIKVDDLIIEKIKKTISPAIFEKIDRAKESLKNKNKYNNKIKDKILSNKKSIENLVKQLSNANDEIAQYLLAEINKLHEENKVLEAKIKNNNVDIEAFNLDIFKDSLIKFNEKIDTADFNEKRNLIRSVVKRIEWDGENLDIRLLEYDV

SEQ ID NO: 5675 - protein, 533 aa, unidentified
  source 1..533: note = uncultivated organism
MSRRQQTDGNLALKQNNVIVIEAAQRPEAQKLRVAAYCRVSSDSSDQLNSFVAQLNRYTALITSRENWSLVDLYTDEGISGTSAEKRPDFQRLISDCRKGLIDKVLVKSISRFARNTKDCLETIRELKSIGVGVYFEEQNIDTSNMSGELLTAVFASIAQKESESLSAKMRWSYQYRMKSGTFLPSSVPFGYVLQDGKIAVDEERANLVQRIFSDYLAGRSMEEIAGWLNEKNILVRIGWANRKWDRNAISYILSNERYIGNSLWQKTYATDNLPTRYIRNHGERAQYYAERTHPPIIAPETFQAAQALRKRRRDKCTSDAQSQKSPLQMKIYCGVCGTVFKRHKCGETTYWVCRTRFNSKDDCPVPQISEDEIHAAFLRLYHKLRLHGEPILTQMISNLQAIQERRMLWSLDIVELNKQISDIMDQDQMLARMNQCGCVDPDIFISQSNELARQLREAKQKKERLMAEAGDDTIPRTQELLESLETMPEFLPAFDGEIFNDLVDRVTVMDGVTLRFRLKNSLELTEHIKQRG

SEQ ID NO: 5676 - protein, 534 aa, unidentified
  source 1..534: note = uncultivated organism
MNDKNIRCAIYTRKSTEEGLEQEFNSLQAQREACEAYIKSQKHENWQLLPTEYDDGGYSGGNMERPALKRLLQDVQNGLVDIIVVYKIDRLTRSLMDFSKIVEVLDKHNASFVSITQHFNTTTSMGRLTLNMLLSFAQFEREVTGERIRDKIAASKKKGMWMGGKPPLGYYRKDKKIYPDEEKVKLGNSIFKKYVELKSTTLVKEWLNKQGHPISVGNVNCILRNKAYIGFVGHKGTWYLGEHQGIIPTELFEQVQNVMADNRINRQHYDPKKSLLSGKLYDDKGNAMSPSWSTGGSGKTYRYYVSQAIIRKEPSKLGKIGKVSLPQLENFIDSWFEQLLREKPKIHPYIQHFEVNKQKQILTLLSSYTITRNIEKVLIKCVQLKPNEVEITLHVVELFNAIYENREMRLLKPEELKQESIYTEPYHIGTIANGEKIIVGQFIEPKKHPNTELIKILNQAYTWHQDILDGKTTQKIANRDKVCVQYVRRILNLSFLSPKIVRSILNGTQPADCTLKKLLSIKSSNWQEQENYMK

SEQ ID NO: 5677 - protein, 555 aa, unidentified
  source 1..555: note = uncultivated organism
MTNIAIYSRKSIFTGKGESIENQIELCKNYCETYLLDNNLNYIVYEDEGFSGKNTNRPQFQKLIKDIQSKKINTLICYRLDRISRNVADFSGTLELLQKNHVNFISIKERFDTSTPLGRAMIYIASVFAQLERETLAERVRDNMIQLSKTGRWLGGSTPLGFDVKKTTYLNNEGKEKTLSKLILNERELNTVRFAYDTYLKLHSIRETAKQLNVNLMKGKNGGNFDLTQVRRILRNPLYVISDNETNNYLKSRGMNLYGVPNGNGYLTYNKTKQTCIGNNVEDWIVTVSNHKGIIKSCEWLNIQLILDKNKEKQSRIGTGKSNSALLSGILKCSKCGGNMIVKFSGRNANNNNLPYEYYVCSNKTNKFINKCTTKNVPVEKLDSIIISKIIANNKEILIRTLQESVDSIENELLNEEIEEIKDEIFEKESSVSALIKQLSKSKSKSLSDRLMNELNNLDKEIQQLKNKLILIDKEKSQFSNKSYNIFNLMSALSQFDKIINIIDDITQKRFLIHSIIESALWNSDTNDVEVRLCCYKNRQFTNMDKSMDCNLYPS

SEQ ID NO: 5678 - protein, 514 aa, unidentified
  source 1..514: note = uncultivated organism
MPQIQVIAPLRAREPAKLRVCAYARVSSDSADQLNSFAAQVRYYTNLIAGNEDWTLVDIYADRGITGTSTAKRTEFQRMMEDCRKGKIDRILVKSLSRFARNTQDCIAALRELRQLGVTVVFEKEHINTSTMANEMLISMMSAFAQEESVSISKNMRKGIQMRMQNGTYRAPCAPFGYRLGDHGFVIETGEAEIVKRIFREFINGKSTSSIAAELQQEAVPKRYGNPIWTKKGVTYILSNEKYVGDELLQKSITAEVFPYRRALNNGQAKQYYKEMAHEPIISRNTFAHAQSLLTQRRSQFGHSQKIHSSALTKILVCGHCGAPLYHRFVNKRDVWVCSHHLNQSAACPLSPVAEDELTESFNRLVFKLTDASDSILKTYLTQLHCIQERTASFQPEIAALHQQVAQLLEQSHTLNRLMARGCIDSAFFIAHSNTIQQNLDKVKDVLARQRETDLIKEQIDNTLHLQDVLSTINPFEENASRIPEVVFLIKISENHVIFHLSNDLELREERRKV

SEQ ID NO: 5679 - protein, 594 aa, unidentified
  source 1..594: note = uncultivated organism
MSADSRSAIRCAIYTRKSSEEGLEQSFNSLEAQREACEAYIASQRHEHWLCLGNRYDDGGYSGGSMERPALRQLLADIDAGKVDTVVVYKVDRLTRSLADFAKIIERFDASQVSFVSVTQQFNTTTSMGRLTLNVLLSFAQFEREVTGERIRDKIAASKRKGMWMGGRVPVGYNVKDQKLIVDTTEADQVKRIFRLYLKLGCVAKLKARLDRDGVKSKTRLSASGVKSGGMSYSRGALYTLLQNRIYLGKIPHRDATYAGKHDAIIPQKLWDKVQDRLRSNNKVRRNGGNAKSPSLLVGLLYDHQGNRFTPSHAVKRGKRYRYYVSQAAIHHRAADKGGPTRIPAEEIEGLVCRRIQSLLSSPEQLLQSIGVESDGAATSKMLITAGKQLAKIWQAKSPAEHREFLSAVIARIVVHEATLEVAIIHPAFRESLLADKSSRLANRRHPLDKRTKDVFKLIIDARVKRCGGEVRLLVSPDSGTEVPGRPVSSLIKSVARAHPWPEKIIRGELTGLHSIAQSTGLDEHYAGRILNCSFLAPDIVKAILEGCQPADLTVQKLLRSLPLAWIDQRKLLGFHSNGLTASTRGASCHTRAR

SEQ ID NO: 5680 - protein, 506 aa, unidentified
  source 1..506: note = uncultivated organism
MEAIYTRQSVEKKDSISIDYQIEQCKQKLLTDDYAVYTDKGYSGKNTNRPDFEKLTDDIKKHKITRIIVYKLDRISRSILDFANMLDMFKEYHIELTICVEQFDTSTPMGKTMLNMIMVFAELERETIQQRVTANYYERGRLGMYMGGRAPYGFKKIETSLNGKKTYTFEEVPEQVEVLKSIYEMYTEPNTSLGTISRYLNKKGIRAAEGGNWDTCKLSRIMHSPAYVQADAHVYLYYKSKGCVISNDIDDFAGINGCYLYGKRKASDRKYTNMENHVLSLALHKGIIDSKTFLRCQHKLSGNKRIANAGKSKYSWLSGKLKCGYCGSSITTTTQYNGVYYLGCTGKKLRQDCNGVQKTLKVPEIESIVEKQIISVCNKRKELKKSVVQKPSNNQDIDAQLKVIDYKIDNLLKSIEDGIIPDTVIKRTQQRINELEQEKKRLLEANQRRAAESMDDSEVFRIISIAENWNSLDLDAKKDIVSLMIDSVSITDDSLEIAWKKAFNDL

SEQ ID NO: 5681 - protein, 510 aa, unidentified
  source 1..510: note = uncultivated organism
MGQYDAIYARQSVDRADSISIESQVEYCQYETRGGTYQTFIDKGYSGKNTTRPQLQAMMEAIHRGEIKRVIVYKLDRISRSILDFANMMAEFQACHVEFISCTEKFDTSTPMGRAMLNICIVFAQLERETIQMRVEDAYTSRSRKGFYMGGRVPYGYRLEPYMIDGKKTSRYIVEPSEAETVRMVFAMYAEPQTSYGDVARRLNEQGIPNTQAESGIWDRSRIAGMIKNPIYVRADLDIYRFYKEQGAVIHNGPEDFIGAFGCYLYSDKNVGRKETTLAGQHVVLAPHEGLVPSDLWLKAREKCLGNKQIRSKRTSKPLKAHNTWLAGKIKCGKCGYALSIRKAKTRIGRYFICSHRMETKLCLGVGGLDAGALEAMVLEEMERHLEQFKTLTAPQDTTELPKVYACQAKLEQLTTEIAKLTERIADADELLMDYISRRIHELDAQANACRQELTRLSAQKDQVKQQAAGLTNYMQHWEELSFDDKRTVVNQLIEVIRATRTKCDIIWKI

SEQ ID NO: 5682 - protein, 525 aa, unidentified
  source 1..525: note = uncultivated organism
MKPPIRRCALYTRKSSEEGLDQAFNSLDAQREACEAYVISQKAEGWRALPDIYDDGGFSGGSMERPALKRLLADVESGRIDVIVVYKIDRLTRALADFARMLEIFDAHDVSFVSVTQSFNTTSSMGRLTLNVLLSFAQFEREVTGERIRDKIAASKAKGMWMGGYPPLGYDLPAPETRKLIVNPDEAETLKLIYRKYLELASVHALERWLIDQGIRSKRHVTKKGRVMGDQPFSRGALFHLLKNRLYLGEIVHRGKVSPGLHDAIIETSLFAKVQAALGHRSNRRKSTREDVARSPFAGRIFDSAGHPMSPTFSYGARGKLYRYYVSAPLQQGTRSSENATLRRVSATKLESAVRRHLESILVAEQPDDPFDHITRLIIGPLDVQILIPKASAPDHSRPRIAGVSLTVDTVHPDQVRLTLPITLGAKCNRTVIDTSDAGAPGKDHKLITALKRAHTMIVRDSSGFPVMKRRPQSPHERRLVQLAFLAPELQHDILMGRQPRRMTLAALLNDPLPLLWSEQIAKYR

SEQ ID NO: 5683 - protein, 506 aa, unidentified
  source 1..506: note = uncultivated organism
MKCAVYIRVSTNKEEQKASLINQRELFLRYIHERGWDLFELYVEIETGTKDRKRPQLKKMLEDAKANKFDIILAKELSRLSRNISLSCKIKDLVMNNELHIITLEGAINTLNGNLGKFGLYAWLSEYESQTTSSRVKYSLDNRARKGLFKGSTPPFGYRIEDGKLYVREDNFPDIVRRIYREYMAGNGQDIIARRLWEDGIPSPSQVAGKSNASSIWHGSTIMLILKNENYTGDLVQSKTTTISVTSEKRKKNAKEDWIIVKDSHEAIISKSDFKTVQELIKARGRIKAVTQTHLFSNILFCSDCGSGMHFKANRKGYVCGNYDKRGSSACASHIVREKELADIILADIRKLISSVKDTKFQNILTQKIEQQKKKIEKELKKITKELDVIIKTKNNALKKFVNDEITKEQYNSIIEEDALQLHELTEKQQQYKTLIAQNFDVSNGIEDITKLQEKISNIQELTPEILNRFVERIEIKEDGSPRIYYRFSGSSIYFSTLTNFETHST

SEQ ID NO: 5684 - protein, 544 aa, unidentified
  source 1..544: note = uncultivated organism
MDTNNIKKTWRATLYLRLSREDGDKEESNSIAGQRSLLRDYLTQHPDIQEYAVQIDDGWSGSTFERPSFKKMMEDVKAGKTNCIIVKDLSRFGRNYLDAGEYIERIFPFMGVRFIAVNDNFDSFKEKNASDDLIVPFKNLINEAYCRDISVKIRSQLEIKRKNGQFLGSFAAYGYLKDPQDKNRLVVDEYAAEVVRSIFRWKIKGESPQDIADRLNSEGILSPLEYKRSLGMKCSTPLQTNLKASWSAASIIRLLKNPLYIGTLTQGRATTPSYKVHKRVEKAENEWSVIENNHEPIVSERDFDTVQRVLARDTRRSPDETAVSLFSGMVFCGDCGASMVRKPVSSGGKRYNYYVCSANKQDKSCSPHRIREETLEMIVLELLQNHIAAVADLADALSVADTAPLRTAEAFKVQRQLDEKRTEYEKLQKLLMSLYENLTDGIIDRDEYMRLKQSFSGRAAETEKQMDALQERLTTIRTHTADTSWTENFKRYRNLTKLDRSAVVNLIERIMVYENNAVKITYRWQDEFTWQMDIVRQAQLREAV

SEQ ID NO: 5685 - protein, 589 aa, unidentified
  source 1..589: note = uncultivated organism
MKVALYTRVSTEDQAREGFSLEVQRDYLLQYAKNFGWDVVCTMSGKDVYVDDGYSGGNMDRPAMQRLLFDAKNKQFDLVLVYKQDRLSRKLKDLLALLEEFESLGIGYKSATEPFDTTSSAGKMAIQMLGSCAEFERNRLVERVFPGMVVGVKRGHWQGARYAPYGYRYNKEIKKLEVHAEEAKIVKEIYDMYISGKSTSQIAGHYYNLGIKSRQGGKFYTKFISSILKNKTYLGMLVWNKKRYEKKEKTHNGEGKGYKYVNNDPAKIIEVKDCHEAIITQEVFDKAQKLLDRNRTNKVVRFRNNVYHLSGVLKCHECGRNYRGLTLTKNHRTKERRPWYCCSSVGVSYVKCKNKSVTADAINKQVWDIIDTISKNLHVIEELGDMIKLSATEPEQCYIEQLEDTEKALAKNLEKQKALYEVFSEDKINIDIYKDKAELLRNEEKKLRQDIKSIQLKILEKRNAVNLVKATQDFLLKLRSNPNTQQMDYLIKTFMRIIFKGIYIQNQEIVKVDINQPWKMCYEEALKVRYSEPKAKNLEGKEILRFAQDDSLKEGVKCQTKREKTPKKAKTKANRGTESVYFCVPSDVR

SEQ ID NO: 5686 - protein, 534 aa, unidentified
  source 1..534: note = uncultivated organism
MLKTDGKYCIYLRKSRADRDTQLYNHSKEDVLKRHREILLSTSRNLGIHISKIFEEVVSGDTIAARPEVQKLLSEVENNLWDGVLVVEVERLARGDTKDQGTIADTFKYSDTLIITPQKIYDPSSEFDEEYFEFGLFMSRREYKTINRRLNRGRIKSVKEGKWIAAEAPYGYRKVKIKGDKGYTIAFLEGEIDVARMIFNWFRIGELQENGTYKTLSPDNIAVRLDSMGINPRKAKKWSRATIRDILTNPAYAGMVRWGYKKEEKRMVGGILSVERRRSKDFHLYDGIHPAIITKEDHYAILRKLTGTARSSSVNSNNKLKNPLSGLVYCDNCGHLTTRLGQNSKNKYETIKCPNRNCDNVSAPLVLVEEKILASLSDWLSKYKLECDNKDFAAEELHLKQALISNLYKDKEKVKRQLDKTYTLLEQEVYTTEIFVQRNKALTDQLQAINTNIIDLESAYNAELNTKYEYEELIPKMENIIDIYFKIEDIQTRNELLKSVLEKVTYKKTVRNTKGNALNANFEITIFPKLPKKK

SEQ ID NO: 5687 - protein, 566 aa, unidentified
  source 1..566: note = uncultivated organism
MSAVRPAGGHPQRVRCAIYTRKSSEEGLEQAFNSLDAQREACAAYILSQASEGWVQLPDIYDDGGLSGGTLERPALQRLLTEVREGRVDIIVVYKVDRLTRSLLDFSKLVEAFDKAGTSFVSVTQSFNTTTSMGRLTLNMLLSFAQFEREVTAERIRDKIAASKARGMWMGGTPPVGYEPDGRSLRIVEQDAELVRCVFESYLALGNVRMVAEQLAREGTRSPTRVTIKTGRAFGGVPFSRGQLYVMLKCPIYVGEIHHRGQVYKGLHQPIVDRDTWDRTQARLAANLQGKIRRRIASVNLLAGRLVEAQGEPLVAVHATKGNTRYRYYVSRRLQHEPGTQGMRIPAAEIEAAVCNRVGELFADNLLLAATAQLDLNPADIAAYTTRCDTLRLMVARRDAPTIASIVNQVRIHDSRIEIDCAAVAIAALLGVERSTEAPDSIALLSDVRLTRSGMAMRLVQDGGAAVTRLPDRALIRLLVKARGWWAQLGTGEIDVKQLAAQEGINPSYVTRVLRLAFLAPAVVEAILAGTAAAGVDAAALTATDAISPLWADQVRAIMSSPRWPV

SEQ ID NO: 5688 - protein, 550 aa, unidentified
  source 1..550: note = uncultivated organism
MAKQTENKVGIYLRLSQEDLREGDSVSIDNQRMILTKYVKEKGWTLVDTYVDDGWTGTDFNRPEVQRLLDDAKSGRINIIVVKDLSRFGRNYIQVGQYIDYIFPLNNIRFIALNDGVDTADRNSTALEMMPIINLFNEWHASSTSKKIKAVVEANAKAGKSGCKQAAYGYIKGDDEKHTPIINPETAPVVLSIFKMRAQGISPRHIADKLNEDGILNPTDYHYSRIGKEPTIAMRHLWSGATVKNILQNRIYLGQLAQLRRTTVSHKNHKVVYKDESDWVIVENNHEPIITQELWDRVREVENSVSNGKPMKTGYVNPLCGLMFCADCGFKMQVATTWRGIKKTPDAVPYRSYNCTSYRLFGKNACDSHYITERCIEKLIVDNIRLMARLVIDDEEAARKRFLTIKNQGDAEKTANSRKNLAANQKRISELQGLIQSVYEDKYLGKITETSCGVLLGKYETELKALQEEQAKLTARLDTEKQNAEDVDKFIERVKKYADVQKLTREMCLELIEYITIDKHPSDRKAERDIHIYYKFLDKPVEHSLHNLYE

SEQ ID NO: 5689 - protein, 576 aa, unidentified
  source 1..576: note = uncultivated organism
MSADSKSVIRCAIYTRKSSEEGLDQSFNSLEAQREACEAYIASQKHERWRGITTPYDDGGYSGGSMDRPALRQLLADIDAGKVDTVVVYKVDRLTRSLADFAKIIERFDAGQVSFVSVTQQFNTTTSMGRLTLNVLLSFAQFEREVTGERIRDKIAASKRKGMWMGGIVPVGYDVRDRKLIVNPDEAAHVRKLFRLYLELGCVAKLKAQLDRDGVKSKARLSPSGMRSGGTSYSRGSLYCLLQNPIYLGKIQHRNATYAGEHDAIIPQELWDKVQERLKANNKVRRSGSNSKSPSLLVGLLYDEEGNRFTPSHAVKGGKRYRYYISQAVIHHRATAKTGPTRIPAQELEGVICRRLQGLLSSPEQLLQAIGVPSEDAATSKALIIAGKQLAKVWLAKSPTEQREFLSTLIGRIVVHETSLEMAIIQPALREALLGKRSAELTKQEPLEKEKNVFKLMIDARVKRCGGEVRLLVPTDSANDSPSRPVPSLIKALARAHRWPGQIIHGELKGRLSIARRTGLDERYIGRVLQCALLAPDIVEAILDGHQPADLGVQKLLKDLPLDWIAQRKILGFPAH

SEQ ID NO: 5690 - protein, 543 aa, unidentified
  source 1..543: note = uncultivated organism
MTLPQTKSIRCAIYTRKSTDHGLEIEFNSLDAQREACEAYIKSQAHEGWRPIPDHYDDPAYSGGSLDRPALQQLLRDIDAGKVNVIVVYKIDRLTRSLADFAKLVEIFDAKAVSFVAITQQFNTTTSMGRLTLNVLLSFAQFERELASERVRDKVAASRRRGKWTGGGVPLGYRSENKKLVVDQAAAETVRYIFRRYLDLGRIQLLADDLRDRGIRTKRPSGAKSELDGGIQFTYGPLAHVLTNRVYLGEIGHKGTWFPGEHAPLVDRETFDQVQDLLKSNRVERRLRRSANGAMLTGLIFDDCGNRMSPSFSTKQGIRYFFYVSAALLRGQKHKAGSLPRVSADALATAVMSAVRRHSGNLDQPVSDRELLDARVERIVVGKEFLKLELKQTLEIDSSEEAPPSVEVSNGRQCTVTVPWSPESSRPLIEIDERASKASSRPDPGLVQAIVRAQAWIQQLSDGTHESIEDLAAAHGMHVKVVRKAIRLGFLAPDIVAAILAGDRSPATRLSAPESELPLSWAAQRVHVATGGRAYEIKDDGFH

SEQ ID NO: 5691 - protein, 526 aa, unidentified
  source 1..526: note = uncultivated organism
MKARRTKVPSAVAEDKRCAIYTRKSTSIGLEQEFNSLDAQREACLSYLQRQPGWTALESRYDDGGFTGANTDRPAFQRLLQDVDAGRVDVVVVYKVDRLSRSLLDFAKVMERFNAAGTSFVSVTQNFSTADAMGRLTLNMLMSFAEFEREMISERTRDKIAAARRKGKWTGGSVPLGYSVVDKKLVINELEAALVREIFALYHEHRSALAVVRILNERRHTPRRNTMSGLARMPRAWVTNDVLRILKNSVYAGYFTVGDEIFSAEHPALIERAVFVRTQELLALATVTRKAAARNPEYLLRGIVRCARCGAFFTCASTTTRGVTHRYYRCATRDKRGKQACSARPMTAQAIEDYVVERLRRAVAGGDLAGDVTAAVARRIADVRENLDVERRMLPVQIASLSAELQRDFESLQQLTGPARRPIEARLQAVGDQLARCEARLVAVDAELARLGGIGVEAAWVAECLTDFHRVWDVLTAENRARLLRVVVERIELDEPANEVRVFLADLSAGISAAGTSPETTQEAAP

SEQ ID NO: 5692 - protein, 554 aa, unidentified
  source 1..554: note = uncultivated organism
MTAPAPSVVRCAIYTRKSSDEGLEQAFNSLHAQRELCEAYVRSQAGEGWILDNEHYDDGGFSGASLARPGLRRLLGEVAARRIDVVVVYKVDRLTRSLTDFAHIIEALDKAKASFVSVTQAFNTTSSMGRLTLNVLLSFAQFEREVTEERIRDKIAASKAKGIWMGGSLPLGYDRPTDPVRRALVVNESEAATVRLIFHKLLELGSTYALQLWLADQNIRSKGWVTLSGRSMGGFSFSRGALTHILRNRTYLGDIPHTAVSYPGRHSAIIDRATFDAVQAQVVVKSRLRRERVPKAMGLRLAGKVFDSMGQPMEGVVHRARSRTYNYYAAPVVTLGSFGAAEDDTIRRVPAAALEQLIIERCALLSPGIPRQYLDAEIWRVVSRVEVHAAQVHLMLNARGLSALAGEPVGINQARARLAPGDQVVADHIHSGVMRIVMAVRLKVRGGRTWSIGPAGPGKTRPTGIDRPLIRRLRAGHAILRDCGIAPDKSGDQFRFARGPKASSEMQRVRLAFLAPDIQAAVLTGAIASGGHGMLTVPKRPPLCWADQREVLRS

SEQ ID NO: 5693 - protein, 539 aa, unidentified
  source 1..539: note = uncultivated organism
MRFFIYSRKSVYTGKGESIENQIEMCRQYIREKFPGAADGDMEIYEDEGFSARNTDRPQFQQMLRDIRARKPDFVVCYRLDRISRSVSDFSALIEELNDRDISFVCIREEFDTSKPMGKAMMYIASVFAQLERETIAERVRDNMLMLARTGRWLGGTTPMGYTSEKVREIVIDGKVKTSCRLKDNAEELRVVDIIFEKFLELRSVSGVSRYLIRQGVKSRSGTDYSLPGIKEILQNPVYCTADRDALDYFSARGSDVCFDERECSGEFGLLAYNKRDYKKKHAPRQTMDKWIIAIGKHRGRVSGKKWAAVQNIIEDNIPTGKKPAKMHNDYSLLSGLIWCDRCGRRMFAKRRWGTDTDDVRFDYICSGKLRGGTASCGCRNLNGRQADALVCEALMQYTDEDPGIYPLLEKLRREIQEQAREEPLEQVEARMRACSAEMDRLVSSLAQGELTPAFVRRVNIRVGELDRELSELSRTREALREEADCPDRQAQSNTLAASLSSLKDGFHLLSIHEKRVLIKLLVKQIRWDGENLHLFTDG

SEQ ID NO: 5694 - protein, 523 aa, unidentified
  source 1..523: note = uncultivated organism
MPMVGIYCRLSIEDKDKTGSDPSASIQNQKEMLRNYCNERNWEVYDIYVDDGYSGIDRERPGFNRLLKDCEAGNIDIVLCKDQSRFSRDTVVIEQLINDKFLEWGIRFIGVADNADTDSESYGTMRLFTSAYNEMYVKDISSKIRRTLAFKREQGQFIGSFAPYGYRIDPDDKHRLVVDAEASAVVRTIFGMYINGSGYRAIVRKLNDDSIVSPAEYKRQQGSRYVNCNADSSSSKGLWTQSTVARILANEMYTGTLVQGKSHHISYKNKHRKKVSKADWVRIPGTHEAIIDRGTWEQAQERLNSHCRVGKRSDELSPLSGKVKCALCGSPMKRNVYYNRAKTVRYYSLQCAAYKTGAMNCPNKTNMSGLVLEKKILEELNRIVEKYCQADKIEISDICTEQLMRLGAELSKLEEKRNSAQNRLVNMYKDKLDGLISDGDYKLFRQKLTDEEQAICVRINDIAVQINECRQRVKDDKEKWTVIEQYTHFDKLDRTIAEEFIDCVEIGMPDDKGNREIHIYWKI

SEQ ID NO: 5695 - protein, 565 aa, unidentified
  source 1..565: note = uncultivated organism
MGQSRCAIYTRKSTEEGLEQDFNSLDAQREACAAFIQSQKQEGWTAIPKTYDDGGYSGGSMERPALKQVLADIEAKRVDVIVVYKVDRLTRSLSDFAKLVEIFDRCGVSFVSVTQQFNTTTSMGRLTLNILLSFAQFERELIGERVRDKVAASKKKGMWMGGTVPLGYDVKDRKLAVNKAEAKTVVEIYQRYLKLQSVRALRDDLAAAGIRSKRRFRADGSEYGHQKLSQGALYLMLQNRTYRGEATHKGKAYPGEHKAIVDEALWSSVQALLAQNRVARTNGANAQEPSLLTGLLFDEHGERLTPTWTSKKGKRYRYYVSAALVAGTNETKQRIPAGNLEDVVVEKIRRFFSDPKELIDVFERLGLSRQRSAAIKCAARIARQLNEKDQTRTTLILPLLRRVVVGSEEIKIEMHNDRLAALLHGKVAESLSEQSLESKDSGDAIILTVSAQLQRVAREMKLVIDQTKAGAMCDMALLRIIARAYDVQARLNANRNLSVKEVSQVENVSSAYIYSLLRLRWLAPSIVSAIVNGRHPKRLNAKRLMRLSFRLSPYWSEQRALLGFD

SEQ ID NO: 5696 - protein, 509 aa, unidentified
  source 1..509: note = uncultivated organism
MAIILYARKSVERENSISCETQIEYCKSVIKPDERSEKILTFVDNGFSGGNVNRDGFQKMMKLIRQGKISKVIVYKLDRISRSLSDFVNILQEFKAHKVEFVSSQESFDTSSPYGELIVKILMVFAEFERTSTINRVTQAYAHRSEMGFYMGGRQPYGFELIPTVIHNIKTKKLSPIPSEIEQIRYIFEVYAQDNISLRRLLDILITENKQSLNGSVWTTAKLSTLLKNPIYAKADSDIYDYYDRHGVQMITDLAMFTGEFGTQLYGHTKHKPDNPDWSDMKLVLLTHNGVIDSDIWLKCQRKLEKNKQIGNSISNQTSWLSGKIICEKCGHTMTTIKGKINKEGELRRYFNCTGKSHKKICTGPKISIYAEDLENIIYDCITEKLLDLKEAKHTTSGSGTSEMNDLKLKIKTIEKSEKQIIDTMLIGGFNDDLLTIANQKATHLKRDKLALYERIEELKGQSEEADVVVNLAKSWKTADYNCKKSVAMIMIDKIIISEDGSTKMIWNI

SEQ ID NO: 5697 - protein, 532 aa, unidentified
  source 1..532: note = uncultivated organism
MKVAIYSRKSMFTGKGESVENQIEMCKDYIKFSLPNVNSDEIFIYEDEGFSAKNLNRPQFQKMMNDLETIKFDYIICYRLDRLSRNVSDFSSLIDLLDKKGVNLVCIKEHFDTSSPMGRAMMYITSVFAQLERETLAERVKDNMHMLARTGRWLGGPPPTGYNGTEVSEVIIDGKIKTSHKLEFNENEIEVVKMMFDKFLENHSVSAVSKHLIFNNIHSRNGKYFSNLGIRDILQNPVYCNADSDAYNYFTSHGADLCNEKEKWNGKYGISAYNKRDYSKSGAPRNDISEWIVAIGKHQGIISGKDWVSIQNFFHDNAKEKVVNHSDLGLLSGLLYCTKCGEKMFTKKQKSTSDNYSYICSSKLRGGTKLCDCQNLLGAQTDDLIVDYIKNEIDGIDGMENKINELKKQYLEEGTSNEADKITDEINAVKTEIDVLTERLTDSKLSNVSIKAIDTKLIEKQSEINELQKRLSLIDSNEFDKIVDIDAILAGIQSFKDCFDNLSVFDKRQIIRLLIQKIEWDGEDLHIFMYGE

SEQ ID NO: 5698 - protein, 509 aa, unidentified
  source 1..509: note = uncultivated organism
MKTAEPEHKIRCAIYTRKSTEEGLEQEFNSLNAQREAAEAYIASQRSEGWTCLPAQYDDGGFTGGNVERPALQRLLHDVEAGRIDCVIVYKVDRLSRSLLDFSRLMDVFDKKRVSFVSVTQQFNTTHSMGRLTLNILLSFAQFEREIIAERTKDKMSAARRKGKWVGGIPPLGYDIAPNGRKLLVNPEEASQVRALFDLYLERESLLEVVEECLERGWATKSWSSSKGRDFGGKAYTKNSLLRLLRSKTYLGKVDYEGQVYKGEHEALVAEDVWQEVQSILTRNARNGGKEVRNRYGALLRNLLHCTACNCGMVHTVAMKNNRHYRYYVCRNAQQIGWKHCPTKSLNAHEIEKAVVAHIKSVSAHPEMIEAVLLKAREGEEKAVADLRAERSFLAKEIDTCNAQIAKAATFGNTDQLADLHDLLRRQEQRHSTVISDLQAWEQERLVPETVTAALRDFSPIWDELMPGEKVKILQAILERVSYDGRNGSVTVQFRSAGLAALCRNIQRK

SEQ ID NO: 5699 - protein, 557 aa, unidentified
  source 1..557: note = uncultivated organism
MSAKRSIRCAIYTRKSTEEGLEQDFNSLDAQRESCEAFIASQKAEGWIGLANRYDDGGYSGGTIERPALKRLLKDIEDRNVDVVVVYKIDRLSRSLMDFTRLVEVFDRKSVTFVSVTQSFNTTTSMGRLTLNVLLSFAQFEREVTGERIRDKFAASKKKGMWMGGNPPFGYDVASRKLVVNPVEAESVRLIFQRYLDLGCVRLLCADLIERGVMSKRRASRTGEQRGGKPIGRNALYLILSNRTYIGETTHKGASYLGEHEAIVPRALFDAVQGRLAELGPALSGNTRMVQDAPYAGLLIDETGAAMLPTYSIKNGSVRYRYYVSKPALKGEPSRATISRIPAPPFEAFMAGVIERLGLPARDREDTSRLALQRVEILSNNIIVQFDRVAALASWRGANPDRPIARDREVVDQRREFLGSGETLTDDGERLTLSLPVRARFRGGRAAILHPREGTSLEPRLDMALVKALARAHRWCRMLLGGEVASIDALAARIGQDRGHVGLTLNLAFLSPTLVRAIVGGKQPPGLRLSHLLNADIPLSWHAQEAWLERVANGAAV

SEQ ID NO: 5700 - protein, 582 aa, unidentified
  source 1..582: note = uncultivated organism
MKTQINGKIAIYSRKSKFTGKGESIGNQIEECKKHIAYKYQITDMNQIVVYEDEGFSGKNTKRPQFQQMLKACRNHEISMIVCYRLDRISRNTIDFALLYQELERLDINFISVTENFDTTTPLGRAMLSISSAFAQLERDTIAERIRDNMLALAKTGRWLGGTTPLGYISTAKTSVDIEGKIRTAYRLKTDSDNFSLARLIFDKFLEFRSLTKVETYLLNYHYKTRNGKNFSRTGIRDILKNPAYAAADEDTLCYFNEIGTLIFNESSEFNGTHGLMVYNKSNQASEIPHKQHNYSEWIVAIGKHKPLLTGKEWLQVQELLEQNKSKSYRKPKDNTALLSGILICADCGSYMRPKANRSLNENGNKRFSYLCETKEKSHGQLCSMNRPDGNLLDKTVCDKIKEIAQGEDVDKFHEQLKYAKKQLLSKEVSNTTEIDHLQKVLHDTDRKIENLVIALSEADNTPAFSHINKQINNFHEEKLKIEKQIHTLNELLQNQNILLANFDVLIEKLSSFSDSFDMMSIEEKRTTLRILVDKVVWDGTHVHLYLVGQNNQKTKPQQAGCKRNPDASARTEKDVKRDFFI

SEQ ID NO: 5701 - protein, 558 aa, unidentified
  source 1..558: note = uncultivated organism
MKEIEEEKEKPIRAAIYVRVSTADQAKEGISLEEQERVCRDFCKAKGWEIYKVYKDAESGRNIQREELTELFKEAQLRLFDVVVAHKLDRMSRSLINMYEIVEKLKQLDIKFVSFTESFDTTGSTGRLMFNILASFAEFESDRIGERAYMGMLGKAKECNYNGGTVPEGYRIVDDKWVIDEEGAAIVRFIFNLYYSGDPETKKEMGCWKIAEWLNKKGYRTKKHITKTGKTLGGKAWNAEAVRSILSNPICCGTYTWNKYRIKRTGEGVITKKRPEREWIIKRDALPSIIPRDIFDAVQERLKSNRKINIRGRQENYMFSGLLYFHPCGVRLEGWKKEREVSEGKECRVDRYYRCNPLVWKRIRGLNKGEMLTEHCKDCRFKSIRQETIESFLIEQVKNLKYDLPEIKEVVEKIKQRASGDIEIFAQKERELLEEKNLLESKRENLYFSLRKESISLDEFSKQVKMIVDREREIESEITTVQTKKMETVYADSDASIAENLIVQFADCFDVAPSDARKNLLQAIIKKVDIEHNGKVHITYSLPLHITESSGVVSSMAA

SEQ ID NO: 5702 - protein, 656 aa, unidentified
  source 1..656: note = uncultivated organism
MAKKQNQDDNAKTCVLYTRVSTAIQVDGYSLKAQEDRLRKEAKHRGYKVIGVYPDEGKSGKNIKDREKFNEMIEDIRSGKKKPNYVYVFKLSRFGRNAADTLSSLQLLEDYGVSLLCVEDGIDSAGAAGKLLIAVYAAVAEAERENIHAQTMAGRLQKAKEGGWNGGFAPYGYKLVEGKLEIADDEKEVIEYIFNTYAAGGIGVSKIANQLNQMGFVKKVRQNNTVNRFSATFVKNVLDNPVYMGKISFGRRRTEKIDGTRNEFHIVKQKEYQIYDGPHEPIVDEQTWYKCQSFRKKTGIKREKTHSLEHEHILSGILRCPVCGAPMYGNVNRKKKKDGSGEYYKDSFFYVCKHRKLVDGVECNYRKQPSQNNINAEVEAIVKEALNSPTFIETLREVYNENGDRDKLQKHIRELNKEYRRLSALKEKLGENLLKLDVEDEFFEDKYEDIQAQINKLYADMKEVEIQIYDFEAKIERTEYMQMSLENAEEYIRRFIEDYDNCSDAFKKDFMKGMIERVEIFPERLEDGRQVKMVRFMYPLIYKGVEGQEVWWDKEKHVETVVLLGWKGVDNYMYVDYAPDHHVIQGGKATYREITEWIKNKYGVHVTNLNIAQIKDKCGFEKRENYNIGAKGHKVPNCTPEKEKMIIEAFRHFNMI

SEQ ID NO: 5703 - protein, 583 aa, unidentified
  source 1..583: note = uncultivated organism
MEVRTIPPKTKRRPALHRPVIKLSNTDETKAKTNAKAIDDLRSEILTGKARRVTPVPEKQAPVKIAAVAPVETKKLRVAGYCRVSTGTTQQETSIVAQREHYEAYIKANPDWECAGVYWEAAVSGTKKENRPELQRLIKACKAGTVDLILTKSISRFARNTTDCLEMVRTLTALGVNIRFEKENINTGTMESEFLLTLYSSFAEEESKSISANELWTKHKQFENGTFRYSKAPFGYDLVDGTFVVNPDRAPIVKEIFDAVLAGKGTPTIAKELNARGIPTGTKRNDSSPGVWTAYMVGGMIKNVAYIGDVLNQKTFYDHFHLKYNYGEKQQYYNEGHHEGIIDKDTFERANAAIRQRGAEKGNVPKDRHLRKNPHNNRYAFSGKLKCACCGGTMKRVTQKTAQGKKYHWVCSDHVADKTACSMKREREENIRNAFTNLLNKLLYAKDVIFDTYTFRLRQEEAKENVAALTVLNDELNTIQEEKNRLTLLLSKGCGEPVSFTKKLIELEARENTVRYDISQCTGDSMTFRAVEDTKDALADWKKGGDTDALFTEIVESATVETGASVVFHLKCGLDLKEPLREV

SEQ ID NO: 5704 - protein, 529 aa, unidentified
  source 1..529: note = uncultivated organism
MEERKAIIYARVSTEKQAERELSLEAQEEICRRKAKELGYKVVKVFKEAESGRSAEKREEFLKAIDFAIQNKIDAFIVYDTSRFARNRKDAVVYKTLLRKHGVKVVYASQSIPEEDDLTSLFVEGILEIVDEYYSRKLAKDVIRSMEKNAQEGYWNGGRPPFGYRRKVIAELRGGKKKVKLEINPEEAVIVREIFETYLYEGIGAYQIAKKLNEQGKLNRGRKWDKKTILRILTNPIYTGTYRFRDIEVENFCEPIISKELFKEVQKEIEERRLAPLKGNPTSIQLLTGILRCGYCGSPMYSEPTKKQKYRYYVCSTYKLGSGCKPLRIKAQTIENAILESLRKYFLEEKFLEKVRSELIRIFEEERKPLLEKLKLKKLEKAEVEKAIENLFRLLENTSEEDYELLMKRLRERRNQLKELEKEIKELEVQVIADLKPIVDKSFNEFKEAVEYVLREGDTKIRRKLLKKIFSAIYVKEKVRTVGTNGIKVNEKNSQLDRIKVFEVQGVPNFSVVWGEWCARRDSNPRPRD

SEQ ID NO: 5705 - protein, 546 aa, unidentified
  source 1..546: note = uncultivated organism
MTTKRCAVYTRKSTEDGLEQEFNSLDAQREACEAYILSQKHEGWALVPNRYDDGGFSGGNMERPGLKALLADVEAGLVDIIVVYKVDRLTRSLADFAKIVERLDAKGASFVSVTQAFNTTTSMGRLTLNVLLSFAQFEREVTGERIRDKIAASKRKGLWMGGPVPLGYQVVERKLVPVPEEAERVRSIMRCYLEAQSVPALLAQLKAEGVLTKVQVLTSTGHRGGIPFARGSLYHLLKNPIYRGKIVHKGKVYDGEHEAIVDEQLWDQVQHRLRANAPARKRPANAPQRALLQGLMFDPEGRPMVPTYGSNGTKRYTYYVTRKDLARKGDARPTRCRRGQVESYVASQLIALLNDEHALRRLSGATEGEALQTLFERARRLAQDLARPERAQDALRSFVTAIRVGKQDMQVELQPAALGAEGTLTWSYAISRPVSARPFREAKLKIEARRSNDRYDADLVALMAEAIEAQRLVLQSPELSLNQLGKREGRCRTHLAKLLRLSWVSPKIVEAIAAGTQPKTLTRRVLMSTPIPLAWDDQEREFGLAV

SEQ ID NO: 5706 - protein, 527 aa, unidentified
  source 1..527: note = uncultivated organism
MTTTRTDAIYARYSSHSQDDSTSIVVQIEACERAAGGPTKHYIDQARSGRSVGGREALHRLLADARAGKIGRLFLYKFDRLGRAAETHVIVAELEDECGVQVISATEGKEALARGIQLVVAENYSKVLAERTRDGLKRRFREGTWTGGKPPYGFRIVDGPDGRRRLAIDPNEADVVRFVFRTYLAEAVGFKELARRLKGRGAATREGAPWSFTTVRSILTNPTMTGEVWYNRRSMKLDKRTGRRVPRPKDEADHLSYTDEALAIVEKVEFDRVQQMLDARSGARGPRAAKEVRPFTGFLFCGECGSVFYSRKSKNAKGEYRYYNCGCRQKGGPGACPNSATVREDKLMDKVLEVCTDLFEDTDAIVEAVIREAEKRIASNRDEALKLRREIAELEKKNTAFLGLMIDPEVPAEAKRAISRQLGENESRREQVQEMLARLGEQANEGTQKLARAVRQAMAEAKANFAGLATPAQLNRLIGELVGPMVVRGDGTIQQKTPEMAQAPAGAEACVTSTVAGGGFEPPTSRL

SEQ ID NO: 5707 - protein, 519 aa, unidentified
  source 1..519: note = uncultivated organism
MTTSAKTDSGAIRCAIYTRKSTDEGLEQEFNTLDAQRESAEAYIASQRHEGWTCLPDRYDDGGFSGGNLERPALKRLMADIEAGGIDCVVVYKVDRLSRSLLDFSRLMEIFDRHGVSFVSVTQQFNTTHSMGRLTLNILLSFAQFEREIIAERTKDKMWAARRKGKWVGGMPVLGYDVAEGGGRLEVNEDEAARVRAIFQLYLELESLLPSAQELERRGWNNKRWVTRKGKERGGKPFNKSTLFRLLTNPIYTGKVVFQGTTYEGEHEAIVDMETWKKVQAILRRNRLNGGTLVRNKYGALLKGLIFCTPCGTGMTHSCANKKNGKSYRYYVCQTAQQRGWAKCPTKSVNAYDIESAVVQHIKGLGTNPAVLSTTLTKATEQAEARLHELEMERNAAERELKRLHAQVRKLLGGTLPAGASGIATDRLADLQERIRTTEQRMTAIQEEIITLGKTTVKEKDLTQALADFDEVWNSLSSKEQAKIIHLLVERVGFDGRDQSVTVTFRSEGLKQLCQRTAA

SEQ ID NO: 5708 - protein, 535 aa, unidentified
  source 1..535: note = uncultivated organism
MKAALYTRVSTHWQIDKDSLRVQRQELLQYAALMLGTTDCVVFEDAGFSAKNTDRPKYREMMARIRKGEFTHLLVWKIDRISRNLLDFTNMYSELKALGVTFVSKNEAFDTSSAIGEAMLKIILVFAELERSMTSERVTAVMLSRAQSGLWNGGRIPYGYSYDKATKEFSLNREEALVVKKLFRVYESTKSILATTKNLNESGIRTRAGTSWNTVGVHKILKNPFYVGSYRYNVHDSANQAIRPEQEWTLIENHHVPLIERDQFDRVQSILVRNRKLDTQYVNYHTDKTYLFSGLAFCGYCGSKMTPTTSKPRKNGHTSVVYGCTKRRRQTSFCTNKYVTESSIADFVFTIAHNLLSLSAEFSPSDSLFRINERLSRGLTVNISEKSLDTVRKLLCDRSVPVYFSPTFTENDKDNAEIARTERRRAEDAIRRLNALYVNGDIAADEHAALLAAYREQIDNLTAEPDVQPEFSEKASYYLFAQFMIEEPFSPRKISDYTLRTTQEQFIRSVIKRITIKDGQITSIEFTSGLSLEFT

SEQ ID NO: 5709 - protein, 624 aa, unidentified
  source 1..624: note = uncultivated organism
MNKNVEVIAPTKCLNKLNKNKLIRACAYCRVSTDNEDQKTSYDSQRIHYKNYIEENPNYEFVGIYADEGITGTQIKKREQFNSMMSDALNGKIDLIIAKSISRFARNTVDTLNCVRKLREHNVDVYFEKENIHTLGLSNELFLTLYSAFAQAESESISENVKAGVRMKMKRGELVGKYVPFGYLYNKELNKLVIDENKKDIIIYIFEEYSKGVGFRTIALNLNANNIPSPTGVKWCHASVRRIITNEKYVGDLKTGKYYSDNVISHKRKINYGEKEQYFTSNHHKPIITRDLWNKCQKILEKRSKIVKPDGNRDKFSRKYPFSSKIYCGICGERFIRRSYKIRSNNKEVAYWICRSHRNKIECSNLLHYRQEELEDIFVKVYNKLIENKEQYINSFIKKVNEILLNNNDYDNSNKIKEEITKLQNRLSNLIDLKLDNKISKEILESKQLEITNQINELENKLVSNKDLEFTKKQKLEQINIISSTLKKYPGLTKFNEDIFNKLVDRIIIGEVLDNGKEDLYKVKFILKTGEMIKDNLPNNTLKIGSDIGHYGFRINKQALEIKEDNVSAYVLRKNSNIDSCFNIIVFIKIFSNHTHPPSVKQKESKTTDIIRIIDSFKINFVKK

SEQ ID NO: 5710 - protein, 531 aa, unidentified
  source 1..531: note = uncultivated organism
MPTNEYCIYLRKSRADFEAESHGEGETLSRHRTALLALANKQNLSVTKIYEEVVSGDTIAARPVMQQLLEDVSAGLWKGVLVMEVERLARGDTMDQGLVAQTFKYSNTLIVTPLKTYNPNDEFDEEYFEFGLFMSRREYKTINRRLQRGREASAREGKFIASIAPYGYKRKKLDNDKGYTLELVPEQADVVRMIFDFYANGTEINGQLRRLGIQALARHLNTMGIKPYRNDYWEKETIRDMIRNPTYAGYIRWGYRKVQKKVVDGKPISMRPINYNEDCILAEGLHEAIVSKELFDKANAILDSENSNPPVRLNQQIKNPLCGIVYCAKCGRKMTMRAGRENHPTYLVCHARSCDMVSTPLHFVEERLLSILKQWLDYYKIKSTESSVSAVDTKPIENAIKQTEADIERLKKQRLKAHALVEQEVYTVEMFLERSKDINDEIDAATLKLKNLHGELSRLSERETMRSEFIPKIEHLLEVYDSLPNAEAKNKMLKEVLQKVVYNKEKAGVANTGSVESFELTAYPLLPETLD

SEQ ID NO: 5711 - protein, 562 aa, unidentified
  source 1..562: note = uncultivated organism
MTKSNIRCAIYTRKSSEEGLEQSFNSLEAQREACRAFVLSQKHEGWTALDEHYDDGGFSGGSMERPALKRLLVDIQAGKIQLVVVYKVDRLTRSLTDFSKIIEIFDSQKVSFVSVTQNFNTTSSMGRLTLNVLLSFAQFEREITGERIRDKIAASKKKGMWMGGLVPLGYDCVDRQLVINPGEAEIVLEIFRGYLRLGSVRRLKQSLERKEIRSKIRTSLAGRTGGGATYSRGTLYHLLNNRIYVGEIRHKGTWYPGQHQPIVSTKLREQVAALLQKNNQSHRREKSQSCPGLFSGRLFDTNGVRFTPTHALKNGKRYRYYTSQASIRQTGSKPLVTRFPAEGLEQLVKSQMRVLLQSPEKVTRGIEDGPSKDAAGEHARAMARDWPTLDVSKQNEFIRNTLKRVVLGQTTLTIELNKAELVAALLSENAEALTSLNRDKSEILKLTSDFQFFRRGRELRLASAHAGSCFEAAPTMSLAKAVARARGWYERILAGELNSIDQLAQSASLTRRYVRRVLPFATLSPQITKAILMGKHRPNLAVAEILRGVPLYWQEQEERFLR

SEQ ID NO: 5712 - protein, 558 aa, unidentified
  source 1..558: note = uncultivated organism
MARTRKRYLERPVRPEAKEAPVVNYSVGIYSRLSVDHDDRKTESIENQIEIIRQYIIRENGHPKRKQSFEIYDTYIDRGISGVSFERKGFDRLMNDVKNHKVNCIMVKDLSRFGRDYLETGNYIEKIFPFLGVRFIAVTDGFDSMSENVSERKLEMNIRNLVNDMYAKDISKRVMNARKIAAGRGAYIGSIAPYGYITEEIGGMRKLVIHPENAGIVHFLFESFAVGSSYGEIVSWLYRNKVHRISDYNRYGHTYWKNGERLHQWNPGVIREILSNPVYTGKLVQCRRRSCFQEGQKEIIDTPEKERMIVENSHEPIVGQGLFDQVNAELKKREKRAADKGGSGKSAVVEEKNIFRHILYCGNCGGKMHAVSYRSRVDGKKSYSYYCRNAYYMDERRCSKNYIKEGVLERICSERIREILKEKKLSSKTLMEINHSEWENRKAVYLKEQNQIMQEKYKLSNRVGMMYMEYKEGMVSHQEYSAFREARSKQEKFYEKRMWEIKHIIRKMEIREEEQNLFLCSLQMKKGCKGLNIQFIESLLEKIGVSSDGMIDIRFRFH

SEQ ID NO: 5713 - protein, 572 aa, unidentified
  source 1..572: note = uncultivated organism
MNHPPTQHKRCAIYTRKSSEEGLEQSFNSLDAQREACEAYVRSQAAEGWVLMDTVYDDGGFSGGTVERPALKQLLSDIDHGLVDLVIVYKVDRLSRSLADFVRLIEQFDQQNISFVSVTQQFNTASSMGRLTLNVLLSFAQFEREVTSERIRDKIAASKKKGMWMGGATPLGYDVVNKQLVVNDEEAQQVRLLFEQYLGLGSVKKLKAWADHQGMVSKRRTTQKQRQMGGCALSRGALYTILKNPAYIGKVAYQKELFEGQHEGVIEEKLWQQVQAKLCQNRQQQQLRTHCQSPSLLAGLLFDDQDNPMSPSHSKSRQKRYRYYVSQALLQFREKDAGSVTRLGGKDIEDIVITQLKDFLGNPNQLLDNLDCDALSATDRQALTKNAKAIAKKWDHQTSEKQITYLKDFIHRITVSQHQVVIHLRGEEVLNNCLKKNLLGQHKLDTSNSIKLTIPVHLKRCGIETKLIMVNGPTPEAHPSSVKTLQAAQLKALTWNQELITGKVLSASEIAEREKVTSRYVTHILKLAFLSPEIIKSITQGTVPATFNMEVFKKLDLKYVWSEQEKELLNFQ

SEQ ID NO: 5714 - protein, 519 aa, unidentified
  source 1..519: note = uncultivated organism
MNERKRNTRCAIYTRKSTDEGLEQDFNSLDAQRLAAENFIASQTGEGWVCLPERYDDGGYTGANTDRPALQRLLTDVKAGAVDAVVVYKVDRLSRSLLDFARIMSAFEEHGVAFVSVTQSFNSATSMGRLTLNILLSFAQFEREVISERTRDKISLARQQGKWSGGCQVLGYDAAPEGGRIVVNPAEAEQVRTIFGLYLELGGLLRVIEELDRRGWTNKTWVTRGGKLHQGKPFTKNVLYGLLTNPIYTGRVRHHGKVYPGEHDAIVNDATFNAVQEQLGRNGRHGGNPGTRIRGEAILQGILRCKACDCGMVNSHSRKGNRRYRYYLCHHAQSRGWRHCPRPTLPADEIERFVIEEIRAIGQDPNLVREVVEETHRLRERETGELASRERLLRQELVDYQRQAQALAARPDDPATVAGLAAVQERTSQLAREMTQVHTKLADLRAAALGETEIAEVCRLFDPVWDTLSSGEQRRILGLLVDRVEYDAAKESVAITFHPTGIVALAAGNRRETEEAAVR

SEQ ID NO: 5715 - protein, 528 aa, unidentified
  source 1..528: note = uncultivated organism
MKGGVAKPVRCAIYTRVSTDQGLEQDFNSLDAQYDASQSYIRSQAHAGWTLVRGKYDDGGFSGGNTDRPALQRLLEDVQSGKVDVIVVSKVDRLTRSLADFAKLVELFDKHNVSFVSVTQQFNTTTSMGRLTLNVLLSFAQFEREVTSERIRDKIAASKRKGLWVGGMAPLGYDTKDRKITVNEAEIDTVRTIFRSYLKLGSLNLLMADLRKQGIVSKIRTLKTGDTVGGIPFTRGGLAHLLRNRFYVGAVPFKGEILRGEQTAIVDQGLFDAVQAKLSEQINGHKAARMKSEALLAGRIFDDRGNRMTPSHTCKRGIKYRYYLSSTLLQGQAERSGSVRRIPATEIEALVIRSVRDRLKPSAPIDDRSLVDTHVARVEVQPEQLVIQLAQPERTNRKGARAVKTLRVPWHKTPSKRRREILLPDALDPQHARPIRSETRATFVASIARGRRWLNELVDDAKASVESIAKRERCSVRQVNMTISLAFVAPDLVKAAIEGRLPRGIGVTRLRDAPVEWSRQHAMLGLTG

SEQ ID NO: 5716 - protein, 578 aa, unidentified
  source 1..578: note = uncultivated organism
MIQRIKPTQEKVVRNAALYVRVSDRKQAKLEGSLDTQAEALKSYLASRQQHSFQEEWRIYGVFREEGKSAKEGVLRPELQRIVQAIRSGDVNAVVVTKMDRLVRSLVQFLELWKLFEENDVTLISLAESFDTSSPMGRAMLKMVVLFAEMERERIGERVREGIHHRMDLGYYVGPPTLGYDFDPANPGKLVVNQEETALVLDLFEQYLATGSLARLRKYLARKGIVSKQYVSKRQGLPFGGGALSVTQLKRHLTNPLYIGLVPNSEGDLIQGKHQPIVPENLWNQVRRRLQVQIRTRHNSNEETLYPFFLKGLIFCGECDSAMTPRSAHGRSQRYFYYSCTRRTRHGTEACSIKDVPAPALDDAFLGRLKELGENENFVVHLGKQKALNSTVEFDQLELRRKTLERELADVRRKVSKWTDLLGMSKTEGGEKAILRKIGEAEERDESIKAELEEMTIRKRELREQNADPEQVCQTLHAFAELIDAAEPSEKRMLVKLLVAKVVWTTGEIKYALYEQPNPDMLDQPEPVGATSDGSLLKGKWCTTSQTQRTASGILWAVDPVAILPQGRSGSLRIALGG

SEQ ID NO: 5717 - protein, 531 aa, unidentified
  source 1..531: note = uncultivated organism
MSGRRRNQPAGTAEPKASIRCAIYTRKSSDEGLDQEFNSLDAQRESAEAFIASQKAEGWTCVPDRYDDGGFSGGSMERPALDRLLRDIEAGKVDCVVVYKVDRLSRSLMDFARIMEAFDRKGVSFVSVTQQFNTTSSMGRLTLNILLSFAQFEREIIGERIRDKIAAQKRKGKWAGGVPVLGYDVDRSGPSPRLVVNEAEAARVRQVFQMYLDKGSLLPVVSELSKREWRNKSRVIQTGRRKGEPLGGKPFDKCSIYQLLTNPVYVGKIAHKGAVYDGEHDPIVEAALFDQVQTLLKANGRTGGADVRNKYGALLRGLLRCKSCGHSMTHTFAGGRNSRAYRYYRCIKAIKSGAACCPTGTLPAAEIERVVVDELRTLATDRPLLSQVLAEAQASIAAERESATTERDALKRQLERDHRLLRDLALGTATSDSAAQIAHLHERIVDAERRLAVVETRSAELDADTITREEAAAAFADFDSLWQNLIPREQARLLRLLISTVEYDATAGTVAVTFRPTSIRALLARRLEEAA

SEQ ID NO: 5718 - protein, 596 aa, unidentified
  source 1..596: note = uncultivated organism
MDARTKKIRCAVYLRVSTEEQNKEGHFGLEVQEDKCRAFIESQEAEGYVLDEKHVFKDEISGGTPIEKRPELNKLFEAARQKEFDVLIVYKTDRLARSIRILVNAVHELEVLGIKYRSVTEPFDTTTAFGKTAMNLFGTFAEFEKEMIRERTMNGKLKAARNGFWSTGFCPYGYYRDEETKKLVIVPEEAKMVKKMYKWLVDEQLSLGEISRRMNAQGINSPKHTRIEKRETHNYWWKRTIGRILTNEVYAGKLIYRKYKRPFKNLSSLIDPTLLRPEDEWIEIKVPPIISRELFDAATQQLVRNREFSKRNQKREYLYAKLIYCGYCNYKMFSGYQPSRRNKPLADGVGKYYHGVYRPTDAVGSTKRCEKCLQYGETRLEPVWECLTAILKNPANMYAPIEKYIYKEENTKEIKERMDEITSELEFIDKKKKKVQKMFLDSDMDERQYETYLSEFKIGERKLNDESTRLQQRMLSNAEKKGRRIAIEKVYEQVKSRLENVSYAEKMRVLHLFVERITLFPKENYAKVVFKFPSEANVSRVDRTVSLDPNDSSFFPLVLNIRTLSERERRADILRSNPGMYSPKELVLDGNNPKVI

SEQ ID NO: 5719 - protein, 600 aa, unidentified
  source 1..600: note = uncultivated organism
MTYPARSGITVVRRLTYKNTMETTITKKTMRAAIYIRVSTDDQIRGYGLQVQGEKLRAFVAINDYTLDEKHFYKDEGYSGSLPVEERPGMKKLLEDAKKREFDVVITYRLDRMFRKTRLLLEIVEELEKYKVAFRSMTESFDSTTVTGKGMMSIIAAIAEMERGTIQERTTNGRAASARDGKWVTGVPPYGYDLDKGTKKLLINNEEAKWVKIFFRWIVADRLSLREVQRRANNMKIPIPRRKVSNKKTHNYWHTRTIGRIITNETYTGTAYFRKYKRPFKNLTSVIDESLLREREGWISIKVPPIVSRDLFDACIKQLIKNREFSKRNLKRTYLFSKLIYCGSCGFKLFGGYQPPKKEGYVGTKYYHGWCTKAEVGTSKRCPACDQIAETRLLPIWDQLKEIVKQPKMALEKLAKYNAEKIKKDDTEEKLVQIKKTLASFSNKRQRIALLFSDGELDRDSYKKTLMECRDQEEQLRQDQLRLERQLLTKKEIKEISGIIEMQYKRLTERLDTLTYEEKQEVVRLMVNKVIVYPKKAEAEIELNFNPGNQEVAALTGTLPAPSRARLWDNNAKNGLTTENRVGVREGINHLRDNSVRRTS

SEQ ID NO: 5720 - protein, 522 aa, unidentified
  source 1..522: note = uncultivated organism
MNRRTANTPPASTKTRCAIYTRKSSDEGLQQDFNSLDAQREAAEAYIASQKAEGWVCLPDRYDDGGFTGGNMERPALRALLADIDAGKIDCVVVYKVDRLSRSLMDFAKIVETFERHNVSFVSVTQHFNTTNSMGRLTLNILLSFAQFEREIIGERIRDKIAASRQRGKWTGGTPILGYDVDRSNGGPRLVINPDEASRVCQIFELYLELGSLLPVVTELERRDWRNKAWKTRDGRVRGGLPFDKCRLYNVLTNVLYVGKVQHKGDVYAGEHEPIVSDDLFARVQQQLQRNGRNGTVEHRNRHGALLRGLLHCKACGRAMSHTFTTRGNRRYRYYTCTTVTKRGRQACPTDSLPAIEIENAVVDQIRCIGRDPALLGDTLEEARKQADSAMARLNGERRALERGITRLQADIRRAVADRDASTRMLDLNNEVGAAERRVSEINARLAELEAERVDGPDVTAAFADFGNVWSALSPREQARVLNLLVRRVDFDAADGTIAVAFHAAGIKALADGALVGAEEAA

SEQ ID NO: 5721 - protein, 561 aa, unidentified
  source 1..561: note = uncultivated organism
MYRQNVIAQVFLPGGGIVEWLQCRLLFILCIARRVAECRVNGNNIARQNNNYFISQRRTPMKRINAIYARQSVDRADSISIESQIEFCKYELKGGSFKEYKDKGYSGKNTVRPQLQQLLTDIRRGEVEKVIVYKLDRISRSILDFSNMMNLFQQYQVEFVSSTEKFDTSTPMGRAMLNICIVFAQLERETIQKRVSDAYYSRSQKGFRMGGKPPYGYRLEEILMEGIHTKKLVEEPGEAAIVREIFDMYEQPDTSYGDITRYYAEKGVQFYGKELIRSMLAQLLRNPVYVRADMDVYRFFRSHGTNIVSSPEQFDGIHGCYLYQGRDAQTDKLQNLKGHMLVVAPHEGLVSSEQWLNCRIKLMRNKTIQANRKAVNTWLAGKVKCGNCGYALMSIKIQSGKQYLRCTKRLNNKACPGCGKVYTEDVENYVYKEMVRKLREGQSPATYTKLKENPQVKQIYREIEEMEKEISLLVDSLAGAGETLTDYINQRVEEIDQIHQLKLEKLSVLAENHATPEQMEKVASNISLWGEIDFEEKRFTVDKMIRSLRVFPGSVQIQWKF

SEQ ID NO: 5722 - protein, 551 aa, unidentified
  source 1..551: note = uncultivated organism
METNLNTTIYDADAYFRLSRDDGDKEESDSIINQKALIREFIKSNPDIRIHEERVDDGYTGVNFERPAFQAMMESIKSGRINCVIVKDLSRFGRNYIEVGRYIEKIFPYLGVRFIAINDHIDTAKMNGGSEEMIIPFKNLVNDAYCRDISIKVRSHLDIKRKQGEFIGAFAPYGYKKSEEDKNRLVIDDTAAAIVRQIFQWKIEGMSGSRIADKLNAMGVETPMDYKLKNGENYQCGLRRKACPKWEANGVNRILRNETYTGVLLQGKTVSPNYKIRKRTKKDEKDWIRCEESHEPIITREQYDLVRSLFDEDTRVAPSQDALYLYSGIVKCGTCKGNMTRKSISYNGKKYVYLRCLNHKNKRGCDASSNMRMEQFEETLLKVINHHIEEVVKMEEMFELIDDIPYITYQSERLTDAIMEKELEIEKAKQYGLGLYHDYKEQLITIEEYQELKQFYHERETDLEEAIRELEREKEAIASNKRDKMQWAEEFAKYKGFTVLTRDLLVRLVKEIDIYGKDRMEIIFQYQQEYQSALGFLNGLADAIEHKKEVI

SEQ ID NO: 5723 - protein, 530 aa, unidentified
  source 1..530: note = uncultivated organism
MKNEIAAIYCRLSKEDIDKALDKTVSESIKNQKSMLEAYALEHQWLIYDFYIDEDYSGSDRGRPEFNRLITDSLLGRFNIVLCKKQARFARDIEYVEKYIHGLFAEKQIRFVAVLDNIDTGAVGRSVRKASQINSLVDEWYLSDLSENIISSLTIKRKNAEFIGSWAPYGYRKDPNNKNSLTIDPEAAEIVKEIFGRYLNGYGISRIAQELNAGRIPNPLLYKQSKGERINPNPEKLTVKRYLWAPSTVSAILHNQTYIGYLIQGKYRKANYKSKKLLRVPRTDWIIIPECHECIIDRETWDEVQKSLNSKWRVSAAGQCHHLLAGKAYCGECGSKLVSSGGRSGYRKTSYLCCSNHNLSKDACIGTRIEASKLEQVLLNQINSLAGRFYDEDYLIKHIDFDPFQPDSRKAQLKSRLQSLQDRTDTVRRKKDILYSDKLDGLITFEQYLEFKIKLEEESESILLQQQELTAEISFMEARESDPVSKTDIMNHFRDSATLTQEMVNQLMESVYVFKRKKGEAQQVIINWDF

SEQ ID NO: 5724 - protein, 518 aa, unidentified
  source 1..518: note = uncultivated organism
MRTAAYTRYSTDNQTENSIAYQMEAIQKYCAANNHVLIGIYADEAKSGFNTERDNFQRMIQDAEAQVFEAIVFYDLSRISRNVVDWFTARERFRQMDVKLLSCTETIGEADDPASFLSESMKAIISQHFVMETRKKVIAGQTSKAKQGVFLGGIPPLGYDIVDGRYVINNYEAGAVRLMFELYAEGYGYKYISRVLKEKGYKSKRGGVIGVNAARSILQNERYNGTYCWNRVKTKYFGKWAGGELNPDVVRIEDGCPAIIEKKLWDEVVRRMKSKSRARVKSEGMKFDYLLSGLIRCDKCGASFCGNYKKNTRGYINRYYTCTGKLNRKGCKAKPMNADELEVLVVALLKDEFFNSNLIDRTADLITEKVNSGAKSKSQKIGDIKKEISDIDMKKSNLIKVLMDGFDSQSVRDKVAELERERGLLDQSLDVMNITKDDTIDREVLVKQLKRDSFALHNEPDKIKDILRKYISKIIISDDMIEITSFTDVVSVGNSGEGKPPILTIIYNCITCEASVKW

SEQ ID NO: 5725 - protein, 623 aa, unidentified
  source 1..623: note = uncultivated organism
MRAGVWIRVSTEEQAKGESPKHHEVRARMYAEMKGWEVVEIYDLSGVSGKEILSHPETQRMLNDVKTGRIQALIFSKLARLARNVKELLEIAEVFQKHNANLVSLEESIDTSSPAGRLLFVVIGALAQWEREEIAERVRASVPIRAKLGKPTGGVGPFGYKWENGKLVINEEEAYVVKRAFQLYLETGKLLTTCQKLKEEGLKARKSYFRPVTLKRILTDMVYKGIKRANYTRPRGKGKSWEYKPVEEWVYFQVDPIIDEELWEKVNLLIKANEEKYKTSRIPKEGKYLFSGFVVCGYCGKKMYVNPYDGMKDPIYSCRGCEKKTKIRESLLEKKVKESLSYLVLNPEEFQAIVKEERRRVEVLEERIANLEKEKKRIKAKIEKLFSLWEEELIDKETFKQRYEKLKEEEGVCEYEVAKARGELEFWKVKELSFDHLINEAVKIKDLWDYIEYEEKREVLKYLLDRIQVYEDKVLIFLAVPEFIGLCNYTHTLRDVGIISKFCKNSKPTSGFKISLDIIPQERFQGKWYPEEPKTIGEVLRKIRLEKGLKVKEVAKFLGVTEDTILNWELRGRKPKQSILPKVIEFINSLTDQVCKIQIWLLFFLFLCQNDFGLLTGEAICFF

SEQ ID NO: 5726 - protein, 549 aa, unidentified
  source 1..549: note = uncultivated organism
MAKQPSSQVRSSALRAAAYVRLSIMTAETNSPDTQFSDIKRFIDAHGWTFQEAEAVIDQSKGVKIAGGDLFVDLGISGSKGKFRPGYEALLKELENYDRVVVWKIDRLTRRLSELGTVLDLFGKNKVVLVGVSDGVDTGTASGRTTAEILGTIAGAEARNTADRVNAAQQTMLRNGKWRGGPAPYGYRLKQLGRGKGTTLEIDPSQAKHMKFAIERFLKGDSIPTICAALNAKGVKSVFGNPWSHPALRRLIGSPVMAGFQVWKNEIVVDSNGMPVRPYPGIIDLETYNRLQESIKKRYFVHPSRGGALLSGIAYCSLCGGKMNGSSPTEHGGANYRCRNKYQLNKDCTGLSTRSSALERYVTQVVLTLLSSENTRKELSKSLTSIKQQSRNNKKDDPRAEHEFLRSQLKILQERKILKKYEYAGGEGDFEKSWEEIVSQMKILEEEMKRIPADEFDPKLQSLISSSDIYSTWQRMTLAERREVVSVLFKRIVIMPRNPDWNNGKGYDVRRVRFEWAWDAQQPDGMIPTSERQPPKRKQATKVRMSASK

SEQ ID NO: 5727 - protein, 519 aa, unidentified
  source 1..519: note = uncultivated organism
MTLKTATGSRERKSLSPTRIVRCAVYTRKSTTEGLDSEFNTLDAQREACEAYIASQRLEGWLALSDRYDDGGFTGGTVERPALQRLLADIRNGLIDCVVVYKVDRLSRSLLDFAKLMEVFDLHKVAFVSVTQQFNTSTSMGRLVLNVLLSFAQFEREIISERTSDKMCAARLKGKWLGGPPVLGYDIDRDRKRLKLNPKEVSLVKSIFVLYLKKQSVLEVAIEANRRGWKTKSLITKTGKRRAGHSFTKTDVQRILTNVTYIGQINHKGKIVRAEHPSIIDKATFENARQLIKHNRHAGGKAYRHQHNALLKRLLHCGQCGAAMGHTYAIKNKNRLYRYYLCTTRHKQGNEACDTAPLPAQEVEDCVVEMIKRIGQDQSLSERAFAEAVTRRNTRIAELTGELGQLRRRMKKEQDGIDKLTAVIETSRKPLETILERLNQAEEGLRQTKHRLEEIEAQLERLDSEAVEREHLLDALSRFGLLWDTLAERERTSLIRQILEAVMYDPSEEEVSLVFRLVP

SEQ ID NO: 5728 - protein, 579 aa, unidentified
  source 1..579: note = uncultivated organism
MSTESRTMSRCAIYTRKSSEEGLEQSFNSLDAQREACQAFITSQRQEGWRALPAHYDDGGYSGGTLERPALQRLLQDVEEGKVDTIVVYKVDRLTRSLADFAKIVEALDARGVSFVSVTQQFNTTTSMGRLTLNVLLSFAQFEREVTGERIRDKIAASKRKGMWMGGRVPVGYDVKERKLMVNPEEANLVHRLFHLYLELGCVSRLKVQLDREAIKSKERISPAGNRSGGTLYSRGALYRVLQNPIYLGDIQHRGNVYPGEHAGIIPRELWEQVQAQLRSANQGRRNGLKANCPSLLLGLLQDAEGNRFAPSPTAKNGKRYRYYVCRGKVDAHGAQRKPTRVPAHDVEQQVSLRLQTFLQSASEVMDGLTQPEGPPARTQQIIAAARKQFEQLRSDSPSYVQKFLRRVVQRVVVHSDKIEVEVSKSELSAVLAGDPRAASHQGPVDTLRLAVEARIKRCGGETRLVVPPHLPSQVRVHPVPSLLKALARARQWYEWVIAGKVWGGRSIAQKTGFDERHVSQILECAFLAPDIVEAILDGRQPENLTWKKLTRHVPMNWVEQRKRLGFPTPALAATNRLS

SEQ ID NO: 5729 - protein, 714 aa, unidentified
  source 1..714: note = uncultivated organism
MSKYIIYSRKSKITGVGDSINTQIEAARQLLFKKYLNIKEDEIIIFKDEGFSGGTSKRPAYQQMLNLIQQEPITAICAYRLDRLSRSVIDFVELLKLCDSTNTHIHLVNDNYDLETYSGKAMLMIASIFAELERSIIKERITDNLIALSKQGRWLGGITPTGYASVKQPDSNNAKMLQLIPEEADQIKTLFTKYIELQSLTRLETYCLSNNILSKNNKNYTRCSLQSILMNPTYCTADLQAYEYFTNLGCTIYNTDDLPIDDLFNGEHGMLIYKKTDQSKPTKKQTPPQEWIVTVGQHPPIISSDMFIKTQELLKLNSDKSYRQPRHTANVALLPSLLYCKHCGSYMRPQRTNRIYKDTGQPAHRYLCELASKSQKTLCQCVSVNGNVLDKIVVDEIFKIIENLNIGQESIINELLNVQQDHISNNDLQQNLNNLQQQQANIQHQIDNLINKLAIIEDDDVVDSIQQAIKTRKNDILTIKNKIETLQSTLNTQTQQQSSVEELIQSLLDFKELFNTANIDVRRSLLREIVQKVEYDYVDKSIIIYFAQGDKHHCVYITDKTHLQSTPYVHTGIHPDEDKHNHTSMPISQNNLHIYQLMYTPSEHLSLFYHIDMLKHITYKAVLTYHCSLPPYFNDNNDFDFITSSDFNTLGSRLKRERLLRGFKQTEIAAVLNIHKSTYIKLENNQCTLSDVKLHHIVSTLANFYQIDVSYLLT

SEQ ID NO: 5730 - protein, 571 aa, unidentified
  source 1..571: note = uncultivated organism
MRVVSYVRVSREEQVEGWSLDAQRDLCADLAARRGWELVQVFEEPGRSAKTDLRPSFQRMMSQAEARRFDVIVVHKLDRFSRSLADVVKNVARLKEAGVGLVSVSEPWLDTTTPQGEFMLYLFALLAQWDNENRARETSKGKQQRAKEGYWNGSLSFGYITLSDLRSDLWRIGEQHDAGEIEEAVYAARSEELENYLDQWHDRTEGDAVPDLKNAAGALLAYTCYSQGNVSDNDVAILLNEAGYRTSGNWGERLFEADTVRPMLQNRFYLGETQYKGKWMPGRHPAIIPRALFEKCQQVRAQRRGRTVRGTSKKRTYPLSRLALCARCGQPMRGQANHADERYYRDPRRSSNICNQKMVRADDAERQIVEYLANIQLPEDWRERVLQISQLDHQDAASLHDQRRRLEGQLERARKLYLMGDMEESEYRTMREDLKGKISALQPTQDADLESAAAMLETIGSLLEYATPKELDDVFHALLTSVYLDSGAAHPVIAIEPKPFLKLLMDVSIQPFQPDDGGSGNGESPDTTPVVEGDDDGQTQVVVRENRDTILADAGQEIVMAGEGAMPDKNC

SEQ ID NO: 5731 - protein, 540 aa, unidentified
  source 1..540: note = uncultivated organism
MTAADEGITGTSTKKRAQFNQMINDARLGKFQLIITKEVSRFSRNILDTISYTRELRALGVGVLFMNDGISTLEPDAELRLSIMGSIAQEESRKTSARVKWGQTRQMERGVVFGRSMLGYDVKDGKMTVNPEGAEVVKLIFHMYGVEKKGTSVIARELRNRGIRSYSGNTNWAGSHIIKILRNEKYVGDLLQKKTYTPDYLTHAKKYNHGEEPMVALTDHHEPIIDRELWDIVQSELKRRNLHGEQSSGHANRYIFSGKIKCGECGASFVSRKKKRKDGSVYKRWGCYTAAIEGTRHLDKQGNEVGCDVGKMVRDELALDMLKQAVAALDLDRKWIADNVTALAVEAIQAGEQGSAENAEKLEHEMEQLTKKKEDVLDAFFSQSITKEEMRMMNERYDRQMAGLQTRLDAVREKEKLHYDTEQLGADVRKQVNGILSGDTDSEVFYKNILDQMVVYKDCHVELRLNLLPMKWMFVLERLSQLKGQIQGKNGPENPGCKNDTDISGEPEAEKSEENQGFPAPVCNQESSVPISVSSAWTWG

SEQ ID NO: 5732 - protein, 614 aa, unidentified
  source 1..614: note = uncultivated organism
MRPVTSQGFRIGIYTRVSTEEQAENPKGSIKNQEQRLREFIKLKNMVEPFGEVTAVYSDPGVSAKNMNRPGFQKMLEAIRNGEIDLVLVTEISRFSRSTKDFSMLQEFLEEHECKFLSIRENFDTSGAAGQMVLNMMATIAEFERRQTAERISHSFLARAKRGLYNGGSVPLGYKTDESKPGNLAIVPEEAELVKLIFKTFIKEGTLAQTAKRLNADKVKFPRQVRGGGGARAKIFHIDTLYRLLKNKAYIGTRVFSVKGGHEEVPAVWPPIIDVELFERANKMLKANCSRRRTHDNKFPYLLTGLVHCHECGERMAGASATSRSGKKIGYYEHLATRKTEASLKQKLLKHGPRRIPSIKIEPIVWGEVKKFIEQDDFAKDLLNRARKLHGTIEKESKRKELRTKEAALERQITVLAERIAKLPESIDPAPLFEQLAELQESKKKIEAEVKQSTQQRVVNEDPVSFENLELFRKGLRSLIAKGEADHNIKSAIIKTVVHKIEIFPDGFEIHFHVGESHYQASGNHPGASFFVSTLPTQTKPSVGLPTEGPFFIPINQTSRNLMVHGSRRLTNGGADADRTRDLYAASVMLSQLSYRPTLRRRFPVLRVMYRLVH

SEQ ID NO: 5733 - protein, 570 aa, unidentified
  source 1..570: note = uncultivated organism
MTTPRTRIRCAIYTRKSSEEGLEQAFNSLQAQREACEAYIASQKHEGWTAIPKVYDDGGFSGGNIERPALQELLNDIAAGQIQTVVVYKVDRLTRSLSDFAKIIEAFDAKGVSFVSVTQQFNTTTSMGRLTLNVLLSFAQFEREVTGERIRDKIAASKRKGMWMGGIVPLGYDLKDHKLLVNPKEAIIVREIFTAYGRLGCVSKLRAYLEAKKIRSKVRISAEGRKSGGVPYSRGALYEVLKNQVYIGRITHKGDSCPGQHEAIVDQALWEQTSALLATQNRGRRQTGGKVDTSMLTGLLYDADGNRYTPTHAVKGGKRYRYYTSQAAIQKRGRSSQFNRLPAKEVEQLVVSRVAKLFDSPEELIQAVADVETPTRDLQRLTAAGRDLARSWNKLSLRESGSKIRSFVGRVLVGEAALEIEVSPEALERMLLSPDSGNTEPSNMHPKGSKLFSIRCPLTTTRSRGELRLIVPGFTAPSNQVNRPVLKALARATRWRERIMAGEVYCKEQIAADTGLNASYVGKILRLSALSPDIVEDVIAGSRAEFAVTGPSSKVPLDWSIQRREVDGRK

SEQ ID NO: 5734 - protein, 532 aa, unidentified
  source 1..532: note = uncultivated organism
MSKQTKRCALYTRKSTDEGLDQAFNSLDAQREACSAFVKSQASERWREIKTRYDDGGWSGGTLERPALQRLIADVEAGKIDVVVVYKIDRLSRSLADFVRLVETFDRCDVTFVSVTQAFNTTTSMGRLTLNILLSFAQFEREMTGERIRDKIAASKAKGLWVGGSPPLGYDPPGPGERILRVNEAEAETLRSIFRDYLALGSVNDLRRHLARRGVCSKRRTTRNGREVGGVPFSRGALFHLLSNEIYRGRIVHKGEVHEGLHRAIVDDELFAAVQKKLRQGSRKRPRRQRNVASSTLTGRIFDADGAPMTPAFGYGKQGKIYRYYVSSPLHQNGRADRPDAGGDAGAIRRVPAPAIEGFVQDAVGRFADRDDLGAAIRIEVRKRTVELLLASRCLPIAATRLGENEHAALDANDPELLRIVLPVRMRPRGGRTVIENVSAAPAAMLDRKLVQALKKAHAMLERGNDRKAVLNEAPASAYQRRLIHLAFLAPELQRAILDGRQPSGLTLSKLLSSRPPASWAKQIELYGAPLE

SEQ ID NO: 5735 - protein, 550 aa, unidentified
  source 1..550: note = uncultivated organism
MKIAIYARKSKYSPTGESVENQIQLCKEYLQSKYKSETLEIDEYKDEGYSGGNTNRPDFRKLMAQIEVYDMLICYRLDRISRNVADFSGTLTILQNNKCDFVSIKEQFDTTSPMGRAMIYISSVFAQLERETIAERIRDNMMELAKMGRWLGGTTPIGFDSEPITFIDENMKERSMTKLKPNMEELKVVELIYEKYLQLGSMGKVVTYLLQNNIKTKKGKDFTLGSVKVILTNPIYVKANEEVCNHLRAQGITVCGDIDGKKALLTYNKSTSITDNVKTKTIVKDKSEWLAAVGSHNGIIPADKWLQAQNIKDKNKDSFPALGRSNTTIASRVLRCDKCGATMGVTHGHINPATGKKHYYYNCTLKKRSKGVRCDNKPAKAAEVDEAILITLENMFKTKSSIIDNLKAKNKARRVEMLSSNRIDVINKNIDDKSKQIDSLVNKLSLDEDLTDILLKKIKSLKIEIKELNDELLTLNSENIKLNEDDITLDFIGKLLEKCSIIRTLDVAEQQQIIDALIPLATWNGDTEVLNIYPLGSKELELKEEESKKK

SEQ ID NO: 5736 - protein, 533 aa, unidentified
  source 1..533: note = uncultivated organism
MKNSIPCFFYGRFSPGGNQTHQSIEGQLTVCRKYAKENNLNIVAEYCDEHITGRNDQRPKFQKMLNDIKTKGGCKVVLVYALDRFGRNKAESAVNRLFLKKHGVTLVSATQKTSKNIDGTTNLDGILLESVYEGLAEYYSEELSQKVKRGQNESFEKNKYLGGTVPLGYKIVNKFFEIEESTAHIVRRIFNEYCDGLTVDKIIEGLKADGIKNSFNRDFSKHGIMNILSNEKYIGNYVYGGRRHDGVIPKIISPVLFEQARLRMEKNKRNPGSSKAKEPYLLSGKLFCGYCGSKMLGESGTSKTGAKHHYYKCYKQKRRQPCHKKVVVKDVLEDIVVKETINHLFKDELLHEIAHTVYLYNKETIENNEELIYLTKELTRVQKSIDNIMKAIEQGIITSSTKSRLEELEVERDEIDALITQEELKQSILVDENDIYEYFKEFADGDIDNPRYKERLLNTFVNKVFLYDDKMVILYNFTGNGNKIDVDLKELEEALEGSYINPDAPPRGRYTNPAYYIVKGLIALVVKIPQKKD

SEQ ID NO: 5737 - protein, 550 aa, unidentified
  source 1..550: note = uncultivated organism
MENKGAGIIGIYARKSKFTGKGESIGNQIKSCMEYIKSHLINETEETKMQIEIYKDEGISGKDIISRPGMVRLISDLEKGKIKIIVCYRLDRVSRSVKDFSGLLTKLAGYGTGFISVNEAFDTRTPIGRAMMYIASVFAQLERETIAERITDNMYALAKTGRWLGGRTPLGFDSVKIEETDNGGRKKSRYCLKEKEDESVIVKLLYYKYLEFGSLTKLETYLVNNNYHTRDGKMYGRYTLKAILSNPVYCVADNTVYKYLEENGYGIYAEQGMFDGKRGLIAYNKNNCKAGGSRVNNAEDWIIAAGEHKGIIGAGTWIKVQEKIKRNSGKSYRYPKTINALLSGIVRCGKCGSYMRPKGGRQAADGEKRYYYQCECKEKSKGGLCKVPNIAGNVLDKMVIAEISGLKGRMVKEYNYLHDTIKKMEKNIDKKNEKNIIQCQIKEYSCQIEKLLDALGKSRNGTTTELILKRIDEVTDIKNKLQEQYHKKQKNSTASTGSFPYEMYASSLLELGQDTWGLIKPDRQKDILKMVIKEITWNGKDAIIYLKCSQ

SEQ ID NO: 5738 - protein, 508 aa, unidentified
  source 1..508: note = uncultivated organism
MQAKAESLLRCAVYTRVSTEEQAREGYSLAAQEERLRSHAKNQGWAVYKLYVDDGYSAGSKNRPALKRLLFDASLKRFDVVLVYKIDRLSRSLKDLIDIVAELNQFDVGFKSCTELIDTTQPEGRLMFHQFGSFAQYERELIGQRTRFGMIKRLKQGLWNGIPPYGYRIVGGKLVVEPKEADLVKKIFRWYLQQNMGVVAISRELNRLRVRPRKAEHWKGTRIHRMITNPLYAGFVRWGGEMAKGTHEPIIEKDIFDIVQATLHQRNHKSRQLRGPNYLSGLVKCDLCGAAMHVTYPGIEPKTRFKYYVCNTRYNHHSCDQAYIRADILEHSVIQEIEKLSVRKDVVSALVKDYVDHNHNTLLPKLEGKKQTALADLESIRSEKEKLSRWLLSANLTSQAVSYLNQQVDRLGEEENKAQEHLWEIEDEINAIQVKSYNAQEICDHLKGFVSAFPTLSDGERKLLIDSLIVEVAVKNKEVTITLRPPLSSFGFLSTEIAPRGIEPLFDG

SEQ ID NO: 5739 - protein, 588 aa, unidentified
  source 1..588: note = uncultivated organism
MRTKTLDLDFPTLDKLQTEKAPSTRTIKKIDPVVRTTPKVRVASYARISTAHDDQKESIVIQRQHFNSLAKRQHDWIYVGCYWDVMSGTKKDKRPGLQRLLADCRAGRVNLILTKSISRLARNVTDLLEMVREMTATGVRIIFDRENIDTGTMDSELLLTILATMANEESKSFAANNRWAIQKRFKDGSYKRGVAPYGFDLVDGHLEINETEAETVRYIFSRMLSGIGCSTIAKELNEQGIPTKRIGEKRKDGVKHSGKWGPATIRGMIRNEVYMGDSRLQKTFKDTLFKTHLNEGQLPQYYYEDNHPAIVSREAFAGANRVLDQHFKECGAVKDAAPTYSFTKKLVCGNCGAMLWRCSDTRKANKRSYWLCSTHHKEGAKACSMKRVMEENVENTFTTMMNKLHFCDLVVVAFRDMMRKGWRERCGEELRSLEAGLAQNSINQMNLQAQRGTMDQAMFHTQMDILKAQEVETRAEIDLIMDSKVGEADKLLALVQAWGMKTKFKAETFEALIEKVVVRDRETFEFQFKCGLRLTETVIYELPEAPIISTPPVPSEQEQLLLPEGETDAGPRRNVIKILPVRKVTEGL

SEQ ID NO: 5740 - protein, 568 aa, unidentified
  source 1..568: note = uncultivated organism
MIRCGVYIRVSTDMQKERGESLETQQKRLCAYVDSKEGWSVVESYKDAGISAKNTNRTEFVRMMSDIEQGKLDAILCTKLDRMFRNTKDFLDITESLEKKNIKFVCLDGNIDTTTPTGRVFSTMRAAFAQFERETTAERVRDVMCSRAEQGKWNGGIVPYGYQLENEELTIHPIESEVVKKVYNIYLKRMSIRYVTQKLNSDGIKTRKGDLWSIISIRRILTNPFYYGVLVYNKRSHSYSGELKRNPKEEYIESKGNHPVIISKELFDEVQSCIKQQSKIIFKSNTKYLMTGLIYCSQCGSRMHGMLTGRPLNKHAYYRCHGHVQKGNSQCKGNAIRVDRVESLIVDALKNFSKDDIKIKASVREDSEGSSRFNDKLKDLECNRDKIQTKRKRLIELYEDNSISKEDFLDRKAVIDIEEAFINKEIVELNPQATNTNINCYSLDDVLKVCKNMKDTFNELDIDDKKELLRNVLTEVKIDKHNVEYAIQILPEVVNDTRNDNVFVDGEDTGARAAIAPTGRARAGARRCRYSGIFRRYRGRSWTGSISMSRCRRFRTRRSAPKRLRKAR

SEQ ID NO: 5741 - protein, 555 aa, unidentified
  source 1..555: note = uncultivated organism
MSRPLVRCAIYTRKSSDEGLGQEFNSLDAQHEACAAYIASQRHEGWKPLPARYDDGGISGGTLERPALQRLMAEIDACRVDMVVVYKIDRLTRSLADFAKLVERLEAAGCSFVSVTQAFNTSSSMGRLTLNVLLSFAQFEREVTAERIRDKIAASKKKGLWMGGVCPLGYDPHPDPNRRELVVNDAEAQVVRSLFDLYRQHGCLSAVTAEADRLGLRSKRTRFSTGRVQGGNRMSQGQIHRLLTNPVYIGRIRHKEKTYPGTHPAIIDEPLWDEVQQRLQAASARRRGAAPGAPVEMIAPLKGKMRDDTGDLLTPTHTQRRGKRLRYYVSNRLISGGTNPSAWRLPAKDLERAVSGAIAAHLAECARSHRGLGATDVLQVASAGDALEKLAARIAQEGIVASAPLIRQAIVAPGKLQVELEANALAQAAGIASALDPVLLLFARDLHCRRRGVEMKIIAGDTTAAPDPVMIRALRNAHDWSARLRAGTPLQKLARTEGIAERYLARIVHLAGLSPRLQQAVLDGTQPAHLTLRKLLQAPLPLDWVEQERLLDPPN

SEQ ID NO: 5742 - protein, 584 aa, unidentified
  source 1..584: note = uncultivated organism
MKKEIIKKRCAIYTRKSTDEGLDQDFNSLDAQREAAELHIRSQAHAGWTIMPQSYDDGGYSGGSMERPAVKQLVQDIEDGLVDVVVVYKIDRLSRSMSDFMKIMELFEKHNVSFVSVTQHFNTDTAMGKLILNILQSFAQFEREMTAERIRDKFAASKRKGMWMGGVPPLGFDVKDRKLEMNPAEAEIVQNIFKSFIETGSATEVTKELKDKGYKSKSWVSNSGRHHKGKDLTKSAIYKILSNPLYIGKISHKGTIYEGEHTGFISPADFEIVKKIKENRNPNDSAARSTVASHLLRGLVFDPDGYAFTCSASKKAKKRYKYYVSTQAVKKSYDDCPIKAVSAPILENVIIEQMRRMLSRPEWVKRITEDIKVNLKGKKPSDTRIMQALQNFDGIWDELFPVEQQRLAKLLINRVVLYPKKVVISLRPLGITGLLHEMLPESNFEGSTPSIDSPLEITVPVRFKVHGGRKYIKTPDGKDLFSARQPKFESNMMMAIARGHHYQEILDKDNDLTIKTLAQREKLDHGYIAKSVRMTQLAPDIVEAIVNGKQPHSLSLTDFMKPFPNGWEAQRQHFGFYQDDNIAA

SEQ ID NO: 5743 - protein, 535 aa, unidentified
  source 1..535: note = uncultivated organism
MMKKRIKCAIYTRKSTEEGLEQDFNSLDAQREACEAYIKSQMHEGWILLDKQYNDGGYSGGTMERPAFKELLKDIENDEVDIVVVYKVDRLTRSLMDFSKIIDVFDRHETSFVSITQQFNTTTSMGRLTLNILLSFAQFEREVTGERIRDKISASKKKGIWMGGKVPLGYLKEDKKLIIHKKDSLKVQMLFEKYLELKSVPKLMQYLKENEIKTKTDKYFSKGQLYHLLANKIYIGKINHKDKVYDGEHEAIIANEIFERVQKLLYENKVDKTCGVKSSSNSLLAGLIYDDLDNKMTPSHSNNHGRRYRYYVSTALKNYKETGSVSKIPAGEIEKFVVETTKEFLQNKEQIQNIVSDHKISKQNKLIYTAQNIQNYSETKLIRAIVYKIVVDKNSIKITYNKNSLINVLNALSNNQEIVMPNKNEEIFPITISKNIKFIQRSRNDNIIILNTKENDSPEPNPYLVNAIVKSYYYHKQIQEGKTIEDLQNEEGLMDSKYIRNILNLKYISPELTEQVFNGTQPKELSLQKLIIFYT

SEQ ID NO: 5744 - protein, 534 aa, unidentified
  source 1..534: note = uncultivated organism
MKRVLCLYRVSTLKQVDKKDDIPMQRRECRDFIDRMDDWVFYDERMEKGVSGYKVSANDRDIIVEIREMAEHKLFDVLLVFMFDRLGRKEDETPFLVKWFIEHGIEVWSTREGQQRLDNQVDRLMNYMRFWAASGESEKTSLRVKAAHKQMTEDGVWRGGGCPYGYKLVHQGRIGKRNRPLYDLVIDEETAPIVREVFDLIVRQGYGTHRAANYLNEKYPNPDKIWVAQTIRTMIRNPIYTGRLHMNDTLSDPIERLRIVSDEDVAFGTDAIAKRIPRKYTDSLNDENDLLPEIVPSKTAVFGAYLLSGIAYCAHCGKKLVGTYHTKHYGDMTYHRPVYRCYNGEIRAKNCTGQRTYSGTKIDNAVLVAVRQYLQYFQKTVDDQWKERARKRLRQEVKNRVGRLESTLERLIKEQDGLKKEILKAISGTSDFDRGLLKEMLEENKNAQLQAEEDLQKAKLEVAREEEKLKQLEQQYQHISAWADEFEDADVDRKKMILARLIEKVEVSKGYNIEIKFFLDQETFVEAVTSQKAS

SEQ ID NO: 5745 - protein, 563 aa, unidentified
  source 1..563: note = uncultivated organism
MTKKKKQKCYIYIRVSTEMQVEGYSLDAQRDRLIRFADYQDMEVVREYCDAGKSGKSVVGRPEFSQMLQDVADGRDDIDYILVFKLSRFGRNAADVLNSLQQIQDFGVNLICVEDGIDSSKDSGKLTITVLSAVAEIERENILVQTMEGRKQKAREGKWNGGIAPYGYRIDKENGILEVDPDEAEIVKVIFDKFAHTDMGFDGIARYLNDHGYVKNRSRDFELGYFTRGLIRKILDNPVYLGKIAYGKSVTEKVKGTRDEYHRVPNEDYLLAEGRHDEIIDEELWNAVQEKRKKTGLKWVKTHSLDHEHILTGIIKCPICGSNISGTIYRSRNRKTGDYTDHFYYRCKHRKMIAPGQYCDFKENIDQNQLNGEVEGIIRDMVHDNAFKSFILEKLGQKVDVSNLETERDNLRTQLRQLTVSKGKLSDQMDRLEVTDRHYDRKYQDMQDRLDTFYDRISELEERISDVNEKINSAMSEQLSSKQLCNILTHFDKIYDKMPDIEKKRFMRDFIESIELFPERQENGSLLKHIDFKFPVSYNAEEDSIVLPVGNDVETVTLLVRKP

SEQ ID NO: 5746 - protein, 659 aa, unidentified
  source 1..659: note = uncultivated organism
MYNTKEGKSCVIYIRVSSERQVKGYSLDGQKHYLAECAERRGMTVIDTYVEEGKSGKSIEGRTEFQRMLDDIQSGKVHTDYVLVFKLSRFGRNARDVLNSLEFIMKYGVHLMCVEDGLDSSTSMGKMMITILGAVAELERENIIAQSLLGREEKAKSGGWNGGFAPYGYRLVKDDDKSKGKLETVPEEKAVVQLVFDMFLNRNMGYTAISGYLNRNGYTRPPAKNAIRPSYGEWSSDHIKRMLSNPVYTGRVAWGKRRTEKVPGKDNEYRLVKQDEYILSEVISHEAFVSKEDFDKVQEIKAIRGKKGNHNIGQYNAHLLSGIVKCPQCGAPMYIGMTKWTNQDGTERRTESYVCSYATKHRGTSVCRRNGVVASQVEDEVMEYTRKIVRNPQFVKDLQEKVMTAVDMTEVENDITAYKNQLSALQRSRDSLERDIDRIAPDDKYAERRRADMTRRLNDLYDQIYKAEDLLQESMMKKATLESEQMSVQSMMGILSSFDAIYDRMNAAERRDLVKYLISEVELFPREEQKTQKRFVKAIAYKFPIEQKVLTQFDECGASVETVCLLVRRNSLHINIDVNVEEMLQEKRGQATYPQIKEYVLEHTGLKVSSLYISQIKRKCGLDVGDNYNKPKSEDAKQPQCPLEKENAIKAALRHFGMI

SEQ ID NO: 5747 - protein, 532 aa, unidentified
  source 1..532: note = uncultivated organism
MPVIKCAVYVRKSTEHGLEQEFNSLLNQEESCKAYIASQAFNNWEYVRTYTDAAISGGTMERPALKQMLDDISKGLINTVVVYKVDRLSRSILDFHNMMKYFDKYNCNFVSITQAFDTSTSMGKLTLNMLLSFAQFEREVSSERVRDKIRASKAKGLWMGGNPPLGYDVVNKKLIPNAVEAANVRTLFEKYLELQSVNALTKYAVAHNIYAKQWTTAKGITKGGRPIAKMSMHRILRDRTYIGQIVNKTDNTVAPGEHQAILPAELFDRVQVTLHNNANNKSQTHGSSNLLTGKLLNHNGVRFTNQRTCGKGKTNTHYYATRGFYLPTPTVDEITIKTIAQFLDADLSTLPPATVDVIKHINIQNISYAEKKVFIQSLVDKVIYSQEKLIFYLVPDTTKLQPFATENFINQKSAPMEFTVNDNRIVITVPIVLQKYANTVFDKTKNGILTITDNNHLILKAFATAWKYRELYERDGNVDEIIRCLHTSPRQFYRYLDIAYMNPGKLNEILSGKLKINVNDLFRIARENQLNV

SEQ ID NO: 5748 - protein, 554 aa, unidentified
  source 1..554: note = uncultivated organism
MIAEKQKSKKNKRYIIYTRCSTDDQAQGEYTTLDAQAHHCKNMLDAFGYKLKSVVNDDGYSGKDLNRPGIQKILKDINKKRSFDGVIFFRLDRLTRNPRDLYSLIDLFRDSDIDFISVRENLDSSTAIGRVVIGILGLLSAFERELTGERVKASALARVRQGRWVGGILPYGYKLIPDGERLPNGTQPNKIIIDENVTPILKLVWEMAADNKSLTFIGLELKKRGLLTKTGKMWQKQILSTIIKNPFYKGYLRYSGEMHKGRHPAIVSEKLWERANQILTAKLPGHNFTPKKRDYYYLLAGLLRCGECGSHMMCNFSGGRDKNKFFYYECNRSKQALGCSVTRISATMFDKEIINFFKRASKDQEIITKALGNAMAESRIKAEALDKIVDEKELLLNEKRHKANTLINIAMDNGVSSGSTFKTKITAFEAEISQLGDELSKLQAKRRVEQMGANSGEFLHHNMRFAMQYIDKSPPEAQKSLIRALIKDIEIFDDKIGINMYVHIPIEDNLPSTLVLNEKHRTLNQDAVLTDNDPVLLSRQHWLPRVDSDHGPIG

SEQ ID NO: 5749 - protein, 661 aa, unidentified
  source 1..661: note = uncultivated organism
MAATTSRPKSHRRKRRRAGPGDNQVGPRRVAIYLRRSTDDEHQPFSIDAQQQALTNYVASQLGWTLVATYSDDASGATTDRPDLKRALGAARAGRYDVLLVYRVDRFSRRLSDLLDLLNELDDANVAFCSATEPFDTSTSIGRMLVQLLGVFAEFERETIVDRVINGMTTKASKGKWSGGTRPYGYLVARDTQQLIPHPAEAPVLRDIFRLYTQDRIGTRAIAAELNSRGIRNRTGKIWSGHTIARILDNPAYTGDIVYRDIHVTDAHPPLIDRTVFDRAREIATARGDAQTQRALSDSDYHLTGLITCPDCGHKYIGTSANGRTKRYRYYTCFSRTRYGRAGCNAPRLPADDLDPAVLQALYDFYTQAGDLLTEAIARAQRHFRDRHVDRRTGHDALNAQIAAKRAAVARYHTAFENGTMDDTTAGPRLRELRHEIEQLTAHRDDLAEALDDEPAAPTAGTIERIIRYLHQTLTQGTSAERKAAIESLIAEVRLTSEGVIIPVFKLPTPGAPLPGEAADVEEPPVRTMVRSVELRGLEPLTPTLPVWCATSCATAPRPDVPDELLKCTGSARVLVGGIAGVAGPRQAPSQRRRPGQAGVSSGWDPPGTSLLRPSCRPACAPCGAGHDRDTSAQSPAEADTAFLSAASRRIAFRVASTALR

SEQ ID NO: 5750 - protein, 559 aa, unidentified
  source 1..559: note = uncultivated organism
MTKASTTRCALYLRVSTEQQAAGNSLATQESQLLRHAKARGYTVADIYADAGLSGKDTNRPELQRLLDDARRRCFDVVLVWAVDRISRSVPDLLRLIDTFREHGVEFAAVSQQFDTSDPAGLLTLHILGSFAQFEREMLVERIKDAHLQLLHRGDWSCGPTPFGYRKADGQLVEVPEEAALVRRMFQLYLQTKSFRAVAIRLNEDGLRTRKGNPWNSRVVGGILINPLYTGANVYGRHAKGDTRLKPKEHWIVVPGMREPMVSPETFQAVQAIADAKKPAKRTPAGGPWLLTGLVRCGKCRSPMYASREQRRDRVLRYYECNGKTRLGTGFCNARNVRADWLEETVLEKLAEVAAHSVPPSSAQQAEEPTDTAQDERRRLQNALDRLKYRIARVFELYETGELDKAAFSERMSRLAGEREEVQAQLAASRAAGPTEACGQRPAVGCESPGGAGTREFLRAVIREVVVNGRSVELVLADLGNQTTMRFTLSVLPAIDTTTLGGRLKKARLEAALEQRDVARLLGVHVQCISNWENGRTRPRRLTIEEIEAAIAQQQARRA

SEQ ID NO: 5751 - protein, 551 aa, unidentified
  source 1..551: note = uncultivated organism
MWYNIYKDTAAELVNIMMLDMYETAAYIRLSSDDGDKEESNSVGNQRKLILNYIKKKQDLKYVGEYVDDGYTGLNFKRPGFQKLLNDIKIGKINCVIVKDLSRFGRDYIETGRYLERYFPDMGVRFIAITDGIDSDKGEYDMLLPIKNLFNQQYAKDISGKVYSAVKTKQQAGEFIGAFPSYGYKKAPDNKNRLIIDEPAAEVVRRIYSMYLQGYGKQTIAKKLNEDGIPCPTEYKRLNGDNYINCRKLDSTMYWTQSTIKHILSKEIYTGNMVQGTRHQRMKGRQKLLDKSQWIVVRNTHEPIIDRETWDKVQVLLKRQHRDLELTKNNSIFAGFLKCGDCGRSMMKNSWKRADGSRTYSFYCGTYKRNGTQFCSPHTLPAALLEQIVLDDLKMIIQNVSDLKKIVDSQSAQMKEKTKSYEKKLHQLSRELERVKNLKRAVYEDYREDLISKKEFIEYREEYLKQEEHIQKQIDILENAQEDNPQETFHENPWVKRLLEMRDIEKLDRDIVVEMIDEIRVYENRRIVIRYNFSDEFENLFPETCELREAR

SEQ ID NO: 5752 - protein, 516 aa, unidentified
  source 1..516: note = uncultivated organism
MPASSPKPVRCAIYTRKSTEHGLELEFNSLDAQREACEAYIKSQASQGWRVLPKPYDDPAYSGGTLDRPALKQLLTDIEAGIVDVIVVYKIDRLTRSLADFAKLVETFDRKSISFVAVTQQFNTTSSMGRLTLNVLLSFAQFERELSSERVRDKIAASRRKGKWTGGTVPLGYEAKDKKLVIHPKEAETVRTIFKQYLRLKSFGLLVQDLDKRGIVTKIRDTKVSKCRGGIPFTYGPLAHLLKNRIYLGEIHHDSKWYSAEHKPILDKRVFDQVQALLVENRIATRTRQFTGGALLAGKLRDDRGNRMSPSFTVKNGVRYRFYVSRALLQGRKTQAGSVARIPAQLIEDIAINAVQKRFSLNSKLPDDELRSHVLDSVTEIAVHPKKIVIVTQPMDQDSSTAETFEIPWQVPIKGVPTPPLPSTNSGQPDPKLLRAIIRSHAWLRDLQSRRFDTIEALAASVKLHPKVVRQELRYAFLTPAITGAILNEDPPLTLVLARFPRALSLAWSDFTYNSK

SEQ ID NO: 5753 - protein, 566 aa, unidentified
  source 1..566: note = uncultivated organism
MNNNEKTIKNVAIYSRKSKYTGKGESIDNQIEMCKEYLRVNYRDDYDEMKLSVFEDEGYSGGNINRPQFQIMLSDIKKRKFDTVICYRLDRISRNTADFSRLMEDFNKLDVSFISMRDRFDTATSTGRAMMMMVSVFAQLERDTIAERVRDNMQELAKSGRWLGGTTPTGYESVEVERIDVDSKKKRSYKLKLINSEMNTVKLIYKKFLETNSLTQTQTYLMQQMVKSKNNKTYNRHSVKSILENPVYMIADSAAWRYFNTLGVDVYCEEKDFDGKHGIMAYNKTDQKTGRTNKKNDIGDWIIAVGKHKGIIAGSEWVKIQKMLMQNKSKSYRKPRSHSALLSGLLFCGECGKYMRPKQSSRLNQSGNRVYHYMCETKEKSKKQLCETKNINGNELDKAVCEEIKKLSADKSTFANQMNKAKKSILLDSDGYANQLKDLEKQVSRNEKLIQKSVETLLIIENTVSHDYVTKEMERLHNENILLNDKIEEIKCITRDYELSDTDFDVLKDMLSSFSKVVDIMTIEEKRRAIKAIVKKVIWDGENVHIYFFGSEDDSANLFPLGKDSK

SEQ ID NO: 5754 - protein, 521 aa, unidentified
  source 1..521: note = uncultivated organism
MRFATYGRKSIYSDKSDSVDNQQRMCREFVDFKFPDDVESFECYQDEGFTGANTNRPGLKRLLADISDGIVDALVVYQLDRLSRDVKDFANIYSSLEEHGVMFISIKENIDTATPIGKAMMYVTMVFAQMERETIAARVTDNMIGLAKKGLWTGGNPPYGYKRERIEINGKKHCTIVPVPDAAEYVLGIYDEFLEGGYSLQAMETEFKRQGRRTVNGAFFSTTQLYKILTMPYCVPATPEVWDFYSALGCQMADERESWDGKCGVMIYGRSTEKNKKHQVQPHSEWVVCEGVHAPFVPAEKWLAVQARFRQNTFEKKQKYDIPLLKGTLRCAKCGGLMQVSRKKLAHGRICSSYYCLKRMRQGVEACDMSMIKCSKLDDRVLAIFSNIEADPSVIRKYSSVEEKKDDGAALRDLERKASAIRSRISRLTESLAEGSAASKYIIAQIESEDLSLAAVSREIEIAKTEARRSASAEKTSAERSQEIAGMMKSLSGLSADEKNAIVREVVQECTWDGETLFLRL

SEQ ID NO: 5755 - protein, 559 aa, unidentified
  source 1..559: note = uncultivated organism
MPGSSKSGKNGRPLAAGPAADVDAPRVAFYTRISTDEDHQKYSLGAQKERLEAFSKAQWGDAWQLHKVYRDTESGTHMNRPGLEEMLYDAGNQAFNTLLVFRVDRLSRKVRELAQMVDELTKNGVTLKSITEPFDTSNAAGKMMLQMLGVFAEFEHATIVERTKVGMEKKAKGGSFVGGNVPYGYRLDPEKGLVVHEEEAVIVRKMFQIYALGREGASAISKQLNEAGHRNRNGRKWCRRVVLYMLKNPVYVGKIRWREVLYEGHHDPLVSEVLFEKANQVLQERHEDLKGRQWHNGDERLLTGIIKCSRCNSHMFGGGGYKKGVHVPYYVCSKRYNDHDCEQDYVRADLLESAIIEDIKAMFRDEQFMARVWAEANKRLCAEKPNLEKEIAKVEAEAAKAQTALDRYFEAFEAGTLEAELCNQKVRDLRARLEELEAEKRELEARRERLELPAIDRTMLASLVENFERVMAEAPNPQKKDLLRRLVKKVLVHDRRTIEVWYGLPNSRGIEDWNNWLPACNSFRRGRGWAEPEIRFRIEQTVEIALGPKGPSKMATSAP

SEQ ID NO: 5756 - protein, 576 aa, unidentified
  source 1..576: note = uncultivated organism
MKRREDKIAIYSRKSKFTGKGESIGNQVELCREYVRNMFGAEYAERCEVFEDEGFSGGNLKRPDFQKMMDRVRKGEFRAIVVYRLDRVSRNISDFAGLIDELTKLDVAFVSIREQFDTSTPMGRAMMFIISVFSQLERETIAERIRDNMHELAKTGRWLGGNAPTGFKSEAVSKVTVDGKTRKSFKLVPIPEEAEIPKLIFDLYAETDSLTAVEAELLRRRIKTRQGKDFTRFAIKGILQNPVYMAADEAAYHYFMEREADVCFPREAFDGTCGMMVYNRTDQEKGRAAIQLPVESWIVAIGQHPGLIPSRQWIRVQESLERNKAKGYRKPRNNEALLTGLIYCACGERMYPKLTQRKTAEGESIYTYVCSMKDRSKGKRCGLRNANGNLLDEAIVEQLKGLTEHDSTFLTQLEKSKQFYTGNRERYDDQLAGLRTEYAKNEQTLNGLIDSMGFVAGSSAKALVVRRMEELAEQNREIENRIRELEMLTTANGLSDSEFDLLRQVLSVFRTSVDEMSVEEKRAAIRAVVRKVVWDGEMAHVVLFGADEGEIEFPDILGQADEATQEPKSPWGEDSK

SEQ ID NO: 5757 - protein, 558 aa, unidentified
  source 1..558: note = uncultivated organism
MARPKARYEILPKTSKSKTWYVGFYIRLSREDSRGNDESESVHNQRLILTDWLNNQFDDDKYVLVDEFVDDGVSGTTDEERPDFQRLLRFIEAGKINCVVVKNLARSFRNHADQGYYLEDWFVIHQVRFVSLYQQPIDTYKDPYGATNIGVPVQGVLNESHAKDTSENVRKVFDKKREKGLHIGSFAAYGYKKNPEDKNALVIDEEAAEVVRDIFSWFLDGMSKNAIVQTLNERGVLCPSLYKRSKGMKYKNPNAGNQPLWNAKTVTQMLKNRLYVGDMVQGRYRVRSYKIHIQDAVPEEEWFIVENTHEPIIDRERFAQVQELLKRDTRMAPGKKKLYLFSGFLRCADCGKSMCRSEVKGTVYYFCRTYKEQSKAACTKHSIKHNLLEAAVLYVIQQQVHMADAYAEVMAHVDKAPLKKSQSSKLDGLIAAKGRELAKVTRYKQSLYQDWKDGNLTHKDYRQMYEDYERRMENIDTAIENLTAERAELEKSTEAENPVLTAYRKYENIDKLTRDILIELVDHIQVFENGSISVRLKHSDEIRRMEESIEANRHSGAG

SEQ ID NO: 5758 - protein, 531 aa, unidentified
  source 1..531: note = uncultivated organism
MANKKETRGNLAISEPQRVIVIEASEQPQDLKLRVAAYVRVSSDSADQLNSFAAQNRYYTTLISGKENWSMVDIYADRGITGTSSKKRGDFQRLIADCRRGLIDKILCKSISRFARNTTECLDAIRELKALGIGVEFEEQHIDTAKLSGEMMTAIFASMAQAESEAISSHVRRGLQMRMETGTFVPAKQPYGYRKINGQIVVYSPEAQIVRQIFTDYLAGCSAREIAEKLKQSKASSSGHQWNYKSVVQILRNEKYAGNSIWQKTYRTDEFPRKTRRNYGERNQYFASDTHPPLITQDEFDRVQQLLAQRKEIYFKGRDIYISLPPGIIYCGCCGAHTRRKKVNGKYYHICRTHDVNSQNCPLGPLQETELHTAFLRLYRKLKHQGANILPQILATLRTIRNQRMLWSEDVIELNKKISNITSQNQLLAVLKQQGGVDPDIFISRSNELAEQLRAVKLEKERLLNATHDDVIAQTQELIDTIEVGPEFLEEFDGELFGELIDRIIVESNERLRFRLKNGLELTEPIERTVR

SEQ ID NO: 5759 - protein, 564 aa, unidentified
  source 1..564: note = uncultivated organism
MKEVEIITANLNVYNKDFVDKVIKKVCAYARVSTDNEEQLTSYSSQINYYTEKIKSNPNWEFVGIYADEGISGTQAKNRTEFLRMIEDAKAGKIDIIIAKSISRFARNTLDTLKYVRELREHNVDVFFEKENIHTLDMDSEMFLTFYSAFAQAESESISMNIKLGYKAKMKRGEACGNPECYGFIWNKEKQELEINEEQAKNVRLMFDWYINGKGVHIIAKELNKRNILTLKGRKWTHTTVRNVINNDKYVGDLRLQKYYVENPITHKTKVNKGERDIYLVKNHHKPIITREVWEKACSITNKRKRPIKDGKPTDYSKYSLRYPFSSKIICGYCGAIFTRKMGRVKQDGTRTPYWACQRRAQERYDCEDSKFIRESLLQEIFVELYNKLNEERTTNNINLLSAIKKMTEETVFEKDIKRLENEKVKLNDRLSNLVDMKLDNIIDNDTYVKKEKELLNKIDEVSEKLNSYKSEIINKDKQIKRLNKIEEVINTTPRLEEFNEDCFKNLIDKIIVGEIDENGNKNPNVIKFILKTGKNYDFLIDNQKYCMSFCKRNKWLLYRILQW

SEQ ID NO: 5760 - protein, 573 aa, unidentified
  source 1..573: note = uncultivated organism
MKKKIKCYTYLRVSTEKQVDGYSIDAQRKNVQKLADLKDCEIVHEYVDAGFSGADVQNRPAFTQMMKDFENGKDDISYVLSFKLSRLGRNAIDTLESLRKMQKHGVNILTDDGAVDSSSAYGNFFILIMSGLAEMERENILAQTFAGRVEKARQGRYNGGQAPYGYKLVPSTDKNKKGILQINEEEAPLIRLIFDRYVNHEKGDTKVAEYLITHGYSKVLRGNGKLQYIDESFVGCVIRNEVYCGEIVYGKRKNTKNSKTGRTVTTLRDPSEWYRAEGLHEPIISKELFEQAQAIRKKNTHYQPKVYDPNHAAIYSGIMVCPLCGAPMHGIGGVGKVKKDGKHGGGQYYDQCSNHCRKRGEYQCEYSKGWRQDKIDSLMSEIIVRVAGNDQFREDLNERIGEAVDTSEYEAQIELLDKQIRNKTKTLKRKSIMLDDFDWDVENADDLYEYMNADYVRLHNEVVALENSRKEVQSTITSIQNQQVTKDTMYKFILEFGKIYKTLPAIKKKEMANRFIEKIEVFPEEKEDGSVIKSVTFRFPIKMGNEQIETLDFDGLTTDKHVETIVLMTHNGR

SEQ ID NO: 5761 - protein, 520 aa, unidentified
  source 1..520: note = uncultivated organism
MDAIYGRQSIEKKDSVSIETQIEKCKIFCNEDYRIYTDAGYSGKNINRPQFTKLLEDIKSGLIKRVIAYRLDRISRSIADFSQLLIMFEKYNVKFVSATENFDTDTPMGRAMINIVMTFAQLERETIVERVTDNYYFRANNGYWAGGYAPYGYKIKHIIGQDGKRHSVLEIDKEQSKIVKKIFDMYINKNMSMRKISQQLNLEKIKTLKGNYKWGICAVNAIITRPLYTKATTKIYDYYINFGVNITNNIEKFDGNMTANLYGKANKTEKVKAIRDYNDMYLSLTQCPPIISNEDWFKAQKIKGGRNLMAPRSNTSKISFLCGITKCGKCGANMVTQGCINRQRKKYHYLICTNKRNIGAAICNNKMIRTDKLEQIVLNDMKQYFSSKNIAKILSKYLKTSKEQNIELLKNKENLENNILKLDIQIKNLINSIADGNGSSLKYINQKIQELDIEKSNKVAELSKLKLDKFSSDTSNILEYIKNIDEKITSSNFEDLKILCKTVIDKVVVNDDKIDIHYKI

SEQ ID NO: 5762 - protein, 793 aa, unidentified
  source 1..793: note = uncultivated organism
MAMANRKQPPATARDGKPTTERVAVYARVSTEMQAEEGLSIAAQLTEMREFVAARGWTVVSEFVDAGITGQTLDRPGLQSLLTAAEQDAFDIVIVHELSRLSRSSVYDTFSIFDQLGRWKVGFASVKEPQFDLANPTGRFLLTIIAAINQYYIDILRMHTKKAKRQRAREGLYNSSITPYGYAHGGSPRVPPVIVEAEAQVVRFMFERYVTGRFSFAEIAEMVNDQGWRTRADRRFSKDTVTDMIRNPFYAGKVMYKESRRGDVGEMFEGQHAPIITEEVWDASVRVRQRHQHRSRILQAVSRPYLLSQLARCHICGRSLRAQGLKSGGYYREMSYERGYDDCPNSRLGTRADALHAQVGAIVRLLELPTDWQAELTQLLGADDEVTTLANRRARLTAERRRLKESYLRGDFDEDEDLYRRALERIRRELEQLPSEDDMGQIKQAAVLLDALSEVWDDADVGDQRDLTHLMLREVQVDVAQGRVRLLYPTAPFVPLFRKIPLLAEREMGSFAPVWTPELARQFALPTLAAQAEPLDRLVVAPFLPVWPWPSVPHARISPALSVILKARRAAGLEQGRVVAVAHPDVPAVELDRRKWPAVTLQTLSLAAALALPADSLACLDTPLAVQNQARLDELVGEVYTVLEPSGYWHFVDLMPSSMPAHWVFTYFPEAWAYVRNTAWTPHKLYTGLRRAGFGAVLQEHTFYQPLSLAAISAIAQRREGILAALADEAYQKGLARLAAALVGADAQTLIGSEVTLVEVAAVKDEQPRPKRRKRPFDAPADVAPEAEAAETP

SEQ ID NO: 5763 - protein, 598 aa, unidentified
  source 1..598: note = uncultivated organism
MPRSAPDHNPPGDGVPCAIYARISEDPDQDENGVNRQLEDCRGLIAQRFGWELAGEYVDNDISATKNKPRPEYHRLLADVDAGRIKVIVVYTTSRLLRTRRERVDAVEKFAAARVRIQPVRGPELNFDSPAGRMLAGILGEVDAHETEQMAERISRAMRQGAERGDYNGPRPFGYDLVMETDRKGRLRASGMLQINEAEAAHITGAVDRIIDGDRPATIVREWNSRGITTVRGNRWTVQSLQQMLLAPYLAGLRARYPRGSDMLRVRDKPIVVYEGRWPAILAAERQDALAAVLTGRRNPNRSGTNVKHMLSGIITCGRCGRGMWSGMPGGGSRARAYVCPTGHLGRAAEVVERWVEFCVFHWWEPNGALDKAREIEARTRGGETGAGLLGENRADRALLERLEDKLADELLDQAAYLRQKQRIEDRIAHRDEVIAQWQRQNEADAITERGDALRGRWRADGKPFQWRVLEASVAKVIVHPVGKGGKPFDPRAIEVIPGGILGQLDPADPVLAVPAPAAGLRRARAPRRAVRALFAANPGADFTPREVAGKTGLSLASVRPIVAGMRKDGEIVAVTPLHRGGGGEREARYRGADADGN

SEQ ID NO: 5764 - protein, 568 aa, unidentified
  source 1..568: note = uncultivated organism
MTGAASNKTSTKRRYRCAIYTRKSHEEGLDQAFNSLDAQREACEAYVCSQAGLGWELIDKAYDDGGISGGHMEREGLQHLLADIRAGQVDVVVVYKVDRLTRSIADFGKLVELFDAQDVSFVSVTQAFNTTNSMGRLTLNVLLSFAQFEREVTAERIRDKIASSKQKGMWMGGRVPFGYRNEARQLFIEPEEAEAVRLMFDLYLKHQTIRLVKKAVDRQGILSRARTGKFGNRTGGLPFSKGNIATILSNPIYAGMIRHKETIHPGNHKAIIEQEKWNRVQAILADRSTRRSTKKKVSSPACFTGLLFDQHGNRLILHHANKKGKKYHYYVSQQSGDDTSKAGLRIPVGKLDHFIQSLITEMLQSRSVLMDWLSLQERVAEEIAAVADAATKLAENLTASNPDERKAIYNQIIQAITVYPDRIKIELDVEGMEHCLQTDLPNETEIMIEKPMTIRRRGQEMKLIIGGIKQQENNFDQALIRLVAKSHHLKTELESGQANSIKAFAETHGIDHGDAKNLIPLSYLAPSIIEDIMAGHQPADLTAVRLKQLACHLPKLWSEQRHLLGFTT

SEQ ID NO: 5765 - protein, 544 aa, unidentified
  source 1..544: note = uncultivated organism
MQTTEIKKIWRATLYLRLSREDGDKEESNSIVGQRNLLRDFLKQHLDIQEYAVQIDDGWSGSTFERPSFKKMMEDVKAGKTDCIIVKDLSRFGRNYLDAGEYIEKIFPFMGVRFIAVNDNFDSYREKNASDDLIVPFKNLINEAYCRDISVKIRSQLEIKRKNGQFLGAFAAYGYFKDPQDKNRLVVDEYAAEVVRQIFRWKVEGASPQDIADRLTAEGTLSPLEYKRSLGMKCSTPLQTNVRASWSAASIIRLLKNPIYIGTLTQGKHTTPSYKVHKRVEKDESEWSVIENNHEAIISKADFETVQKVLALDTRRSPDDTTVALFSGMVFCADCGASMIQKPVSSGGKKYHYYICSANKADKSCSPHRVRSDAIEAAVFPILQRHITAVVDLGRLLSIADTAPLRTAEAVKVQRQLDEKRADYERLQKLLMSLYENLTDGIIDKAEYTRLKQSFSSRAAEAEKQMDALQERLTTIQTHTADTSWIENFRQYQHITELDRTVVVKLIERIMVHENNVIEVILRWQDEYEWQLDIVQQAMLKEAV

SEQ ID NO: 5766 - protein, 541 aa, unidentified
  source 1..541: note = uncultivated organism
MARSTTAQRTRKAATTSTLGDDVRVGIYVRRSTDDEHQPDSIEAQDTRLDAYIGSPPGWRLVARFPDDASGASTERDGPHRALAAARAGLIDVLLVYRVDRFSRNLRDMVMLLDELDAAGVVFQSATEPFDTSTPMGRMLVQMLGMFAQFQRDTIIDRVIAGMERKHAKGKWKGGKRPFGYQVDKTTHTLVVDEHEAVIVRLIFDLYTTDRLGSRAIAKVLNDRGHRTSSGGTWSGYQLIRALTNRVYLGELTFRETTVTDTHAPIIDLTAWEQAQAILDARGESHAHRAASSADYVLTGRLRCPSAARAMIGTRATGRNRTYRYHTCWNLARYDPNKCDFKRLNADAVDAAVLDALAGFHRTQHDLIAHAITHEQTQHQAANADRNAELTTIENEITKTGQAIDRYLTAFERGTMDEDLLTHRLTELRTKTKQLRARRDELTPALDDAPTTPEPATLVAVADHITEIITNGTHNQTNTLVEALIANVTITGPDRLIPVLRIPQPHNNDKVTPTQPAQTAPNGVVRTMTKSVGRVGLEPTT

SEQ ID NO: 5767 - protein, 529 aa, unidentified
  source 1..529: note = uncultivated organism
MNRQRTEGSSALQERKVIVIEAAQRPEAQKLRVAAYCRVSSESSDQFNSFIAQTNYYTGLITQNPNWTMADIYADEGISGTSAEKRPEFQRLIADCRRGRIDRVLVKSISRFARNTKECMETIRALKAIGVGVCFEEQNIDTSQMSGELLTAMFAAIAQKESESISENQRWSYQHRMQSGNFITCKAPFGYRLSKNTLEVYEPEAKIVREIFSRYLQGDSKDDIAQWASTLGVKTRDGKDRWQHTTISYILRNERYVGDALLQKRYTTDSFPHQKKRNLGERDQYYRIASHPAIIDREIFNAAKKLLELRAKKVVTEKTANDPMAKKIVCGACGTMFRKKACGGITYWECRNHNRDKDSCPITQIPEREIHAAFLRLYHKLIHGEPILKELLLNLQAIRERRLLWSEGIIRLNKRICDLTDQDHTLSRMNQCGLVDPDIFISQSNELARQLIAAKQEKEQLLAAAGDDSIPKTRELLETLESAPEYLPRFDGEIFGDLTEKIVAENNTSLRFILKNGLELTEKIERTVR

SEQ ID NO: 5768 - protein, 527 aa, unidentified
  source 1..527: note = uncultivated organism
MATTKRAGILARISLDPDGEAESPDQQLADGRDLAQQRSAEVVATYVERDVSGYKQRERPEYDRLIADMRAGKLDVVIVWAIDRLTRQGVVGIAKFLQVMDETGVALISVTQPFLDTTTALGRGVLGLIASLAQAESENTSTRLKRSHRFSAQAGKPHSGGSRHFGYRQTVRGVTLPDAEGEPGTIVESEEAAIHEAIERVKEGQSLRSIARDFNTRDIKTPMAGQQRKRKGKPYICSGDWSARSLSQMLRSPRIAAINEREGERYAGTWEPIISETEHDEIVQLLTTTTPSARRGKRHLLTGLVRCGNCGGAMATSFYKKNGVDYPRYACVKDPGNDRCGKVAVVMSKADEYITDQLLRFLSVAQLRPLEGDDNESELQDQLIEAQGAMSELVRERFVLRTLTPAHFEGARGELQAQIDALDRRMEALKRAKADRTATLPLGDLGALRAWWEGASGEERRAAVRWAVRDVEVFSVGRRGQFSSDRMGYMLNWSVLMLSADKAGELTPEAEAEYIAQNLAAQTEESS

SEQ ID NO: 5769 - protein, 580 aa, unidentified
  source 1..580: note = uncultivated organism
MAEAKNRPPRPTKWSRCAIYTRKSSEEGLEQDFNSLDAQREACTAFIQSQKHEGWTVLPTAYDDGGYFGASMQRPALQRLLVDIEAGRIDVVVVYKVDRLTRALSDFAKLVEIFDRCGVSFISITQQFNTTTSMGRLTLNILLSFAQFERELIGERVRDKIAASKKKGMWMGGTVPIGYDVKDRKLVVNKAEAKIVVDIYRRYLRLKSVRALRAELNAAGIRSKRRLRPDGMQCGNQRFSQGALFLMLQNRTYRGEATHKGNAYPGEHAAIVDKPLWDAVQSILAENRVARTTGANGKAPSLLTGLLFDEAGERLTPTWSVKKGTRYRYYVSTSLVTGNGKPHSKRHRFPAGDLENVVIERLRTFLSNRGELLDTFADGSLLSRSGRGQLIERGRQIADELDKTPNKSRKTIAALMHRVEVRPDGIRIEIPQTRLTALLTSESSEWSEKRQPIDPSDRIVTLAAPTQLMRVGREMKLLVNDSNDNRAPDMGLLRILARAHDIHARLAQDTSLTVHDIARQEHISAGYIYILLRLRWLAPDITTAIVNGRQPPQLKAQKLMRLTAQLHADWAKQRALLGFR

SEQ ID NO: 5770 - protein, 548 aa, unidentified
  source 1..548: note = uncultivated organism
MQNKTYQAAVYLRLSREDGDVTEGGKQVSNSIANQNELVMDYLKSRPEISVISTYTDDGYTGVNFDRPEFQRMLSDIRDGKINCVIVKDLSRFGRNYIESGRYIEKIFPMLGIRFIAITDGYDSINEDMGSDMIVPFKNLINDAYCRDISIKIRSHMDIKRRNGEYIGAFAAYGYLKDEENKNHLVVDEYAADVVRDIFSMKLCGMSQQAIADKLNADGILSPIQYKKSIGVGLNSSFQKSLKPKWSYNAVLRILKNEVYTGTVVQGKCTTPNYKIKKRIHKDEAEWIRVEDMHEAIIPKSDFDIVQEILLRDTRVAPEQVEVFPLAGMVFCADCGEPMVRKTVPAGGKKYVYYVCSGNKRDKSKCSTHNISEKNLLQGVVGVVQDHIGKVIATADAVEMIHQTHNTKPDVVKLEDRIQKLHEEAEACNGRKKNLYEDYKDGILSREEYSMLKEKYQSQMDDIEKSIASIEADRDGILANGTGRQEWIDKLKKYNGATELDRELVTFLIKKIEVVDPETILVSYRFEKALKEMERVLELYSDGMKEAV

SEQ ID NO: 5771 - protein, 556 aa, unidentified
  source 1..556: note = uncultivated organism
MYHTKQKTEVIFIPGKVYRTAIYCRLSREDGDKVESNSIASQRAICEDYIARHDDLEIVCEPFVDDGYSGVSFNRPNFKKLEDAIRKGAIDCIVVKDLSRFSRNYIDGGRYLEKIFPQLGIRFIAVNDAYDSLTGDPQSDSFVIPFKNLINDSYCKDISMKIRSSLEVKQKNGEFVGAFAPYGYKKSPDNKNQLIVDGAVSEYVQMIFAMYKDGFSIGRIAARLNQMGVLSPMEYKHSAGVKFDTVFKTGDTAKWTYKAVQRILTNEVYIGVLAQGKRGTPNYKVRVVQPKDETEWVKVEGAHEPLVSYEDFMAVKTMMKRDMRCSPDQDEAHLFSGFLFCGDCQQSMTRKTVPSKTKKYIYYVCSTNKHSRTCSPHSISAKEVEEKVFRAIHDQIELVVNLEKALEMIERLPCQNRKAFNYEAQIAKLEEEIERYQKLKLRLYEDLSDGIIDKSEYFEFRNSYTKIIEEKQEALLRVKKEMKQSVTTGATERNWVTLFKQYENIEELNRRVLMALVDRIMIYEDHAIEIVFKYKDEYQQTLEYVLGYADELAVAG

SEQ ID NO: 5772 - protein, 561 aa, unidentified
  source 1..561: note = uncultivated organism
MPDHNVVAIYIRVSTMYQADKDSLPMQRNDLIAYAKVVLNTTDYVIYEDAGYSGKNTDRPRFQQMMTDIRSGKFTHLLVWKIDRISRNLLDFSSMYKELKDLGVTFVSKNEQFDTSTAIGEAMLKIILVFAELERNMTSERVLATMVSRASSGSWNGGRVPFGYVYSKKTQEFSINEAEARIVKMIHDDYEQVHSLTYVARQLNTMGYTTRSGSLWSPQAVYCILKSPFYCGVYRYNVCSDSNHSKVKDEAKWVTVGDHHPAIISSEQKSRIVSLLDANNKLKARSYHSEHIHVFGGIIYCKNCNKLLWSSPVSKRRHLTNYSKYICPSTRSTNSPHCKSTTDLYVGEFVFNFVLNILNLQSSFDSSMSLSALQKRLLFGSVFNQVDHMDEPSLNGVYNMLNSEVPENRVFGKQHLPKEKNSSERNRLIVKRNKIQRASERLDKAYLYSDDSMNEQDYLIQKNKLNEQLSAIDIKIQSLSNDPWKVSINDDEFVATASKFIIQDRLTNRNYVNYEHLASTTDPSVLQTFVQTIIQSIYVSDGRITSITFKNSLECQFFYIQ

SEQ ID NO: 5773 - protein, 534 aa, unidentified
  source 1..534: note = uncultivated organism
MKRNGNGNGKVRTGQHRVRCAIYSRKSTEEGLEQEFNSLDAQREAAESYIASQQHEGWVCLPDRYDDGGYTGANMERPALRRLFEDLEAGRVDCVVVYKVDRLSRSLMDFARMMEAFEKHQVSFVSVTQQFNTTHSMGRLTLNILLSFAQFEREIISERTRDKIAAARRKGKWMGGKPLLGYDLVLGPGGGKLVVNDEEAVRVRAIFDEYIQRQSLIRTVQALNERGWTTKRWTTRKGHECGGQAFDKTSLFRLLSNVVYRGQVRYKDEVHAGEHKAIVDDEIFQRVQKMLRSNGRTGGMHVRNKYGALLKGLLHCKPCARAMMHTYTSKGNRRYRYYVCYTAQKQGWHACPSKSVPAEEIERFVVEQIRAVGRDPAVMAMALDQARAQAMEEMAALESDAKIAEREIGRIHGEITKVAGDAASNGHAASRLAELHDRLRDAEQRLSELRDQAERARRGMVTKAEVDSALEAFAPLWDALSPREQARVLQLLIQRVDYDGANGKIAVTFHANGIRTLGRNGVADDLEVDACPTV

SEQ ID NO: 5774 - protein, 568 aa, unidentified
  source 1..568: note = uncultivated organism
MKTIRCAVYTRKSNEEGLDLAFNSLDAQLEAGLDYIKSQRHEGWEAIKAIYSDGGFSGGTMKRPGLKQLLDDIDKGRIDVVVVYKVDRLSRSLTDFAKIMELFDLKQVSFVSVTQQFNTSTSMGRLTMNMLLSFAQFEREVSGERIRDKIAATKKKGYWVGGQPPLGYRLQQEHEAKGIYIIPEEAEVVRKIFTRYIELRSPLQVANELSGQGHTTRRWVSKNGKKHGGRPLSTAYIHRILTNQLYIGKITHTRNDKTEIYDGRHQPIIDEATWNAAHQIMRKQEKSELHRWTHPHLLKGKIRTMDGYMMSPSSTHRPLTKKADTKQKRLVRYYLSQKAVKQGHKSCPIKSLNAEHIDTLIRGMVLGYLDCDDLLKQSSTVRDRWIRSLIDEVTIATDSVKAGLFTSEIDKLRSHQFKPSAQDASPHPTCIHKPAVEDCGKTITLSLSIQIKKHDGRRMLLSPDGTDLVISSKPEPQQHIVDAIGHAYRWHDELIKSGLKIEAFAEQQRMSRARVRKLLPLTQLSPSVLRHALTGTLPSLVTLDDLIKASHQLDWSKQAAELGLPAAG

SEQ ID NO: 5775 - protein, 503 aa, unidentified
  source 1..503: note = uncultivated organism
MVQVQVIAPYAPQSDKLSVAAYCRVSSNSEDQLNSYRAQVGYYTRLISENPDWQLADIYADEGITGTSMEKRDEFNRMIADCRAGSIDRILVKSVSRFARNTTELMETTRELQELGVVVVFQEQEIDTSQMHSEMQLALHAMAAQEESRSISDNMKWSYQKRMESGTFIGCSAPYGYQLKNGTLEIVPEEAEIVRRIFQMYLSGMGLHEIPRQLNEAGFLDRGKRKWQYSHIKCILANERYIGDSLLQKQYTSLFSETKRKQNHGELPQYYVEESHTPIISKEQFAKARALAERRNIAKPPRPHLFTHRIQCPACGGYYRETFTRGKSYWICANAANYCTPCLPYRISEESIKSAFLNFAGKLYTYQEELLDPPLKLLREIATNGQGEDKKLMELNEQIAVLNDKAASLQKLNSKGFIDAEEYRRQNEILATQRRKLSQERKKKLRGNRALEMLEAIEQLQDQLDSWQDIPTEFSMEKGSLFLRPLEISSFPVGLIISFGIVR

SEQ ID NO: 5776 - protein, 578 aa, unidentified
  source 1..578: note = uncultivated organism
MRKTDRSTSGAIVHCAIYTRKSSEDGLEQEFNSLDAQREACEAYVVSQRHAGWKALPDMYDDGGLSGGTMERPALLRLLADVKTGKIQIIVVYKVDRLTRSLADFAKIVDVFDAHGASFVSVTQQFNTTTSMGRLTLNMLLSFAQFEREIAGERIRDKIAASKAKGMWMGGTVPLGYDVEDRKLIVNESEASTVRMIFQRYAELGSVALLKAELDEKGVVSKIRTGADGVRLSGGNAFMQGPLYLMLQNRLYRGEVAHQGNIYPGQHKAIIDPELWQVVQDRFAANRRARSLGISVEEPSLLTGLIFDADNNRLSPSHAVKKGKRYRYYVSTSLITGRRSEHRTGQRIPAGDIEALVLDRIRSLFASELESSNALAPLSLEAATQRSALHRLTELATRWPKLTPLELREIVRSVLQRAEVNGDGVLLSVSRRALLSIATPNVTLADTTNPIADEAPLTLTISAKLRRAGKGVRLVIGAGSADRIDNGLVSLVGRAIATRDKFLSGHDDSVESMASRLSLRRDYLSVLIRLSYLSPQIVREILAGQHPVELTPTRLIELSKNLPHDWREQSRVLGFSPV

SEQ ID NO: 5777 - protein, 519 aa, unidentified
  source 1..519: note = uncultivated organism
MRRITKIEANRPDPFANPKLRVAAYCRVSTDSDEQLESLKAQTTYYEKHIKSNPEWEYLGVYYDEGISGTKKENREGLQRLISDCENKKIDLIVTKSISRFARNTTDCLEMVRRLVEIGVFIYFEKENINTQSMESELMLSILSSLAENESTSISENNKWAIQKRFQNGTFKISYPPYGYENIDGQMVVNKEQAEIVKHIFSQALAGKGTGRIASALNNRKIPSKRGGKWSGTTIRGILVNEKYVGDALLQKTYTDSNFNRHTNYGEKNQYLIQNHHEAIISREDFEKAALILEQRAREKGIEKRNSKYQNRYSFSSKIIYSECGETFKRRIHSTGKIKYVAWTCNTHLKHKEECSMLFIRDEDIKNAFITMMNKLIFGKDFILKPLLYKLKIMSKSGNLSKIETLEKQIESNRKQQDLLVSLVAKKYLEPALFNKEKNELQMEEGNLIEEKEGLIQDLNGELSKGQEVSSLIKYTNKTAMLVAFDDETFTRHVDKIIVFSREEVGFVLKCGITLRERM

SEQ ID NO: 5778 - protein, 634 aa, unidentified
  source 1..634: note = uncultivated organism
MHAADKTRSSSGTKARVQNIRIACLTRISTDEINQPYSLDAQTNALDAFVAAQPGYVITHRFVDQASGATLKRPGLRSALASARAGEYDVLLVYRIDRLSRSVSCLMEIVAQLNSLDVALRSVTEPIDTRGPVGLMLLQLFGVFAEFERGVLIDRISKGFERKAARGEWLCGRAPFGYQLDSAAKSLVAERGEASVVQAIFSAYAEERLGAKAIAVRLNDDEVHNRSGRPWTNQAILHLLRNPVYAGKITHRDEIYNGKHDPIIDEDLFARTWALLLERSAQSMTSASKSVYSLSGKVRCQVCGGAFVGVGSNGRDGYYRYYICRVRHSSGANACAGARVPADDLEDAVAERLGELFSSFSTFEEAAKTAFDEWAAGRREIEDEVNRIDAEFNEATVAIDRHLRAFEAGTMPPEICAPRVEELSARRDELTIQRDQLIAELHRNPELPSQSEFDALAVEIGDVIAEKEPEGIRQLFDEFIDHVEISSEKIATAYFHVPDIQRPGPIVARVCDKSPMSIDEGVLDAPPKRDPAIKSADILLVTRKRTLPNCRDEVLEALRALVAESGDRPFPVREVYGHMRDLGTAYSEPTVYKAMQRMKSSDPRLPGIQLERVGRQGFRLTENLVANTRSVSQT

SEQ ID NO: 5779 - protein, 502 aa, unidentified
  source 1..502: note = uncultivated organism
MSEQASATPLRAAVYTRISNDPEGREKGVERQEEDCRALAEQYGYDVVAVFEENDVSASTRSRKPRPQYDELMARAKAGQIDVILAYSNSRLTRRPMEVEDIIRLHEHHGIRVRTVVSGDDDLSTADGRMVARIKGNVDAAEAERTSERVRRAKAQAVAEGRYRGGKRPYGFEKDGVTVVPVEASVIREATSAVLAGRSVRAIARELNERGVKTSQGAEWTQMSLRDVLIRPRNAGLLSKGQITHGDFEILGAAVWNAIVSEETWRAVFDVLTEPSRRTNAANNDTRWLGSGLYVCGKPTGEVDAAGRPIKCGARMRTSASGATASRPNHVRKVHYRCAASAHMHVMQAATDDHVMSEVAKLVRDPRIASHLQPAAVDLSAEREERADLTRRLESFERDYALGHITGPQLAKSTALVEAQIAKVDDRLAKAIRRNASSPIFNAADPGAAFLAAPIDVQRSVLASVMQVEIVPAARSGASWSTDRVRLHPLVPSDLQATPALV

SEQ ID NO: 5780 - protein, 526 aa, unidentified
  source 1..526: note = uncultivated organism
MSMQVATYARVSTSDQVDTGTSLADQERRLLAAVTARDGRHVGHFVDAGVSGASDSRPGLDRLRDAVRAGGIDCVMATKIDRVSRSAVGLLALIEDLRSHSCHLMLIDEGLDTSTSAGDLTSGLLGVIGGWERKRIADRTKGGRRAAAELEGRFVASVPPFGYRIVPAPNAKGKRLAVDEDAASTVRRMYELLVRENASSLDAARTLNEENCLTSTGMTWTPESVSRWALREEPLRAASGLWIFDGIPVDIPPILASGEVAYWRTWQDQRRRPGGTLVRGPYLLSGILKMPCGRGAMGRTAGTQRPTYSCRRHYLRRETPGRHDDCYNMPCGPVEETVIDRVSEVLRNPEVLGAAIRERLGLEAAESDYDELVDRLRAVEVAIASEAALFRSQGYSGSTLAAVLAPLHTERQELARAVSHVQTRLAAHGSDRPDLDCLIRSAETGLSNASLATWRQVFMALELTVNVDGYETCSDCGGSGYLPLESGRGRAWPKTCTLCLKGRLPRLTIALDDVSTPLIHGSQPPT

SEQ ID NO: 5781 - protein, 551 aa, unidentified
  source 1..551: note = uncultivated organism
MEKDKTEIFIYSRKSKWTGRGESIENQVQMCRDYIERCIHEAKNADVRVFEDEGYSGKNTKRPEFQKMMKEVKQGKCKYLVCYKLDRMGRNIIDIASLVEELNHLKVSFISVKENFDTSTPLGKTMLYIAGIFAQMEREQIAERVKDNMMLLAKNGRWLGGNTPLGFVSQKDEKVQIDDKIKTSYRLKEDAEEMKIVHFIFREFQEKQSLIKVVEYFLKNDILTKRGKEYSTTAIKDILTNPVYCIADEDAYEYFETMGCQLCFTREEANGTRGLISYAKTSSEMYKNKDNPPEEWIIALGKHKGEIKGKDFVKVQKMIAANSTKSESYRKVKNEIALLSGILYCTCGHAMRPKYYNVKQITEEGERKFSYRCPYKDGTHGEKCNVENAPGNDLDQLVCEELFRYAEPDSRIGTMLEELKKQFENSKSDSVDELGLLNQAIKEKEESINNLIATIKKPGRSQAFIEHIDEEISKLEEECDKLRNRAALLKEGKEAVIKDVNQVDLIISELETFKRSFQTLSVPQKREYLRLLLDKVVWDGETAHIFLYGSH

SEQ ID NO: 5782 - protein, 570 aa, unidentified
  source 1..570: note = uncultivated organism
MASQSQALYPARSSQPLSIVYAGVDSLHAYPRNARTHSKHQIRQIAESIKEFGFTNPVLVDRNNTIVAGHGRVQAAEILGMKEVPIRCAIYTRKSSEEGLEQAFNSLQAQREACEAYIASQKHEGWTAISKIYDDGGFSGGNIERPALQELLNDIAAGQIQTVVVYKVDRLTRSLSDFAKIIEAFDAKGVSFVSVTQQFNTTTSMGRLTLNVLLSFAQFEREVTGERIRDKIAASKRKGMWMGGVVPLGYDLKDHKLFVNPKEAIIVREIFTAYGRLGCVSKLRAYLAKKKIRSKVRISAEGRRSGDVPYSRGALYEVLKNQVYIGRITHKGDSYPGQHEAIVDQALWERTSALLATQNRGRRQTGGKVDMSMLTGLLYDADGNRYTPTHAVKGGKRYRYYTYQAAIQKRALPSQFNRLPAKEVEQLVVSRIAKLFDSPEELIQAVADMETAIRDLKRLTTAGRDLARSWDKLSLKESGSKIRSLIVRVLVREAVLEIEVSPEALERMLLLPELRSTESGSMPPNRSLPNSLLTGKNTGNFAEFGPSKSTLVAVGLSFHLSSEPNRQFQS

SEQ ID NO: 5783 - protein, 521 aa, unidentified
  source 1..521: note = uncultivated organism
MENTVVTIAPSIKPKFILRVAAYCRVSSDSSDQLNSFAAQVQHYTKFIDDNERMELADIYADEGITGTKTSKRDDFNRLIADCKKRKIDRVLTKSVSRFARNTADSIMYARLLKEYGVSILFEKENIDTAYMSSELLLALSGAQAQEESISISKNMRWSIEHRMKSGTFIAGHAAYGYKLVNGEYTIDENEAKIVKLIFKSFLSGMGKKAIADMLNGTDAPKRNDKVLWRIATIEYILTNERYIGDAVFQKTFKTETVPFIQKTNRGEKAKYYVENTNPPIISKEDFKAVQQLIKNSSFAKQRNKITVDPLTQKMHCKCGAAYKPLTVNGKRYWECFKHNSDGSKCDSRRIPEKDIYEAFITMINKLRMCHADILPVAITQTERLQMKAGGSASKIKEIDKQIAELNNRNLVLARLNTKDIIRPAEYAEQSSAINNRVNILRSERRQLLKEQDENNILSGLRRLNDLLSNIKKPYTEFNTDILKNIVEEITFPTDTNICFKLIGNLIITETIPDRRRYKSQ

SEQ ID NO: 5784 - protein, 539 aa, unidentified
  source 1..539: note = uncultivated organism
MPTKGEHPNKGWAATYGRFSFVQTRWTQESPEIHDRVNRQTALLHGFKIKPGCDFYDHGVSGSKDVRLPELERAIKAIVDREVEALVVPALDRLSRRGMRHVGEVLDAVEAAGGRIVFAKEGLDTGQQASRAIIAFLAEQARAEAQAISWRIEQWHEGRRLKGKWAAKRPYGYLIVDAKLVPHPQEAPIVRRVVAEFLTGKSPRNIARDLNAEGIPSPGAAKAAEIQAEGREARSRLDSSWGATTVRSVLINPALCGWRQHNGKVVLGPDGEPVSFGDAILTAGDRARILAEFERRTTVVYGGRNFGRIGGKTGSGRPARYLLTGIAACDSCGYAMAGYLTHKATYLSYRCSSMTHGYGCPGRAYIRADTADAEVKRQLTARLAAMDPDDPILGAIAERWRSFAMPEGEDERVVLESQRDAIRSRIVDLEEARYVRGEFDSVDEIIRWDGMMSRLKAQRDAVLDGIEQLGPPADFDLAILLDTYQSREAWDETPLAHRRELLKIAVDKVSITPAYRSRSIPVADRIRLVLAGEESGSVG

SEQ ID NO: 5785 - protein, 516 aa, unidentified
  source 1..516: note = uncultivated organism
MTSKSIVVRRCAIYTRKSTEHGLELEFNSLHAQREACEAYIKSQTHEGWQAIPRNYDDPAYSGGNMERPALQRLLKDIDAGLIDVVVVYKIDRLTRSLADFAKLVELFDKKSISFVAVTQQFNTTTSMGRLTLNVLLSFAQFERELSSERVRDKVAASRKKGKWMGGSVPLGYVSKDKKLLVDEAGAKTVRMIFDRYLELKSFQKLVDELNRKRVVTGSREIKGKISGGVPFAYGPLAYLLKNRTYLGESGHKGSWFSGEHDAIVDRDVFDQVQQLLKANSLGRTGRRQQNAALLTGLLFDDRGNRMSPSFTVKNGVRYPFYVSSTLLRGRKPNAGSVARVSSIDLERAVMEGLRDRIHGLGDSGTPEITIGCYVARIVIDRESVTITLKANFDGSPPTIQIPWSATSQRKRSRFEISTEAATHTPNPQLVQAIVRAHAWLRLLSNGTHRTVESLGQSVGVHPKIIRSGIRMAFLAPNIMKAILEGEQSTEGRVKDLVGGLPLSWLQQRRNGLEAF

SEQ ID NO: 5786 - protein, 532 aa, unidentified
  source 1..532: note = uncultivated organism
MSAMVARRNGHAAPAAAPAREVRRCAIYTRKSTSAGLEKDFNSLEAQREACEGYVRSQAHAGWEVLPNDYDDGGFTGANLERPAFRQLMDDVEAGRIDVVVVYKVDRLSRSLLDFARVMDRFNRAGVAFVSVTQNFSTADAIGRLTLNMLMSFAEFEREMIAERTRDKIAASRRRGKWTGGPVPLGYDVVDGRLAVNELEAVTVRELFSLYLEHRSALVTAREMNARERKTKFIRTREGKIRGAKPWAKDPVLRILQNPTYAGYTSYGDELHEGEHDALLDRDEWTQVQALLAANAGSKKLPGRNPDYLLRGLLYCARCGWAYTTGSTRKGDREYRYYRCLTRDKKGREACPSRPLPADAIEDYVIGHLRTVAAEGDLVADIEERLKARVAEARETLGSERDRLPARVAELSAEGHALLNSLAGVTGTGRRLVEDRVQKVGAALAQAEARLAEVERKLAALDEAEVTAAWVVEALRDFDAVFDALTPDNRARLVRALVARIDVDEPTGKLTITLADLDAPWDGGAMAQETTP

SEQ ID NO: 5787 - protein, 569 aa, unidentified
  source 1..569: note = uncultivated organism
MAKPKRPAARQDRQSVRCAIYTRKSTEEGLEQEFNSLDAQREACAAYVLSQRHEGWVELPTMYDDGGFSGGNMERPGLKQLLADVETGKVDVIVLYKVDRLTRSLADFARIVEVLDGAGASFVSVTQSFNTTTSMGRLTLNVLLSFAQFEREVTGERIRDKVAASKAKGMWMGGVVPLGYNVVSRKLVIEEEQAESVRTIFELYTELKSTGELSDELHRRGITTRARTLSSGASYGGGRFSRGALATMLQNRVYIGEVEHRDQVYAGEHQPIIERELWDKVQELLAANRHERRTSSRITDTSLLAGMLRDRLGRPMSPTHATKGTRRYRYYVSREDEALADHRLWRLPAHALEQLVLERLGAAIGEGNLLTERLSAPSGETVELVRQRCSALAETLLAASPNVARGMLHDLAVEAQLQDERITLGLDASGLLEQALGSDAQMLALELHDTSRIMITVPIAIRRRGQELRLVCQPSGPIPGEVDATLVGLIARAHQARETLVENATDVTDAERPHLTRLARLSYLAPDVQAAILDGRQPLELTARGLLRTATLPACWTMQRQVLGFASCA

SEQ ID NO: 5788 - protein, 589 aa, unidentified
  source 1..589: note = uncultivated organism
MPIAIYARVSTEEQRERQSIETQYELGQSFCKVQNLPVYRVYGDNGVSGTIPLDRRPEGSQIFRDARLGKFDELLVYKLDRLARDARLTLNAVAELEKMGVRVRSMTESFDTSNATGKLMMTMLAGFAAHEHSVIKERSLDGTNRVARAGAWLGGIVPFGYRKTGEKGTARLEISSADIPGLDLSEADVIRMIYRMAAVERRSCYEIAARLDELRVPCAYRRDDRMVLRGKRRQRTAGLWRPGRVRNLIVSTTFKGIHEYGKRTRTKGRQTISRPVPAIVDEKIWSKAQANLKAHFLFGVRNTHNHYLLRGLMKCACCNLTYIGVANTRPSGRREFYYRCNGNQGARGLYGAHGERCPSKAVRGEALEEMVWGDVLEFLRNPSVVIERLQARMRDEANDSTKNRDRLRRLRGLLEGKAEERNKVVGLYRRGRLNDAELDHQVEEIDKDAAGLTTQIEELEAKLSGTESNGAVLEGAEALLTRLRQRLDQPLTYERKRQLVELLVGGIRIETIRNGAQRENVATVTYRFPSAVGVCTDRGSLPPRRSFSSPSGASAQNMVPRLDEAHVNKHAVKGDAVIRRTKLMRIFQG

SEQ ID NO: 5789 - protein, 547 aa, unidentified
  source 1..547: note = uncultivated organism
MKRKVAIYARVSTEHEAQLSALENQVQYYDGILKQHHDCILYDRYIDEGITGTSTNRRKNFMRMIEDAREGRFDLIVTREVSRFARNTVDALQETRKLKKIGVEVYFTEDNIWTFNDEDGELKLTIMATLAQNESKKTSQRVKAGQMISFQNGVIYGTGNILGYDKVGKDLIVNEEQAEIVRFIYSEYLNGKGTVSIADELTRREAKTSTGLTNWSAAYISRVLRNPFYSGTIVYRKSYIPDYLEQKPKMNYGEVEQVIVEGRHEPIVSKEDFKKVQEIMDSHSKPIKLGRRQALGTPKNIWSKKLICECESTFNRKVYHKNKNSTTYCYVCYNKKMHPKTKFKTTCDVKEVQEWKLEYMAETIFRNLTRNTEDRKELFDRLMKGVEIDKHPEIKIKKRIDKLNQLVENESSKLDRLIDDYLDETIDVTMYDMFQKKLSNRIEKYKIEINELEKKCNSLEPLDVRIENVKKSIRRLLDINYNGVNEKVIEEFVEKIIVHKDYFEWKLNFMNETIKLEINGKSKKDGFLIEHTENDIKWYNIINSFSP

SEQ ID NO: 5790 - protein, 518 aa, unidentified
  source 1..518: note = uncultivated organism
MTVMSDCLKDGQSAKLSCAQKRRSNNITAFIDAAYCRTSTEIQRDKGYSVPRQKELLTEHARTKGCGNLTFYIDDGHSSADLERPELVRLRRDIEAGRIRSLRVYSYDRLFRSLIELLSFINFVQKHKIEFISLKEQIDTTTPQGNLQLQIMGSLAEFERRQVVQRVQDAMYHKVRKGDFCGGQPAYGYRVKDKALFQHPEESKVVEVIYDKFIESKSIRGVTLWLNKNGHKTKRGKTWATATIKRILWNPLYMGIQTYGKRKGGAKTYAPEAEWMREKVRGLEPIISKEKFDKVQSLIKARAFKKPDRRGRVYILSGLLRCECGGRMGGYTHPDKRKKGRSYSYYKCNDHIHKGSCVCPGNSFTKEDLEELVLQEVNARVNLKFDAKEKASAQLDGEASSNQKRMQTLQANLRQLSSKKQKLLDLYSEDGIDKSGLKEAIARIDSQTNSTNEEINKLSLELDPREQDMRADVFSQLNDLKGELFNLSRKTKQTILQQVIKEIVVTRDHKVKVSIYEI

SEQ ID NO: 5791 - protein, 518 aa, unidentified
  source 1..518: note = uncultivated organism
MNKIRCAIYTRKSSEEGLDMEFNSLHAQREACEAYITSQKHEGWVLLKEKYDDGGISGGTMNRSGLKALLDDIEAGKVDIVVVYRVDRLTRSLADFARMVEIFDERKVSFVSVTQQFNTTSSMGRLTLNVLLSFAQFEREVTGERIRDKFLASAQKGIWMGGFLPLGYNVKDRKLFINENNAEIVRHIFSRYLELKSVRLLADEVAAENLRSKLIDAIVNDELRPPKATLSRAGIYKLIDNPIYIGKTKHKGKIYEGQHEGIIDIKTWEEVQALLKNPNLRQPQTPRKTTLSPLLGKLIDAENDDLVATFTKRRNEYHRYYISRRAKCNADRSGWRLPALRVEEIVSTQLKAFLSNPSFLSAALTATTGDIYVLNQVIAKANEFLSKSETEIFQSILKQAQFRNNDILFRINLKPIFPNDINSEMAEIIYEYTVPLKMQRKTIGMTLVVPTEKEQAKEVDANKLLAIARAHLWWDDWLNGRAQSMKEIAARDGFHPCYVGDVMHLAFVEPREVERMVG

SEQ ID NO: 5792 - protein, 515 aa, unidentified
  source 1..515: note = uncultivated organism
MTRRTTPSVSATATKRCAIYTRKSTSTGLDSDFNSLDAQREACLAYIQRQPGWTLVDERYDDGGFTGANTDRPAFQRLLADVDAGKVDVIVVYKVDRLSRSLLDFVKVMERLGTAGASFVSVTQNFSTADAMGRLTMNLLASFAEFERSMIAERTRDKIAASRRKGKWTGGPVPFGYSAKDKKLVVNEVEARVVREAFALFLQHRQMAKVARELNERGLLPRGSSRPSRLGLRWTKDSIARVLRSPLYAGLMMYGDELHPGEQPRIIDDATYRQATRILEGAGRELRFTGLNPDYVLRGLLRCAGCGQAMCPGSTLKNGKTYRFYRCSTRDKHGKDACSARPLPARALEELVAERITAETADVKLVQHIERSLRARIEAQRASLAAIRADLPGRVASASAAASKLADELGKLDGRARELVEAKLRVEADRLVAAERQLAETERDLADLEVADAEATWMLGALRDFANVWALMTPENRGRLLRALVAAVRVNDATGEVEIELVNFSADARAEEAAA

SEQ ID NO: 5793 - protein, 506 aa, unidentified
  source 1..506: note = uncultivated organism
MASTNSTDPKVVRCAVYTRKSTEEGLEQSFNSLDAQRDAGESYVRSQSGEGWVLLETRYDDGGYTGANIDRPALRRLMTDAQAGKVDCVVVYKVDRLSRNIRDFARMMEVFDKSGTTFVSVTQQFNTTTSLGRLTLNILLSFAQFEREIISERTKDKQAAARRRGKWTGGHLVLGYDLDPATGKLVVNEKEAELVRRIFNSYLEGETVFSLKAKAAALGWRNKQWTTRQGKTYGGAPMGRCHFYSMLSNVLYTGKMRVGDELHPGEHEAIIDEKTFDLAQAKLKCNSPTGDRRQQMRMESLLRGLIYCSCCGSSMHQTYSASKEKRYRYYICSRAQQPDGNDCITRSVSAPVIEDAVIASIRRVSVHERVIEETARIIRFRLTNDINRLGDELKTLQARVKNLKSQVARARESEEQRKVELANQIHRGECRVAELKREIAKLERVRKDGAQLPSTMDAFDSLWKSLNLREQCLLLRQLVEKVGYESRTGRVTVSFKSASVAALCQP

SEQ ID NO: 5794 - protein, 528 aa, unidentified
  source 1..528: note = uncultivated organism
MTAKSIKPVRCAIYTRVSTDQGLDQDFNSLDAQYDASQAYIRSQAHAGWALIRSRYDDGGFSGGSTERPALQRLLTDVRARKVDIIVVYKVDRLTRSLADFAKLVELFDSHGVSFVSVTQQFNTTTSMGRLTLNVLLSFAQFEREVTSERIRDKIAASKRKGLWVGGKAPLGYEAKDRKITVIEKDAELVRSIFRRYLELGSVNRLMVDLRQRGVLTKAKSVKNGRTIGGIPFTRGPLYYLLRNRFYIGEVAYKGEILPGQQSAILDRDLFNAVQAKLAEQQNNQTRARAKSDALLMGLIFDDRGHRMSPSHACKQRVRYRYYVSLPVLHGQPDPVGSVCRVPAAEVEAVVSDALRCEIPPATGLDHRELIRTHVARIEVQSHKLVVELQPLTPPQPSEDGTDRKVIQIPWQKPPSKRRREIIVPDSSNETRPIRADARARLVAAIARGRRWLNELVTGAVTDIEAIAVRERCSVRKVNMTISLAFLAPALVQAAIEGRLPRGIGIARLSDPTAEWSRQHQELGLPVP

SEQ ID NO: 5795 - protein, 548 aa, unidentified
  source 1..548: note = uncultivated organism
MASAKMLRCAIYTRKSTEDGLEQEFNSLHAQREACEAYILSQRHEGWTLVETHYDDGGFSGGNMERPGLHALLQDVKIGLIDVIVVYKVDRLTRSLADFAKIVERLDAKEASFVSVTQAFNTTTSMGRLTLNVLLSFAQFEREVTGERIRDKIAASKKKGLWMGGPVPLGYEVVDRKLIPVPEEAERVRTIMRRYIASRSANELIAELEADGIRTKVQKRTSGPHRGGIPFRRGSLFHLLKNSIYRGKIVHKGEVYDGEHEAIVDKKLWNSVQQRLREKAPPRMRSENDPQRALLRGLLTDPERRPMVPTYTTKGSRRYTYYETRKDLARPDDIPATRIGQGQLERYIMIQLKTLLRDEHALRRISAEEEGGALSDLFEKARLAADRLAHHASRQTIISQLIAAMQIGRDRIDVRLNAEALGCSNGEQWNWSIPLPARKPFREAKLRIDRDADAPPVDTGLIALLGDAFQARELVIAGPNLSINQIAKREGRCRKQLMKLVRLSWLSPIIVEAIAEGRAPARLTRKRLLDLDLPLAWSDQEEMLGLAH

SEQ ID NO: 5796 - protein, 556 aa, unidentified
  source 1..556: note = uncultivated organism
MPPDSSKSLRAAIYTRKSSEEGLDQAFNSLHAQREACENYIASQRSEGWRLVSTEYDDGGLSGGSMERPALRRLLADIEHGQVDIIVVYKIDRLTRSLADFARMVEIFDAHGASFVSVTQQFNSTTSMGRLTLNVLLSFAQFEREVTGERIRDKIAASKKRGMWMGGFVPVGYLKRDRSLEIDPEEAETVRLIFERYLQLKSVRLLKEDLDASGLVSKTRIGKNGLKLGGKPYSRGKLYKMLSNPIYVGEIRHLDTCHPGLHAAIIDRDTWEKTQRTLAQHAVRGAGETAKANPSPLAGKLIDENGQTLTPTHAVKKGLRHRYYVSRSLLCAGTEPNGGGWRLPAREIERCVAVAAASLLEEQSLLLAAIRDNGIEADRIISILEEAERWALKLRSSAQSDALALLIDRVELKEHGLKLSLLLPRPQTSIPETLKLEQLISVRMKKRGVELKLVIGNERFRPASVDSILLKTIARAHRWLDWLVSGEVKSLNEIAAREDITRSFVGRIIRLAFLAPEIVELITAAKQPPELSAELLTKHLHLPFDWDDQKRLLNIS

SEQ ID NO: 5797 - protein, 507 aa, unidentified
  source 1..507: note = uncultivated organism
MAEITIIPAKERSSEIVRTAAYARVSSDSEDQLNSFAAQIRYYTELLQNSTDAVFVDMYADEGITGTSAAKRADFQRLMNDCRKGKIDRILTKSVSRFARNTPECLAAVRELKALGISVYFEKENIDTAEISTEMMLAIYSQFAQEESISISKNCRMGIKKRMMDGTYKNATAPFGYDYVNGKLQINHEKAKIVQQIFDWYVSGLGMLEIATRLNSLDVSKKVWRHKTIHIILTNEKYVGDTLMQKKYTTDTLPFRNVINRGEREKYYVSETHEPIIERAVFDTVQQILSTRNKPCGYAIEKSPFRGKIYCGNCGNTFRRKTHNDCVRWVCRNHDISASNCIIRQIRETEFQAAFIRLWNKLQTHYKMILVPILRQIKTLYNKNQSGNTQLATHRKEIAEIEQQIHLLAVLNTQGTLDSAYFKERSQELDRKLLTAQRQLNANLDDQDSERLDKLHKLIGIFEKAEPITEFDEIKFEQIVEKIMVLSESEIRFDLIGGIGFTERIAR

SEQ ID NO: 5798 - protein, 530 aa, unidentified
  source 1..530: note = uncultivated organism
MNKIRCAIYTRKSTEEGLEQEFNSLHAQRDACEAYVRSQASEGWIASAAEYDDGGYSGGSTNRPGLQRLLTDIHRGEVDVVVVYKVDRLTRSLSDFAKIVDLFDRHKVSFVSVTQAFNTTTSMGRLTLNMLLSFSQFEREITAERIRDKIAASKAKGLWMGGRPPLGYDGVGRRLVINTDEAELVRHIYQRYLELGSVLTLTVELKTKDVRSKRWTNKLGLEVGGSLFSRGALYHLLANPVYRGTICHGELRYENSHPAIIDEATWQAVRARLDANVSALPSTPRLAATSLLQGVLFDDRGHPMRVVHCTRRGQRYRYYVSSAALHKEGGQAGSLPRMGVGALDAFVLDHASIALSPNWRPSEPLEDRVRSALIRVAISEKHVALVLRADAANPNQKLEHASVREIEDGIELSVGIRLKQRQTAILIEAAGSARQAPRVDRALLRAICLARTWARLLASGEVGSVRDLALRYGFCNHYTAKLLPLAWLAPDLATAILDGTQPNSLTLGALVKQAIPMDWNEQRALFATFG

SEQ ID NO: 5799 - protein, 554 aa, unidentified
  source 1..554: note = uncultivated organism
MKNHATKPRSRCAIYTRVSTDQGLEQDFNSLDAQREASEAYIKSQAHEGWTLLRSRYDDGGFSGGSMERPALQKLLADVQARKIDVIVVYKVDRLTRSLADFAKLVELFDAHDVSFVSVTQSFNTTTSMGRLTLNVLLSFAQFEREVTGERIRDKIAASKKKGMWMGGVVPLGYRVESRALHIVEDHAEIVRCLFRRYLEAGSATRLKQTIDTENLRLPVRIDGAGRSTGGGLFSRGHLYKILSNPIYIGRIAHKGQEHEGQHPPIIDQDLWAQVRQSLKDHLARGKARHETQSSDALLVGKLFDDRGNRMTPTWARKGSKRWRYYVSQAVLQGDKTKAGSVARVSAPEIENRIVDAIGKLAQRAGSEFGPSGCEQAGDNATSPEGGRAASDRHAEIRSLVDRITLERTTIRIALSSDLEEYEEAKVLTIPWTPPSPYRRREIIQGANVESAIARPMRQNARLLVIDALRKAHRWLDELLADPRQTVEAIASREGKSERSIRMMLSLAFLAPDIVKAAVEGCLPRGFGLTRLIDLPIAWSDQWEALGLKAPVRA

SEQ ID NO: 5800 - protein, 533 aa, unidentified
  source 1..533: note = uncultivated organism
MNKERKTVGSLALDQTPRVIAIPSIGQEETRKLRVAAYARVSSDSEDQLHSFAAQTAHYTELICQNPDWELVDVYADKGITGTSAEKRDDFQRLLADCRRGRIDKILVKSSSRFARNTKESLEAVRELKSLGIGVCFEEENIDTAELSGELVTAIFAMLSQKESEAISERVRWSYQMRMKAGKFITCKAPFGYDLVNGKLEINENEAQVVRYIFQQYLTGQSVESIARELTQREIPTKEGGPCWRMTVIGYILGNEKYIGDALLQKSYMTYALPHRKVINSGAHPQFFVRDSHPAIIDRKTFEQVQRLLERRREGLHQRPHGKYLFTGKITCQVCGSKFKRRSIDESSVFWVCQTHSRSPEKCPITQVPEQQVKAAFLCMYYKLRNQGINILKQLLKDLKAARESRMLWSMDIVKLNDRIADIIGQDRLLAQLKQQGLVDPDLFISRRDKLAEQLRTAKLEKEHLLEAEEDQTIQQTSNVLNALESGPEFLAEFDEELFSELVEKIIVEDAEQLRFRLINGLELTERMERMVR

SEQ ID NO: 5801 - protein, 560 aa, unidentified
  source 1..560: note = uncultivated organism
MTNPRIRRCAIYTRKSSEEGLEQDFNSLQAQREECEAYIRSQRHEGWRLIEAPYDDGGLSGATMERPGLQRLLADIRASRVDTIVVYKVDRLTRSLADFAKMVELFDAHAVSFVAVTQQFNTTTSMGRLTLNVLLSFAQFEREVTGERIRDKIAASKKKGMWMGGNVPLGYDVRDRKLLINPGEAGTVQRIFRRYVALGSVRRLKEELDRDGITSKPRAGKTGQPSGGRPFSRGALYQLLSNPLYIGEIRHHGVCHPGLHEPILKRDLWDRARRRLSENGLAPRPRPAKVDASPLAGKIFDESGERLTPSHATKSGRRYRYYVSRRLVTSTAREGQPGWRLPAREIEQAVAEAAAMILDDTISLTTDLKEAGLDARQLKAALTAAESTRRKLGDDGNRSGALQALIDRVELRPDALGVTLRLKPLLADAQHSQLAIDPRVNRVVPLQIKRRGIESRLIIGARSTEIDVSLLKVVARAHRWFMELTSGRVTSLVEIARREGVSGQFIGNLLPLAFLSPKIVAAIAEGRQPRDLMAKAVIKCASTLPLDWAAQPLHLGGFAQ

SEQ ID NO: 5802 - protein, 545 aa, unidentified
  source 1..545: note = uncultivated organism
MEAKELYHAGIYLRLSRDDGIFGEGGSIASQRELCAAFVEKCTDMNIYDIYVDDGYSGANFDRPDFKRMMEDVKGGLVDCIVVKDLSRFGRDYIEAGRLIQKTFPALNVRFIAVTDHFDSLTADYHESTLVLPVKNFVNDSYCRDISNKVKSHQRMKREKGEFIGAFAPYGYMREEKHKNRLVPDPYAAGIVRDIFKWKTEGMSNLAIAEKLNEAGVLSPMEYKKRKGENYSTGFAVRLKAEWSAVAVKRILTNEVYTGTMVQGKSEKINYKLAECRPRPQEQWVRVEGTHEPIVTQEEFDRVQRLLAAGIRAPQGQTKAHMFSGLLYCGDCREPMTRRVNRYQGGEKIYFICSTQNKGRGCDRHSISEEELKEAVLNGLKLQTALFLEDEKVLSGVGALTVSDEEQKEREQEVVRLRREEETYLSLKDDLREDVKRGILTQEDYYTFQSIYEKQQVEIQKSVRRQEEGIAGLVRLQNEWKAWLETFQKRPRLEVLDREMLLAFVDRILVYEDKRICLEVASGEKKGIFSRDLCQTVRGQSKCEE

SEQ ID NO: 5803 - protein, 555 aa, unidentified
  source 1..555: note = uncultivated organism
MSAKRPLRCAIYTRKSTEEGLDQEFNSLDAQREACEAYVASQKAEGWIALRNRYDDGGYSGGTLERPALRRLLGEIENGSVDVVVVYKIDRLSRSLMDFTRLVELFDRKSVTFVSVTQSFNTTTSMGRLTLNVLLSFAQFEREVTGERIRDKFAASKKKGIWMGGNPPLGYDVSDRKLIVNPAEAETVRLIFQRYLDLGCARLLADDLVPRGVVSKRRTFGDGRPRGGKPLGRSALYCILNNRTYVGETTHKGASYTGEHDAIVPRELFDAVQHRLAELGRPLFGKVRASQDAPFAGRLFDETGASMRPTYSVKRGGIRYRYYASAPTLKGQRSTAAISRIPAPPFEAYLTSVIRRLDLPGVETDDEAKATVDRIEILADSIAVRLHRDAALAVRRQLASDSSKRRDRDLVDEQRSHLIDGEAIADDGAHLIVSLPVRARFRGGRATVRYPAGFAQQPVQPDIAMIKALARGHRWRQMLMDGEAASIEEIARRFDLDRGHVGLTLNLGFLSPALTRAIVQGAQPADLRLTDLLAADIPLSWESQRETFRESQRSR

SEQ ID NO: 5804 - protein, 599 aa, unidentified
  source 1..599: note = uncultivated organism
MAERTFRCAVYTRKSSEEGLEQAFNSLDAQREAGCDYIKSQKHQGWVAVSSIYDDGGYSGGSTDRPGLQRLLADIQSRRIDVVVVYKVDRLSRSLADFARLMQTFDENQVSFVSVTQQFNTTTSMGRLTLNMLLSFAQFEREVTGERIRDKIAATKRKGIWVGGVPPIGYRLPREEDEGHVPGDRTLRVVEPEAEIVRSVFQRYIETGSLVVLSKLLHDAGHTTKRWRSAVGNSHGGRRLTTSQLYRILINPIYLGKITHTRGGKTDVYDATHKPIVPRELWEGVQARMERNERENRHRWTHTHLLKGKIRTCEDFAMSPGSVQKVRNRADRIAERSIIRYYTSQKAIKQGYANCTIKSINASYLDDLVRALVMDHLMQACRVNLRLQTSEKRDHWIRELIHGVVLAPDLLTVDIERERLTHLAKEIAAEKGTGVQATPKTFKGKARTEEIEASANDIPAFPFQVQIDDAGPHTRLSVRIQLKRIDGRRIIVSAEGDDLTLEFHAATSPAARQYLIRSLGRAFAWHNEMLHGSTAAEIARRVKLTESRIGQLLVLTQLGPAVLERILRADLPPGVSLDDLLRAAKHLDWQKQRDILQLR

SEQ ID NO: 5805 - protein, 657 aa, unidentified
  source 1..657: note = uncultivated organism
MAPASRRTRPARPALAGAGTGGVRVAVVTRISTDELNQPYSLEAQAAGLDAFVASQPGHTITHRFVDQASGATLARPGLQAALAAAKTGQFDVLLVYRIDRLTRSIVGLMSIVEELDAAGVALRSATEPIDTQGPVGRMLLQLLGIFAEFERGLLIDRITKGFERKAARGEWLGGPGPYGYQLDSASKTLTVEAGEAAVVRAIYARYTDERSGAPGLAHWLNDTGRRSRRGRLWSTQTVLRVLRNPVYVGKIVHGEDLHEGKHEPILDEATFARAQLLLQAGSAESPAVRPNSSDYLLSGLLRCTACHGAYVGAGAHGRGGFYRYYVCRTGQAKGAHACAGPRIPAQDLEDAITTALVDTYTDSGFFEQAATDAYAHIQAELPRLSVELAASNTQLRDTTAAIDRYLRAFEAGTMSDNLCAPRIAELSARRDELTARARQLSQQAQAAAPALPDVEHRSSIASHVQHALRHEDPHAVKQLLQELVDRIDISPDKRAQPYFWVPQPQKPEPPPARATTGTTVRMRSQDVEVRGLEPLASSVRGRRSTRLSYTPWSASNYHGTWHQKCSMRAPDAGAGATQTAFATASSSVVASTRRLAGAGCVPFSTASAAAMSTTSGVPGSEKSIIDGTAAAGFVAPSATCCACAAARWRRIRSYTG

SEQ ID NO: 5806 - protein, 550 aa, unidentified
  source 1..550: note = uncultivated organism
MNTATLRAAIYCRKSSEEGLEQDFNSLDAQRESCEAYVASQRHQGWRLIADHFADGGFSGGTLERPALQRLLDQIRLHRVDVVVVYKVDRLTRSLADFAKLVEVFDAQGVSFVSVTQQFNTTSSMGRLTLNVLLSFAQFEREVTGERIRDKIAASKRKGMWMGGTAPLGYLAQDRSLVVCEAEARTVRRLFDLYLTHSCVRQLQAAARQEGLTTRSGNDPTRGHLYQLLQNPIYVGEIRHRAARYPGLHPAIVDRTVWETVQEMLAANRVARRDGVGTREPSLLAGRLFNDQRTPFTPSHAVKNGKRYRYYIERAADTGTAGRRPRRQRLAAAEVEKLVTDSLVGLLHSTPAVMEAASVEEHSAEALRSHTDHATRLAAAIAVGPDRHRSIRAFLHRVTVGADAVRLELDVNNLRTTLALPPLTTSEVLLHTIEIPARLRRRGVELKFVIDGPAVERTPQPDPGLIKTIVRAHDWWRRWRSGSGETLMSIGKSEGVQDRFVARLIALAFLAPDLTAQILDGQQSPSLSTDDLLKQWLLPPDWAEQRRLLG

SEQ ID NO: 5807 - protein, 570 aa, unidentified
  source 1..570: note = uncultivated organism
MNPRTRCAIYTRKSSEEGLEQSFNSLDAQREACEAYVKSQQHEGWQAIATNYDDGGFSGGNTDRPALKQLMADIHAGKVSVVVVYKVDRLTRSLADFAKLVEQFDKFNVSFVSVTQQFNTTTSMGRLTLNVLLSFAQFEREVTGERIRDKIAASKKKGMWMGGTVPLGYDVRDRQLQINEAEATTVRTIFNQFLRLGNVTILQEWLRENDIRSKAGNHFFCGPLHEMLHNPLYIGLTRHKTDTYPGQHQAILDCETWDKVQALLDANRQGGKRKPRATKTSLFTGILFDAEGTLYTPTHATKNGRRYRYYTSQAVIKKTKKIETPARIPAPDLESAVIERFLKLLRAPEDLVASIRDDFHEGASLPGGFFTRIVARATSTAATWQSLTAPDREHFLRAAIDRVIIHPTRVEIRIRVPQFIQQLLSDNTPTADSRAGNATAAPQVHLQLVASIECPFRHIPQGRALRLIVGNTNITTEASRQAILKAIARARFWYEQDTTGEAGSILQLAGMHGLSPRFISAQMKLVQLSPQSIESLMKRPESLPLSLGDLLTAIPMNWREQAFSLSARSA

SEQ ID NO: 5808 - protein, 584 aa, unidentified
  source 1..584: note = uncultivated organism
MAGVVKVITATQSRIGKITDGVKRVVLRVCAYCRVSTDNEEQQTSYKSQKTHYKTLIEEHEDWEFVDIYADEGITGTKTAKRTDFHRMIDDALAGKIDMIIAKSISRFARNTVDTLNYVRKLRDHNVDVWFEKENIHTLELTSEMFLTLYSAFAQAESESISENVKMGVRAKMKRGELVGHYAPYGFIYDEEIENLVEVPNEAFIVRYMFDRYKEGVGTSTIARELNDKNIPSPTGKKWSDTVVFRMIRNEKYVGDLLTGKTYTDNPINSKKKKNKGEFDMYYTENHHEGIIDRETWDKCQEIANRRSGKYTADGKPEKFSQVYPFSSKIVCGLCGENYIRRSWKARKEGEPPRAAWACRTYNTDHLSCQSYGNVKESYIEELFLNLYSVLCKYNKQVVEKLLQTIEETFENDDYSKDLKKIEAEIKLHREQLLELLDVRLAKIIDNDVFEQKSERINKKIELLELEAKKIKDYVSHREQVKDRVERFRTIFETNTTLKEFDADVFESLIDRIIIGRRNDDGSIDPYEVRFVLKTGDELTDTLPIKNKPSSRIQKRNETNETDEKSNDEMCAYAHNGKYSFSIN

SEQ ID NO: 5809 - protein, 569 aa, unidentified
  source 1..569: note = uncultivated organism
MTRPLRAVLYARCSSMKQADRDLSVPAQLDACRLHAQRLGWLVTADYHDDGISGFEDERRPAFRRMLADMVEQPRPFDVIVVWDFSRFSRSLEHSLRVGGDLAAAGVVLESLKERTDATPSGWLMGTIHRSFNEYQVRKLAEDTRRGMRKNAAEGGWNGGAVPFGYKVERAETGRGPGKLVPDPAQAPLVQRIFAMALSGQGACTVAGTLNDEGLRTARGRRWSKQSVLYILRNEVYTGVYTWGVKASAKFATEPAEPLRIEDAHEPLVSLEDFARVAAVIAVRRPTVTHPRTTAGSYLLSGLLICDACGAPYIGHGAKNGRHQYYTCQTKQKQGAKACPAANNFEQGRVEGVVLDALRDGALHPGVFADLVREVQASLRTGQADAEGERLVLEGQLSEVTRRLDNLYEAVESGSIPVARLAPRIEQVSQEKEALDARIAALPEAGTEPLLDIGDNDIEGWVGDLRAVVERGSVDERRGLLRAWVKRVVARGDELTVEYTFPLVNVPGPGGSEPSGAPSTRRVVNRRTRRMPAMLRPETRKGEPALRRVLPTVVNGSPRRTWYELRTAG

SEQ ID NO: 5810 - protein, 614 aa, unidentified
  source 1..614: note = uncultivated organism
MSNDRSPIAATAPNGMPRRSSSRSPAGSAGARTAQPRLRCAVYTRKSTEEGLDQAFNSLDAQREACAAFIASQAGLGWNLIPDLYDDGGISGGTMERPALQRLLQGIRDGQIDVVVVYKIDRLTRSLADFARIVEVFDTNGVSFVSVTQQFNTTTSMGRLTLNVLLSFAQFEREVTAERIRDKIAASKKKGMWMGGRVPLGYRAEDRKLVINEPEAGFVRHLFTRYLELGSVPALAAEVGRSGGRRTDGEEPEAVMAGQHCQNDGSDTRSLSPGMLYKLLANPLYIGKLRHRGQVHEGEHQGIVEQDLFERVQAALAGRASVDRGVAMHADTHLLTGILFDEAGERMAPTHARNHYRRYLYYVSAHLLPRRGRQGNEDVRRGWRLPAAELDDAVVAIAAKLLRDRARLATWIGQLGSSARIVDGLQAAVDLSQQLVDATAPQLRRGLLRNIIQRVQLGSGTLAATFDIVNLVNTLLGEQDSARELHQGDDAEPDTFTLTVPIDLRRRGNQARIVVESTIAAGRTPDPILVDLVGRAHLYLASLTKHPAKGIAGVAMRHRADRTDVGRILPLAFLSPALTRSILTGTQPIELSGRHLSRLDLPHLWADQQAAIEL

SEQ ID NO: 5811 - protein, 548 aa, unidentified
  source 1..548: note = uncultivated organism
MRFFIYSRKSVYTGKGESVENQIEMCKQYIRSKFPDVVEDAITIYEDEGFSAKDTIRPQFQRMLQDIRERKPDYIVCYRLDRISRSVSDFSALIEELNDRNISFICIKEEFDTSKPMGKAMMYIASVFAQLERETIAERVRDNMRMLARTGRWLGGTPPTGYRSEKQQEMLVDGKIKISCRLKESPDELQVVGTIFEKYLELHSLTGVSKYLIRQGIQSRNGTWYSLLGIKEILHNPVYCIADKEAFSYFTAQHANVCFEEKDCKGRYGLLAYNKRDYKKKHAPRQSMDQWIVAIGRHRGEIPGKKWVAVQGILQDSIPTGKKPANIHNESSLLSGRIICGKCGSRMFAKRRSHPGTAGGEFDYICGNKLRGGVCLCDCQNISGSQADAMVFAYLVNLAEESPGIYKLLEALKRDLQKQTREDPPACIETKLHRCDDAISHLVHTLSQDGVGAAFIQHVNNRIEALEQERSSLLQEREQLQMKRNSITGLHLEIERLAGSLSDLKGLLRSLSVQEKRSLVHLLVQRIVWDGKNLHVFLDLASNGTESL

SEQ ID NO: 5812 - protein, 541 aa, unidentified
  source 1..541: note = uncultivated organism
MSVKCAVYIRKSTEKGLDQNFNSLHNQEEACKNYILSQTFNNWEYYKTFEDAAISGGTTNRPALQQMISEIKADKINTVIVYKVDRLSRTIVDFHNIMKILEEYNCNFVSITQSFDTSNSMGKLTLNMLLSFAQFEREVSAERVRDKVASSKQKGYWMGGVAPIGYDTINKELTINEKDSELVRLIFNKYIELKSIYLLKDWLDEHHYKTKIKITKTGKKTGGKPFNTSHLHQMLNNPTYIGKIKHLDNVYKGRHEPIISKEIWDNVQKILLSNSNKIKNKGKKKHSQSYLLKDLAYYQDKKLMYTYSKKETYTNYYYVYDKVNYINAHYLETQVLNTIKIILKQSIFYYSPDIFNNLKFIDIDSLTPAKQKIIVISLIKKVIIESNLSIKVEFNPSPKIPNTLKSDNILEFDKEKNLNIYIKDCSIIIHRSIDLNNIRSNKLILGKAQINEPNSEILVAIATAFKYKKLYEELGSVKQVSETLKQGTRRIYKYLNLAYLSPTIINKILDNQLPNVTVTQLIDIASKTYIWNEQEEMLSKI

SEQ ID NO: 5813 - protein, 575 aa, unidentified
  source 1..575: note = uncultivated organism
MHEKELKKFAIYSRKSKFTGVGESIENQVEMCRQYISVHYGEQAALAAKVYEDEGFSGGTLNRPQFQKMMKESYKDHIDALVVYRLDRVSRNIGDFANLITDLDYRNIEFISIRERFDTSSPLGRATMNMSAVFAQLERETIAERIRDNMHELAKTGRWLGGVTPTGYESESVVNVNIDGKTKKAYKLRIVPEEKELVVLIFDKFIETGSLTKTDEFLLNNHFKTKNGNPFSRFAIKGILTNPVYMQADEDAYQYLVDNNISLFCDKALFDGAHGVMVYNRTLQRKGKTHQIKPMTEWIVSVGKHPGIISGAKWIKVQSLLELNKSKSYRKPRSNVALLSGVLRCADCGAYMRPKMSTRTNAAGEQIYTYICTNKERSKSEICHIKNLNGNTLDASVVEVIKNLGENKDELVKQLECIKKRILNESSGYSDTIASVKAKIQNDENEIASLVSALAKAQGTSAEKYVLSLIDKTHKHIEELKSQLDSLEAASAHYNLDTIEFDIVKQMLCSFAQNIDEYSVEEKRALIKTLVRKIIWDGQTIHMYMFNSDEGYDLSLTVDNSVFAATNEPLGKYRE

SEQ ID NO: 5814 - protein, 531 aa, unidentified
  source 1..531: note = uncultivated organism
MISDGFIFFGKGDIMERQDVIYARQSIDKADSISIESQIEFCAYETRGREYKVFYDKGYSGKNTDRPQFREMLEAVRRGEISRVICYKLDRISRSILDFATMMEEFQQNGVEFVSCTEKFDTSTPMGRAMLNICIVFAQLERETIQQRVTDAYISRSRKGFYMGGRIPYGYRLEPYYIDGKKTARYVADPQEAEIVRLIYSMYAEPNTSYGDISRYLRDNNISNSRNKNGCWDRSRIAELIKNPIYVKADLNIYNFFKSQNSELHNSADDYIGTNGIYLYSDKNADRKTLCLQGQHIVIAPHEGIVSSDIWIRAREKCFKNRQVAKPQKGKNTWLVGKIKCGKCGYAMTIRKSSSADRRYFLCSHRMQSHDCEGVGGIRADELESTVFDSIKKYLEPLLSGCCGKIREENPKRKKIRSRLDETEREIDALMKKLASADDVLTNYINLRVNALDSKRQLLIKELKGAENSDTPEVLDKNKLKEFVDNWEEISFEEKKMVADALITVVKVTESNTKILWKSEIFKEASGLGET

SEQ ID NO: 5815 - protein, 514 aa, unidentified
  source 1..514: note = uncultivated organism
MAASTTKAVRCAIYTRKSTEHGLELEFNSLDAQRESCEAYVKSQASQGWRALPQHYDDPAYSGGNLDRPALQQLLKDIDAGRIDVIVVYKIDRLTRSLADFAKLVEAFDAKSISFVAVTQQFNTTTSMGRLTLNVLLSFAQFERELSSERVRDKIAASRRKGKWTGGTVPLGYDATDKKLIINQIEAETVRYIFRRYLELKSFGKLVEDLDAKGIVTKRRNTKVKKFNGEIPFTYGPLAYFLKNRVYIGETGHKDKWFPGEHDAIVDRTTFDRVQQLLASKPADRKATRSSSEALFLGKLYDDRGNRMSPSFSTKNGVRYRFYVSSALLRGRKTEVGSVGRVSAPEIENAVLASLQRHRGQSATKNEPASIVTAERVVIAADHLLITIAGTAETTEAGDPVEIKIPWSIKPRDSVATVEGDAASDSTRNEALVQAMVRAHAWVRALHDGIYQSIETLSEANNLHPKVVRQALRLAFLSPEVTSAILEGRQPSTLAVQIPKLLPMPWTEQRRLLG

SEQ ID NO: 5816 - protein, 573 aa, unidentified
  source 1..573: note = uncultivated organism
MTKTLTLAPDPARDAEAVRVATYTRISTDEERQPNSLEAQRVRLESFVSSQPEWGIDRRYEDQFTGTVIDRPALTQMLKDAKLGRFDVLLVYRVDRLARSIRGLAQIIDELDQAGVIFRSATEPFDTGTPAGRMMVQMLGVFAEFERALIVERITAGLERKAARGGWCGGQRPYGLNIAADRNSLERNPTEAPLIPVMFDKYANRKAGSSALADWLNEQGYRTKNGRLWSKESVITVLRNRVYIGEIYYRGNWYPAPHEPLIPKELFDKAQAILTERREDRSKRAANPAEYLLTGRVRCGRCGQAYVGTAAHGRNGRYTYYTCFTRARYGTKHCANDRLPAERLEQAVTRRLWQVLDDNDLIDRAITDTYERLSQREGEQQSELAGIQDKITETRAALDRYFRAFEAGTMPEDTCAPRIASLSEQAKALERRASELATQQDDEQPERVSAADLDALRSDLHAMLNDSDPKRVKGVLQAMIDGIRVDARDQIEPTFRVPAVRIESGYMEPTGIEPVTVCDTTAQDADPIDYPCSTQPKERCTAFFHCAYSRSRCDSSIAGSQRLPSDQRSRSSS

SEQ ID NO: 5817 - protein, 543 aa, unidentified
  source 1..543: note = uncultivated organism
MSKQIQLNRTGLYLRLSRDDEKAGESLSIENQRIILRKFTAENGGTIVDEYIDDGWSGTDFERPGVKRLLEDAKDGKIDTIVVKDLSRFGRNYIQVGQYIDYIFPAYGIRFIALSDNVDTADRCSTGMDMMPIMNVFNEWHAANTSKKIRAVLEAKWQAGRYTNWAYPYGYKAGTDENRTAVIDEEAAKTVRRIYDMRLQGYSVRTIARKLTDEGIPNPTAYYTRLDGKKSDRQGSPYWSQKTVADILKDPTYIGTLTQHRTTRFSYKNHKVLNVPQGEQIVRENAHEAIIDRATWEKVQAINDRTARGKADKANRVHPLSGLLVCADCGKKLTGKSGGRDRIYMYACRTYTDLGKKYCTSHSVSEKQIESIVLQDIRSMLGDVKIDEKKAKEYFLRERTKCGEQNRLSDEKQLRALTNRLTELDKLIQSAFEEKVLGNLPDSVCKSLCEKYQLEKEGTERQIAELKKRLSETDCIDAEVEEYIARLKRYAKCEELTREMCLQLIEFITVGEKPADNKPREIHIYYKLISGQTLADYREQITK

SEQ ID NO: 5818 - protein, 516 aa, unidentified
  source 1..516: note = uncultivated organism
MRRPAKASPVAEAKKRCAIYTRKSTSAGLEMDFNSLDAQREACLAYIARQEGWVVVDERYDDGGFTGANIERPAFQRLLQELDAGKIDIVVVYKVDRLSRSLLDFAKLMDHFTKAKAAFVSVTQNFSTADAMGRLTLNVLMSFAEFERSMIAERTRDKVVAARRKGKWTGGPVPIGYQVVEGKLVVHDGEARVVREIFSLYEAHRSLVRIIDELGRRGATTKTQRAWKKDGLLRILKNPIYAGYTRHENERYAGEHAAIIDSATFDRVQALMGRSAPTLNRRGVGDTLLRGLARCGDCGAAMLVERAHRGRRTYRYLRCDTVAKRGTDACTSRTRLPLDAVEDIVVGVLREQARDAGLAKRVATFLLRCAAARKHELTAEADALPKTIGEASSRVHAFSLAIVDTPEAGRGVLRKRVEEEAAIVAAQQARLLEVQEGLRTIDGLEADAVWVERTLARLDATWGGLTDAQRVLLVHAIVDEVVLDPRRGEVRIAFVGAEPMVARQAAAEAACAAEAG

SEQ ID NO: 5819 - protein, 525 aa, unidentified
  source 1..525: note = uncultivated organism
MNAKRRCAIYTRTSTEEGLSQDFNSLHAQAEACAAYIRSQAGEGWQPIKAIYEDGGYSGGSMERPALARLMTDIQAKRVDVIVVYKVDRLTRSLADFAKMVEIMDAAQVSFVSVTQAFNTTTSMGRLTLNVLLSFAQFEREVTGERIRDKFAASKAKGIWMGGVPPLGYDIKDRALIVNEGEAETVRFIFKRFLDTGSVHALKADLDQRGLKSKTWTTAHGVQRGGFAFSRGALYDLLGNVTYRGEVAHKGNIYAGQHDRIVDNALWDEVQTLRGRNAKQPRRLASGAMLIGKLFDDRGNMMSPTSAHKGTMRYRYYVSTALTRGRPNDAGSVRRVPMAAIEAIVIAEVSPILAPGWFADQPLTSRVLEALQRVVISERELALELHAGALETDAMPQGERSEERVIVTRPISFAKPRNSTTLIPAGGARDGAKTDRALIRGLARAHAWTRKLEAGTIRSVAALAKQEKLCPIYTRSILPLAFLAPDLTEQILEGRQPRTLTLTALLAEPLPLDWSGQRARFASFG

SEQ ID NO: 5820 - protein, 578 aa, unidentified
  source 1..578: note = uncultivated organism
MSAEPKNVVRCAIYTRKSSEEGLEQSFNSLDAQREACHAFVASQREEGWRAIPTRYDDGGFSGGNLTRPALRRLLADVEAKKVDTIVVYKVDRLTRSLADFAKIVEVLDARGVSFVSVTQQFNTTSSMGRLTLNVLLSFAQFEREVTGERIRDKIAASKRKGMWMGGTVSLGYEVKERKLIVNGEEATLVNRLFRLYLELGCVRKLKARLDAEGITTKLRTSGVGNQSGGTPYARGALYKILQNRIYLGEIHHRKEYYIGEHEAIVPRELWDQVQEKLRTNRQGQRDGLRTESPSLLGELLQDADGKRFTPSHTLKNGRRYRYYVCDSKIGDQGGKHKAVRLPAHDVERQVILRLQSFLRSNQAVMDDCSLPGESPALTQRLIAAAVKNSKEIDKDFLTRVVGRVVVHDDRLDIDVSKKKLRAVLVGDRPESINVADETHHSLGDQIRLEVRAQLRRHGGEMRLVVPADSDGQVTPPPVSSLLKAVARGRQWHEWIVNGEVSSQRSIATRLGLNERYVGRVLQCAFLAPDIVKAILDGRQPSDLTFQKLTCKLPLGWVEQRQRLGFSVLLQRRQSEGN

SEQ ID NO: 5821 - protein, 537 aa, unidentified
  source 1..537: note = uncultivated organism
MFSAPAIDPNRVAVYIRWSTDEQTQGTTLEVQRDACRHFLQSQGWHFRDDLTFVDDGYSGGNMERPALSTLRSAVRAGGIAAVVVYKLDRLSRNLLDCVTLVRQEWAGVALFSTMERFDTQSSIGQMVFNILVSFAEFERNIIRERTMSGKRKRWEQGRNSGFKYAYGYRKSAEGGFAIDPGPAAVVKGIFADYLQGAGYASIRDRLNREGIPAPGGGLWRICTIQLMLRNPVYAGHLAAGYYTYVGGRQKRGKGPARLVHNAVPPILSQSVFDQVQTLREGKAQAGPVIQRDSDYILSTIIRCARCGGPMVGHNGTGGGRRRYYRCANGKEFGKCDCGAVPKDEIEEAVLHEVRERYSPVQLRRRIEQMEARRLETVAARRQAVEQLMGRQAELKRKREKLDDDYFAGELDAKGYGRLANRLDADLEAVGRQVEAARQAVRQAEQSTVDTERLGALVAMLDGLAELGPQQIRRVLRQMLSAVWAYRAKSKGRYNKTPTEVTIEHHVQTLAPACRLFATGERTEGGDGTSIKMGIIG

SEQ ID NO: 5822 - protein, 542 aa, unidentified
  source 1..542: note = uncultivated organism
MRRIRCAIYTRKSSEEGLEQDFNSLDAQREACEAYIASQKHEGWELLSDRYDDGGISGGHLERPALNRLMQAVDEKRVDQIVVYKIDRLTRSLADFAKLVERLDQAEASFVSVTQSFNTATSMGRLTLNVLLSFAQFEREVTAERIRDKIAASKRKGLWMGGNVPLGYQADGRTLKIDDEEAVTIRNLYDLYLQHGLIRLVKERAEDLGLRSRRRVRGAGRFSGGKPLDRGHIHHLLSNPIYAGRIRHKGQVFEGQHPAIINPAIWEKVQEMLKGASSKSRGTKRKAMPSLLAGKLFDETGDRLTPSHSQKNGKRLRYYISHRLVKDRSRNHPDAWRLPAEQLEGLIAYLVRENLRRPDAAMRFIRDLSASEVSSKSAMLHAIKQTKHGLDLVERADLKPGKLTVRLSEGELAQLLDCDADRIEAEELFLTTPFRTRRRGVELKLHLGDAPPEVDRTLVQNIVKAQRWLALIIAGKTFAEIAQAEGTSKRRVQDVVDLAMLAPDVLDAIAAGEQTDTLTSDYLIKSGIQASWSEQRAQFAKL

SEQ ID NO: 5823 - protein, 511 aa, unidentified
  source 1..511: note = uncultivated organism
MKRQAPAAPSTSRRCAIYTRKSTTMGLEQEFNSLDAQREAALAYIRQQPGWTLVETRYDDGGFTGANIERPAFQRLLADIEARKIDVVVVYKVDRLSRSLLDFAKVMERFSASGASFVSVTQNFSTADAMGRLTLNMLMSFAEFERSMISERTRDKIAASRRRGQWTGGPVPFGYSVKEKKLFVNDLEALVVREAFALFLQHRQQAIVARLLNERGLLPRGTRSRPASKGLKWTKDSIGRILRSALYAGNMMYGDEVHPGIHPRLIDETTARQVELILSGNHRELRFTGINTDYVLRGLIRCGQCTQAMSPASTRKGPKLHRYYRCGTRDKEGRDACPAKPLPAGAIEEFVLERIRDATADGSLVEFIGKQLQDRIDARHSAIKKLREKLPAEVADASANAAKFAEELTKFEGRARDLVEGKLRAETDRLAAAERLLAESENDRIDFAVAENERAWITGALKDFERVWTFMTPENRGRLLRALVVAVRVNEANNEVEVELVNFASDGEVAA

SEQ ID NO: 5824 - protein, 542 aa, unidentified
  source 1..542: note = uncultivated organism
MRGVIYARYSSDNQREESIEGQIRENMTFAKKNGIDIVGTYIDRALSAKTDNRPEFQRMIKDSAKKNFDVVIVWKLDRFSRNRYDSAKYKAMLKKNDVKVVSATEAISEGAEGIILESVLEGMAEYYSADLAEKVTRGMTENALKCKYNGSAVPYGYMIDEDKHYQIDPATAPVALEIFTRYAGGETAASIINDLNSRGLKNNKGKEFNKNSFHNMVKNRTYIGEYHYSDVIIPGGVPAIIPEDIFERAVARMESNKRTAAKNKAKERYILTTKLFCGNCKTMMVGDSGQKKNGNIYRYYKCAAAKRHECNKKTIRKDLIEDFVIAHTMYSITDEDSMQKIIKQILALQDEENTVIPALEAQLKDVRHGIDNLVKAIEAGVFTRSTKARLEELEAEEERLQASIRDEQVSHPKITENHIRCMFDKYRDMDMSIPANRERLIDRLVGSILLYDDGKIVITFYYKDEPFVGMLEEIASASDKVGSDTNALGSPVKTNPNYFAGRNRFGFVFFCEYSFFINSRILLFSLRDFRRCRKSSESRSFL

SEQ ID NO: 5825 - protein, 581 aa, unidentified
  source 1..581: note = uncultivated organism
MKQMQMNVSDTYDAALYLRLSKDDTDIDGSAKTESNSIGNQRELLRSFVKSQPDIQIFDIYVDDGYSGSNFDRPEFKRMTSDIEAGKVNCVIVKDLSRFGREYIEAGRLIQKIYPALNVRFIAVTDHFDSKTANTSEKSLVVPIKNFVNDSYCRDISTKVRSHQQMKRENGEFIGAFAPYGYQKDAQNKNCLVVDEYAADVVRKIYTWKIEGLSLGAIAEKLNARHILPPKEYKKSLGENYNSGFQSTEFPKWSAVQIKRILTNEVYIGNMVQGKQERISYKVKKRLDKPEEEWVRVENTHPAVIRQSDFDIVQKLLQYDGRASKSSEGANLFSGFLFCGDCKMPMIRRVNQYKGKKTAFYICQTKNKGGNCTRHSIQEETLKTIILKEIQTYSSLFMDYQMIMEEMKEMEIGYDQVIHYDTQISRLQEEYHKCYALRVSLYDDLKAGIISKEEFQEFRDIYGKKCEELEMVIENQKQMVKQMFEDGVAATIQLEEWKKSLELKKLDRTLLALAVDKIYIYENKQIMIVLRYQDMIEKMKVIKNFFERRGCEAACVHEEVATADSECPLYTQQTDKGKEVG

SEQ ID NO: 5826 - protein, 522 aa, unidentified
  source 1..522: note = uncultivated organism
MSYCIYLRKSRADYEAEQRGEGETLARHRSILTKLAAHNRHVIGHIYQEIVSGETIADRPEVQALLSDVSAGKWQGVYVMEVERLARGDTMDQGLIAHAFKAAGTYIITPAKTYNPADPADEEYFEFSLFMSRREYKTINRRMQGGRAQSVREGKYIGSRPPYGYRKVKLTGDKGYTLAIHDAEAEIVRQIFRWYLNGIDGEAAGLVRIAGRLDDLHVPTGEQGSVWKPCRVHRMLTNPAYIGMIQWGKNKIVRTVGPSGVTKRRVMQDDAELYPGLHPAIIDEEIYNAVQTKLHTPQAHIPVRRGASLSNPLVGIVFCGECGHQMGGLPASGRQPAKIYCRTHSCPTVQNYREPIEQAILDTLRGWLDDVGTISPPPAAAPEQVDITARAIDAMHGEREKIVRQIDKLHDLVEQEVYSVAQYNERYATLQERLNALDADIDAAEREIGSRRVYCTPDELRPALVRLLSEYDGATPEQQNDMLKACVSRVVYRKTQRGLTLRGIEYSNAHQFELDIYPRLKI

SEQ ID NO: 5827 - protein, 563 aa, unidentified
  source 1..563: note = uncultivated organism
MLKVRRCAVYTRKSSEEGLNQDFNSLHAQREACEAFIQSQTGEGWRLIKAPYDDGGYSGGTMARPALQRLLAAIHQKLVDVIVVYKVDRLTRSLADFAKMVEAFDQHGVSFVAVTQQFNTTTSMGRLTLNVLLSFAQFEREVTGERLRDKIAASKKKGLWMGGTVPLGYDVVGRRLVVNAVEVATVREIYTRYLELASVRLLKQDLDRGGIVSKQRLSRAGNQSGGRPFSRGALYELLANPLYAGDVRHRHERHPGQHEAIIDRELWTKVQQLLTQRAAHPRGQTTDAMPKLLAGKLFDEAGQPLYVSGTTKAERRYRYYVSRGLITGQRTAIEGGWRLAAPQIERAVIAAAAQILKDDGAIGTLLLEQPGFSTQRLAHALKAIDAFRAGLSAGDAHDATVAALIARVDLGVNELQLTLDLAPLLKAQLEVESQASLTIKRCVPMQLRRRGVEQRILLSGVSAPTSNIDAILVRAIARGRRWFDQLASRRVKDTLEIAQRDEVPDSYVRRLIPLAFLAPSVVEAICTGRQPPDLTAECLTRRIRLPVCWSDQEKILGLSVAKS

SEQ ID NO: 5828 - protein, 536 aa, unidentified
  source 1..536: note = uncultivated organism
MRIAIYSRKSKWTGRGNSVENQVSMCREYINRHVEGADQAEILIYEDEGFSGKNTRRPRFQDMMEDMRRTKYDYLVCYRLDRLGRSIIDLAALVEELNRREIAFISIKEQFDTSTPMGRAMLYFAGVLAQMEREQIAERVRDNMVLLAKSGRWLGGNTPVGFTSAEVRAVQVDGKSRKSWYLQENEPELLLVRRIFQLYLEKRSLVKVAEYLQIQQIRTRKKNDYTVTAVRDILRNPVYCSADREGCAYFRTLGCQVCVDEPADNDPVPGLICYAKTVSGHRENPPEKWILAPGKHRGVIAGKDFAKVQQLLENNRHKGDSYRVRNEIALLSGILYCSCGRAMRPKYYAVKQTGTDGKRRFSYICPRKTMTHGQSCRIPNLQGNTLDEQISRVVQTRLETVIDWQEILQQAYSQLKETTCCHRAVSETDIRNHQIKEKRKQIENLIHTLSSTPHTPEFILQIEQEIGNLQKQIRQIEQQENEKTKNDVKTGLLSPHFTSLAKTYPYFGVHQKRELIKNVLEKIIWNGSELTILLRS

SEQ ID NO: 5829 - protein, 541 aa, unidentified
  source 1..541: note = uncultivated organism
MNKPYNVGLYLRLSVEDGVSSSKKGKVNPFQNESVSIENQRVLLTEYAELQGWNVSQVYSDDGYSGGAFDNRPAFQRMVRDAEAGLINLILVKDLSRLGRDYIETGRYTEEVFPALGVRFIALMDNIDSEGNADLLPFRSILNDYHLKDLSRKIRSVIKAKAEVGDYVGAWAPYGFIKDPDRKNRLLIDECAAEVVRRIFGMRMQGFGFGRIAAALNNEGTLSPVTYRNAQAGVERPGKVWIANVVKRIIENEAYIGNAVRLRTGYVSYKNRNVIRKSSDEWVRCEGVYPPIISVETWEAVRLLDRKKGRQTDTESEQSLFYKLLRCADCGGTMSRKKSYNTSPVTGEKRPTHSYFCSHYERTGGSVCSRHAIAENALLAIIREDIQTRLESAGVDEERIVRDIQQRYNGATLDEAKRQRDRLAARLDELASAGRKLYEDRLNGVIDVGTFKSLYDKAQTERETLKAEHGQLSALLSAEERRLLERDRIIPMLTQFLSLERPNYETLSELIDHIVVNEGEGKGSYKTHTVWIVYRFEAEAA

SEQ ID NO: 5830 - protein, 519 aa, unidentified
  source 1..519: note = uncultivated organism
MKKALQGILIHRRRNYMSIAAIYGRKSIFTGKGESVQNQLEACREYALRRNWEVIEYFDEGFSGKDTDRPGFQKLLADIEKKKIDYVIFYKLDRISRNMRDILDFIECTAEKGIDFISITENFDTTTPFGRAMLHIAATFAQLEREMLQQRVRDNMLRLSKTGRWLGGNTPTGYRSKRIEYFDKYDRKKYMYVLEEVPKELQLVETIYKQYLKLGSLGKVEKYLREKNLKTKNGKYFQKETIKGILKNPVYIKADRLAYEYFQRFRIHIASPVHEFDGIRGVLTYNKNIIKKGCANKRRDYHEWILVVSNHKGIINSQDWISVQERLEKNRKYFWKYKSRRGLLTGLLRCECGALMRIKYGQKSKKSGKRFYYYVCSQKSASTEKHCNAPNIRGDVIEALVLETFEQLPYSKESGYLYLKRFEEKFKKNKIIDSKEQRVNENANQSKKLKDLNGIYEAEFLLSDINRFDLQIIVERLLEFPKFLHKIEDVEIKQKLLRTTIEKIIWKWSEREVQVYFLD

SEQ ID NO: 5831 - protein, 510 aa, unidentified
  source 1..510: note = uncultivated organism
MSVIKFHAAAYIRLSREDGDKAESDSIANQRKLIAEYLRGKEGFTLYDTYIDDGFTGTNFQRPAFQRMMEDIEAGRINCVIVKDLSRFGRDYIETGKYLERLFPDSGIRFISITDGIDSGKQAYDMLLPMKNIFNEQYARDISKKVRSSMETKQRAGEFIGAFAPYGYRKSDDNKNRLVVDGYAAEIVRRIYRMYIGGCGKNGIAAALNREGIVCPSEYKRLKGWQYRNSRKLESTCYWTYSTVDRILRNELYAGNMVQGKKRQTMRGKQRAVPRDEWIVVENTHEALIDRDTWETAQELLKRRTREPDWKNHTTVFAGFLRCGDCGRALVRKNGKYYCGTYVRSGRQYCTPHAVMYALLESIVLNDLNDVLSAVGDLRGMAEKVCRESMRPRSREQERERLYAELEKIRHLKKAAYEDCRLGMLSEEEYRAYREDYMGRETLLTRQIALEKEAEAGEKSRDPCQAAWVRELLERGRAEELDRAVVLEMLKEIRVYENGRIKVIYRFAQE

SEQ ID NO: 5832 - protein, 551 aa, unidentified
  source 1..551: note = uncultivated organism
MVNSPDHIIRAAIYTRVSSQEQVDNGTSLESQAEQLEAFCKGQKWEIFNQYTDAGFSGKDDKRPGLESLRRDAKAGYFEKVIVWRLDRLARNLRLILGIEAELREQNVAVFSMKEMVDTSTPIGRTVFQVLGLTAEWERESIIERTKTGRLQRLKEGHWAGGPAPYGYDYDPKTKNLNINEEEAKVVRMIYDLYASGKSLGTIADQLNQALISPRCKTAKGWYATGIRQTMVNPVYKGELILNRHCRITEINKIDLTKAVKIATIPIVSKEKWDIAQARLSNNKHVKATDDGLFILQGLIKCGLCGCSYRAERMGGGRYYCCRGQLKTAHLDSSPRCKNRNLRAEGIERAVLKRLNDIINDPNQVIVILKDGITNLKKRESDLEARLLPIERRLKEITEMKSRLADKFIIDNMDAEKYKDARNNLEKEETRLMALRKDCDPSQLLELESTKESIKRYQGLVDYMVFNLEGEEAEGVMLQVMTEPHEYIKNLLTNGSKDMSEKVQLPTTPREWLDLLQLQLVVFKDKIEVKSTIPLPDIQTQECVLTEGDRG

SEQ ID NO: 5833 - protein, 519 aa, unidentified
  source 1..519: note = uncultivated organism
MSKLRNWDVAIYLRKSQADRDSEREAAARGEVYDTLEKHRAELLRVARREGYNVVDIFEEVVSGGFIGERPEMQKLLRNVQDMKYDAVLVVDIDRLGRGDKVDQGRIERAFKESDTLIITPTEILDLNNESGEFAVEVKTFLARMEYKQIRKRLLAGRRRSQEAGKDTGQKPPYGYQKDKNKRLVIHEDEARIVRMIFDWCIDEGLGRVQIAERLTEMGIPSPTGRPVWSHVTVRKILGNPKYKGDQVFGRVKWTKQEDGSYKTTLVKDPDKLTIAEGAHEPIIPRERWEKAQEIIQSRRRPPLRSDFGMVNPLAGILRCKKCGNAILANNPANRPSIYLYCDTPGCQQKMIALHRVEEVMLKQLAQIVEQLEVVQDRVNKRQQVRDEVVSFTEKRVRKLREELAKKYRQRDNLHDLLEDGTYTKEVFLERSRKVQEAIDVLEKEIAEAEVQLRSMHKESRSTEQLIPALMHGIEAYRAAETAEEKNRILRTFIKEMRYNREKEWTGPYQFELEIELYE

SEQ ID NO: 5834 - protein, 590 aa, unidentified
  source 1..590: note = uncultivated organism
MPADSRSTIRCAIYTRKSSEEGLEQSFNSLEAQREACEAYIASQRHEHWRCLGNAYDDGGYSGGSMERPALRQLLADIDAGKVDTVVVYKVDRLTRSLADFAKIIERFDANQVSFVSVTQQFNTTTSMGRLTLNVLLSFAQFEREVTGERIRDKIAASKRKGMWMGGRVPVGYNVKDQKLIIDTTEADQVRKIFRLYLRLGCVAKLKGQLDQNGVKSKERLSASGVKSGGMSYSRGALYTLLQNRIYLGKIPHREATYAGEHDAIIPQELWDRVQDRLRNNNKVRRNGGNAKSPSLLVGLLYDDQGNRFTPSHAVKRGKRYRYYVSQAAIHHLAAAKGGPTRIPAVEIEALVCRRLQSLLSSPEQLLRSIDMESDGAATSNLLINSAKQLAKIWPSKSPAEHREFLSNVVARIVVHETTLEVAIIQPALREALLGDQSSRPAKWERSLEKRSKDVFRLTIDARVKRCGGEVRLLIPAGSASEAPARRVPALIKAVARAHPWHQKIIRGDLTGLRSIAQLTSLDEHYAGRILNCSFLAPDIVEAILDGRQPADLTVQKLLRSLPLAWVEQRQWLGVSATSLHADNLFRIQP

SEQ ID NO: 5835 - protein, 560 aa, unidentified
  source 1..560: note = uncultivated organism
MVEKLQRCAVYTRKSTEDGLEQEFNSLDAQYEACAAYAVSQRHEGWVLLPDRYDDGGFSGGNMGRPGLQRLLADVAGGKVDVILVYKIDRLTRSLADFAKIVEVLDKAGASFVSITQSFNTTTSMGRLTLNMLLSFAQFEREVTGERIRDKIAASKRKGLWMGGPVPLGYDVENRKLVVNEKEADLVRMIMELYIGLGSVVEVADELNRQGYRTKVQKRASGPHRGGCMFRRGTLYHLLSNRIYIGELAHKGEYFPAEHAPIVPRDLWDAVQEKLKDKACGTSRRLKAQQPSLLTGFVFDGEGRAMTPSHATKPGRRYRYYVTRPDQIDGVLAWRVSAYDLEQLVCKRLSALMIDQHLIAGLGQNMTAEDLQQMLRQADLAATLLCSGAVRAKTELLAKLLHRINLREDGIDLILDRSKLVTALGATNCVDAAAPEPLTLSLPAVKVRRGHQLRLVIPGPETIRINSAKRNEKLVALVADAHQARQLVLDSPDRSIAAIATANGRCRTRLGKLAALACLAPDIVTAIVEGRQPTTLTASTLLNIELPFCWAEQRKLLGFC

SEQ ID NO: 5836 - protein, 511 aa, unidentified
  source 1..511: note = uncultivated organism
MKRVCLYTRISTDEARQPTSLRTQRERLERYCEAMEDWRVVAAFEDQASGTSLDRPGLQDALALARECRFELLLVYRVDRLARKVRQLASLCEELDQLQVVLKSATEPFDTGSPAGRMMLQMLGVFAEFEHATIVDRVTAGLERRVREGRWMSGRTPYGYARDTQSKLLVPDAVKAPIVRRIFQLYGEGKLGTTAIARLLEAEGAPAPRKHGWSPSALQLILANPAYRGLVRWNGETHPGLHEPLVDEHLFESAQALLRRRGEDASLRRGNPSEFLLSGLVRCHHCGRAYVGTSAHGRSARYTYYACSTRYKYGTGKCNGDRLPKDRLEEAVLAQLADLYRGGQLIEKALAEAAKQTARERPQAEEQLAATRAEIAQLERKLERYFDAFETGELSAALCDERVRGHRERLEALRQREADLTARVATAAHTPPDGAALAGLADQLDQIIANGNPEQAKDLLRLLVKEIRVYNRRRIVPTYRVPAAVRATPRKVERAGLEPATPSLQSWCSPN

SEQ ID NO: 5837 - protein, 555 aa, unidentified
  source 1..555: note = uncultivated organism
MSISVRSLWEKGVNMLPKQTDYKVGMYLRLSRDDERQGDSLSIENQRRILTNYIEENGWTLYDTYIDDGISGTTFDRPGVQRLLDDAKAGNINLILCKDMSRFGRNYIMVGQYVDYIFPMYNIRFIALTDNIDTLNSDSASMDMLPIMNVFNEWHAANTSKKLRTVFLSNAKAGKYMTTASSYGYVKGDDDNYTPQIDPEAAAVVLRIFKMRASGMGHKSIADVLNQEHILPPLDYRYEKLGKPVPVYSRHLWQAQTVKRLLANQIYIGNLAQMKETTVSYKNHKVIRKDQSEWVIIEHNHEPIISRELWNKVLEVNASVSRGKCTTERVTHALSGLCYCDECGAKMKMQKTPENKSPYSYRCGMHVRYGKAYCSSHNIKGTILEGAILQDIQRQLDFVTNDAEAREKYLARKQGDIAHKNAEDSKRKRDIEKRIDDLSKLIRKLYEDRVLGNMPEKTCAELLTDYQQEKESLQAELDEIMKRSETIKQDEADVDEYIRRLKRYAGVTQLTRQMAMDLLEYVTIDRYEGEGKPRSIHIYYKLIDKPLRDKNNALA

SEQ ID NO: 5838 - protein, 521 aa, unidentified
  source 1..521: note = uncultivated organism
MTMATVTMIPAKPQAGRRKSKDEAPKLRVAAYCRVSTDTDEQATSYEAQIEHYTEYIKKNPSWEFAGIYADDGISGTNTKKREEFNKLIDDCMAGKIDMVVTKSISRFARNTLDCLKYIRQLKDKNIAVYFEKESINTLDAKGEVMITIMASLAQQESQSLSQNVRLGLQYRYQQGKIQVCANRFLGYDKDEDGNLVINPEEAEVVKRIYREYLEGSSYYQIGQSLSADGIKTAAGSDYWLASTLKKILSNEKYIGDALLQKTVTTDFLTKKRVINKGIVPQYYVENSHEAIIPRDIFMRVQEEMVRRASLDTGTGKRRVYSGKYALSSIVYCAHCGDIFQRTHWNIHGKKKVVWRCVSRLYKKYSNIDCPARTVSEAELHEVVVKAVNKLIEGQDDYISTLKKNIEKSLGDGNDSKVAAIDSELEELQKKLLKKANAGQVYEDIGDKIDDLREQKRLLLLEDARDEGARQKVRDLEKFIDKQDKAIEEYSELLVRRLIEKITVYDKYYEVEFKSGLTITV

SEQ ID NO: 5839 - protein, 568 aa, unidentified
  source 1..568: note = uncultivated organism
MKTIRCAVYTRKSNEEGLELAFNSLDAQLEAGLDYIKSQKHEGWEAVKTIYSDGGFSGGTMKRPGLTQLLEDIDKGRIDVVVVYKVDRLSRSLSDFAKMMELFDEKQVSFVSVTQQFNTSTSMGRLTMNMLLSFAQFEREVSGERIRDKIAATKKKGYWVGGTPPLGYRLQREEESKGIYIIPGEAELVRTIFTGYAEHQSHIEVATELNRHGYTTKRWTSKSGRVHGGKPLTAKYIHGILTNRLYIGKITHSRSGKTDVYEGLHQPIIDLQTWDAAQQIIKKQEKSELHRWTHPHLLKGKLRTSDGFAMSPSSTHRPLTKRSETKQKRLVRYYISQKAIKHGFKNCPIKTINAEHLDELFRGMVLSYLNHDDLVKQPQSVRDRWIRRVIESVTLDTDQVAVSLLSEQIDRLRSHKFKAAPSETPAYPTCLHTPEVEECGNTISLSLRIQIKKLDGRRLLLSPDGSDLIIPSNPVPQQHIVDAIGQAYRWHNELISSGTTIRAYAEQHGIARSRMIELLPLTQLGPEPLRHALAGTLPSTITLDDLIAASKRLDWDLQVTELGIRSAG

SEQ ID NO: 5840 - protein, 510 aa, unidentified
  source 1..510: note = uncultivated organism
MPANSTKVIRCAIYTRKSTEHGLDQDFNSLDAQREACEAYIKSQASQGWKALSQEYDDPAYSGGNLERPALKRLLRDIESGRIDVIVVYKIDRLTRSLADFAKLVETFDAKSISFVAVTQQFNTTTSMGRLTLNVLLSFAQFERELASERVRDKVAASRKKGKWTGGTVPLGYDTKDKKLVINKAEAETVRTIFRLYLELKSFGKLVAELDRRKIVTKRRDTKVAKYNGGIPFTYGPLAYFLKNRIYVGEMHHREKWFKGEHQAILDRQTFEQVQLLLKSNRIARRIKHSESGALLRGKLFDDKGNAMSPSFSSKNGIRYRFYVSTALRGRKDRAGSVTRVSAPEIEMITEDTIRRKLEEQGASTEAVWDRIERGVVGKKSIRVTLGSMNTDIRPAETIDIPWNPKRSDHPDTSTLAPSREPDQKLLQTIVRSHAWLSELANDRSASIEELASKADIHPKVMREALKMAFLAPDIVTSIFAGDAAFELADLRKVSALSWQRQRKELDTAR

SEQ ID NO: 5841 - protein, 538 aa, unidentified
  source 1..538: note = uncultivated organism
MKKESGKTVRCAIYTRVSSDSGLEQDFNSLDAQHEASQAYIKSQAHAGWTLIRARYDDGGYSGGSTERPALQRLLEDVKARRVDIIVVYKVDRLTRSLADFAKLVELFDAHGVSFVSVTQQFNTTTSMGRLTLNVLLSFAQFEREVTSERIRDKVAASKRKGLWVGGNVCLGYAAVDRKVVVLPDEAETVRQIFEAYARLGSLSEVQKELRQRGIVSKHRTLKDGRKVGGIDFSTASLANLLHNRFYIGEVDYKGEILKGPQEPILERALFDQVQEKLAAQRIKRTKTNAKGNSLLTGRIVDDRGNGMTPTYAVKNGVHYRYYISTPLLHGKSEIAGTVARVPAADVEDAIGKALRERLEIRAPEDNIALLQTYVERVEIQTNRLVVTLRPGAITPPSAAESQKGKSASLIMHIPWTKPPTKRGRDIVLPAGAAQDETRPIKAARRAKLIAAIAKGCRWLDELVSGQTKNPEEIAERERCSVRKVNMTISLAFIAPGLVKAAVDGTLARGVNLSRMYELPSDWREQLRAVGITLSKGD

SEQ ID NO: 5842 - protein, 545 aa, unidentified
  source 1..545: note = uncultivated organism
MSERVYRTAIYARLSKDDGDKAESNSIVSQKAMCQEYIEKHRELELVDIFADDGYSGVDFNRPDFQRMEDAIRDHRIDAIVCKDLSRFSRNYHEGGRYLEKIFPEMGVRFIAINDGYDTINGNKSSDYMNLLFKNLVNDNYSRDISVKVRTNLDVKRRRGDFVGPFTPYGYIKNPSDKNRLIVDEYSGNIVRQIFSFYKDGMSICQIADELNELGILSPMEYKRSLGINYKTPFRTGETARWSYKAVKRILTNEVYLGVLIQGRRGTANYKVHTIQEKDESEWIRFEDAHEPLVTYDDFMAVKDMLGRDTRLVGKGSEKNLFSGFLYCADCKQPMVRKKVKSGNKIFYYYVCSGNKRHEGCTPHSISAKKLTEAATAVLKGQVEYVLDMSDALDYIEGLPNNDRAIINYEAQAEKLEEEIEHLKRMKFKIYEDYSGGEISKDDYTDFRNQIVDELDSKKTSLGRVQHEMKEAASVGNAGKTWVTLFKEYKGIKELSRRVLMALVDKIFISEGHGIEIVLKYEDECKGVVDYIGKNMDLLQDVKEA

SEQ ID NO: 5843 - protein, 521 aa, unidentified
  source 1..521: note = uncultivated organism
MNDTAKTTDINEEPMMKNVCAYCRVSTNIPHQKGSYESQLEYYENMIRSKAGWSFIGIYADYGKSGTKKKGRTDFMRMLEDCEAGEIDIICTKSISRFARNTVECIKIVRELKKKQIDVYFEKENIHTLSEKSEFLISIYSSVAQAESESISSNQKWSIQKRFMNGTYILPNPAYGYCTNANGLLELDQKQAAVVRFIFDEYLEGNGIWRIAKSLNEQKIPTKTGKAAWLGGAIYIILKNSVYTGDLLLQKTYSEDIVPFVRRKNNGEYRQVLVENDHEPIVTHEEYEAVQRMLKQKAKVKKAGKEEQVEEPSEFKGKVICGICGSSYNRQERKERTGKINITWSCARRIQTKELCENDIIKESQLEQAFVIMWNKLSSHCDEILVPLMNELEQLKATPMIQKQLEQLDKQIQEQKKQREILNHLASGEIIDSAFYMEQQNMISKNIKEYQRAKEQYLQKSRQRKELIQTKELIKQFKKGPQYLEVYDKTLFQAIVKQIIVNPNELVFELTNGLKLTERRK

SEQ ID NO: 5844 - protein, 531 aa, unidentified
  source 1..531: note = uncultivated organism
MPLAKKKTEQEGGRAVIYARYSSNNQKEESIEQQVKECQAFAERKNFTVVGIYSDYAISGKTDNRPEFQKMMRDSKKGGFEFVIAWKSNRIGRNMMQALTNEAALLNAGVKCVYVEEYFDDTASGRFALRNMMNVNQFYIENMAEDIRRGLMDNALKCLVNTRPSFGYKKGEDGRYAVNEETAPIVQEIFQKYLDGWAFIDIANELNRRGLKTVLGNDWNKGSFHSMLRNEMYVGVYKYSDVRIEGGVPALIDKQSFEEVQRRLNHKQTAKGKKNGSAEYLLTGKLFCGHCGEAMVGISGTGRHGDTHYYYRCQGRHHKKNGCSKSNVSRDLVEKRVIESVREFISNDEILEKIIDSYSRFLKKARDESELAVMEAEYAQNKKAIANLIKAIEAGAASETITERISELEAQQRQLEREIEFEKVTLTEITPDQLQFYFKRLQDADLNDKEVQRDLITFFVRAIYLFDDHLKISFNFDKESDRTVTFEQICGDDSSDLLGLYELPTGVLSMTIQTPMTVTVFPCGIVLSVPI

SEQ ID NO: 5845 - protein, 508 aa, unidentified
  source 1..508: note = uncultivated organism
MSSAAGQDPQLRAGIYARLSETYDAAESVPTQLANGERHAGRRGWVVAGRFKDDGFSAFKEIQRDDFVRLVGAIEAGELDVVIVRDVDRLTRNLTDWNRFEKACVRHGVLLSPYTGGDLDLSTPEGAYYGGMETLRAKRESAVKSARVREAKERQARAGKRSGGGSLWFGYVRVYANPDEPTPRKRVILREELHPLNAPAIRDAAERILRGESAGSIIREWTAHGIKPVSAAEWSRGSFTSMLTSPRIAGLLAWQGQKFPTSDWPAIIDVDTHEQLVKLFSDPARRKHVVGAQRHLLSGLAPCPKCGHGLKYRKFSTYRDRADSYACVRGVGGRCGGVAIKAELLEEYVTGAVLDALESPRVQEALHAEDSDAAHREELLATIQRAQDVRADARRDLADGVIDRNDWLDIRQRTEDTISTARREYDRLAGSATVLGDIPPSDGVREAWESWNTDRRRGAIKAVLHKVVVKNLPPGTPNNPGGNMKDPIARREREMAALRQRVEFDWRV

SEQ ID NO: 5846 - protein, 509 aa, unidentified
  source 1..509: note = uncultivated organism
MPTAAIYCRVSTEDQQREGSSLSSQRDYCRRKALDLGYDVPESCIFLEVFSGADTDRPKLNELRSLIRNSAIDALVCYATDRLARNPIHIAIIAEECEKRGIDLIFVTEPLDKTPEGALIRYIKGYAAEMEREKIRERSIRGKREKARQGKLATGGPRLFGYEAVNKKRVINDAEANIVKRIFNWFAGENMTLYSAAGRLNSEGVPSPAGSRWSESAIYRILNNPAYAGITYAFRFKLVPSKNHGMVHKLRDSSEWIEVPGATPPVITREIFEAAQEQLKKNRRRSPANRVHQYLFTGGRLRCGTCGRSMTGSVRIKNGKTYLYYRCVCNVKANYYSKCPQPSISARIIEPAVWKAVLEFLSEPDILEDIIKSRCAESPTGDEAEEYLIKNNIRKAKEEELRYIKLYGKGRISETNFETLIEKVRETLLELEKQQQKLKLKREDTERMHLHIGDLKASAVAYHQALKTADYPLKLKAMEALDIKVTYTPDKNVIIDGVLPVGVTDFGMP

SEQ ID NO: 5847 - protein, 508 aa, unidentified
  source 1..508: note = uncultivated organism
MPKVTMINPINPKTEKKTVPKLRVCAYCRVSSDHNEQQQSFSTQVAYYTDLIEANDTWAFAGIYADEGISGTSKDKRDEFLRLMKDCEAKRVDMVITKSISRFARNTKDCIEAVRKLKELGIAIYFEKENINTLTVDSELVLTILSSTAQEESISISKNNKWAIQKKFETGEWNPSCLPYGYTKGAENEIIIDEAEAVIVRRIYRDYLNGKGSYIIAKELTLEGVSTRRGAEAWGENVVTEILTSEKYVGDMLMQKTFTTDTVPFIRKKNKGQKQKYFIQDSHEPIITREEAQRVREIMDRRRKEKEMVGDTKKYNNRYPFTSKILCGECGTTFKRQKLFKGMPYQTEQWCCSKHIRKRTACSMTAIKEDYIKAAFTILYNKLKSNCDPILIPLSEDLKKLHYSQGYESQIKKLNSRISELTEQSHVLSRLRSKGYLDSVLFIEQNSFIVKELAELKAQRSALLDYTDFGEQITRTHELIAILKNQEDLMESFDEITFSLIVTRVALK

SEQ ID NO: 5848 - protein, 527 aa, unidentified
  source 1..527: note = uncultivated organism
MNGLQYKVGIYLRLSREDERLGESGSISTQRDLLLNYIRDNNLIFVDEYVDDGVSGTTFDRAGFNRMIKDCEEKKINMIITKDTSRLGRDHIEFGFYVERYFPEHGIRYVAVNDGIDTESNSSANDMLVFKSAFNDMYVKDISNKQRSSLYVKKRNGQFVGAYAPYGYNKSEEDKHKLVINEEEANVVKRIFEMFASGYSLTNICDTLTDEKIPTPSISKNMNIGQNNLHYGVWATRTVGDILKSPNYIGNLTQCKQKKISYKSKKRIHNRKDNWIIVENVVPRIIDDDLFNLVQDMFKSNKNRGKGNGITDKLLLRGLIYCKECGHTFGFRAQDQVTKKYGKVTRIYGNCNYWAKRKKQNVCTPHSVKYNEIEEVVIQELRKMCNKYIDSNYLEDSLKRSDKIKAKKDKCNIEILKLENANKVLNKKIDTCYNDKLEGNITLDMYKRAYNNFVNEIKDNENKINEYKKELKNLEDNNVLDEKNLMNKIKEFLELSNPSRSLIASLIDRIEITEDNNIDIYYKFKLV

SEQ ID NO: 5849 - protein, 563 aa, unidentified
  source 1..563: note = uncultivated organism
MLKITLDRFYKAAIYLRLSKEDGDFSFSGEKLESDSISNQRLLIHDFLKKHPEITPVKEFCDDGYTGANFDRPEFQKMLSAVKAGEIDCIIVKDLSRFGREYIESGSYIQKLFPALGVRFIAINDHYDNAQPNAADDSLVLPFKNLMNDSYCRDISIKVRTNLEAKRRNGQFVGSKVVYGYLRDPANKNKLMVDPNAAPVVQDIFRWKLDGLSPAQIANRLNESGVLSPIEYKRANGSKQRTVFQTSKQAQWSAVAIYRILKNEVYTGTLVQGKTTTPNHKVKKIMIKDENEWVRTERAHEAIITLAQFDLVQKIMQDDTRSPVGVQGVHPFSGKIFCADCGSTMVRKVSRCGNAEYAYFICSGNKSDRHRCSSHSIRETVLYDAVLAVVQAHIATALNMADAMKGIDNLAWENRELEKIRGKIAFQVEAIDKNRRLKVSAYEDFRSQMLTREEYESFKAEFDQHIKEASEIISRLHSEQNSIQSGLSEQQGWLAQFRQYENIQELSRNTVVSLIDRIYIRENKDIDVRLMNRDQFAAITEYLREQSKNKITEKTAPRKKEAV

SEQ ID NO: 5850 - protein, 536 aa, unidentified
  source 1..536: note = uncultivated organism
MKDKVGIYCRLSDEDRYKKDKSDDSESIANQKSMLLKYALSHNWEVINVYSDDDWSGADINRPQFQKLIEDCKNGLINIVLCKTQSRFSRDMEVVEKYIHNKFIEWGVRFVSIVDNADTEVQGNKKARQINGLINEWYLEDLSDNIRSSLQNKREDGLYLGSFAPYGYVKDPNNKNKLIVDPVAAEVVKEIFSLYVSGAGYYKIATTLNEKGIVTPTNYKKENGSNYVCRAAKFKEKTKWSQDTIARILRNEAYIGNLVQGKKTYVSYKNHKSYTKPKSEWTYSYGTHEAIIDMETWNYVQSKFKKRTRTSKITGEVYMLSKKVYCKECGSVFNRQLYHTKDGKVPYMKCKSRKLASRDCDNRESIRCEILEKYILEELNKQLDIYYSLDELEKNYILQKKALNSSTLSKRETFEQEKEIIEEKLAKKNDHYKSLYEDKLEGIITQEDFLMFREKFSKEIENYKKRIEIINEELENIKSKEENIKTSKNIFEKYRHIDKLTKEIVDEFVDVIKIGKINKETKSRDIDIHLNIINLR

SEQ ID NO: 5851 - protein, 561 aa, unidentified
  source 1..561: note = uncultivated organism
MQKIMDKTYYAAIYLRLSKEDGDTSSGEKKESNSIANQRKLIEDYLNKHPEITLVQEFCDDGYTGANFDRPDFQKMMEQVKKGKINCVIVKDLSRFGRDYIDSGKYIEKIFPTLGIRFIAINDNYDSAQSQQAGNEIILPFKNLINDSYSRDISIKIRSNLDIKRRNGEFVGSHVVYGYRRSDEDKNKLVIDQNAAPVVQSIFSMKMDGFSPAQIADKLNRDGVPSPYEYKRLCGSKYKTGFKKQVQTDWGPVAVYRILKNEMYTGTLVQGKTSTPNHKIKSRTMKEESDWMRTENAHDAIITPALFDTIQKLMLEDTRSPSGDDSVHLFSGKVFCADCQSTMTRKRTRSAGKEYVYFICNSNKVDRQVCTSHSIKEQVVYDAALAVIQAQVALALDLEAALSQLNGISWERREMERIDAKIARQEELMEHNKQMKVHLYEDFKSEMLSREEYNIFKAEFDKGIQDAKDAIARLVGNKNQIRSGLTQQQSWLTQFREYENIQELNRRVVVNFIERIEITEDKQVHVVLNNADQFQAIVEFLEEEREKANAKKIIVLSREVS

SEQ ID NO: 5852 - protein, 536 aa, unidentified
  source 1..536: note = uncultivated organism
MWYPSCCRRGKRLSQSGAIRRKKISMRKTVTELAMPEQGQRLIRLAPYTRVSSGSDDQLHSFAAQVKYYTEYAAAHPEYELVDIYADEAVTGTRMDKRDDLNRLLRDCRKGKIDRIITKSVSRFARNTTELLTMVRGLKELGVSIYFEEQGIDTAAIDLEMILTFPGMAAQKESETISENMRWSYQKRMESGDFNCCKAAYGYELIDGQLYINEAEAVVIRRIFDLYLQGCGKQAIANQLNTDGIPRRYGYKTWHLNAIHYILNNERYMGDALLQKNYTTETMPFRKRRNRGEKPQYYVENSNPAIVSREVFQAAQALQQRKTAGGSAPKNRYPFSGVLRCPVCGHAYRRQVTNGTAFWLCSYKASGRSECASDRVPENTVKDAFMRMSGKLADNREELLGDLIRQLEKLQNRTSGSGERIYQLNRQIADVNAQNLVVAQLHSSGILNNAEYAAQSGELNRKVSELRSERRRILMEDEDNEVIESLRALDEIMADYAPTEDFDEDLFGQIVESITVVSKNALRFCLAGGLALTERI

SEQ ID NO: 5853 - protein, 533 aa, unidentified
  source 1..533: note = uncultivated organism
MTEKKLVDGSMALQEKQCRVITIEATEKPKNMKLRVAAYARVSSASDDQLNSFAAQNHYYTVLISGKENWDMVDIYADEAITGTCADKREDFQRLLADCRRGLIDRVLVKSISRFARNTKECLEAIRELKLLGIGIYFEKENIDTATMSGEMMTSLFASCAQAESESISGNMRWSYQKRMQSGVFITCKAPFGYRLRNGVLEIEESEAEIIRLIFDRYLAGCSTTAIAAEITKLGISSRDGKPYWQQSSISYILRNERYVGNALLQKKYTTQTLPYQKRRNHGEKEQYFVTGCTPPIVSREVFETAQTLLQCRAQKIITAKGPKSPLSQKIFCACCGAMFKRKRNKETVYWVCNTHDEDKKRCGVTQIPQVRIYDAFLRLYYKLKHHGEAIFTPMLTSLQTIRNHRMLWSVDVVELNKQISDLSSQNQMLAELKTQGLIDPDIFISQSNELTEQLRAAKLKKERLLTADGDHTIAQTQELMELLEAGPDVLDTFDAELFGELVDKIIVESNERLRFRLKNGLELTESIERTVR

SEQ ID NO: 5854 - protein, 590 aa, unidentified
  source 1..590: note = uncultivated organism
MAASGALDGTAAVRAEGRSASDASSRSGVPARRRCAVYTRKSSEEGLEQAFNSLDAQREACEAYIRSQRHEGWTALATRYDDGGVSGGTLERPGLQRLLADVRAGRVDLVVVYKVDRLTRSLAGFAKIVEAFDAHGVSFVSVTQQFNTTTSMGRLTLNMLLSFAQFEREIAGERIRDKIAASKRKGLWMGGTVPLGYEVRDRKLAVDEPEAETVRRVFRLYGELGSVRLLREQLAIDGVRNKAGQPLSRGALYTLLRNRLYRGEIAHKGAVHRGEHAAIVEADLWLAVQARLAENQVDRSRGGGVGRPSLLAGLLHDGTGERMTPSHANKGGRRYRYYVSKSLITGSRDAAPGGRRVPAGDLERLVAERVRGFLASGADVLAALRPAVPAAAEQRWLLDQAARLAHAWSETAGPDQRSTLLSLLSRVDLHAGRLDLHLLPCRLLALLRGAVARDAQPPATDAEQTPPLVLSVPVALRRAGREMALVVGGGPHAPPTPDPSLVRLVLKARALWGTLLRGGAAGLGELAVREGMSGSYATRLVRLEFLAPDIVAAILQGEQPDGLTAARLLRECRRGLPPDWREQRALLSAC

SEQ ID NO: 5855 - protein, 564 aa, unidentified
  source 1..564: note = uncultivated organism
MSTPHNPTRALIVVRLSRVTDATTSPERQLDACRSLCEQRGYEVVGIAQDLDVSAGLTTPFERLQLGDWLENRFHEIDVIVVYRMDRIVRRLLDLADLIRWGQTHSVSLVSATESFLDLTSPFGDIIALLVAKVAELELEAISSRIASAYHHNRQLGKWTGGAQVPWGYLPRQTDDGSWRLFPDPEAVPVIHEVAERVLAGEPLRAIAHDMNERKVPTAKDRMNAHLGRELKRYSWTSAGLKRSMTLPTMLGYATVREPKRDANGKILRDARGRKMFEAEDVLRGADGSPVQRAEPILTKHVFDQLGVELASRENRKEPTKRSSALLLRVIHCGVCGRPCYRLKGGEGRRPRYRCSSAQYKSTCGNGSVVMEEMDEIVESSLLALLGDSERLQRVWDAGKDNAAELVDLDNTLTDLAGQLGRGPFRAGTPQRAALDANIEVLDKRREELALATTRAAGWTWKPTGETFRDWWESLDLTQQNVYLRTMGVRVTFDKRGELSVHLEMAELEQMAAQVKAVGSVDSMTETFAKMTAHGIAGVEIHGGKAVVVSTTGERIEVPLGTED

SEQ ID NO: 5856 - protein, 688 aa, unidentified
  source 1..688: note = uncultivated organism
MRVVSYVRVSREEQVDGWSLDAQRDQCAELADRRGWDLIQVFEEPGRSAKTDLRPAFQRMMSRAEARQFDVIVVHKLDRFSRSLADVVKNVARLKEAGVGLVSVSEPWLDTTTPQGEFMLYLFALLAQWDNENRARETSKGKQQRAKEGYWNGTLSFGYVTLRDLRSELWQIGEQYDAREIEEEAYAARSDELENYLDQWHDRTEGDAVPDLKNAAGALLAFTCYSQGNMSDNDVAVVLNEAGYRTSGNWGERLFEADTVRPMLQNRFYLGEVSYKGKWMPGRHPAIIPRSLFEKCQQVRAQRRGRTVRGKSKKRTYPLSRLALCARCGKPMRGQANHADERYYRDPRRSAHICDQKMVRAEDAERQIVEYLANIKLPEDWRERVMQLSQLDQEDKESSEEKRHRWEGQLERARKLYLMGDMEEDEYRAMRENLKGKISALQPTQDADLEEAAVTLETIGSLLEHANPKELDDVFHALLTSVYLDSSDAGPVVAIEPKPFLKLLMDVSIRPFRPDGDDDPKTPTPPQTPLPDDDGSGDGQCSLTGSPVEGDDHRHSEVVESENRDTILADAGQEIVVADKGAMPVAPVAATRGNLTRGRIFYVQHTRDFCRLLFIFSQHDSEVAMHHHRQHFTVMHKDPFHDFLEQLLPGIQRIVYLLALVPIRLKILYQVRRFNQIVVVNRAQRIQL

SEQ ID NO: 5857 - protein, 516 aa, unidentified
  source 1..516: note = uncultivated organism
MNMGGKLLKTDSRLALHNSKRVAIYTRKSTSIGLEQEFNSLDAQREACAGYVRSQPGWKLLSHSYDDGGFTGANLERPAFAKLLRDVEAGGIDIVVVYKVDRLSRSLLDFARVMDFFNRSGTAFVSVTQNFSTADAIGRLTLNMLMSFAEFEREMISERTRDKIAASRRKGMWTGGTVPLGYDLVEKKLKINPVEAELVREIFRRYLDCHSALRVAKDLNAEHRTTKQRQSKEGVPRGGGTWNKNAVLNILKNPVLTGLMPCGQERYEAEHEAIVEREVFEAVQQRLEAMATFQKKSRNSNYLLTGILFCGHCDKAMTPASTKRGTYRYYRCLSRDKRGKEACPTAPVSAGPLEDLVLAKLREAIFSHHLAEDVTAKAREKLDQERQALEREQSKLPGKIAQLAEQGKQLVDKSGKVPEPLLQAKFKELEQKLAIHQARLEEVQYRLKKLADAALEVDWVAKCLKNFDPIWNALTPLNQQRLVRAVVERLVLKESDNVLNMQFANLEASDPKEAAL

SEQ ID NO: 5858 - protein, 551 aa, unidentified
  source 1..551: note = uncultivated organism
MKKPPKIRCAIYTRKSHEEGLEQEFNSLDAQRVAAEAYVQSQMHEGWEASPTLYDDGGYSGGTLDRPALQRLLADIKRGEIDVIVVYKVDRLSRSLLDFSKLVETFNAHNVSFVSVTQQFNTTNSMGRLTLNILLSFAQFEREVTGERIRDKFAASKKKGMWMGGPIPLGYDVQHRKLLVNEPEADQVRFIYEKYLDLKSLHAVKDYLNTHGHEPKRWLTPAGKEAGPKRYCLQSVRTILSNPIYVGKIKHKEKIYDGEHQPILDPALWQTAQEVMQTNSVARRSPRNHDHAILFKGKVFDAAGQLYGTTYTGRGTKRYHYYLNKVTKARISIGELNGIVSNAIQGLDIAAAALSVPGVSHLELAGRYQGAVDRILTQALERVVLHEASVNILISKQQLIAILQQAPSNAGNANPSAMLTAMIDHPETIELTIDVAFRSYAGRKIAFSTKRGVVNIQQTKHDQSLVTAIVRSYKWNKMIDAGELASAADIASKEKVERTYAGDVLRLKYLAPEIVTMIMNGTQPRTLKVSQLLRQQLPLDWEAQKRLLNIA

SEQ ID NO: 5859 - protein, 635 aa, unidentified
  source 1..635: note = uncultivated organism
MSETLLNRMRRVAIYGRVSTEHEAQLSAFENQQVWYDDLTAHHPEWCVTARYFDRGITGTAAKKRPAFLRMLADAKAGSFDLIVTREVCRFARNTVDTLSITRDLKRLGVEVYFVNDNIRTMDGDGELRLSIMATLAQEESRKISERVRAGQAVSRERGVLYGNGNILGYERLNGTYVINPEQALTVRKIFELYAAGLGYKKICAELMRLGYRNSRGTVDWKVDRIGRILRNATYAGYIGFNKSHSESYLTQRRINHGEADFVYVRGDFPPIIPEELWQRCAAIRKSKSRERPDVSGQSRRMGCKTDPSVWSKKLRCGCGSAFRRYKWRQNADGTTVYGYQCYRRARSVSPDKLRSAGLEDAIACDSHTVPGWQLDLMAQKVFAALWYDRRDAVILACQMLEACAEADRKDQGALVAALADELERLRRKDAGLREMRALGDITREQFLSDQAHLREEQEETQHRLDELQPEAPPADPTLDIRAIRSTLEQWVDLSGPVVADELVERFIRRVDVLSSTVYRWQIDLTPPKTQTSLDAPLADILPPAAEPEPRELFRFQVTAYPRLHIGKMRHHGGDLGLWPWRGHPQHPVGHPRRTAPWNERLYAADRTRRPQWERYPLHPALCPGRRAARPAHPR

SEQ ID NO: 5860 - protein, 557 aa, unidentified
  source 1..557: note = uncultivated organism
MQNFIDKTYYAAIYLRLSKEDGDSSTGEKKESNSIANQRKLIEDYLTKHPEINFVQEFCDDGFTGANFDRPDFQKMIEQVKQRKINCIIVKDLSRFGRDYIDSGRYIEKIFPALGVRFIAINDNYDSAQSWQAGNEIILPFKNLINDSYSRDISIKIRSNLDIKRRNGEFVGNHVLYGYLRAEDDKNKLVIDQTVAPVVQTIFRMKLDGYSPAQIADRLNKDGVPSPYEYKRLCGSKYKTGFKKQVQTEWSPVAIYRILKNEMYTGTLVQGKTSTPNHKVKNRTRKDESDWMRTENAHEAIISPALFDMVQNLMLEDTRSPSGDDSVHLFSGKVFCQDCQSAMTRKKTTSAGKEYVYFICNSNKVDKKTCSSHSVKEQVVYDAVLAVIQAQVSLALDLDAAMSQLNGVSWERREMERIAAKIERQEEIIEHNKQMKAHVYEDFKDEMISREEYNIFKAEFDKGIQDAKDTIARLNGNKNKISSGLTEQQSWLAQFREYENIQELNRRVVVHFVDRIEISEDKAVHVYLSNEDQFQAIIEFLDEEQKKKIIPFIREVS

SEQ ID NO: 5861 - protein, 567 aa, unidentified
  source 1..567: note = uncultivated organism
MAKARSADASQPSIRRCAIYTRKSTDEGLDQEFNSLDAQREACAAYIMSQRHEGWILLPDYYDDGGYSGGNMDRPGLKQLLAEVEAGRVDVIVVYKVDRLTRSLSDFAKIVEVLDAASASFVSITQAFNTTTSMGRLTLNVLLSFAQFEREVISERVRDKVAASKRKGMWMGGRVPLGYDAIDRKLVVNEQEAETVRHIMRRYVEVGTVPALCEVLRRETFRTKLQPWKVGSRQGGGHFTRGALYHLLSNRLYRGEIAYRGEIYPGEHDAIVSQELWDAVQTKLRDNGVERSGTIAEQPSLLAGMISDDAGRRLTPSHACKGSRRYRYYVTPEDEARTATRPFRLPAGDLERAVLDGLRAALDPAALIDKLDSHSCRPKDTGMLVKAVTQLRASIDAAKPSSRIRLLKAIGLNVLVRDAGITATINLNHLMRELGIAQQPSDEPTTHAATIDVPIRSVLVRRGKEDRLAIAPAELDPQQRDPALVTLVLKALDARRLLLGEGSAGLIDAEFHQRYLERLARLGFLAPDIISAVLKGKHPKALTARKLLRVPNLPISWKEQRRLLGFA

SEQ ID NO: 5862 - protein, 511 aa, unidentified
  source 1..511: note = uncultivated organism
MAQVQVIQPYQPQGEVVEKVAAYCRVSTDSKDQLNSYRTQIGYYTNFIAQHPGWALVDIYADEGITGTSLEKRDEFKRMLQDCRAGKITRILVKSVSRFARNTLELIETTRELKDLGVVVVFEEQGIDTAQMLGEMQLTLLAMAAQEESTSISKNVRWSYQKRMENGEFITTYAPFGYRLEKGVLIPEPEEARVVCAIFTLFLSGRGALAIAKELNQNQIPTRQGGKWGRSSVEYLLKNERYIGDAIVQKRYRTPTIPTTRRVNHGELPMYHIHGCHEPIITKEDFEQVQRLIAQRALHTGRGEGRVSLKIECPDCGNQFRRLKIRNTYYWGCRNRENNGSPCAKIRYKENQVKMAFLTMVGKLYTNQENVLHGTFSLLEEIAARQEQGNAKLYELNTALADLNEKAHTLQRLHNKGFIEDGDFREQSDALASQRKKLSDQRTQAIHGSKALDALDKLRELQDTLASLPEIPWEFDIDLFDQIVEKISPISNTELLFKLKCGLELKEVIPQ

SEQ ID NO: 5863 - protein, 601 aa, unidentified
  source 1..601: note = uncultivated organism
MSTSENPGGSGSSSSSLLTHGVRARLLQALTGESSESARAQGGSGDPVGSTRKAFAWARVSTDMQEERGLSLPQQLREIGTFAERNGLEIVGEFSEAASAFRFDEKRVEFHRMLDEARNRPEVSVILVHDFSRFSRDSVNGKALMRDLKASGVEVVSATEPTWDEETASGVWMEAVTFAKNEAYSREIAFHTRKGCRANIRQRDPESGWCYKNGGQPLWGYKSERVFLDRTKNGRQAVKSYWVLDDTEVTGRPLHEWTRRLLVELAAKGASLDDMRDFLNGNGVPARRSQSGYWSASTINTLLTPWALLKFAGHEVWNVHRKSREKKNVSHRPPSEWEIVEKAHPPIITEEEAEAIAQARRTERSRSARFGMAMRRAKSSPYLLSGGLFTCARCGSNMTGFRMSDGREYYVCGSVRYRRGAGCGKGVWVPKDWVEQHVLDDIRQCVDSCSPKFLRRVNDELHKLWKTTNGVQTDVRRKLAEIEKKSESVYRAVEAGLDDVQWANDRLRELKAEREALLAEREAAGTPPQVDIGTVTAYCERVSRTCTLADPTTTKTLIHDWVSEMNLAPVPEEVRFNLSVPEPAFNQVVAGAGFEPATFGL

SEQ ID NO: 5864 - protein, 520 aa, unidentified
  source 1..520: note = uncultivated organism
MHRNLLSGHNIAVLKEIKRKGDRMTGKLEAIYVRQSKDKKDSLSIEGQIERCRLECSHPTTALVYEDRGFSGKNTARPGFQKMQQDVKEGKISKIIVYRLDRLSRSILDFGQFWNVLDQNQVDFVSVNEKFDTGTPMGRAMIYIIMVFAQLERETIAERVTDNYYTRIKRGNWPGGPAPYGMKNIRRKDEEGREVPSLAYTDEFEIVKEIFYRYATEEVSLGEIGRDLTERQIPCRKRKEGWDNVALARILHSPVYVQADEDIYLYYRSRNIGKISNGIEEFGGNSSAHVVGKRAGNVRKYTSFEDQVLSLTNFEGKIPSDIWLRCQYRLEKNRQIGNSGKGKNTWLSGLLKCGNCGYSLTVRKWHDKKYLYCSGRVNLHICDIPSFSQPVDELESEVQKELEKILEECNREQIPVENTEKEKKIRKQLREIEDKIQKLMACMQEASDISMKYINSELEKLDERKSELLKQYETPKKNEKQYYKGIDFEELDFEEKKMTAQAFIERINVYDDEIEIIWKV

SEQ ID NO: 5865 - protein, 549 aa, unidentified
  source 1..549: note = uncultivated organism
MKSKQEQLNKVGIYLRLSRDDERAGESLSIENQRTILEKYVAENGWELTEVYADDGWSGTNFNRPQVQRMLEDAKSGRINVIIVKDLSRFGRNYIEVGQYIDYIFPLYDIRFIALNDNIDTADRDSSSMEMMPIMNVFNEWHAANTSKKVRAVRRANARAGKYQAAFAPYGYIAGTDEKRTPVIDEEAASIVRGIFEMYASGMSAKKIADKLNGDGILAPAAYMKDKVGRTKRRTEICPYWSPCTILQFLRNRMYIGELIQLRYTTVSYKNHKSIRKDESEWAIIKDAVEPIIDRELWDKCQERKKPYRRGRSTKRSGVDPLSGLMFCADCGSTMRLAWNTTHRGKDRKLVNYRQNYNCGAYSRSGKYFCSSHYIKFSDMQSLVIADIRDQANFVLENEDEARAEFIKRKERQTNLQSAGDERKYREGVERLSELDTLIQSVYEDKVLKKVPEEICIGLLEKYQTEKEQLETELNVINERLIRLRQEKSDVDEFIRRIKRYADVTELTRELCLDIIEYITVDRYSGDKDTPRSIHIYYKFIDKKPIKGE

SEQ ID NO: 5866 - protein, 551 aa, unidentified
  source 1..551: note = uncultivated organism
METATTTQYLASAYVRLSKEDMVSASGQKTESNSISNQKQLILDFLKDKADIKLVSIREDDGYTGTDYDRPDFQHMMDDIRAGVVNCVIVKDLSRFGREYINAGKYIDRLFPYYGVRLISINDGIDTVTRSSSDDLSIMLKNLMNDNYCRDISIKIRSQLQVKRKNGEFIGAFAPYGYEKDEKDKNQLVIDPYAAEVVSDIFRWKLDGVNQDRIAQMLNTQGVLSPMEYKRSKGLSYKTSFKLSPQAQWTPSAVRRILANPVYVGTLIQGVRSRPNYKIKKVIVNEKDKWVIYENAHEPIIEPRCFLLVQRLMELDTRTSPHENAVFPLAGLLYCSDCGGPMIRKTQTSNGKHFYYYVCGTHKKTGSCSNHRISKKQLEDAVLHLLQEHIQLLTELESILQTIRSAPMHRYSMRKAQERMLKVESEIDRYRRLKISAYEDMKDGILTKEDYQDITAQYEVRISKELLAKEQVLREMELYLQNGSAPQQWIQEFIDHRNIQCLTRSVAAQCIESIIVYEGKRIEVTFTHMQDYETLVSQVQDYYRGVQEGAG

SEQ ID NO: 5867 - protein, 527 aa, unidentified
  source 1..527: note = uncultivated organism
MSHTGKEGEWMKRITKIDMAEPLITKKLRVAAYCRVSTGSDEQLVSLEAQKSHYESFIKANPEWEFAGVYYDEGITGTKKEKRTQLLRLISDCEAHKVDFIVVKSISRFARNTTDCLELVRKLTDLGVFIYFEKENINTQSMESELMLSILSSLAESESVSISENSKWGVKRRFQNGTFKISYPPYGYDYVDGGMEINQEQAETVKYIFAQVLAGVGTHQIADELNARKVPTKKGGKWTASTVRGMIYNEKYVGDVIFQKTYTDEHFNRHTNYGEKDQYLMECHHEPIISREDFEAAGAVLNQRRLEKGITKGGGKYLNRYPFSGKIICSECGGKFKRRIHSKNGGKYVAWCCGKHIDDVTACSMKFIRNADVEKAFVTMMNKLVYGRRFVLRPLLESLREMDRSDSFGIIQELELKMEKNAEQRQILTGLMAKGYLEPALFNKENNELLQEAAELEMQKNGLSYSVNGEMVKTGEVEALLKFAEKDEMLTAFDGELFGRFVEQITVYSRTEVGFQMKCGLTLRERM

SEQ ID NO: 5868 - protein, 523 aa, unidentified
  source 1..523: note = uncultivated organism
MPTVKTLLPQTQTEAKLLRVAAYCRVSSDSTDQEHSFAAQVKYDTEMIGKNPAWTLADIYSDEGISGTSTGKREDFNRLITDCKRGKIDRVLTKSVSRFARNTVDCLNTVRLLSSLGVSILFEKEQIDTCKMSSEILLAMTGTQAQDESISISGNMRWSYEKRMKSGRYICCRTPYGYDFADGTLSINEKEAKIVRDIFRMFLSGTGKQKIATILNEQQVPRRYGKDKWYHFTIDYILRNERYMGDALLQKSYTTDTFPYKKVKNHGERSMYYVENSHPPIISKEEFDTARTILEKRKHKSHRKKTVYPLTKLLVCAECGHPFRRVSNNGTVPYWICAYRMGGKTECQSIRLDEEDIYAALLRMVNILQSHCDDILKPMIAALEQAQSRANGTQHKVYEIDKEIAALNSKTLAIAKLQTQGILDPADFASQISDLSHKVTRLRSERTKLLRMNEADDDLIRLKAAADTLAGLESEVTEYDENLIRSLVEKITVKSETEIEIRLSGGLTLAEHLPSRKRRCKRK

SEQ ID NO: 5869 - protein, 532 aa, unidentified
  source 1..532: note = uncultivated organism
MSESKETIGSLAVSPAPRFITIPAATQGQARKLRVAAYARVSSDSDDQLHSYAAQNAYFTKLIISNPDWDFVDVYADKGITGTAVAKREDFKRMLEDARKGRIDRILVKSISRFARNTKDGLEAVRELKSLGVSVYFEEQNIDTARATGETLTAVFAALAQKESEAISERARRSYEMRMQRGTFSTNTAPFGYRLVNGHLEIDDDEAKIIRAIFDACLAGKSIIDIAREIACTEMATGMRTMKWQESTILYILHNEKYEGNSLTQKTCTSKELSRRKRRNTGERRQILVTDDHTGIVSHEVFAKVQELLKRKRTAEPKKEGKDVPFKGKIVCGVCGASLRRKPVREKMYWLCRTHERAAADCPIKQVPEIEIEQAFLRLYFKLQHGGMNILTQLLQDIQEARSNRLLWSEDMVAINKQISDISGQERLLSQLRQQGAVDPDIFISRSNQLSEMRREAKQKKSRILRSKEDQTIQKTQEMMDILEGGPDMLDALDEELFSELVERIVVESNNRICFQLINGMGATESIERIKR

SEQ ID NO: 5870 - protein, 525 aa, unidentified
  source 1..525: note = uncultivated organism
MARSSAKRSTAYSPAAPVEKKVVRCAIYTRKSTEEGLQQEFNSLDAQWEAGQAYIVSQKNEGWTALADRYDDGGYTGGNMERPALQRLLAAVESRSIDCVVVYKVDRLSRSLMDFARIVEVFDQNGVSFVSVTQQFNTTTSIGRLTLNILLSFAQFEREIISERTRDKMSAARRKGKWIGGHPVLGYDIDPKGGRLHVNPEEAEQVRTIFGLYLERGSLLPVLQETNRRDMLTKRWTTGDGKVRGGQRMAKATLHGILTNAIYTGMVDHKGTLYPGQHDRIIDQDTWDRVHETLRGNRGDHGASVKNKFGALLRGLLFCMPCGTPMVHSYTMRKSKRYRYYVCYNAQQQGWKNCETKSVTAQAIEAAVLESIRRIGQDPELADAVATEALEQVARRHQEIDYETDGIRRHLRQLNQNIAREAADTSVDSGARFERITVLQGDIEKTERRLGELEAERGDLVTDHISGEELRETIAEFDAVWASMTTREQEKMIRLLVSKVGYDGRTGKVTVSFSNTGAKDLCQAT

SEQ ID NO: 5871 - protein, 514 aa, unidentified
  source 1..514: note = uncultivated organism
MEVWNTAGYLRLSREDGDKAESDSIANQRKLLEQYIEAHPELRLTGYYQDDGYTGTNFDRPAFRSMEEDIRGGRVNCVLVKDLSRFGRDYIEVGRYLEREFPARGVRFIAINDHVDSAAGRYDMLLPMKNIFNTQYARDISDKVRSAIRTKQERGEFVGAFASYGYRKDPDNHNHLLIDPPAAQVVRRIFDLFERGYGKLRIAKTLNREGIPSPSEYKRILGERYRNGRRMDKTTYWTYATVHRILQNQMYAGNMEQGRSLRLTMHGRAKQRAREDWAVVPDTHEAIIPPEQWERVQVLLARRTRELSFEQNQSPFAGFLRCGDCGRAMVKTRSAGGIYYSCGSYKRYGPTVCSKHSISHAVLEEIVLEDLNRVLSAVKDAEALVEEAAARTEGRASAEGDRLEAGLERLYRLKKSAYEDYREGLISRKDFLRYQEDYERQEGELNAQLEQLSGSGQAEDPGLSWAEVLLRQGRLTRLDRVTVAETVKEILIFEDGHIHITYAFADAPGLLRQD

SEQ ID NO: 5872 - protein, 532 aa, unidentified
  source 1..532: note = uncultivated organism
MKARTTKSVRCAIYTRVSTDQGLEQDFNSLDAQRDAAEAYIRSQAHAAWTLVRSRYDDGGFSGGSTDRPALQRLLADVKATKVDVIVVYKVDRLTRSLADFAKLVELFDGHGVSFVSVTQQFNTTTSMGRLTLNVLLSFAQFEREVTSERIRDKIAASKRKGLWVGGKVPLGYEVKDRKVIVVKKNAELVRTIFRNYLKLGSIDRLANDLRKQGAITNVTRLTNGKAIGGNFFTRGPLSYLLRNRFYIGQVVYKGEILPGSQTPIVDTRLFNAVQAKLAEQQNNHVKTRAKSEALLIGRLFDDRGNRMSPSHTCKQGIKYRYYLSRPLLEGRKDKAGTVSRVPADEIEIAVTKAVRRSVAPGPKIANGELIRTYLTRVEVHSAKLIVELKPPKSQRKSGDSKRPKTVHVSWQKPPTKRRRDIIVPESISRDAVRPIRSDARARLIAAIARGRNWLNELVTKSVADVDAIAKREHCSVRKINMTISLAFLAPDLVKAAIQGRLPRGIGIARLCDPPAEWSGQYRKLGLPSPAH

SEQ ID NO: 5873 - protein, 518 aa, unidentified
  source 1..518: note = uncultivated organism
MKRTSVGLYARLSREDGDGIESDSIVNQQRLLEGFAAEHTAFDVYDVYIDDGYTGTNFDRPGFLRMIRDIEAGRISCVIVKDLSRFGRDYIEAGRYLEHWFPAHSVRFIAVTEGIDSANGPSDLMVAIKNIFNSQYAKDISLKVRSAIRTKQRRGEFVGAFASYGYQKDPADHNRLIIDPAAARIVRRVFDMYESGAGKIRIAAQLNAEGVPCPSEYKKLMGERYRNGRRLRETTYWTYSTVHRMLQNPMYAGDMAQSRDERKVMHGKTKKKERADWIVVEGTHEPIIARDQWERVQAMLRSGTRDMDFETNISPFAGVLRCGDCGRAMAKTCRGGRIHYTCGSYKRYGKGVCSPHAISLSCLEQLVLDDLNRMVAAGQDLAALSAQVRESAARPEPVKQEADKAQAALERVLRLKKGSYEDYKDGLLSRADFLRYRSDYDAQEQKLRETLSRWEKAVQETDPLDDPWIQALLQEGRLTALDRATVAETIAQIRIYEAGRIEIDYLFAESEWESADGG

SEQ ID NO: 5874 - protein, 534 aa, unidentified
  source 1..534: note = uncultivated organism
MIRAAAYARYSSDNQRDESIDAQLRAIHKFADENGYQIVREYIDRAKTGTNDRREEFQRMIRDSDDGDFEVVIVHKLDRFARKRYDSAIYRKALEENGVKLVSVLEQFTDSPEGIIFVGMSEAMSEYYSANLSREVKKGQYENAIACKHTGGFAPLGFRVNAELKYEINDEEAVHVRFIFQSILSGMNYSQIIEELNRRGVRTRRGREFGRNSLHEILRNEKYTGVYIYRRSALPDKFGKRNNHADRSRNDIIRIEGGVPQIISREVFDAVQAIMDKRKMEPYVRSDAKEVYLLSGKVFCGLCGNSYCGNRMHGGRNKSLYITYRCNSHSGKGSGNCRNKDVNRDYLENYIRKLLAEVLFDERRLEGVISEYNKMVNSNGSEYDSELKSVKSMIKKTKGEIDNLIGILAATGSASLAEAVSEREERLAMLKEKRREIESRRVTIETNREDISEAFGRGREMLLSGTIPHLRQLIQLYVSRIEVYPDHISATLNYLPALRAVGSDEAVGNYGKAAHNALEVRENIGREELNLEYK

SEQ ID NO: 5875 - protein, 520 aa, unidentified
  source 1..520: note = uncultivated organism
MTSRAVLYARVSTDEQSEEGHSIDAQVRLMREFCARKGWAIVGEYVDAGISGTTVQRPEFQKMLRTAPKRAFDIIVVHKLDRFSRSLVDTLITLSDLSRHAVTFCSASEDFDFTTPIGKVLLALLAAFAQYFIDNLRAETKKGKKERALKGLYNGSVPFGYQAVPKTEGGIPVPHARNAGAYREIIRRLAAGQSGSEIADWLNAQGYRTTGTRGANLFTGDAVLDIANTRFHLGEVSYKGVWRPGKHAAIADAALWEQAQQMIRRRASNRETTKRADRIFPLRKLIYCAECGKGLRGQAQHGKRFYRDMSAARRQCRQPQLVNAAHIEAQLGAYFAKTALPSDWQAQILARFAANADAPRVEAQRRALVNELARARKLYIAGDLDESDWRNEKTRVTRHLDALRPVAAPDMAQAAQLLASIGSLWEQATDAEKLNLAKSLLEKVWIRQRVIVAVEPRAAFYPLFEMLEQSETPPETSNGVTKSQTGATGVGRSSAVAPDTKLKLIVILPPGVSVPRANLS

SEQ ID NO: 5876 - protein, 565 aa, unidentified
  source 1..565: note = uncultivated organism
MNQISKIKKIYHAAIYVRLSKEDGDVASSAKVESNSISNQKNLVKEFLKEKDDIVTVKEYVDDGYSGSNFERPAFQMMLEDIKKGLIDCVCIKDLSRFGREYIDSGMYIERIFPALGVRFISVNDNYDTLEGKSKSDEIIIPFKNLINDAYCRDISIKIRSHLEIKRKKGEYIGSFTAYGYRKVEEDRHKLEMDPYAAGVVKDVFRLKLHGMSQDGIAKKLNEEGVLPPAEYKSSIGSNYQTSFKTKENPEWTSVTVRRILTNEVYIGNLVQGKQTTPNHKVKKTYVKEENEWVRIEKNHEPIITERDFEIVQRLLTMDTRTSPDQNEVYPLSGILVCGDCGVSMVRKTSISGGKTYAYYLCSTHKDSKQCSSHRIPANKLEESVLLLLQKHIENVLNLNQILKFIGNVPFQQIDIKKLEERKEKKQVEVARCTDLRTMLYEDMKDSIISKEDYKELHAAYEARRKNAQISIRQLDIEIEKVLNRKNEGFLWLDYFSEHQNIEKLTRNVVVSLIREIKIYDKNHIEVLFDFDDRYTECIEIVKRLGHETWVDEDGKLNIRLKEAV

SEQ ID NO: 5877 - protein, 501 aa, unidentified
  source 1..501: note = uncultivated organism
MAKVAIYTRKSHYNEDSISIETQIEMCKKELKVGECFEIYQDNGFSGKNTDRPDFQRLINDIADGKIKKVIVYKLDRISRNVLDFCEMYEVFEMYGVDFISSVEHFDTSTAIGKAMILICMVFAQMERETIAARIKDAYNSRTRKGYFGGGRIPFGYKKVPCVIDGKHTSKYEAVPEPAEIIRMAYEIYSKPNTTLGDVLEAIQEKGNTDIKWSRSHISRLLKNPAYTNATIDIYQFFKAQNAEIINAPEEYDGTKSMMLYEGESEDWRTSTDKGRYLVLVPHEGIVAPDVWLNCRKKFAKNRQVKTTTAKNSWLAGKIKCGHCGYGLTVRANEYKTRYVNCTGRAQYRVCKAKLPVIKADELEQKISREIKNKLEELRIHGKSEKENAKVKRIDELTAEIQGIDNNIKKLIALSLESTETTVKYLNESISELDEKKQAKQLEIEQLRSELRKDISKNIVEITNAASHWDDLSFDDKRGVVNILINKILVYENDIKIDWTI

SEQ ID NO: 5878 - protein, 512 aa, unidentified
  source 1..512: note = uncultivated organism
MKQISLISPATGQDIQKKKVAAYCRVSSNSTDQLNSYANQINAYTKIIASRPDWQMVEIFADEGISGMKANNRSEFQRMIRMCELHQIDLIITKSVSRFARNVPEALEYVRKLKLLSVGVQFDKEGINTLSLGDEMLLNTFSAIAQEESKSISQNQRLSITKRMQDGEYFDSNAPYGFRYEDRDLIIYESEAEIVRTIYNMYLQGCSTAEIARELNIKGIPSKMGGKWRPTKISFILRNEKYIGDSLYQKTYRDTIVPFKQFKNRGQEDRFYAKGTHAPLLDKETFNKVQTLLNSRTETFAKSTVQNIYPLTSHIHCCECGSIFRRKIVGGTIKWGCAKHMEDASVCDSNYYSEERIYDGIITVINKLRFCEEDILGQILVRLQSVTALYKKNNTVAQEISQNIAALNSKLLMLEQLRSKGYLANEVYQAQSREITKQLNLLKQKRQTSFESEILEMHTNVQRLKMLLDEIEEPLEEFDQKLFSEVVTGVVINKSDEMTLTMIGGLNFTELI

SEQ ID NO: 5879 - protein, 524 aa, unidentified
  source 1..524: note = uncultivated organism
MKKETPARELKCAIYTRKSTEEGLEQEFNTLDAQRESAECYIKSQEAEGWICLPDPYDDGGYTGGNMDRPALKRLLADIEAGKVDCIVVYKVDRLSRSLMDFARMLEVFERKSIAFVSVTQQFNTTNSMGRLMLNVLLSFAQFEREIISERTRDKMAAARRKGKWVGGLAPMGYDIDPLARRLNVNEDEAARVRTIYELYLECGSIVTTLKEIESRDWRNKLSITKKGKERGGRYFDKSSLFKLLTNITYLSKIRYKEEIHQGEHQAIVPEELWNNVNKKLKHNGKTGGIAVRNKFGALLKGLVRCVACNCAMTPNHTTKGGNKRYRYYVCTNAQKRGWDSCPSKSIPAKQIEDFVIEQIKKVGYAPDLLKDVVTLAHEKAKCNLKDLEGEKFSLERDMARWLAEIHKTTPLIRPNESDSPAVARLADLQERVRHIENRMATIRNEIHQITKGLLSQQEAEVAMFSFDAVWESMTLRDQIRLIGLVVKQVDYDGESGRVTITFNPIGIRNRAQHATKDLTEVPA

SEQ ID NO: 5880 - protein, 525 aa, unidentified
  source 1..525: note = uncultivated organism
MIDTNRRNKEIRCAIYTRKSTTEGLEQEFNSLDAQRESCSSYIASQRHEGWVEIDKLYDDGGFTGGNMERPALKRLMDDINAGLIDCVVVYKVDRLSRSLMDFSKIMDTLDKTGVSFVSVTQQFNTTSSMGRLTLNILLSFAQFEREIISERTRDKMSAARRKGKYIGGRPLLGYDVDRATKKLIVNELEAERVRQIFDLYLECEGLIGTLEAIHARGWRAKSWVTKTGKQLGGGQFYKTTLHALLTNPIYLGKVSYRDEMYEGEHRAIVDPEVFAAVKKKLNANRVSMGDRIHGKSPGVLAGLLRCSACDSMMTHSTSGGSGRGSKRYRYYVCNKAKKRGHKTCPRPSLPAEEVERFVVAQLQSLTIDEDLLNETSLRVSRTINDRGDTLRKELSLLNASLVNLERAIEAISIPTGDDAREAKRLDSLASLTEQQTRDLRRRNELQEQLAKIQASAPDRKTIRKAIKNLEGLWEHLTMGERSRLMSQLVARIDHDPTDSTLSITLSPLGLKSFADESTKEHESC

SEQ ID NO: 5881 - protein, 504 aa, unidentified
  source 1..504: note = uncultivated organism
MKAVTYARYSSDNQREESIEAQQDAIQKYAIEKGYTIVKEYSDHALSGRESEKRAEFLQMIEDAKQGFFDTVLIHKQNRFARNRGEAVYYKGKLKRYGVKVIAVAEDFGDGPVAVLIESILEGFAEYQSLDLATETMKGLMVNAKHCKFTGGRALYGYRVNEKKEYEINQQEAEIVRFVFDKIAAGWSYADIVNYLNDKGIRKRNGKKWGRNIIFDMVRNERYMGVFTFNQYVKRLPNGKRASRVRKNESEIIRIPGGMPAIVTEETFKKVQAILSSRKIGPIRRNNFYLLTGFIFCGLCGSAYTGSKASPKHAYYVCSRKKNIMDCSNQHVPQKDIEALAVLNVEELVKNIDLEETTQIINDYIIAESKDIRSNREKIKAEIASLNQKVNNILDVIESGLANEAVKARLHEHSERIKQLEGQLSLVPKEKNITVNDTRQKLAMLDPENKTNQELREIFKMIGLKIYVFPDRNDVMIGGNKLWHNVGVGETSLTLCQILADMLK

SEQ ID NO: 5882 - protein, 558 aa, unidentified
  source 1..558: note = uncultivated organism
MSKLAWIYVRVSSEEQGKGYSLESQESRCRDYAAQRGYTVVGVAQDLHTGEALDRQGLGGIFDAAATQPFDVLVVYDMDRFSRGGPAHCAILEAQLERHGVTIEFVLGNYNGDSPEAVLSKYIKQSISWYENQQRRERVTRGRLTAAKHGRVLTGFRAPYGYRYADGQLHIDPEEATVVRRIFDAVLEGSSARRIAEMLSADRIPTRADKNPRFSKRNATGIWHYSSVQKILRNMVYSGIWHYNKRKFTKVDGKPVAAPRRPDEWIAVIVPPLIDQETFDRAQAQLDRNRSQAKRNTKQAYLLQFLVVCACGSRCGCETDARRNMRFYTCPNRRRKAYDLPCPVRFMIKADTLEASVWRLVTETLLDPTYLQSWLATQHGVAADHRRRHAERQAAIADSLKDVERKLGALLDLALTDGFPRAVIDERKKSLLDQRRRLEHEDRQARAALATLDLSPDQEQDLLALAARVRDGIDALDFAARRKVVEMLNLQIEVIARRVVRISALLPVGAPGNAAANAGMKAAAHFAVELDLENGAMWAVGDESAPLRGGRPEQRGTS

SEQ ID NO: 5883 - protein, 555 aa, unidentified
  source 1..555: note = uncultivated organism
MNKIIAAEYCRYSSNAQDDGYSIEAQQAKISDFALSNGYDIQYSYIDRAKTGTNANRPEFQRMMKDAKAGLFEMIIIHKIDRFSRNRYDFAVYEAHLSMCGVKLISVTENFGEGVEADLMKGFHELFADYYSKNLSREVRKSLDIISKKGLHCGGVAPLGYDVVDKKLAINEAEAEIVRLIFEMYSNKYTYNDMAKELNARGYKTKSGNEFSASSFNSILTQRKYIGEYVYNRRVAKSLTGKYNSHANKPEDEIVRIPNAVPRIIDDETWGKVQARLNQNKRKVGAYKSKSNYLLSGLIVCGECGFHYQGNSRKGGSGTIYSSYRCGRKQNHKIGCGNSELEKNKLENFVIEQLQNYLFSNEAIDEIAHQVNEYNKIAAKTNNDDLILFQKQLKQIDKQIANITKAIARGVDEDIMIDKINELNQSKKDLQKRIDEAVLEELPTVSKSDIKQALSAFSTYLKENNTIECKRFIDNYIDKIVVHKDKVEIVLKVASSNFNTSESDNDSGALHITIVITREELQKYPKQRRKLSPAIRLGGNFSVSYEIVLKNTHSR

SEQ ID NO: 5884 - protein, 552 aa, unidentified
  source 1..552: note = uncultivated organism
MKPSTPKTQRCAIYTRVSTDQGLEQKFNSLHAQREAAQAYIKSQAHEGWKLIRDHYDDGGFSGGSMERPALQKLLADIKERRIDIVVVYKVDRLTRSLTDFAKLVELSDEHNVSFVSVTQSFNTTTSMGRLTLNVLLSFAQFEREVTGERIRDKIAASKKKGIWVGGVVPLGYEVRDKKLIVNDDEARTVRLIFERYLALGSLPALQRELRGQGIVTRKRTLSSGKMIGGVHLTNGPLAYMLRNRLYLGEINHRDQSYPGEHQPIIDSGLFDRVQARLDENLHGRSLKNERSQALLLGKLYDDRGNRMTPSYAIKKGVRYRYYVSCVLAQGRKDEAGSVSRAAASEIETIVMDALATLVPVSEESVQLDRSGPATSEEHPMPTAPVRIEGRPQQLSDKANVERCVDRIVVGARSIEIRFVEGAQGAARPSSITVPWRPAPFRRKRELVQPADGARPIRAEARGRLLAAIARGRSWLEEILSDQAARLELIAEREGLPERSARSILSLAFLAPDIVKAAVTATLPRGFGFSRLIDLPANWAEQRSALGLPERS

SEQ ID NO: 5885 - protein, 524 aa, unidentified
  source 1..524: note = uncultivated organism
MTRALPQARICAVYTRKSSEEGLDQHFNSLDAQREACQAYVTSQTHEGWTLSRTPYDDGGFSGGTLDRPALQRLLAEIRHHRVQVVVVYKIDRLTRSLVDFTRIVEELDSHGASFVSVTQQFNTTSSMGRLTLNVLLSFAQFEREVTGERIRDKIAASKRRGLWMGGVVPLGYEPKDRSLRVIPKEAELVRTIFSRYLELRSVDELAATLRAKGIRRNQYVSRRGRMHGDGTFSRGALYHLLSNPVYLGRIRHKEVTYEGRHPAIIEQAVWDQVQAQLQSSARRTRGRRTDRSVNLLRGRIFDSQGHPMTPTYTPKANGQRYRYYMNQAVLKYGHVDTIEVPRIAGEVIDQWVMRVVREKLSASAECNVSDRIRRVVLRAKEIEIELDTPDKGTDESMAATTIRVPVNLCRRGQEVQILTCDGTISEAPPAPDPVLVRAMIRAYRWRDLLESGAAKSVEWISRTEHVNASYLAKLLSLAYLAPNLTDEILSGTQPRQLMLKHIRELDIPLDWQAQRRLFAQFRG

SEQ ID NO: 5886 - protein, 586 aa, unidentified
  source 1..586: note = uncultivated organism
MIETTKKEEDKKLKAALYIRVSTTGQDDEEHFGPEVQLERGQNYCKSQGFELEESHIYKDTISGSTHPEKRTGLTQLLKDAEQKEFDVVLVYKIDRLARNLKVFLGIIEHFEALKVIFRSVTEPIDTSTPVGQMVMQILAMFAQFERGMIRERTLGGKLQAAKQGNFVTGVATYGYRVDKTTKRLVIEPEQAKIVKKLFHWAVDEKLPLREIEKRMNQLKVSAPYVAKYKKRKTLDYWHKRTIGRILTNETYTGNFFYRKYKRPFNNLTSITDKRMLRPKEDWIPMETQPIITREMFEAAKTQLLKNRELARRNQKRDYMYAKLIYCGVCGYKMFSGYQPPTKKWPMAGGRYYHGTYHNDKPIGTSKRCKWCPVYAESRLEPIWECLKEILKNPKNMFDPLEKYIYREESPENVKERLEQIAVELSSVQIRQSRVDDLYINGQIDKEKYSEHSNSNGAEEKKLNDEANRLRQSLLTKKEKAEREVAIGKAYEKVKVRLDDVSYEEKMEIVRLFVERITLYAKEDYASVVFRFPSSTETATIKLGSKVSEEKEGFPLVLNIKTMTLAARQAEILRANPLMYFPRTLV

SEQ ID NO: 5887 - protein, 609 aa, unidentified
  source 1..609: note = uncultivated organism
MGSAPTAPAMRRVAIYGRVSTEHEAQLSAFENQQAWYEGVARQHEEWAIVERYYDEGITGTAAKKRPAFMRMLADARQGKFDLIVTREVCRFARNTVDTLTVTRELSKLGIEVYFIQDNIWTMDGDGELRLTIMATLAQEESRKISERVRAGQKISREKGVLYGSGNILGYDRVDGTYQINPEQAYTVRKIFELYDQGWGYKRICAELVRLGCKNADGNVEWKVDRIGRILRNATYKGYIGYNKSHSDGYLTQKRVNHRDEEFTYCKGNFEPIVSEELWDRCAALREKKSAKQRGEDGRLRKFGRKEPQSVWCTKLRCSCGSSFRRFLWHKNADGRKTYGYECYRQKREVSKKYLDAHGLDGSYICHTKSIPFWHIDLMALCVFRAVWRNQKDAVLLACQMLEECSVQDKEQTSDMCEAFQAQVARLEQKQEGLRGMCAMGDITREEFLRDNQKIQAEIHQLQERIDDLTKAPACPSFGLDMAEIKRTLNRWVDFSGPTISEELIDQFILQVVVVDEDTFNWTLDLSSHSAEERRPRPSEIALQQYRERHSSLDSDSAPVDTILSRHIIDPQTILSIQVTREEAETYCHSIGMKFFGKKWRDKTILISI

SEQ ID NO: 5888 - protein, 510 aa, unidentified
  source 1..510: note = uncultivated organism
MATQVRCAIYTRKSTEEGLSQEFNSLDAQREAGEAYIASQRHEGWVALPDRYDDGGFTGGNMERPALRRLLADIEAGRIDAVIVYKVDRLSRSLLDFARLMALLEKHGASFISVTQTFNSATSMGRLTLNILLSFAEFERQIIGERTRDKMSAARRRGKWTGGSPVLGYDIDPRGGRLVVNDDEAARVRAIFDLYLEHHSQVTVAREVNGRGWTTKRWTTQEGREHRGRPMGKGDLYRILTNVIFTGQVNHKGTIYPGEHVAIVDPAVFQKVDERLRHNGLTGGKEIRNKYGALLRGLLHCDACGTSMSHTYTVRNGRRYRYYVCATAQQRGWDACPSKSLATQQIEDSGVERVRGLAQNPQIVAETVRQARELAEGNAGELRAELQAGERELRRLNADLVKVAATTGSGMRVDRLADLQDRIGSIERRMSEVRAELGSLEREAVSEQEVAEALATFDPVWKSLTNEQTRIIRTLIERVGYDGRTGKVAVTFRSAGFKDLCEGREQRGER

SEQ ID NO: 5889 - protein, 520 aa, unidentified
  source 1..520: note = uncultivated organism
MAAADIEIPTGLRRRTLRCAIYTRKSTEEGLEQTFNTLDAQRDAAEAFIRSQRQEGWVVLPDKYDDGGFTGANMDRPALQKLLQDARDGVVDCVMVYKVDRLTRSLLDFARIMDVLDKHGVNFVSVTQQFNTTGSLGRLTLNILLSFAQFEREMIAERTKDKMSAARRKGRWVGGIPMLGYDLSDKGAALVVNADEAARVRAIFDLYLEHGSLIPVVQDLDRRGWRMKEWTTRRGTSAGGHEFTKNRLYNLLTNMVYVGKVDYAGQVYAGEHEAIVEPGIWQTVQDRLRYNSKTGGRQIRNKYGAVLKGILRCGSCDVGMVHTYTQKAPNKLYRYYVCVNAHQKGYNKCQTRSVSAPVIEQAVVEQIRGIAANPDVVADVVRQLDEQRASGVDGLEREKRVIEKELQRLGEETASVIRMTGKLATDRMAELQDCVAVLERQFREVRDQLAESVGQTVDAASVRKTLREFDGIWAEMTPREQEKFVKTMVERVTYDGATCTVTVGFRTAGIRQLCLEVGNR

SEQ ID NO: 5890 - protein, 542 aa, unidentified
  source 1..542: note = uncultivated organism
MLQVFILELVPKIKLGNGFSLGEQQEKLEALCKYKGFEIFKIYKDAGISAKDMEHRPAFQEMLEDMKAGKLNYIVAYKLDRVTRSVRDLEILITELGKYHCYLICDRDDVNTSTANGKFFVRMLTVLSQLEIEIVSERTKFGLTGAIKAGHLPSNAPLGYKRVNKKVVIDEATKSIIERIFELYLQGKSYQTIANIFNEEKVLFPEKKKWTDSIIEKIINNRIYIGDYERYKRVGKEQGKELEIYMNVVEPIISRAMWEDVQKQKEKNQMSYCRDRVYMFFQKLQCPTCGKIMICKGSGGKKKKYMYYHCDNCKLYYREDLIEDCLIENILQLVEYDFHVQKYFYPLLAEKKDDNKINELNTEIDSLEKKKNRLMKAYMDGIIKEEDFSTEYNLVREKVSNLEQEKINMLDLNRSEFNPQHLMAERDIEREILTEGELSTKDKIINKLQAEKENIKAQLQKFKNFWYAIMNRFHNKIAFDKDEQYKYVSEDLYKAGVFTDDDSEIATNALRKVKQKEEKEKEIRQMDNKKIVKLEEKLYIWK

SEQ ID NO: 5891 - protein, 581 aa, unidentified
  source 1..581: note = uncultivated organism
MKPVRCAIYTRKSSEEGLEQDFNSLDAQHAACAAYIQSQASEGWTLVKARYDDGGLSGGTLDRPGLARLLADIAAGQVDIVVVYKVDRLTRSLLDISRLVEAFDHAGVSFVSVTQSFNTTTSMGRLTLNMLLSFAQFEREVTAERIRDKIAASKQRGMWMGGTPPIGYRPDGRSLAIVEEEADLVRQLFQRYLDLGSVRALHEALLSEHIHQPRRTSTTGRTFGGGPFQRGQLYRMLGNPLYRGLIRHRSQTYPGNHPAIIDEALWDQVQARLRDNTQGEQLAPTSADPSLLAGKLYDPSGQPLVATHASKGKVRYRYYVSRHLQHGWMAPAGTAPGAAEQSPTGLRIPAREIEPLVQDAIRQKLADPIALGTELGLDLANPDITTKLMQASRSLSAKLADKDGPAVQGILARIVSRVEVHQDSVRLSLASDTLCQLLGTPAQMQPVEHPERSPDLILTLPVRLKRSGMAVRLLLDSGRPANSTTPNTKLLTAIAKGRQFWQHLQGNPQMTLADLARAQSLSTTYVDRILRLTFLSPTITQAVLDGTTPADLTLDRLKNAKLIATDWAEQHRLLGISSPAA

SEQ ID NO: 5892 - protein, 539 aa, unidentified
  source 1..539: note = uncultivated organism
MTPRRTVREIPSSMVFDLGTLTEVKKTKVAAYARVSTEKEEQEDSFERQVAYYTTKIQSNMEWEFVGIYADPGITGTRAEKRPEFMRMIADCRAGKIEKVLVKSISRFARNTVDSLNYIRELRDLGISVCFENENIDTMTPGGEVLITILSAMAEQESRTMSTNIKWSYQKKFQNGEVVLNTGLMLGYKKVGQDEDGHFIYEIDETEAEIVRRIYREYISGVTITQICKGLQRDGILTKLGKCEWRHSVVRSILTNEKYTGNAILGKTFKPDVLTKYRQKNTGQAPKYYAEGTHPAIIDKEMWDLARREEKRRLEFKERTVGAGRYSSKYALSGLLICGHCGHTMRRQVRTMGTGKKVASWGCTLRIENGRQHCTESRNVNEDVLIEAYLKALNKVAGSMDDYLHMISENCSMIMKPKLKRELADIEQEIIDIQEEVLALHKQKQQGLLAPAEFNKRVADHKERMEKLQERQRQIYEKQGNTLAVEYWLNQFQDATERKDEAAMEPTVIKTLVEKIVVDNQRRIVDIHFKCGVIITETI

SEQ ID NO: 5893 - protein, 511 aa, unidentified
  source 1..511: note = uncultivated organism
MNKNAVIYARYSSQGQNEQSIEGQIRICTEYAENNGYTVVKVYTDKARTGTNDHRPDFQKMIADADSGAFEQIIVYKFDRFARNRVDSIMYKAQLKKKYGIRVVSATEPVSDDEGGEFYEMFLEWNDEKYSQRLSKRVHDGLDTSVKNGTYCGGKLIYGYKLIDTDKRGNKGIIHKVAIDEEQAEVVRYIFEEYAKGTPKKEIADELNRRHILYRGKPFKFRTFENWLSNAKYTGECMHGKRISTNTYPQIIDKATFAAVQKRLEKNKILAGANSAVEPYILTGKAFCGYCGDSMTAGGGTSHTGAKHYYYVCHQKRKGGCRKSSENKNNLEYTVAKAVYDFLSRRENAEIAAQDTIRHYEQRTGEDSLRSIEARIRHAQDEAEQLTNAFILARNELLRANIEKKMTEQEILIKDLCASKAQIELERGKKITKEKIIDFIAEMLKGDPSDKGYQKKLIDNLVYKVFVYDDHIITYLTLGNYKEIKEISLADTDKALSAIKVQPLSSMVHQS

SEQ ID NO: 5894 - protein, 575 aa, unidentified
  source 1..575: note = uncultivated organism
MGGKKDIGSKIAVYSRKSKFTGKGESIENQIELCRQYISVHFPQIDEKDILIFEDEGFSGGHMNRPQFQAMMKMAENKEFSHIVCYRLDRISRNIGDFAKLIEELNRLSTGFISIKEQFDTSSPMGRAMMYIASVFSQLERETIAERIRDNMQELAKTGRWLGGMTPTGYQSEPVEKVTLDGKVRKAFKLTIIPEEAELIRLVFSKFLETNSLTKTDTFLLQHGYVTKNNRSFTRFAIKNILRNPVYMIADDDSYTYFSAQGVELFANKNDFDGEHGIMAYNKTEQIRGKKNEIREISDWIIAVGKHAGIISGADWIKAQNQLEQNKSKAYRKPKSNVALMSGILFCGSCGDYMRPKLSTRINADGELIYSYLCSTKERSHMHNCSIKNPNGNTLDKLVCDEIKKLSEEPSVFIKELEECQRIISHDTSKNGAELEQLKKQLNETEGEIKALVSALAKAGGTSSEDYIIRQIDELDAKCKDTKRHIEELESITSQHLLSDIEFDTLRDILSSFKNTFDDMNIEQKRAALRTFVKKAVWDGENVHIYLFGSSDGDIELPPLPTLSTTLEPLSENSK

SEQ ID NO: 5895 - protein, 525 aa, unidentified
  source 1..525: note = uncultivated organism
MGCSKRTSGNNALKESNNRVITIEATKRSEDIVLRVAAYCRVSTDSLDQMNSFAAQQKRYTALITGKEHWQMVDIYADPGVSGTSTAKRKDFQRLLADCRRGKIDRILVKSISRFARNTKDCLETVRELKSIGVSVLFEEQNIDTGKMSGELLTSVFASLAQKESESISQRCRWGIQYRMQNGLFNTYHAPYGFRLQDGELVICEEEATVVRQIYTMYLGGAQPREIVKELQEKGTCPASWNRKTVEYILKNERYAGNALLQKRYSTDTLPPQKVRNHGEMAMYFVEGSNDAIVSQEVFDNAQRLRQQRSRAVMPNPRQLSRWMICGCCGKMLRPKRVSGKQYMVCRTHEEDKGLCPTQEIPEEEIIRAALRLYYNLKHHREILIGMLDRLVKVKERKLLWRPEVIEQNKRISDLSCQNQLLAELKKQGFVDPDIFISKSNALAEQIRAAKLDRERILSEDDDNTIPLTRMMIDELEDGPEYLGTFDGEILGVLIDKIIVASRNQLCFRMKNGLELIENIERVDR

SEQ ID NO: 5896 - protein, 527 aa, unidentified
  source 1..527: note = uncultivated organism
MKTLRCATYTRKSSEEGLEQGFNSLHAQREACEAYILSQAGEGWKALATGYDDGGYSGGNMERAGLKQLLADIDRGLIDIVVVYKVDRLTRSLGDFSKIVERFDAKQVSFVSVTQAFNTTSSMGRLTLNMLLSFAQFEREVTGERIRDKIAASKAKGMWMGGRPPLGYDGVDRRLQINEAEAQKVRAIFAQYLIVGSVVKLTRELAITSVRSKYWVGKAGQPLGGNKFTRGALYHLLANPVYRGAIRHGDKLYPNAHPPIIDDPTWAAVQSLLAKNAPNAPHTPKLGDGALLKGLLFDDLGNAMQPIHVRKGPSRYHYYVTAARVHGDDRVAGSLPRIGAKTLDVAVMDRVTALMNPNWRKNDTAEPRVRAALRKVTLGAEVIKVLVLKEACRPSAPGDRADGELVEIAIPISLKHRQSATLIAPADRPMAAPAVPDRALVRAVCMARDWRRRLEAGEIGSTRELARREGLCHRHTGRLLPLAYLAPDLIEAIIEGRQPRAMTLQGLTATPLPRTWQDQRRLVAAFA

SEQ ID NO: 5897 - protein, 541 aa, unidentified
  source 1..541: note = uncultivated organism
MADNERKILRCAIYTRKSSEHGLEQDFNSLHAQREAAEAYIKSQAHEGWKLIKTSYNDGGISGGTLERPALQSLLSNIGERKIDVVVVYKVDRLTRSLADFAKLVEMFEAHGVSFVSVTQQFNTTTSMGRLTLNVLLSFAQFEREIAGERIRDKVAASKRKGMWMGGTIPLGYDVKDRKLVVNDAEAETVRLVFQRYLTLGCVSKLRAHLNDLDVRSKQRTLKSGHVLGGGPIGAGALYHLLRNRIYRGEVAHKGAVHPGEHAAIMDEELWNAVQVKLSGNISKRRQTQIASGALLGGLLFDDKGNRMSPSYTARKAGRYRYYISQAVLRGRKEQAGSLARVGADSLEQIVVGTLRRGTSPGGTETEPASGVWSPEIRNLVQSSVERIVIHDHEIEIVLKTMSQDHSAASVDENNDGGSSTILRIPLPAPRSRERKQILIPSIAGSAPHRVDQSLVLALARARSWMQALRRGKYVDTGEIARRFGLSDAHVRRVVRLAFLAPDIVESIVEGRQPRVLTVKLLLPGIPFDWAEQRAALGFAR

SEQ ID NO: 5898 - protein, 535 aa, unidentified
  source 1..535: note = uncultivated organism
MMRAQPKTFRCAVYTRKSTEHNLDLEFNSLDAQREACEAYIRSQAHEGWRLLADRYDDGGLSGASLERRALQALLSDIRADRVDIVVVYKVDRLTRSLADFAKLVELFDQHTVSFVSITQSFNTTTSMGRLTLNMLLSFAQFEREVIGERVRDKIAASKRKGIWVGGPVPLGYRVADKKVVAVPDEAAAVGNIFTRYLELGSIGALIADLDRKGIRTKSLRLADGRIRGGIRFGTGALAHLLKNRFYIGEVVYRGATYQGGHPPIIDRQLFEAVQVRLAENAVGRRIRLRGSPSLLAGRIFDDRGNRMSPSHTRKNGVRYRYYVSHAILQQRKDEVGRVGRVPAAEIEQLVLECLRGNQASADAAPDGSAIPDRDLIEQRIHSVTVRPEGLDVRILDTTTEADRLQTDDAQTSLITLPWTAPSFAAVKGIVHSPSAAAPALKPETRDALLGAIARARRWIDDLRQGRSASFAEIAQQEGQVERHIRLLAPLAFVSPRIVSAIVEGTAPADLTVTGLARGLPYSWTKQAEASGFLS

SEQ ID NO: 5899 - protein, 546 aa, unidentified
  source 1..546: note = uncultivated organism
MKEEKQTKKIVYCAAYCRKSIEERADEVFGSIENQHEAVLNFIASHKHEGWIPLTERYDDNGFTGSNANRPSLQRLLNDIKEGRVTMVIVYKLDRLSRSLVDFVQLLKFFDEHEVAFASVTQPIDTSTSTGKLMLHILSSFAEFERQLISERTKDKLSASRKRGQWTGGYIPLGYQLEVKDKKKKLILEPEGEKLVKDIFDLYLKGNSTLKISQIFNERGLRTSQFTCKNGRVIGGVKFSVAKIQWMLRYVGYMGKVEYDGQIYNGEHEALIDEETFKKTQALLDQNHRERKVLKNTDCTGLLSHLLHCKACDTYMVHTYTIKHGTHKYRYYTCTNAQKYGHSSCPTRSVNSKAIEDTVINCLQKIYSDKEKTKNHTYKQEIDALLSPIWNTLHPEEKKRILKILVKEIDYTASSKELGITLTDNKQRRKFEIDLKQVRPLNKWHKEEEIEKEPKLRRNLLLAYHLEKLFAENKASAAQAAQWLNMQETRVHQLLNLLLLSPKIQEEILELPNQKICSVPEYKLRPIINEADWQKQDRMWQELLQK

SEQ ID NO: 5900 - protein, 523 aa, unidentified
  source 1..523: note = uncultivated organism
MTETGKEPARLLRCAIYTRKSTEEGLEQAFNTLQAQREAAEAYIQSQKQAGWVAVAERYDDGGFSGASLERPALQQLLAAIDAGGIDCVVVYKVDRLSRSLLDFARLMERFDRRKVSFVSVTQDFNTTTSLGRLTLNILLSFAQFEREIISERTRDKLSAARRKGKWIGGWPVLGYDVDSQGGRLVVNAKEAAQVREMYGIAAGGESLEAALRAIQVRRFQTKAWKSRAGRRHGARPFSRMTLRLLLSNVLYTGAVCHKGTVYPGEHERIVDQELWEQVNTKLSLRSVHQRGRTHQRQEAPLTGLLCCAECGSTMRSTYTTKRGRRHRYYCCAAVSGRAGKNCPQGPVEAKDLETFLLRNLEPMFGSGVNWAAIRESVDRIEYEGTRHQVRIRWRDGARVEFEMPVPNRRGVNAGQGEPESGRVPRVSRLMALAIKYDGLVREGTVRHRRDLAEAGHISRARMSQILSLVDLAPEIQEALLFLPKTVAGPDRITEKALRQIARSMDWDWQKKQFAELMARGTR

SEQ ID NO: 5901 - protein, 543 aa, unidentified
  source 1..543: note = uncultivated organism
MTEAKTRFRCAIYTRKSTDEGLEQNFNSLDAQRAACEAYIQSQAGEGWECLPQVYDDGGWSGGNMERPALKRLLAEISKGQVDIVVVYKVDRLTRSLTDFARIVETFDNNKASFVSVTQAFNTTNSMGRLTLNVLLSFAQFEREVTGERIRDKIAASMARGIWMGGSIPKGYDLGDRRLDVNPIEAEQIRYIFTRYLELNSLISLAKDLDQNNIRSKRWTARSGKERGGYLYGPSGLSYLLRNRIYLGEITHKDKSYPGEHDAIIDTDLFQQVQDRLAANHLKFVQRRARSAACPLHNKIFDAHGQPMRPSFGYGRGKEIYRYYVSDSLLPLGRLKAGSTTPLGDRLSAERTERFVQSQLASLLPPNGPEPEIFGAIKRVTFSATMLTVILDIQVLIEPNACRDTLLDKAQQIDPAAKIDSDDLVLSLDARPLRRGKSVRSTDCFLDAPEQRRVLAELVRTSHRKLTELNASPLHPEMHEHMSTPINEWTRERIAIGLLAPDIQRALLTGKAPLGLDPEKLLSRDMPLYWEGQRKFLGMKHAA

SEQ ID NO: 5902 - protein, 516 aa, unidentified
  source 1..516: note = uncultivated organism
MSNVKIIAPTATPKDMLRVAAYCRVSSDSADQLHSYAAQIKAYTRLIDEHDGWELVDIYADEGLTGTRMDKREDFQRLMYDCRKGKIDKVVVKSISRFARNTRDCLVTLRELSSLGVTVKFEKENIDTGTLTSELMVSVFGTLAQEESVSISKNQRISYQRRMERGEFITCAPPLGYRIVDGKNLEIVEETAKVVRWIFASYLAGRSTAWIAEKMSRRNLAPMHGGKAWHPQTIQKILKNEKYIGDALCQKTYTLNTFPFIRKDNHGEADQYYVENTHPAIISREDFQKAQELMKRRAERVPSEPGDYTLARKIVCGQCGTVYIRRVTKSGYVTWVCHKHDRKASSCPNGRISEQRIFAAFLRMYHKLKANEGIILQPVLKQLSSLTDALNRGNPAMLAINEAIAAAAEQNHNLSKLHTAGLLDAMALATRQTELNAKMTELRRQRRKLLCNDEIDEQVESIHRTVEVIQDGPERLDSFDDALFALLVERITAESQTTIRFRLYGGLEFTETLEER

SEQ ID NO: 5903 - protein, 545 aa, unidentified
  source 1..545: note = uncultivated organism
MTARQCAVYTRKSTEDGLDQEFNSLDAQREACEAYIVSQKHEGWTLVTGRYDDGGFSGGNMERPGLKALLADIDAGLVDVIVVYKVDRLTRSLADFAKIVERLDAKGASFVSVTQAFNTTTSMGRLTLNVLLSFAQFEREVTGERIRDKIAASKRKGIWMGGPVPLGYEVIERKLVPVPEEAERVHTIMRRYLELQSVPALLVQLKAEGILTKVQVRASGPHRGGIPFARGSLFHLLKNPIYRGKIVHKDQVYDGEHEPIVDEDLWERVQQALRAKAPARRRTTNDPQRAILQGILFDPQGRSMVPTYGSNGTRRYTYYVSRKDLTRRGDPESTRFRRGEIEHHIVQHLIALLSDEHALRRLSGCLDGAALQTIFSEAKRQAQALAVRANAVETVRAIVAAIHVTNTELRVEIRPAALGLSTKGTWVYNILRPTKRPFREAKLRMDAKGADDRFDNDIVTLLADAMQVQRLVLQSPELSLNQLGKREGRCRAHLGRLLRLSWLSPRIVEAIADGTQPKSLTRQKLLSISLPLEWDVQERLLGMAA

SEQ ID NO: 5904 - protein, 652 aa, unidentified
  source 1..652: note = uncultivated organism
MKKKQRCYIYTRVSTAIQVDGYSLDAQRDKLIKYAEYQELDIAHEYSDQGKSGKSVEGRPEFMQMLEDIKSEKDQVSYVLVFKLSRFGRNAADVLSSLQLMQDYGVNLVCVEDGIDSSKDAGKLMISVLSAVAEIERENIQIQTMEGRKQKAREGKWNGGLPPYGYKLVNGLLMIEEEEAEIIRIIFDKYLNTSMGSIAITEYLNSHGYKKKLRQNNTLDYFTENFISKVLDNAVYCGRITYGKRTMEKVIGTRNEYRQVRKDDYIDVKGIHEGIITEEEWAQVQIKRKSMAAYQPKTHSLEHEHILSGLLKCPKCGGPMYGNVNRKKKKDGSSYKDYFFYRCQRRKVIDGKKCDYKRQWSEELIDDAVSELICSLVTKPKFEEHLRKKVGDKIDTKELESEIEYLKKQIQSKKNAKERLGMEIDRLDETDRLYELKYEDMQGRLYKLYEDIDEMEEKVQVLQRRIDNIMRQKISGDQVYEFLLAFDRLYKELSDVDKKKFMNTFVERIEIYEEKQTSGQVLKKIRFRFPIYFNGEEIDEISWDNDATVETVCLLSKLHEAKHHVNVTVDMDEMDLTSAESKATYEEIKKYVAVHNDGMKVSNLYIAQVQAKYGIIERENYNLPKSEDTKHPQCPKEKEDAIVDALRFFRMI

SEQ ID NO: 5905 - protein, 562 aa, unidentified
  source 1..562: note = uncultivated organism
MADKVLRCAVYTRKSTEDGLEQEFNSLDAQYEACAAYALSQRHEGWVVVKERYDDGGFSGGNMDRPGLKRLLADIAAGRIDIILLYKIDRLTRSLTDFSRIVDVLDKAGASFVSITQSFNTTTSMGRLTLNMLLSFAQFEREVTGERIRDKIAASKRKGIWMGGPVPLGYEVKDRKLVVVQKEAQQVRHIMRRYLELGTVPALVIDLARDGFRTKLQKRASGPQRGETPYRRGTLYHLLSNRIYRGMIVHKGAYYPGEHPAIVDEDLFEDVQRKLADNASGSSQRRRHKQPSLLTGMIYDGEGRAMTPSHASRPNKRYRYYVTRPDELGGSPAWRVPALDLETLVCTSIAERLAEPGFVLDLVGENEVDAGQLQQAMNAADLAAATLRSGTDDRRTELLRNVTERIDLADDCIKITLCGAGLVELGVAKQRPETGSPLLSLAKPAARNRRGQQMRLVVPGPEAAVKQPSTRRDDKLIALVAEAMQTRELVLAHPGRSIAAIASEHGRCRTRMARLVGLSCLAPDILTAIIEGRQPEGLDARRLGGLQLPSKWDEQKRITGLE

SEQ ID NO: 5906 - protein, 612 aa, unidentified
  source 1..612: note = uncultivated organism
MGATMNNVISQKDGRTGRVAAIYARVSSERQRQDETIASQTVGLRELAGARGLLVPEDLVFEDEGFSGATLTRPALERCRDRAAEGAFEVLLCHAPDRLARRYAYQVLLLEELARAGVEVSFAKEPERSGTPEDELLRQFQGMIAEYERAQIAERTRRGKAHRARGGSQAVMSGAPYGYRYVKKADHCDAYWEINELEAQVVRDVFARYVEEGISIGELARWLSGRGVPTRKGKAVWDRSTVWAMLRNPAYRGQAAFGKTKTADRHGAPTRTTRARGERHGRRPTRYDEPAENWTLIAVPPLISEQTFELAQARLGANAHFAKRNTKQPTLLQGILVCRECGYACYRTTTRTTNKRIYYYRCIGSDNYRHVGGRVCHSRPIRADELDELVWANVRELLEDPALVQAEIDRRLQALRTEHPATQRREALERDLARAENALTRMIEAYQEQLISLEELRARTPELRKRQSALRAQLDTLDAELHDAETYLKLADTLERFLSRLDDGLDQLDTAGQQRILRLVVREVLIGGEDDTITIRHSIPTPTSPHDPSYLLRGSSQHPALRSSLLGRGEPTIFDHARLQPLRDHSPDGERAELAEDVGMVNPVKRRRQISV

SEQ ID NO: 5907 - protein, 548 aa, unidentified
  source 1..548: note = uncultivated organism
MSESMTKVWNACGYVRLSREDGDREESNSVTGQKDLIRDFFVRNPDLHEYGMKVDDGFTGSNFQRPAFQEMIADVKAGKINCIVVKDLSRFGRDHLEAGEYIERIFPFLGVRFIAINDHYDSLHSDGDSDALILPVKNLINEAYCRDISIKVRSQLEIKRRHGDFIGSFAVFGYQKNPDDHNRLMVDEYAAGVVRDIFKWKLEGISAGDIADRLSQAGIPTPMDYKRSQGLSYSTSFRTKRESTWSAGMVLRILKNPIYIGVLEQGRVTTPSYRVKRVVNKPRAEWAVVEGCHEPIIDRFDFESVQKVLALDTRTSVSGKAVEMFSGMVYCGECGGAMVRKTIPSGKKKYVYYVCAAHKNEKTCYSHTLRDIALNEIVLEALKKHIQDVIDLSDLMGMMDAAKLQQVTVRKMRARLENKRSEIDRCQTLLRSLYESLADGIIDQREYQELKRTYSRQRTEAEEQAEAIQAEMNRELTNLSFGCGWMDQFRKHQNIEELDRTIIVSLIERVMVFRNHRVEIVYRWHNEFQWCLDLLAQAQAALPGEEAV

SEQ ID NO: 5908 - protein, 525 aa, unidentified
  source 1..525: note = uncultivated organism
MVQKRTACDVALYERLSREDGDRLESDSIVNQQRLLEDYCERHPEFRIVGHYSDDGYTGTNFERPGFRRLLDDIEAGKVNCVIVKDLSRFGRDYIDMGYYLERCFPSHGVRFIAVNDGVDSERGPYDMMLPLKNVFNAQYAKDISEKVRSAFEVKQRRGEFVGAFASYGYLKDPGNHNHLIVDPVAGAIVLRIFKLAVSGVGQVRIAMILNEEKVPCPSEYKRLMGERYTNSKKLDSTRYWTYSTIHRILQNEMYLGNMVQGRYIRPTMHGKAKKADPSEWIIAEGTHEAIVSRELWDAVQAQITKNTRALDFDQNVGLFAGFIKCADCGRAMVKTRRGERIYYSCGSYRRYGATVCSNHSICQGDLEQIILADLNEIICAVNDLRKIAEDNREKKTFVKNKDSERKRVEAALSRVRRLKQNSYEDYQDKLLSRDEFLRYKADYDQQEQTLLQQMESLEEDQEENLLEQPWVDKLLSRGELTELDRVTLAQTVKEIRVFEEKKIEINYLFSEELRTLLENRKEQM

SEQ ID NO: 5909 - protein, 533 aa, unidentified
  source 1..533: note = uncultivated organism
MRTREQSRYANRKPSTRHDGRGFSTEQGLRAALYMRISTDEKKQKWSIDGQRRRLREFCSSRNWTVVAEYSDEASGAILDRPGLMRALEDAARGKFDVVLFVRLDRFSRKLKHLLGLIDELEEQGVGIASAKESLDTTTPIGRMVIHILGAFAELEREMIRERIKDGVAARARKGYWQGSPPLGFKKVSGLLEPDISALPLALRIFHMYVTERKGTTAIARTLSAEGTPHPAGAPRWQSQHVITVLRSPAYIGHVRSHGALMEARHDAVIERDTWERAQELLAERAKHLELRRGNDSQYLLTALVRCGRCGRSFVGAAGHGRGGRYTYYRCQGRIKFGRGYCSNTGLRRDALENAVIEKLEDLLRDTPLLEDALARARTEEARSDDSRIETGEIRRKLEDVEKRRRRYLDAFEEGRLDPEQVSGRLEELAECETALRVRLNTVERDQLPEGLSEAAVTAALQTLGQLPELPTEQAKAFLRLLVKEVVVVSKDEVRCTFRLPLDDLEVRATTGEVEPAGLEPATSAMPWQRSSN

SEQ ID NO: 5910 - protein, 507 aa, unidentified
  source 1..507: note = uncultivated organism
MYIALYARQSIDKENSVSIETQLEYCRSMIRPDEKHYRAKEFSDRGYSGKDTNRPAFQSLMKDVRRGKVKKLIVYKLDRVSRSLIDFVDMLGIFKEHRVEFVSSQEMFDTSSPYGEMIMKLLMVFAEFERASIINRIRDAYDKRSSMGLYSGGRRVYGYNLEDAVICGVKTKRFVPDKAEAEHVRYIFETYSLPGMTLRQLQTNLTENGITPASGSGWSSGKLGALLRNPIYARADADIYVYYKNRNTNIINSISEFDGRRHVRLYGRTKHDKTLPDWSDMKIVLLDGEGLVSSDIWLKCQDKLSKNKQIGRSLSCHSSWLSGKLICAKCRRTMTVAASASGRYFICTGKSYTKTCPGISKTVYADFMEEMVYDCIAKRFQSLILTRPDSRDETDLEAEHEINSLKIRINEIESRLENLCGAVLGGSLNDDMVSVLNSKAKKLGDEKRALSEKIASLSKPNTSKVPDMKFSEKWAEADFSQKRSAANILIRAVVIYEDGTPEIIWNI

SEQ ID NO: 5911 - protein, 580 aa, unidentified
  source 1..580: note = uncultivated organism
MAESEKTQQRSARKLRCAIYARKSTDEGLEQAFNSLDAQREACAAFIQSQKHEGWRVSPTLYDDGGFSGGTLERPGLKRLLADIEAGQIDVIVVYKVDRLTRALSDFAKLVEIFDRRGVSFVSITQQFNTTTSMGRLTLNVLLSFAQFEREVIGERVRDKIAASKKKGMWMGGMPPLGYDVKDRKLIVNDDEAQTVVGIYRRYLALKSVHAVKDALAAAGIRSKRRIHPDGSEYGSQKLSRGALYLMLQNRIYRGEITHKGNSYPGEHPAIIEKPLWDEVQATLAQNRIERATGARAKHPSLLAGLVFDETGGRLTPTYAVKKGTRYRYYVSTTLLTGAVRNRSSARRIPAGNLEGLVIDQLRAFFADPGAVLDAIDETHSGSGQSHLIERGHQVAEELAAQAANEVKATLMTLACRVEINADCIEIKISRHRLAAFLAGQPIDQTMQDHKPDRDSDDVVTLTTPARLKRVGREMKILVDNPDDHTAPDPSLLRIVARAHDIQARLMQNIKLTVHDIAREERVSAAYIYNLLRLPWLAPDITAAIVNGRQPPQFNAMKLMRHASRLPADWSEQRTLFGFR

SEQ ID NO: 5912 - protein, 553 aa, unidentified
  source 1..553: note = uncultivated organism
MKENISNKIYKAAVYVRLSREDGDVANAQKDESDSISNQKSLIQHFISSKTDIELVEIFEDDGYSGVFFDNRPGFQSMLDAIEAGKVDTVIVKDLSRLGRNYVEVGRTVEDFLDVYELRLISLNDNVDTIDGDEKVRDIIIPFLNILYEQYARDTSNKTRAALDTKCKDGQFIGSYAPFGYKKSETDKNKLEIDESVAPVVRLIFKLYIEGFSAQMIAKKLEGEHIPAPMDQKREQGVKCGNGFKMYKKSVWDSNMVGRILKNEVYVGTLVQGKVSKRNFKQKKRYTKSEERWIRYENAHKGIIDRLDFDIVQQLLSEDVRRGTADSELSIFAGKVYCGDCGEAMHRRKVKAKDKFYSYYSCSSNKKDKTSCTQHNIAETLLIKTVKESVNFQSHLLKNIQEVMEYCKAQWDEEQLFENLEVKKLELEDMLKLQLERIKSLYEDVKDGLITKEEYLDYKLGYQQKTVELKNRIVDLEDKIQNRKSALDNSEWMDRFYQYADIEELSRLVVAQLIKAIYVYEDKRIRIVFNYQDQLAEINELLEEQKIITEEAV

SEQ ID NO: 5913 - protein, 566 aa, unidentified
  source 1..566: note = uncultivated organism
MKRVRMLLRVSSNQQLEADGDLSVQRQLVKEYIDRHEDWILDDKEYFEGSNSGYKNAVADRDVLQEALRDAERSEYDILVAYKDDRIGRRMWEIGTYVMALKSNGVDIYTHKDGLITPNSDDIMGQMMLALRYGAAQKSSADTGMRVKDTAQKLVQKGKFMGGSAPYGYELVLSGEISKHGRALHTLKIIPEQAEVVRYIYNLSLNKEYGSTKIAKLLNEDDTYKTLAPKDIWKSGTITSILTNPIYAGHVAYKRREHVNGKYHRLDSDDWIKAASPNEDIQIIDGDTWNRTQDKRKLRSDKYIKTLEHKNVKVIRRNDGMLSLIDVIYCGYCGRKLTNGTKYSYWTIKDTGEKRASKIPIYRCQSAQEGIPHNKVYQFRADKIEKIIFECLGEYINKLQENDDVMTEIEANEARERKRVEIEIKNLKKELDKISHGIEIMQSHIPEAMTGDYPLSVKEIADAIHKEQEKENMQKQLVLEKEEILKQDSVNSADWKELKSKFPTWKQIFEKSDSHTQRVLVNKLIERIDVTNEQIVIRFRVNLNDFLPQPRIDGGSDTTLYRPCLM

SEQ ID NO: 5914 - protein, 524 aa, unidentified
  source 1..524: note = uncultivated organism
MKKQTESERRIIRCAIYTRKSTEEGLDQEFNSLDAQREAGENFIASQSQEGWKVISTRYDDGGYSGGNVDRPAMKRLLEDIAAGKIDCVVVYKVDRLSRSLLDFSKIMETFDNHGVSFVSVTQQFNTTHSMGRLTLNILLSFAQFEREIIGERIRDKIAAQRRRGKWAGGIPVLGYDVDRSGPSPKLVVNADEAAKVRRIFGLYLEMESMTPVVEELDRRGWCLKSWKTKSGKTRGGKPFDKSSLHTMLTNQTYIGRIKHKTQTFKGEHTPIIDQKLFDDVAAMMRSHARGGGNHLVNKYQALLKGLIYCPACNYSMVHNVARRRSKVYRYYTCVTAIKRGRKYCPSPSLPAADIEAAVVDQIRCIADDPGLRRDVLEQSSKRCEAELAELNTQRTQLTQRLNHQHEQMKHVSSSTDAGSGDSERLAALHQEVAGIIESLEIVNGEIERLTAEQIDERDVNAAFADFGNVWNELNTREKSAVLTLLISRIEFDADESSLSISMHPAGIKTFSAEATEQHQETNS

SEQ ID NO: 5915 - protein, 565 aa, unidentified
  source 1..565: note = uncultivated organism
MKVATYARVSTERQAERGTIGSQLAALRDQVSTAGHELISEFIDDGQSGARLDRPGLDALRDAAEAGLFDAVWCLSPDRLARVYAYQVFVLDELARFGVEVHFTDAPDFATGDPQATLLTQVQGVIAEYEKAKIAERYRRGKLFRARAGEITTWKTAYGYRRVARSAATGPAHLEIYEPEAAVVRRIFADRAAGTTVREICRSLNADRVPSPTGKATWAHSTLSRLLRNEAYVGRVYFNRTESVPDGRPARRTRQVPRDRADWIPIDCPRIVTDDVFEAAGRVAVDNTQWSPRRAEPGQWLLKGLVKCGVCGVGTNCHKMRGRNGTWHRYYYCRNHDPLRAGGQEHRCPERNIRADALDEFVFDQIKRALMQPDLLLAGEHSVAVTAPVPDDQLLAAELTRLDRKVDAADTEKRRLVDLYQAGLIEMADLQRRAADVAARHRQLQAKRTSLADQHAALVRGNQVHRRVHDFAERIRGVIDQLDAVHKQQLLRLLIEEVRVTGWHVEIRLRIALDQPPPPDPKEPDRSPHPNEPPSLPRRLSSEDGLRSIGEHQRPQLPPHPRRRR

SEQ ID NO: 5916 - protein, 510 aa, unidentified
  source 1..510: note = uncultivated organism
MAQVQIIQPYRPQSEELEKVAAYCRVSTDSKDQLNSYRTQIGYYTNYIAQHPGWELADIYADEGITGTSLEKRDEFKRMLQDCRAGKIQRILVKSVSRFARNTLELIETTRELKELGVVVVFEEQGIDTSQMLGEMQLTLLAMAAQEESTSISKNMRWSYQKRMENGTFLGCRSPFGYTLEEGKLLPHPEQAPIIQEIFARFLAGEGKQAIADDLTARQIPTRFGNTQWNIAGIHYILTNERYCGNALLQKTFTSGFPARKQRNHGQVNQYYTTETHTAIISETTFQAAQELIRKRDNGQRTRLHAELPIICPECGYTYRKLKSRGKEHWVCSLRNRGQSQCHSLSVEGSAVKTAFVNLVGKLYLYQTELLSPTLSLLEEIAARQKQGNAKLYELNAALADLNEKAHTLQRLHNKGFIEDEDFREQSDALAAQRKKLSNQCAKAIHGSKALEALDKLRELQEQMEALPEIPREFDIDMFNQLVEKIIPISNTELLFKFKCGLELKEVMPK

SEQ ID NO: 5917 - protein, 523 aa, unidentified
  source 1..523: note = uncultivated organism
MTRQEQQRQALGRVRCAVITRTSTEEGLDSEFNSLDAQRESGEAYVASQKHEGWVGLPTRYDDGGYSGATLDRPALQRLLADIEAGKVDCVVVYKLDRLTRSLLDFAKLVEIFDRHKVSFVSVTQHFDTSTSMGRLMVNILLSFAQFEREIIGERIRDKVAATRRKGKYTGGPPVLGYGVDRERKRLVVNAEEAALVLRIFSDFVETGSTTTLAQALTAEGHTTKSWTTKEGKHRAGTPWNKVLVYRVLNNPLYIGEVTHKGERYPGEHEPIVTRRLWDQAHSILARNCRTRGVRTRTKTPALLRGIIRCAHCDCSMGPSFTKRRGKTYRYYLCVHASKHGPGSCPVGTVPAGEIERAVIEQLRAVFETPEIVAATVRAAREQQEARLQEVTHQHAEVTAALATLKEEAQRLMSGAYGDSALVAGRLAELTAQVEEQERAVTQADQEMQALSSRVGEQEVIGALASLDPVWEELFPAEQERIVQLLVRRVEVGPDGLDLELRAEGLESLALELRSQDREEMVV

SEQ ID NO: 5918 - protein, 502 aa, unidentified
  source 1..502: note = uncultivated organism
MIYGYCRVSSDEQAAHGISIEAQRDILSGYARMSQDEIRIFEDAGFSGKNTQRPALQQLLSAVRSGGCTAVVVWKLDRLSRSLRDTLSMIEDVFAPAGVTLVSVTESIDTSTPSGRMMLNLLASFAQLEREQDSDRVVMSHKHLARDCKYLGGHIPLGYCVDSEKHYQLDPIAAPAVRRVFEMYLAHAGYSSILAYLNDPDMLTALHRTKPYTKQHINYILSNEIYAGVYTRRMGADPRHRITSPETIRIPGGVPALLSQDEWRRVCDIRSRNAASNLSASYRAKYVYPLSGLVFCSVCGKNMKINHGGKTRSGKIERYYSCPDRCVPPARLESVEAAVFKSIEYLASDEYIISKACEIANSFSDDDEKSQHRSSADLQDRITEIRKQSARLLKLVKDSDTPPASVLDDLTALDREEQLLRTRLDSLLQPHPRYNPDQLADLVRAAANIKDLPPDEQKARIQAAVARVIVSDTSYKIRYVCPTSCGDEPLHYVEHTIKRQRR

SEQ ID NO: 5919 - protein, 575 aa, unidentified
  source 1..575: note = uncultivated organism
MKAVIYARFSSEKQNEASIEGQLRECLEYANFNGIEVIGNYIDRAQSAKTDHRPEFQRMIKDSYKRPFDCILVWKLDRFARNRYDSAYYKNILKKNGVRVISAKESISQGADGILLEAILEGYAEFYSAELSEKVKRGMTENALKAKSNGVRPPFGYYVDDTDHYQIDETLAPIVREIFTRYLDGMRVNDIVKLLNERGIKHKGFEMKYNAVFRILTNRKYIGEYKFGDIVIPNAIPAIIDEETFNSVQQRMARNKKAPAMHRSEDDYLLTTRLFCGKCGAMMTGVIGTSHTSRQYRYYKCNHAKQGKCDKKSVRKEWLEELVLDEIKELLSSDEVVEELADRVYDLQQQEDNATASIQTQLTGVETKLNNLVEAIAQGIYSSATKKALDELEERKRNLEIELFEAQMRNPVLTKEQILFALHNFRKIDISTQEGKQWLIDGFVNSIYLYDDHFVITYNYKGQSKTVTFEEVNSSPLTSKGSPTHSGDFRSKIPCFSLKNAVICSFWLNVKVQPPNEPPNLFYRRKLLPERLTDRKNGDKIKEQQRGVTVQRSARVTKNNRRDCHIKGGYFFMIM

SEQ ID NO: 5920 - protein, 581 aa, unidentified
  source 1..581: note = uncultivated organism
MTTESKAVIRCAIYTRKSSEEGLEQSFNSLDAQREACEAFVASQRHEGWRALPANYDDGGYSGGNMERPALQRLLEDIEASKVDTIVVYKVDRLTRSLADFAKIVEALDARGVSFVSVTQQFNTTTSMGRLTLNILLSFAQFEREVTGERIRDKIAASKRKGMWMGGTVPLGYDVKDRKLIVNPDDAQIVVRLFNLYLELGCVSKLKARLDQEGIKGKERTSAVGNRSGGTSYYRGALYQILKNRIYLGEIPDRGQNHPGEHAAIVPRELWDQVQAQLKSDHQGRRNGLRANSPSLLVGLLQDTEGNRFTPCHTSKNGRRYRYYVCQITSGRKEAENKPSKVPAHDVERHVVLKLQSFLQSGREVMDELCLSEDAPARTQQIMAGAAKQFDQLSSGAPAVVQDFVRRVVQRVVVHADRIEVEVWKQKLRDTLTADSRTSSARPATQHPEQASTDVIRLDIEARVKRCGGEMRLVFPPDHPGPTRVPASSLLKALARGRQWYEWIVAGEVSGRRSLAEKLGLDERYVGRVLECAFLAPDIVEAILDGRQPPDLTFKKLTNCLRPSWTEQRRELGFPSLQPGQ

SEQ ID NO: 5921 - protein, 554 aa, unidentified
  source 1..554: note = uncultivated organism
MRKDGRPIRCAVYTRKSTDEGLDKAFNSLDAQREACTAYVMSQQHEGWMLLPDLYDDGGFSGGSMDRPGLRQLMGDVKAGKVDVVVVYKIDRLTRSLADFAKIVDVLDAAEASFVSVTQAFSTTTSMGRLTLNVLLSFAQFEREVGAERIRDKVAASKAKGMWMGGGVPLGYDARDRQLHIVPSEAETVRHIFQRYLEVDSIRTLVRELDHEGVVSKRRTSRNGRLSGGCPIRRGALGWMLKNRIYVGEVRHKDKVYPGQHKALMNRELFDAVQQKLKDQASEGSAGRPYRRVALLAGMIRDDRGRPMSPVHTYNHGRRYTYYASNLNDDQRAPALRLPAGELEAWVRLAIASWIENPSNLAELMSGRRLDEKSRYLSVCSEVARSVASHPIREARGELIRLELALTVSFDQARATFNAAALSHSVGLDAERGEVTLEIPTACSNYGHEPRLRLEPAAGKSAGPDRHLVELLGRSAAARDELIGASDSNAAAMPVTRLRHLQRLARLSYLDPTIVRSVLDGTQPRKVAARDLWRIADLPLEWAAQRALLGVTTN

SEQ ID NO: 5922 - protein, 533 aa, unidentified
  source 1..533: note = uncultivated organism
MARAKRNASSKNPPQAIWRAALYTRLSREDGDKPESDSIANQRALLESFASQQPDLQIVGQYSDDGYTGTNFQRPDFQRMIADIEAGKINCVVVKDLSRFGRDYINAGHYLERWFPEHGIRFLAVNDHIDSERGPYDMLLPFKNVFNEQYARDISHKVKSAMQAKQRQGQFIGAFASYGYRKDPQDHNRLLVDPCAAAVVRRVFDLYEQGNGKIRIAKLLNEEGVPCPSEYKKLNGERYHNGQKLGKTTYWTYATIHRMLKNQMYIGNMEQGRAPRQTMHGRAKRLDQSQWTVVEGTHEPIISRQQWDRVQALLAKDTRTPSFEQNISPFAGFLRCGDCGRAMSKTNHPGGIYYCCGSYKRYGPSTCARHGISHRELEQIVLDDLNKIIGAVGDLKALAEEAKPQKKHRSIEGARERIQGNLDRVYHLKKSTYEDYRSGLISREDFLRYNEDYTLQEKSLSNQLSQLQQEQPEAVFNRPWIASLLKHGKLTELDRTTMAETVKEILIFEDGHIEITYLFSDELGILDDPDGNR

SEQ ID NO: 5923 - protein, 520 aa, unidentified
  source 1..520: note = uncultivated organism
MSFKVGIYIRVSTEDQAKEGYSLEVQREYLESFAKREGYEIFKVYCDDGISAYSTRRDALQLLLKDAKQKKFDLVLVYKIDRFSRNLKDLLTLVDDLSACGVGFKSATEPFDSTTSAGKLMFQQLGSFAEFERNRISERVFPGMIKGVQQGNWQGARFSPFGYSYNKAKKLLEIEKREADIVKLIYTMYLAGKSTQDIAAYLNKKKYQTRTGKQFYNKFICDILKNRIYTGKIVWNKKHYDKNQKTKKHYKYIKNDPSKIIIAQGKHTPIIDEQDFEEVQKLLAVKKRRWRPRAKNQEYLLAGLITCAKCSHKYHGVSSISNHRTNKKKRWYRCSGPYVNRVRCANRAVKAEDIEPEATKIVVQLIQNERLKQSRLTTGTLPSGANFPDFDENTKIDATLLRNKLGDNHKKQVKLTDAYLENLLGGDVYRDKMETLRGEEDGLKKLLAGYELREIESERSEGYLNRVKDFLDSYDDGLTKVNFEHKRQMAGLLFKNIKIAPAIGGSRPPKKNFFFSFRPL

SEQ ID NO: 5924 - protein, 522 aa, unidentified
  source 1..522: note = uncultivated organism
MAKSNSSRPAAGGGGAPTANRVVRCAIYTRKSTDEGLQQEFNSLDAQREAAEAYINSQKGEGWQVVAETFDDGGFSGGNMERPALKRLLAAVESRAIDCVVVYKVDRLSRSLMDFARIVEVFDRNLVSFVSVTQQFNTTSSLGRLTLNILLSFAQFEREIISERTRDKMSAARRKGKWIGGHPVLGYDIDPKGGRILVNPEEAERVRSLFDLYMKSGSLMLTVEAARQQGLVTKRWTTAEGITRGGTAMNKNTLHGILRCALYTGKVDHKGVLYPGEHERIIDQNQWERVQEQLKQNKADSGGRSRNKYGALLRGLLFCVPCQSPMIHTYTINKAKRYRYYVCYQAQREGWKACETKSVSAEAIESAVLSSIRRIGTDPSLAEAVALKALEQAADRRRELDQDLDTQRRHLRQLIHQAARANGRGKEGAPEIANWSEEISATEERIAKLEAERSGGSSRHVNAEDLRQILLEFDAIWGTLTTKEQEQMIRLLIAKVGYDGRSGKVTINFSSEGAKELCHGKQ

SEQ ID NO: 5925 - protein, 545 aa, unidentified
  source 1..545: note = uncultivated organism
MADFLYPNDGVVFEAIAYYRLSKYAKSNDSESIANQRKLIREYVARHPEIVLVDEKEDDGYTGTNYNRPGFQAVVQAVKDKRANCVIVKDLSRLGREYIETGKYLERVFPAMGVRFISINDDIDSENERPGDDIIVPVKNIMNEAYCRELSKKLRRQFEVQRNKGEYVGPFVSYGYLKDPEDKHKLIIDEYAAEVVRGIFQLKIKGFNAQTIADYLNETGVLSPARYKQQIGSKYKSGFQKGGGSEWGPMAVRRILMNEIYIGTLIQGKRGTPNYKVKQMRERDQSKWSVVKNNHDPIIDESRFNLVQQMLQRDTRTSPQEETVQPLAGMVFCADCMRSMCRRVVKKGMNSFYYYVCSTNKRTKGCSSHSMSQNTLDGIVFRAIKKQIELVVELDKLLSEVEQNGLVATKLRRLDILTEEKEKEIERYQEYRMKLLEAFHDQLIDRTEYDAMRQKYTNMITRLQASLEKIMDERKTVMSEAPDSRNWVSQFVQFRDTEQLSREMVATLIDKVFVYEDKRVIIDFNYRDEIAYHQEILRQMEEAVS

SEQ ID NO: 5926 - protein, 564 aa, unidentified
  source 1..564: note = uncultivated organism
MTESDNRKFAIYCRKSKFTGKGDSIETQIEKCKGYIALNFDITDDSEFMIYIDEGFSGKNTKRPDYQKMMKACHNHEIKAIVCYKLDRISRNTIDFSLLLEELKELKIDFISATQPFNTTDPTGEAMIKITSVFADLERKLLAERVRDNMLSLAKTGRWLGGTTPLGYRSIEVKTPVDIDGKIRTAYRLNTREEEVPIVHLIFSKFIEFNSLTKTETFLLNNHIKTRNDKNFSRFGLKAILRNPVYAAADEETLKYFTDLGTIIYNDSSEFDGKHGLMVYNKTDQSTSKSHTLHEYSEWVVSIGKHKPMITGKEWIKVQKLLELNKSKNYHKPKNNTSLLSGILVCGHCGSYMRPKANRRLDENGNKTYSYLCETKEKSRRHLCNITNPQGNLLDERVCDEVKRLAEYEDKEKFYEQIKTAKKQLMTSGKSNVTELDILQKSHKDTEKKINNLVQTLSKTTYGSASNYIQDEIETLHKEKLQIEEKIHTLNELLQHQNDMLVTFDMMIKKLSSFSESFDMMSIEEKRNVLRVLVDKVVWDGTNAELYLSVSNDEKTKPQRAGCK

SEQ ID NO: 5927 - protein, 578 aa, unidentified
  source 1..578: note = uncultivated organism
MNKNVEVIAPTKCLNKSSNNKLIRACAYCRVSTDSEDQKTSYDSQRIHYKNYIEENPNYEFVGIYADEGITGTQTKKREQFNQMMSDALNGKIDLIIAKSISRFARNTVDTLNCVRTLREHDVDVYFEKENIHTLGLSNELFLTLYSAFAQAESESISENVKAGVRMKMKRGELVGKYAPFGYLYDKELNKLVIDESKKDIIIYIFEEYSKGIGFRTITLNLNELGIPSPTGRKWCHASVRRVITNEKYVGDLRSGKYYSDNVISHKRKVNYGEKEQYFTSNHHEAIISRELWNKCQEILEKRSKIVKLDGNRDKFSRKYPFSSKIYCGICGERFIRRSYKIRSNNKEVAYWICRSYRNKIECSNLLHYKQEELEDIFIKVYNKLTLNKDTYINSFIKKVNDTLLDNTDYKNSNKIKEEISRLQNRLSNLIDLKLDNKIPKEILESKELEITAQINELENKLISNQDLELTRKQKLEQVGNIVKILKEYPGLTKFNEDIFNNLVDRIIIGEVLDNGEEDLYRIKFILKTGEMMKDNLPNNTLKIGTDLGHYGFRINKQVLEIKEDNVSAYVLRKNSNI

SEQ ID NO: 5928 - protein, 523 aa, unidentified
  source 1..523: note = uncultivated organism
MIKNKIRCAIYTRKSCEEGLEQDFNSLDAQREACEAYIKSQMHEGWVLIEKEYNDGGYSGGTMERPAFKELMQDITEDKIDIVVVYKVDRLTRSLMDFSKIIDVFDKHQTSFVSITQQFNTTTSMGRLTLNILLSFAQFEREVTGERIRDKFEASRKKGLWITGGTPHGYTKEGSHVLVPELKYSKDIQKIFELYLELGTVEKLYKKLPELNILSRSNKPFSRGMLYRMLADKVYIGKITYKDRIYDGQHEPLVSEELFNKVQGLLKLHSQERKYSTNAKEGSLLTGLIYDDMGNRMTPTHGNKKGKRYRYYITKTHKLEDYQIGVITKISAGEIEDFIKAQLTIFIKNNIQENIQSESVSKQKTILKFVENYQPNKIFIQNSINQICLQPNEIFVEYDSGYIFECIKSLFNNSGLLEETSEHKLERRRYEVRISTTSKKHNKITISGEANYNEKLIKAVVKSFWYNKLGAEGLLTKDIRNSRIRRLAKVRFLAPEILESILNGTQDPELTIKKLTEMANKID

SEQ ID NO: 5929 - protein, 526 aa, unidentified
  source 1..526: note = uncultivated organism
MKVATYTRISTDEKHQPYSLDAQSHRLAAYAESQDWQIVRRFTDQRSGATLERPGLERALREADAKRFDLLLVYRVDRLARSVRGLAQILERLDAAEVLFRSATEPFDTSTSAGRMMVQMLGVFAEFERATIVERIIGGMERKAARGEWTAGKIPYGYQLNDERRFLEPNPAEAPIVKLIFDRYTQRGDGSVALAHWLTGQGYRTRQGKPFSCKAALGILRNRVYMGEISFRGTYHPSPHRPLVDPVLFQRAQEILDERSKSASQRRSNQSAYLLAGRVRCAHCGKRYLGAAAHGNGGRYSYYVCFSRQRYGRKSCQADRLPAKQLEDAILNQLSALLQRADLVRNTITDALAERNNQRSDRQAEIESIETGIQNTDAALGRYLHSFETAALPEKACGERIAELNRRLTGLRAHHHKLRLDQQDDPDPLPPTEDELRALQAHVDDVIHDGDPPARKALLQSLVSDVRIVSRGEIYPTFSLPAARPPTPCPQRDISRITRSPQTTSIMVRLYVPFIPLRGFEPRFPP

SEQ ID NO: 5930 - protein, 604 aa, unidentified
  source 1..604: note = uncultivated organism
MDEERKDIVAGIYIRVSTEDQAREGFSLGEQEEKLKALCDYKGYKIYRVYKDAGISAKDMEHRPEFQQMLKDMRDKKINAIVAYKLDRVTRSVRDLEELISELEANKCYLICDRDDVNTSTANGRFFVRMLTVLSQLEIEIVSERTKFGLVGAIKQGHFPGKPPFGYKHVNKKLVIDHSTSWVVEKIFELYRNGLSFQRVANYLNDNAILGRTNWSDGNVEKIIDNKIYKGDYEQYKVDKSRESIIYVDVVDPIIPRYIWDECQDQKVKNQRTYSRNRTYIFFQKLLCPHCGRIMKCKGSGAHDGKYMYYNCEFCRYSLNEAKVEKRFVQILTNLLRIDEEYNNYFLPIFAKNSKKPAVSDLSKEIADLSKQRERIKTAYTTGVIELEDLDESIKVINEKLTHLRAEQEKQIEVDSGKQFSIEEVMINRDKSSHPLNDFKNTQFLLNEWKQKDDTDKQYFVNKYIESITIEKKDNSVDGLVIKDIKLKDFTRMRAKNLLINGLLEFSQRVKIKGKEEVIRSNMAITPEEFEKYKNEIEKQDEIGYTLLDGEYDIMETDVYEIHQEGIEDKTIFKMIPIVHYDEQGNFDGKYKIAVVYSNWKTIE

SEQ ID NO: 5931 - protein, 537 aa, unidentified
  source 1..537: note = uncultivated organism
MRSARPGERSGSGKPAGVGGKRCAIYTRKSSEEGLEQDFNSLHAQREACEAYIASQRHEGWSLVPSHYDDGGYSGGSMERPGLAALMADVEAGRIDIVVVYKVDRLTRSLADFAKIVERFDAKGISFVSVTQAFNTTSSMGRLTLNVLLSFAQFEREVTAERIRDKIAASKRKGMWMGGHVPLGYRVENRKLVIDEVEVEQVRTIFDLYLKLGSIPALKDELDRREMRTRVRTRSDGSTFGGVLFFTGALSALLRNRAYIGEIIHKGEHHAGEHEPIVDAAVFEKVQQRLASQLVERTKRLSPNGLLRGLIFDSRGNRMSPSYTVKHGARYHYYISRALLENRKAEAGSPPRASATAIDELVLGALRQRPGALPPDEPAQRELVLELIERVEVNRSQLVITFASHTSQADRVVALPWLQRQVKPEKVIHEAASVASEAAGAAPHQRRANRERLVKAIIKARSWRDDLIAGRTDSVEAIAESEGKSSRNIRMMIQLAFLDPWIVEAAADGRLPDSIGATEIARDLPMAWQEQRRLLGL

SEQ ID NO: 5932 - protein, 585 aa, unidentified
  source 1..585: note = uncultivated organism
MPKKKVEIIKPQEQKKKKNKKYNVCAYARVSTGAEEQKDSFVNQQKFYEDKIKANPDYNFAGVFADEAISGTTDKRPNFQRMIRFAENGHIDIIYTKSISRFSRNVVDLLSYCEKLRENNVNVIFEENGIELLNSSGSLMLTILGAVAQMEVENTSDHINWTLRNKMEKGELVGQANPLGYDVVDNKLVVNEEEAEYVRYIFRRYLEGVGASTIARELEKMVAKTKKNNSKWYASTVMGIIKNEKYTGELLQGKTFTTNPIGHKRKDNKGDGTFYRVENNHEAIISVDDWKKAQNIIDNRCISYADGRRRGTTQNSNQSDFTSRLVCAYCGKHFVRRKTHPGTQYEKIIWKCSSVCKGARADCLKSATLEEDFIKQSVVGMIKNLIEDKDAMFYLSYEQVNRLMKKSDKKKDRLEEQITKCRKNLEAKTNKKSKILTMFLDEKITEEEFDKQRADIEKEISSIQELLNDLESDINLEKIKTNTSMQVRKIASEGKVDTFNKELFDLLINKIVVGGKVLNENGKWVDEPKSLHFELNPYNLCTDLETDIKDGMIHYKADKSLENSTSCNSENEEDSLCTLNKDNTR

SEQ ID NO: 5933 - protein, 546 aa, unidentified
  source 1..546: note = uncultivated organism
MVRCAIYCRVSSDEQVEKGTIGSQVDYAKRYLELHGPEMGITEHEFYLDEGISGTIALSERPAGSKLVLDAKNKKFDILFIYRLDRLARNVKNVLDTYDLLEKQNIALKSMTEAFDTGTPTGKFFMTLLASIAALERETILERTQGGKDRNVREGKWVSGAPPFGYRIEDKRLAIYDPEADTVRLIFQLYEDGMSTVEVAKYLNAKDVLTPAVSKGTKNKSTGKWHAGHISIILRTTAYMGSYSYLKRSKRKRDTIKLEVPAIIDYQKYADMQEKIVKNADVARGSKKHNYLLRGLIYCSKCGRALVGSSGDSKSGRVYYRCTGTVEYGQGKKCDTKQLRAADVENAVWEDIYELLSHPEELIEEMEKELGKNKESSEPLQIELAEVENFIIDKQAARGKVIGLMTRGKLTEQEAEEALEELANELGSLNSRKEFLFDKINNAQNFEGNVLNVRLVIDAVRDHLDELTEEEKSALVRAMVRRVEVKTVLNEAGKWDSIVTAQYYFFHGMELSISRNAQNHTTLYNIESTWIFHAFSRKNGERVRWR

SEQ ID NO: 5934 - protein, 544 aa, unidentified
  source 1..544: note = uncultivated organism
MDPTQPKRAVIYARVSTEQQRERHTIASQLSVMPEIVRQHGYVLVDEPYVDDGVSGETINERPGMMRLLEDGERNLFDAIFVIDLDRLTRARKSLDWEIIKDVCRRNHIYVITPSQTYDFANEDHEFISDIFSRISAFEKKKILRRSIRGKFQKVKQGRFIGGRRPYGYRIVERQFEIHEEEAAVVREIFQRCLDGQSCESIQRALTEAGYPTPLGHRTPWAKSSVVRILHDSKYAGEFVRWKWKREDPGIGKRGSIGTLVLRNSSEWVTVHIPAIITRETFETAQRLLSSRKSVSKRNSKREYLLSGLLWCASCGCRMTGECYSHEQRYYVCWNRRRKRLGVAPCPNPACPADPIEASVWDAVVSLLSQPGLIEKAIHLAKSGAAHTQGEAVMDHRRLERLIQARVKERERLIHLYMIEAIDTDTVKPKLLKIKDEITSLEAQLSAALAIQRQVNRVSSISKVWKASIRACKDMAFPDKRTLLKLLFLNPSPANESLRVGIWFHQDRSIELCGIIDFVRLRSELGIESQSFSWSALPVRAKPC

SEQ ID NO: 5935 - protein, 533 aa, unidentified
  source 1..533: note = uncultivated organism
MNDNPKPTDQPKIIRCAIYTRVSTTDNLEQDFTSLDVQRESAESYIASQKQEGWVVLPERFDDAGFTGANTDRPALKKLIERIKAGGLDCIIVYKVDRLSRSLLDFTQLLEFFDKSKVAFVSVTQQFNTNTSMGRLTLNILLSFAQFEREMISERTKDKMAAARRKGRFVGGRAPIGYDINKETHQLVVNPLEAILVRKVFDLYLKHRSCIAVAVIINDEGFLTKKTPSKGRPLGGLRFKNTNILWILRNVVYKGKVCYQNAIMNGVHEAIIKEETFDMVQKIISANRRTPQTQERAKGRGTLSQLLRCKNCNSAMFFNYTYKKKVRLKYCYYTCVGALKRGYHTCPTRTIRAQIVDDQVVNCIKQISGYKDAIPSDWPHMTVPEKQDVLKNIVKVINYDGVTRMLAITAQDGKDYCFEVDIKKPVIETPEEVIKKEPQLRQNLILAHQIQKVLDSGRGENIRQVSGWLNLSPARVNQFMSLLLLSPAIQEAILFEEDEKITAIPEYKLNNITRETLWSNQLVLWQQLTSQTD

SEQ ID NO: 5936 - protein, 510 aa, unidentified
  source 1..510: note = uncultivated organism
MNAPSSAPRKAAIYLRISQDREMDGLAIDRQREQCEALAKFRQWEVVETYADQSKSATDRTKVRPAYDRMVADYQAGRFTAIICYDLDRLTRQPRQLEDWIDAAELRGLALVTANGDADLSTDGGRMYARIKAAVARAEMERKSARQSAAQRQRAKQGRAPKGMRPLGYATNGDVIPDEAETVQAIYNAFTRDTHPESLRSLARALSGTQTVPGISPRPKHSHVVSVERAAKREAQGLEPRPITPDGPWVPTTVLGILRNPRYAGMSTYTPKVAQADGSRRRSWKAQILRDDAGEPIRGQWERIVDDETWWRAQSILDDDKRVTNTSGSTKRKHLGSGLYRCYECGAKVTGAPRGYRCAGHVMRTGSHIDDYVTRVIAARLRKPDAVRLVPNAGESAATQSIDAAISEQRARILRAQNDYDAEVIEGHDLKRIRDAAEARIHELEAEKLTTSQGNALAPILGSDDPATAFKEAPLETRRRVIDLLATVTLLPHPRGKRGFDPETVQLEWR

SEQ ID NO: 5937 - protein, 553 aa, unidentified
  source 1..553: note = uncultivated organism
MKAKEFYNVAIYLRLSRDDEDIDGSKTESNSISSQRDMIRSFIRKQDNMEIYDIYVDDGYSGANFDRPEFKRMMKDVEAGNVDCVIVKDLSRLGRDYIEAGRLIQKTFPAFSVRFIALTDHFDSLTADYNETSLVVPVKNFVNDSYSRDISNKVRSHQQIKRENGEFIGAFTVYGYKKCEDNKNVLVPDDYAADIVKKIFAWKIEGYSNLAIAEMLDDMGILSPMEYKKMRGEKFQTGFVTGVQAKWSSVAVKRILTNESYIGTLVQGKEEKVNYKVKKSVRKPEEEWTKVPNAHEAIISKEDFEIVQDLLKIDTRPGVGEKKAHIYAGLLFCGDCMEPMIRRVNRYKGKTTVSFICSTKNRGDNCSRHMISEEELNHLVLTGLQTQIALLLDKSRVLSSIEQMEINFEEVVAFDKEIERLHSEQDKYLGLRAGLYEDLKKQIITEEDFKNFREIYEKRYQELQQAITSQEETIKKLFKSGVTAGMNLERMKTVMQVTELDRMTLVSFVKSILVYEDKRVYLELRHKEMFSKVVMLAGYVEAEQLRGGGDVNG

SEQ ID NO: 5938 - protein, 519 aa, unidentified
  source 1..519: note = uncultivated organism
MRNGNRKSGNGNGKILSGVTPKVRCAIYTRKSTEEGLDQEFNSLDAQREAAEAFIASQRHEGWEALPNRYDDGGYSGGNMDRPALQRLLEDIEEGHVDSVVTYKVDRLSRSLLDFTKIVETFERQGVTFVSVTQAFNTTTSMGRLTLNILLSFAQFEREIIGERIRDKVAAAKRKGKYMGGMPVLGYDVDRVAKKLVVNTTEAKLVRHIFKRFIQTGSATLLADELNRQGHRTKEWVTAKGTTHVGTTWNKMHLYRMFNNRLYIGEIVHHDQHYPGEHEAIVPRDLFDKVQAILEENCRVRGNKTRAKTPALLKGLIKCGCCGGAMGPSFTKKDGKTYRYYVCIHATKRGWKTCSVKSVAAGEIESVVMAQLRALFQTPELIAETCRVSRQKEADEIEHLKAERFGLEGELPKVSDSLRKREVEKRIAEIDGMVATLESNPLSEQQVADALRNLDQAWEELFPSEQARIVALLIERITVANEGIDVRYRHDGLHTLVADFRDIEEEPIDEREQEADNPS

SEQ ID NO: 5939 - protein, 518 aa, unidentified
  source 1..518: note = uncultivated organism
MKCAIYARVSTKEQAEKYSISSQLDRLRSFAEKEGYQVYDEYIDEGYSGTSAERPALRRLLVDAGQGYLDMVLVYQIDRFFRDLRKVLNAVNELTTLGVSFRSITQPFDTSDPSGKFMFQQFASVAEFERNMIVERTNRGKLQSVKEGSYMGRAPYGYYYDEKKKMIYPDKDEAEVVRLIFKLYNQSNTSMYKVADDLNRRGYKTGSGNDWSEPDLQKILSRKSYMGEWEFHSSLEKKPVVLKVPKIVDKETFFTAEELRKRRAKFAKRSTKENYLLAKLIYCGKCGEGMVGYTVLDSPKNDGRSYYRCKRRVYSKSCSMPYIRTERIDRLVWDEIKKVVKKPSLIREAVEQKNAEYERVQQDFRREVCNIDTKVEELQKQKQRVLQAYRRGKLDLDELGNQKQEIQEEENKLNQESEEIKLLLGSERDTRQNLLQLEEFAEKIQDRIDNLNFEQRRYIIELLVKKVLITSEGRVRIECIVPSGAFVQGERIAEVGSQHGPGRKKKISESVELDFSSS

SEQ ID NO: 5940 - protein, 588 aa, unidentified
  source 1..588: note = uncultivated organism
MEKVAVYCRVSTEEQAQRQTIENQVDYARDYCQREGYIIYDFYCDDGISGTIPFEEREAGRRLLNDAKEGKFNLVLIWKIDRLARDTRLALTVAHILKDLGVSIKSMTEPFDTSTPIGEFMFTQLASIAKLERDNIRERSITGTNRVAKQGKWLGGIVPYGYRVNEEGYLEINETPLPGSTFSEAEVIRMIYNWIGRDGLSCIEVAKKLNSMGIPTHYAKDSREFILPPQNTPGKAGLKGKRKVKTSGRWHPHRIGNMVRNTTYMGIHIYGKRSKGKRELIERQVPAIVPPELWHKAQETLKNNFFWAKRNSKREYLLRGLIKCGICGRSMVGSFYKGRKSQHERWYRCSGKFIHVRVAKGTSCPSRAIKAEWIESLVWGELKGWILHSKTLDQILSEELDRYERESGNWFIELGRLKAELNLKTQERERIINLYRKGIIRMRDVESQMRQIEEEEKELERMIGELKAKMTGDISKEETIRSIKERLEEFKERIERGRISFQEKRKIIESFVKEIRVNLQGEYNLVETIPWKEGFIKEEPPENTVRKAVYVRVGEVEPVIPEGEINIIYRFTIPSKPDLITYHTGMDS

SEQ ID NO: 5941 - protein, 536 aa, unidentified
  source 1..536: note = uncultivated organism
MTTAAIYSRKSRFTGTGESIKNQVEMCKEYASKHFNVDEFIIYEDEGFSGGNTDRPKFKQMFQDAKNKKFDILICYRLDRISRNVLDFSKTVESLNKYDISFVSIREQFDTSTPMGRAMMYISSVFAQLERETIAERIKDNMQKLAIDGKWLGGNKPYAYTSKQIKTNDNRKEYMLIEISEEMKKVTLIYKKYLELQSFSKVESYFIRNNIKRKNTFFNKSTIAYILRNPVYCIADNLAYEYFNKLNATIPSPEKFNGKNGLIGYSKRDSKTWTAKDKEEWFVGIGKHKGRIKSKDWIHVQSIIKNNSHKAIKTGTSKNSIITPLLECSCGSKMKASHIAKNKDGSIKYFYYVCRLKERTHGSLCNKANLNGIKTDKKIVQGMKEIAFKNNTLEKQVEREIDFFDENKIKRKNKKNQIESDIADKRNQIEKLVDSISNSNNTAASKYILEKIDIIDSEIKSLENELFQINENNEIDILKKLDLEIQKELMNEVKDIDDYDFEEKQSLIHKLVDKVIWDGNTLNMYIKGTNFTNSIT

SEQ ID NO: 5942 - protein, 552 aa, unidentified
  source 1..552: note = uncultivated organism
MGRTSKRACAAAGAESVAPGTVQGKMQGVKCYKAGIYARLSSDQDLKKNESVETQIEIAKRYVEDWNQQHGDKIEIVGEYADLGKTGTNFDRDDFKRLMQDIRLGDINCVIVKDLSRFGRNYLEAGNYIEKIFPFLGVRFIAVADGYDTGTEVNNTKQMASEIKNLVNDMYAKDFSAKAKLSLKQRREAGSYVGGPPPYGYEACLEGRLRKLKPDGNTAEIVRLIYKKFLEMGSYQAVADELNDRRINPPTVYKKCKEVYCPAETAYKGWDKGAVERILKSATYTGGLVQGRTSLTAGKEENRVRRPEEEWVRKENTHEAIISQELYGQAQEIHRRIQERTRSHNHPTKGCPIGENIFDKVLYCGVCGRKMTRHSYVKDYRDGRRERKGGYFCLDSVSTKRETCPESNRISRTELADILSFLFRAEFATRLKKQRDYVEQGQALVHQKKQELERQLRQTEGAMAALSEEEGEKYMAYRLGSLPQEEYVRYRLWKEERLRELERQKKRYQEEGKKLERKGDIYLRAVRSLIRLKSGDALTRELVEALIEKIYV

SEQ ID NO: 5943 - protein, 524 aa, unidentified
  source 1..524: note = uncultivated organism
MSKTTETPPTVRCAIYTPKSTEDGLEQEFNSLDAQRLAGESFIASQKSEGWIALPDRYDDGGFTGGNMERPALKRLMANIEAGQVDCIVVYKVDRLSRSLIDFSKIMDVFERHKVAFVSVTQQFNTGTSMGRLMLNVLLSFAQFEREMISERTRDKIAATRRKGMWTGGCPMLGYDVVEKGGRLRVNEDEAARVREIFEMYLDRQSLLTTSAILEARGWRTKHWVSTRGREMGGKRFGKNSLFKLLTNRIYLGKMTYKDEIYDAEHPAIVDAEIFERVQLLLKRNGRTGGAHVKNRHGALLKGLVRCVTCDCAMVPSHTVKRLSDNGGKVYRYYCCSNAQKRGWHVCPTPSVPAPELERFVVEQAKGIGRDTNLLAETLTECRRQREDAIGRLEVEKRTLERELQRHDAELRKLAGKDGQATDRMADIQDLIRNAEQRATEVREQILALSRELVDAREVGEACALFDPLWDTLSAREQARILHLLVERVDYNGPKGTVAITFHPTGIKTLADELKRQETTTCKA

SEQ ID NO: 5944 - protein, 534 aa, unidentified
  source 1..534: note = uncultivated organism
MLDANPPISQRKIRCAVYTRKSTEEGLEQDFNSLHAQREACEAYIASQKHEGWVLLPQTYDDGGISGGHLDRPGIQQLLADIDAGLVDQIVVYKVDRLTRSLTDFGKLVERLDAAGASFVSVTQSFNTATSMGRLTLNMLLSFAQFEREVTAERIRDKIASSKSKGMWMGGAIPYGYDKDGRSLKIREDEAETVRTLFDLYREGMTIVELAQYCADHKILSREQKLKDGSIRGGIPMTRGPINHMLKNPIYLGKIIHKGKVFEGQHPAIIDEATWEKAQLRLKARTDGHTQKRKSAASNGRLLIGKLFDADGNAFKADSAKKNGRRYDYYYSAGQPQSEADRISRTRENALRYQAAALENAIGEAVLPYLGVQLVGTDKQHIIHSLQANQIQTWLPFIERVIVQQGQMDITFTEDVPGQRSIQASFTQRRRRHEQRLIIEGQAQIDKTLLEHLALAQALYAKTKDGITLKEAAAEYGISEDRMRRLTPLMFLNPKIIEQAMKGILPTDASARWFGRANFTANFDEQLAKVHALA

SEQ ID NO: 5945 - protein, 542 aa, unidentified
  source 1..542: note = uncultivated organism
MLPKQTDYKVGMYLRLSRDDERAGESLSIENQRRILTNHISEQGWTLYDEYVDDGFSGTDFNRPGVQRMLDDAKTGKINLIICKDLSRFGRNYIQVGQYVDYIFPMYNIRFIALNDNVDTTNSQSSGMDMLPIMNVFNEWHAANTSKKLRAVFESNAKSGKYMTTFCAYGYEKGTDENFTPVIDPYAADIVRRIFEMRASGMNAKKIADVLNSEHIVPPLDYKYDKIGREYPLYSHHLWSSQTIKRILKNQIYLGHLCQMKQTTVSYKNHKVINKDMEDWVIVENNHEPIISQELWDKCREVDASVSNGKCTKERTTKPLSGLCYCDSCGAKMKQHNSTGSKNPMGYVCGLHARYGKSYCTSHYIVMHGIESIVLADIQRQIDFVLNDDEAKAKYLAHKQGSIAVQNAEDKKRQQEIHKRIDDLNKLMQKLYEDRVLGNMPDKICSDFLVKYQQEKENLQSELNDITRRTETASKDEQDVEEYIRRLKSYAGAETLTRQMCVDLIEYITIDKYQGKKIPRDIHIYYKLIDKPLTDRKNALVK

SEQ ID NO: 5946 - protein, 537 aa, unidentified
  source 1..537: note = uncultivated organism
MRTADYHFELPSFDELKSSDFNPPSSSGQKQAVRDMSVIAPVPDIRKLKAAAYCRVSTDNEDQKSSIRIQKEHFRTVAQKNSGWQFVGIYADIVSGTKKEKRPELNRLLADCAAGKVNLVLTKSVSRFARNTTDLLEMVRSLTAAGTGIFFERENIDTRTMDSEFFLTILASLAEDESHSISANCRWGLQRRFEDGSYRAASAPYGYDLADGSYAVNETEAEIVREIFQRAADGEAFARISAVLNDRGIPTKRDGQVWKGEAIHPEWEGRSISALLRNEAYVGEQILQKCYTDRNFRMCRNTGQYPQFRHKDHHPAIISRETFEAVQEMLEANRPKKPQAEKKASVLSGMLRCGCCGANLTKNKNRAGNVYWICSRHRKKASACGLPGIPEDQFISAFSQMIMDLHADDSVVREYLDSVRQEYRNDFRVDAIGKKIRDIDTEIAALSNTQGRIRPADYRSRQNALEAEREKLRDELDKISDNRICLTEELLSLIHSAGGSFDFERTFLQAAEGVTIQGRGIFTVRFRCGLAVEYDGR

SEQ ID NO: 5947 - protein, 517 aa, unidentified
  source 1..517: note = uncultivated organism
MPQVQIIEPTIKPQEQKIRVCAYARVSSDSDDQLNSFSAQVEYFARLIQSHSDWEFVDIYADEGITGTRADKRDEFQRLMRDCRAGRVDRILVKSVSRFARNSTDCIKAVRELQALGVSVIFEKEQINTGNLSNEMFLSMMSAFAQEESISISQNMRKGAIMRMKNGTFRLSQIPYGYRYDEHGVLIIQPEEAEIVRWIFKSFLSGKGVQTISRELEAKQVPKLRGEPIWSKHGILYILTNERYAGNELFRKSYRTESIPFKKIDNFGEKTQFYTEDTHEAIVSLETFEKAQSLLREKKKKHGKKQSSEPFILTKMVVCEECGSVCYRRITSQGTMWTCSTHLSDLSRCSAKGILEGIIYRAFLSLLNKLNQYQDEILVPFLHQIEELKDKEYMSHPGAVKLNQEIAELLEQNHALATLRAKECIDSAFFISQTNELEQKISALRAELQRYRDINDYQELLDGTRTILDVLKQAALDEFQPAVFKKMISRIIAGSQALRFQLINGLELVEPIERWPI

SEQ ID NO: 5948 - protein, 635 aa, unidentified
  source 1..635: note = uncultivated organism
MNENRCAVYTRKSVEDGLEQEFNSLDAQREAGENYIASQKHNGWRCLPERYDDGGWSGGNMERPALKRLMDDIAAGKIDTVVCYKIDRLSRSLIDFAEMLNSFEKHKTNFVSVTQEINTSSSSGRMMLNILMTFAQFEREVIAERVRDKIAASKKRGKFCGGVPVLGYLPDPQTKKLYIVEKEAKTVRLLFEKYVLLGSLKEVVHEANMLKLKTKEWSSAKGRRHPAGLWNTGSLYRLLANPIYAGYVRHYSEQYEGEHKAIISRELWKRAQTIMRGNGCQAPRRRNKRQAFAGLVKCGHCHCAMTPTYTKRHGKKYYYYICQESTKNPDHCCPLKRIPAGDLEHAVLQQLSVLFQTPSILRAALAAAREQEIAMKDNLTLNRNTLQAQLDGLKREALTGNADFAEIKKAGERLVEVKRQLLALKEPVSADDVIAALSDTAGLWEFLFPGERHKLLRLVVRSIEIFENRVSLTLQLDGLKELAIEMSQSGYFNLEHPNAAEKLPEITQKVLPDGAIQLSMVLAAKKVAGHRRLVIPAPGSERLKQSAILRAIGNARKWMDMLINGKAKNISDLAERLGMKTPYVTRILRLNNLAPDIIEAINRGDEPDGLSLATLVKGFPDDWQDQRRELGFSAV

SEQ ID NO: 5949 - protein, 553 aa, unidentified
  source 1..553: note = uncultivated organism
MLSNNLSKTYLCGGYLRLSKEDGDFAGSETLQSNSIENQKEYIEDYIHSKPEIEIVDFYIDDGYSGVNFDRPDFQRMLQDIKNKKIDCVIVKDLSRLGRNYIEVGKYIERLFPLLGVRFIAINDNFDSADDTAASNNIIIPFKNLINDAYCRDISIKIRSHLEVKRKRGEFIGAFAVYGYMRGKDKNKLIVDPYAAEIVKEIFGMKMDGMSQQAIADELNSLGILSPAEYKKEQGSRYKTVFQTHSKAKWTAMAVMRVLTNEIYVGTLIQGKESTPNYKVKVREKKPREEWIRIENAHEAIISRADFEIISDIIQKDTRVTAGKRAVSIYSGYLVCADCGCSMVRKKAYSGSFEYVYYVCSGNKKNKDTCSSHRISENALNLAVTKTLQLHLKHLADLQESILYIRKKSCNSDKIKMMVLQSEKIKGDIEKYNRLKLECYEDYKNELITQDEYLLFKKELDNRIEDTKKAATELSKKKRMLLDGRYEKESFMEKFLTSKDIELKRSLFVRFISQIYVYEDRRIEIIFRYQDEIEQLAGLVGEIKQETAVREVI

SEQ ID NO: 5950 - protein, 680 aa, unidentified
  source 1..680: note = uncultivated organism
MAIGLYLRVSTDEQRERQSIETQREFGQRYCALHQLSVYEIFADDGVSGTVPIESRAAGRRVLEAARQGKFDQLLVFKLDRLGRDTRLILNAVAELEKYGVRIRSMTEEFDTGTATGRLMLTMLSGFAAHEREVIRERSVAGTNRVAESGAWMGGIVPFGYRKAGEKRNGQLVVSEDPMPGMAMSEADVIRDVFRMAAVERKSCRVIAERLNSLRIPCAYVRDDRLMLRGKRKERTSGVWRPGRIRGLIINKTYMGIHEFGKRAVSSRPVISRPVPAIVTEETWKKAQKTLQDNFLFCARRAKNRHLLRGLIKCGLCGLTYIGVAANRPNGKREFYYRCNGAHSPAVYRPNGPCHSKAVRGDHLEEQVWSDVEAFLRNPEPVLKQLQTRLESDAKGSDQTRKQVARLEGLLAQKATERSRVVGLYRRGRLTEADLDAQMDEIGKEETALEAQIAELGGRISGADSVGANVCSAQALLAKLRKRLDEPISWELKRRLIEVLIAGVRVDTVETCGVKQAEITVTYRFSQPDQPMPLVLPQSYSTGRVIRIPTEPHSIGDHIRRRRLGLKMLQREVAEQIGVCEPSVFNWERNASNPEIRYTPAIIRFLGYNPLPPANCWAERLVQCRTAMGFSQKEAAHRIGVGPSTLAKWERAEREPAGAFLGRVKRFLQDWEAAGARRAG

SEQ ID NO: 5951 - protein, 566 aa, unidentified
  source 1..566: note = uncultivated organism
MKRVRMLLRVSSNQQLEADGDLSVQRQLVKDYIFSQSDWQLDEKEYFEGSNSGYKNAVADRNILQEALQDAKAKEYDILVVYKDDRIGRRMWEIGAYVMSLKSFGVDIYTVKDDCISPESDDIMGQMMLALRYGNAQKSSSDTGMRVKDTAQKLVQKGKFMGGKAPYGYKLELSGEVSKHGRALHHLVVVPEQAEVVKYIYELSLHKEFGATKISKILNEHEIYKDRAPRDIWKSGTIVSILTNPVYAGYTAYKRRERVDGRYHRLDSKDWIFAEKPDTEIAIIDENMWNQVQDTRKQRADKYIKSLENQNVTVIRRNSGMLALIDVLYCGYCGRKMTNGSKYNYWTIKDTGERRTSKIAIYKCPNAWNGIPHEKTKQYRADQIEPVVFEALAEYIGKLQENEDVFTQIEENQSRQKAVKQSELDKEQSELENIQQKISVMENNIPNAMTGDYPLSLEELAGIIRKHKELEQKHKRIVEERKAELDAMKVSMDDWENIRSKIPTWQDVFWNADTTTKRVLVNKLIERIDITKDSVNIRFKINLNDFFTLPRITDGSGTIPYKLCSE

SEQ ID NO: 5952 - protein, 540 aa, unidentified
  source 1..540: note = uncultivated organism
MDSHSSDSKEKPQIKCAIYTRVSTSEGLEQEFTSLDNQRESAESYIQSQKSQGWILLPERYDDGGYTGANTDRPALQKLIADIKETKINCVVVYKVDRLSRSLLDFSKLLEFFDQHRVTFVSVTQHFNTNSSMGRLTLNILLSFAQFEREIISERTRDKISAAKKKGKWIGGCVPLGYDLNKETHKLIVNPKEAALIKELFELYLKERSLLSVVKIANNKGYRTKARYLADGKIKGNVKFSTTSMIKVLNNAHYIGKIRYQDALWPGEQEAIIDDEIFIQVQETLHSHPAKKRFHPPVGKKIALLSRILRCSACNSAMYIAHSAKNRKVRYCHYVCINSKKRGPDACPTKLVNADLMDTKVLECLRKATKDRWLDPKEWDTCSLEEKRTILQRLVQEIGYNGKEGILEITLNDKKKPCRFEVSKDELKHHPMPPRHQPMETVPQLRQNLLLANQIQGLIDEGKAESLKQVAGWMNLNHQRLNQIINLLLLAPKIQEEIICGKSETISLIPEYKVRDVGFELSWSKQFEMWQGLINKRPVD

SEQ ID NO: 5953 - protein, 550 aa, unidentified
  source 1..550: note = uncultivated organism
MAAFFCPQTEELSGQHWYGISYLRLSKLGKRYESESIDNQRKLIHEFVQRHPEITLVGERVDDGYTGTNYDRPGFQGVMDAIREKKANCVIVKDLSRLGREYIETGKYLETVFPDMGIRFISVNDDLDSEHTPLCDDISIPIKNIMNEAYCRSLSQKLRAQFRVQRKAGEFLGAFACYGYLKDPADKHKLIIDEYAAMVVRTIFQLKMEGYSQQAIANYLSSEGVLPPAAYKQQQGLKYQSGFQAVGDNNAWSPVAVRAILENPIYIGTLVQGKRGTPNYKIKQMKLRSKEDWCIVEKNHAPIISEELFTSVQHLLSLDTRTSPSEEVVQPLAGMLYCADCGRAMCRRSVKRGNRMFYYYVCSTHKRSKLCSSHSISQTALEDVVLRAIQKQIEMVVDIDQLIHEIGQKSIQAAKHRQLDMTIEEKEKQITEQKEYRMRLLEAFHDDLISRTEYDMMRQRYTRRIDALQAALASLHERRQALEEGAADTRNWVAEYTKFRKIDRLTREMVAGLIRRITVSEGKQITIQFNYADELASYQQMIAAAAKEVG

SEQ ID NO: 5954 - protein, 543 aa, unidentified
  source 1..543: note = uncultivated organism
MQNTQNKIWNATLYLRLSRDDGDKEESNSITGQRELLRDYISQRPEFREYAVRVDDGFSGSTFERPSFQKMIEDVKAGRTDCIIVKDLSRFGRNYLDAGEYIEKIFPFLGVRFIAVNDNYDSLGDKKASDDLIIPFKNLINEAYCRDISVKIRSQLEIKRKNGQFLGSFAAFGYLKDEQNKNKLVVDQYAADIVRDIFKWKLEGVSPQDIADALNKLGVLSPMEYKRSLGMKFTTSFKTNAKAVWSAGTVIRVLKNPIYTGVLVQGKETTPSYKVHKRVTKDESEWTVIEDSHEAIISKIDFDSVQKVLKCDTRRSPGGKAVGLFSGMIFCGDCGASMVRKTVPAGEKKYVYYVCSAHKQDKSCSPHRIRDNALEEIVLDSLKQHISEVVDMSELLTITDTAPLRTAQAQKVQRQLDKKHEEYEKLQKLLMSLYENLADGIIDREEYTRLKASFTARADEAEKQMDALREQLEDIHNHGTENAWMNEFIKRQGLTALDRAVVVALIDKILIHSNDVVEIIYRWQDEFAWQLDILRSARLREVV

SEQ ID NO: 5955 - protein, 611 aa, unidentified
  source 1..611: note = uncultivated organism
MEEKKIAGIYIRVSTEDQAREGFSLGEQEEKLKQLCSYKEYEVFKVYCDAGISAKDMEHRPQFQEMIKDIKSGKINYIVAYKLDRVTRSVRDLEELISMLEKYNCYLVCDRDDVNTSTANGRFFVRMLTVLSQLEIEITSERTKFGLNGAIKCGHLPGKLSLGFKKDGNKKTIIDESTSPVITKIYDLYLKGKSYQQITNILNEEKVLNKKWYDSIIEKTINNRLYMGDYVQYKKIHASINQEPIIYSNVVEPIIPRYIWEECQLQKVKNQRTYTRDRVYTFFQKIKCPICGKIMKCKGAGGRKRKYLYYNCETCHVNIREDYVEKAFKEIIYELIKFDESYNKYFLPLFAEKETSKNNDNLDKEIINLNKQKDRIKKAYTSGVVELDDFEEDLKLVNERLKNLNLQKEERIRLCRLRSYSVEKIMANRDIERLFDRDTKSKEFTFKEWDLKTKEEKQEFIARYIESITIENDKNKKYGIDITDIKLKLIYKNKIEQLTQIGASDFKLPFVINGEIIDTTVSCPLTRKQLNIYLKELKQIDSIHYYEIDDFEESIFSFIEKNNIDLSFNANSDNEEIYKFIPIIKDNQIKSNKDEIYNLGVLTNDKILNFE

SEQ ID NO: 5956 - protein, 634 aa, unidentified
  source 1..634: note = uncultivated organism
MTVTGGRSRKRRSNESSVRRCAVYTRKSTEDGLDQDFNSLHAQREACEAYVRSQAGEGWKLLPDPYDDGGFSGGTMDRPALTRLLADIQAQKIDTIIVYKVDRLTRSLADFSRIVDVLDAHDVSFVSITQQFNTTTSMGRLTLNMLLSFAQFEREVTGERIRDKIAASKKKGMWMGGFVPLGYEADGRTLTIDEEEAGTVRKIFELYLELGNVRLVKQAADALGLTTKVRRPDDGKAGGSEAGGEPRGDDMNGLVINAQTGATPGTGRQADGKQNRERQDRRTREDASPVAKRSAGGRPLSRGYIYKLLGNPLYVGCIAHKGEIHEGLHPAIIDRATWDAVQMKLTANRGRKRSMPTRKTEPSPLMGKLFDADGHPLTPSHAVKSGRRYRYYVSRHLVNGTVGENTTDSGWRLPAREIERITADAVTALISTPARLAEAARDSGIPADRIGALLDRVSTSTNPGTGITSSNPGPTGTRKHPLDLVDRVALDSDRIKITLDLSSMTGLPDTTITHSIPTCIRRRGVEMRLVLDGPDKGEATANPDPRLIRCVVQAHAWFDDLKQGQAATLSDIARSEGVSDRHISQVLPLAFLAPDITGAILAGRQPPELTAETLIKRIDLPLHWDDQRAMLGFS

SEQ ID NO: 5957 - protein, 526 aa, unidentified
  source 1..526: note = uncultivated organism
MQSIPKVGIYCRLSIEDKDKLKTDDSQSIQNQKAMLRDYCHERDWEIYDIYCDDGYSGIDRTRPAFHRLLADCEAGKINLVLCKDQSRFSRDTVVIEQYINDKFLEWGIRFIGVADHADSDSEMYSTMRLFTSAYNEMYVKDISAKIRRTLTYKREHGQFIGSFAPYGYQIDPADHHHLIIDAETAPTVQLIFERYIQGNGYRKIVQELNKQGILNPSAYKQHTGSRYRNGNADASTAKDLWTQSTIAAILRNEMYTGTLVQGKSHPISYKNKKRKNVSKDAWIRIPNAHKAIIDQETWKRTQERLNSHTRVGAGAPALSPLSGKVRCGVCGRSMKRNVYYNKAKTIQYYSLQCAAYKTGAMNCSNTKTISGKVLEEAIIEELNKIVRQYCQTDQIKLTNFHLEQIHTLKKQLEKLTAQQTAAQARLTKMYKDKLDGLISGQEYTLFRDVLLEEEENASNQIMDLQQQLKLLAAKEIHAKAQHAWIETYMYFKKLDRTIAEEWIHYIEIGAVCETGEREILIHWNI

SEQ ID NO: 5958 - protein, 506 aa, unidentified
  source 1..506: note = uncultivated organism
MTVAVYLRISKEDKESNSIESQRGMVLHAIEHMPEYADAHIAEFCDDGFSGRNFRRPGVERLLRQVQEGGIQCIIVKDLSRFGRNYLEAGSYIFRVFPALGVRFIALNDGFDSLREMEENSLEVSFRTLLYDIYSRDLSDKVKSALYGKARRGEYVCALAPYGYRKDSTDKHRIVPDADAAAQVRRIFQMAANGQSTRQIARTMNEEQILTPLQYRRANGCGRTVWNCIGEENFWTQQTVARILRDERYTGKAVYGRQKRENAGDLRQVQVKKADWITADDAHPGVVSKEEYALVQEMLHLGSVRGSSQKSGHPLLGKVRCGICGRAMIHAGRNHRYFICHTPRVAPFYACPDLRLSEDDLVQILQDAISRHVRNAVDANRIFSQVQNATRQKRKAADIRRGELHKARLRLEAGRKELFEQYALGKLEKEAYLAAKTNITKKLEVLSIQIEKLEAKLAEAARRETPERCINNEVIRQFAADGMQELLQEVTVCPRHLLKITWNFHL

SEQ ID NO: 5959 - protein, 562 aa, unidentified
  source 1..562: note = uncultivated organism
MSQTRKIRCTIYTRKSSEEGLDQDFNSLDAQHESCAAYVASQRHEGWKLLPTRYDDGGKSGGTLERPALQRLLNDIDAGRVDMVVVYKIDRLTRSLADFAKLVDRLEEAECSFVSVTQAFNTSSSMGRLTLNVLLSFAQFEREVTAERIRDKIAASKKKGLWMGGVPPLGYDAHPDPNTRELVINDEEAQTVGRIFDFYDKLQCLNAVTRQCDTEGLVSKRHVFSTGRVQGGRPFSRGQIYHILRNPTYLGRIRHKDKSFPGQHTAIIEKRQWDRVQDKLAAAAIRPRGGTTSETFTSATPVAPLLGKLRDETGDILTPSHTQKGNQRHYYYVSNRLISGKPDPTGWRLPARALEKAVTNTIADHLRTAAQRHQIVISSDALMSSAAADAMQGLVEEINARGAKALSTILKSGTISGEQLQLHLSPSYLSKILNLPTEELDKNLYKIDVPFAIRRRGVEMKILAGETTPAPDATLIRALRNAHDWVAQMKTGTSIKQIARTTTISESYITRIVLMAFLSPRIQQAILSGSQPAELTLETIARCKLPMDWQAQERLFGFIQTA

SEQ ID NO: 5960 - protein, 588 aa, unidentified
  source 1..588: note = uncultivated organism
MASNMLSGATAASAIHPAPSLACAIYTRKSSEEGLEQDFNSLHAQREACEAFVLSQKSLGWALLSDGYDDGGFSGGNVERPALKRLIADIQAGRIKVVVVYKVDRLTRSLADFAKLVDLFDTMGVSFVSVTQQFNTTTSMGRLPWNVLLSFAQFEREVTGERIRDKLGASKRKGMWMGGVVPVGYCAMGRTLTPEPIHADRIPEIYRLYLQLNCISRLSKEIHALGWRTPERPNKREGFGGHKAFSRGHLRNILSNPIYAGLIRHKPEHYRGQHPALVSMDLWIQVQERIESNRQSHKLQSLVKNPSLLVGKLFDEIGRRLVPTKPTRRKRRSRYYNTKVDDPGESIRLPASDIEQKVIAAIVNWAAAPHQVLNAMGWADAQNADHVLKQAQRLQLALQRIALGQPFTSPPSAQQALDINYLRSFVSRVEVAPACMRITLDLVGCGLQTEGAQPEQSIIEIPLQRKRSGMAVRLVIGNEAPENHLLHRSDPGVVELMTRGRAWMKLLTSCGQSIEAIAQQEGFSARYVSRVINVALLAPDIVRGLERGEHPTDVNVTQLITSVPFPLCWATQRKQLGVRHPEGAASCG

SEQ ID NO: 5961 - protein, 505 aa, unidentified
  source 1..505: note = uncultivated organism
MGQLRLPDVHLPDRLVARLQALGEREGTAAVMYVRISQDREGAGLGVERQLDDLCDLFERLGFSLAGVYADNDLSAYSGKPRPDYQQMLADLSAGHAKAVTAWHTDRLHRSPVELEKYIAVCDPRGVVTYTVKAGHLDLATPSGRMIARQLGAVARFESEHKADRIRAARLQAARAGRWQGGARPFGFEADGETIRPDEAAEILAASEAIVAGASLRSVVRAVNERGFRTTFGRKEWKTISFKDVLLRPRNAGLAVYRGEIVGSAVWDPIVPEDTWRALVSVLTDADRRTASSNRVRWLGSGLYVCGVCELPDLRVSTAGGGEQKPAYRCRARNRRDVKDGPHVVRAAAPLDAFVEHLIVERLSRPDAVELLRAPEAAVDTAELSAEAVSLRRRLDDLDDDLDDGRITRARWQRRNDRMRDRLAEIDREIEVAARVDPLAGVVGVEDVSVLWFGTKPDRSDGLELGRRRAVLGSLVEITVLRTTRGRRVGGASFDPDAVRVDWLR

SEQ ID NO: 5962 - protein, 572 aa, unidentified
  source 1..572: note = uncultivated organism
MKQESVKWYVIYSRKSKFTGKGESIENQIELCRQYIASHYGAEQAENVLVYEDEGFSGGNLERPEFKRMMKNSHEMQFAAIVVYRLDRISRNIGDFAKLIEDLGERQIDFISIREQFDTSSPMGRAMMYIASVFSQLERETIAERIRDNMHELAKTGRWLGGTTPTGYQSVGVSKVTMDGKARKTFQLEPIEEEIRLVQLIYDKFLETGSLTKVDQFLLEHQYITKRGKQFTRFTIKAILSNPVYMIADEEAYNYLTENHVDLFADQNDFDGKCGIMAYNRTLQRVGKANQTRPMEEWVVSVGKHPGIISGSQWVQVQFMLEENRSKHYRHPRSNVALLSGLLVCGKCGDYMRPKMTNRVAADGEPLYNYMCTTKERSRRKCCDRKNVNGNRLDAKLIGEIKKLADDKELFAQCLYQTRKSIGENRNDYDAEMDALKQKINENENSINALVNILSKSAGSAAEQYILEEIETFHKSHEAMQERYAELEKLTTQHRFANQEFEFYQQMIESFAESVDQSTVEEKRRFLKRIIRKIVWDGENATVYLFAHDGEDVLPEFEPTEENEVPLSENGK

SEQ ID NO: 5963 - protein, 503 aa, unidentified
  source 1..503: note = uncultivated organism
MKVLGAVRLSRHTDESTSVSRQREQIRTWASLYGHDVVAIAEDLDTSGKTAAAERASLGPWLRDPVLVTRWDILVCAKVDRISRNVRDFCDLIAFCQAQKKFVVSIAESFDLSKPEGRMVAQIMASVAEFERERTGERRREAAGALRQEARFGGGRVPYGFAAVQIPGGSGWLLEPDPVTALVVRDLASRMITGSSANSLCAELNEKGIRSPAGGRWHAQNLIRIMRSASLKGLVVTAKGEIVRDDEGMPVRRQPVLDDNTWARLQQELDSASHPVSGHRSDAALLLRVAFCGACSSPMYAQRGRRQGRDYEYYVDSGRKHGCQARAVRMALLEDLVETALLHELGELPRLEKLSLPGDEDRSGEIREREEFLAEIDADYADGKISGERHHALAAIQESRIAALRALPSCPATTGWVETGELFGEHWAGLDKAGKHNLLLEYRVRADVYRDAGETRDGMREVPSARDGGTIVRQNILAVRGDVAAIVRLGDLVVLRERATRIS

SEQ ID NO: 5964 - protein, 602 aa, unidentified
  source 1..602: note = uncultivated organism
MEKRVAGIYIRVSTDDQAREGFSLGEQEEKLRQLCQYKDFEIYRVYCDAGVSAKDMKHRPEFQSMLNDMHQGRINYIVAYKLDRVTRSVRDLEELITDLEKHHCYLVCDRDDVNTSTANGRFFVRMLTVLSQLEIEIVSERTKFGLNGAIKSGHLPGKAPLGYKKENKKTVIDPLTAPIIKRVFDLYIQGKSYQQISNIFNEEKVLNKTWYDTHIENIINNKIYMGDYVQYSFIHKKIGKEPITYMDVVDPIVPRYIWEECQNQKEKNQRTYTRDRVYTFFQKILCPECGKIMKCKGAGGKKKNYIYYNCEHCRINVREDYIEKAFEETIVELIKFDNEYNDYYLPLFADKREKQNKDDLKKEINNLNKQKERIKKAYMSGTIELEDFDDELKDINNKLNILNTDLKDKEDIKVYSPESVMVQRDINRLYMFDNISNNWFLHEWNLKTKEERQNFISKYVESVTYVKDPEAIHKVRLTDIKLKSIYKEKINTLSKLGITDVQVKLNIDGEDKIVYLGYPLKDKEIKKYMDELNKYRTTNFHMLNNLNYTLDNLPQELNIMLPKEEQIYKLIPIIKDIDNLSNINNEFKLGVITTNIKTVSPN

SEQ ID NO: 5965 - protein, 560 aa, unidentified
  source 1..560: note = uncultivated organism
MEDLKSKFTGKGESIANQIELCKQSIYSTFPSITEEDILIFEDEGFSGGNTNRPQFQEMLKLCRKKQIQCIVCYRLDRISRNVGDYANLINELNNLNVSFVSVTEKFDTTTNMGRAMMCMASVFAQLERETMAERIRDNMIELAKDGRWLGGNPPTGYKSVETIGSITIDGRKRKARMLEIVPEEAELIKLIFSKFLEYRSLTKTETYLIQNDYVTKTGKAFSRFAIKAILTNPVYMIADETAWDYFDLKEIDIFADRSSFNGTHGIMSYNKTSQQVGRSNEIRDMKEWIIAVGRHIGLICGKDWVEAQKLLEQNKSKSYRKPRSNVALLSGLLYCDDCGSFMRPKLSQRVNQNGELIYDYLCELKEKSKRQKCNSKRINGNELDKLVCEEIKKLTSDKSEFMQALKKEQRQLNINDSSRHDNLKNLRKNKADTETKIKNLLQTLAKTEGTSAQDYILNEINELDIKIKSLDKQIQEYEDLATTSSMSDIEFENLADMLCSFADSFDTMPIEQKRLALRAFIKKIIWDGDKVHIYFFGCEEDDIDLSDEENSEPQGKGCK

SEQ ID NO: 5966 - protein, 518 aa, unidentified
  source 1..518: note = uncultivated organism
MSKQPSTRPRTIRCAIYTRKSTEEGLDQQYNSLDAQRDAGEAYVRSQTNEGWELVHDRYDDGGFSGGNIERPALKRLMEDIQAGKIDCVVVYKVDRLSRSLLDFARVMETFDKYSVSFVSVTQHFNTTHSMGRLTLNILLSFAQFEREIIGERIRDKLAAQCRRGQWTGGYPVLGYDVDRSERTPKLVINPEEATKVRRIFSLYLELKNLLPVVEELDKRGWNNKLWQSKKGLPKGGRQFDKCSVHALLTNPIYSGKIKHKTDLYQGQHQAIVDEEIFERVQAQRRENGFNRGNRIPSKHGGLLKGLIRCPNCNVAMVHNMTKRNSIVYRYYTCVRAIKRGRLACKHPSLPAGEIEAAVVDQVRDISRDAGLRDEIIRQAMVATQQGRKEIEAHQIQLGRQLTRDHGEIRQLALDERPDSQVSHRIADIQERIEKAEVELAKVNRRLVDLEKHEMSTQEIEDALVDFDRIWDALTTREQSQLLALLVSKVEFDQSDCTIAITFHASGIETLDQQSQEV

SEQ ID NO: 5967 - protein, 565 aa, unidentified
  source 1..565: note = uncultivated organism
MSQISQIKKIYHAAIYVRLSKEDGAVASHEKTESNSIANQKSLIRDFLENKNDIEVVQEYVDDGFSGSNFERPAFQMMLEDIKKGKIDCVVTKDLSRFGREYIDSGMYIERLFPAMGVRFIAINDGIDSGEAKSQSDEIIIPFKNLINDAYCRDISIKIRSHLEIKRKQGDVITAFVPYGYKKNDKDKHKLEIDVYAANVVKDIFRMKLHGKSQDAIACELNSSGILPPAEYKASTGSNYQTCFKTKEKSEWTSVMVRRILTNEVYIGNLVQGKQTTPNHKVKKTIIKEKCEWIRVEKNHEPVITDRDFEVVQRLLAMDTRTSPDREEVYPLSGVVTCGGCGIPMVRKTSKVGGKTYAYYLCATHKDSKQCSSHRISTDKLEEVVLELLQTHIDNMIDLKRILSFIGNVPFQQLDMKKLEERREKKQAEVDRCADLRGMLYEDMKDGIISKEDYKELHTAYEQRKKSAEIAIHQIELEMEDVLNRKSKGFVWLDYFTEHKNIEKLTREVVVSLIREIKVFDKTHIEVVFDFDDCYKECLNVIASQGHSVEVDSTGKLNIRLKEAV

SEQ ID NO: 5968 - protein, 562 aa, unidentified
  source 1..562: note = uncultivated organism
MARKSRKNVQVTPAVVVGPVQYKVALYARISVENEQKREADTIGNQIALLKDFVSQHQDLVVFDLYCDDDISGVSFVRPEFARMMNDIRAGKVTCVIVKDLSRLGRNMIESGEYIEQIFPRMGVRFISVTDRFDSLRDDADISIQLKNFANEAYARDISKKIRAVKRTQQLAGKWTTGTPPYGYMLDPDDKYHLFPDPQTGPIVLAIFRMVAENHTLHFIAKTLNEQGVPSPGRYLYDIGLRKTEKFKNAIWYLQTIKKILVDPVYLGWIVSGKYRSQLCERGTKTTVKTPEEEWIINKGMHEPIVSKELFDKVQDILSARQSEQGLATIYDSKSKRRSMFKGILRCGECGRSMYLRSKSNRGYYYYCTLHENYNATICPKKAVKQEDVESLALRLIQTQIRAFSDAQRLIANLNATPSSQTRYQIYETQIDDAKRNIEKFNQLKAALYGDFADGLLSHQDYTDLSEDYSRRADDLRIFIAELEKEKEKYSVGFGSKMQWALLIEKYKDQESLDAEMAAAFIETLTLFNDGHVEVAFRHRDEIEQVLYVAATRGKEAERYAG

SEQ ID NO: 5969 - protein, 519 aa, unidentified
  source 1..519: note = uncultivated organism
MAANVTYIPPKAANPEALRVAAYCRVSSDSSDQLHSYATQIKAYTEQIGAHANWELVDVYADEGLTGTRMDKREDFQRLLADCRKGKVDRVLCKSISRFARNTRDCLAALRELSALGVTVYFEKENIDTGTLTSELMVSVSGALAQQESISISQNLKIAWRRMMAAGDFVTTNPPFGYELVDGCGLRIKESEADIVRWIFASYLAGISTREIAKSLTERGILTTEGNAVWNPRSVQLILDNEKYKGDTFTLKRYTTNQFPFAVKRNHGEVDQYYIENSHPAIINTDTFERVQKLKERRTRKRQLDKQDSPLRGKMACGVCGTALMRRTTGKGLISWVCRKHDENAADCPVGRIPETEIYAAFVRMYNKIRANADIVLKPALTQLDDLERALQRENPAMLEINRAIAQVAEQSHNISKLQTAGLLDADACAAKLSSIQIKLTQLRRERRRLLEHDDIEDAISRLHQTADTIKSGPEQLDTFDESLFEELVERIIAESQTCIRFRLWGGVELTEEVRRAKR

SEQ ID NO: 5970 - protein, 557 aa, unidentified
  source 1..557: note = uncultivated organism
MEQMQKNTPDIYDAALYLRLSRDDMDDGSEKTESNSIANQRELLRSFIKSQPDIQIFDIYVDDGYSGGNFDRPEFKRMTTDIEAGRVNCVIVKDLSRFGREYIEAGRWIEKTYPALNVRFISVTDQFDSKTADFSEKSFVVPIKNFVNESYCRDISGKVRSHQKIKREKGEFIGAFAPYGYCKDPENKNCLVIDDYAADIVRKIFAWKIEGFSFGAIAEKLNVRHVQSPKEYKIANGENYNAGFQGTDTPKWSAVQIKRILTNEVYIGNMVQGKQERISYKVKKRLDKPESEWVRVKNTHPAIINQSDFDVVQKLLQYDGRASKTSDSASFFAGFIFCGDCGVPMIRRVNRYKGKEKAFYICQTKNKGGDCTRHSIPEEVLKKIVLKEIQMYTALFVDYEMIMEELQQMEVSYDQVISYDTQIAKLQEEYNKCYSIKVSLADDLKSEMITKEEFDEFRESYGKKCEELDQMIEHQKKLVKQMFEGGVSAKVQLEDWKKSLEIKELDRTLLALTVDKIYIYENKQIKIRIRYQDVIEKMKVIKRFYTEHQAEYRKEVG

SEQ ID NO: 5971 - protein, 573 aa, unidentified
  source 1..573: note = uncultivated organism
MTTTVQHGPAAAKRAALYLRVSTGRQAEQDLSIPDQRRQAQAYCQTRGYIAAAEFVEAGASATDDRRPEFQKMMDAAAAKPPTFDTIIVHSFSRFFRDQFQLEFYVRRLAKNGVRLVSITQDLGEDPMSVMMRQIMALFDEYQSKENAKHTLRAMRENARQGFWNGSRPPFGYRVVAAEQRGARTKKKLEVDPVQAEHVRLMFRLVRIGDGERGPLGANLIADHLNQRGIRTSGGGRWGVGAVHQILTRTTYVGEHRFNVYSWRKREEKPEDEIVTVAVPAILEREEFDEAQAIMRSRSPQLKAPRFVSSGTTLGGICFCADCGGAMTLRTGGKGEGYRYYTCCTKARQGETGCKGRTIPTDRLDAIVIEHIENRLLAPDRVVELLSGVLERRTKQADDYRESIARLRRQAADADAKLTRLYDAIENGLADTGDENLKGRLKELRAVRDAARSDADRAEARAGDRSSDITEDAIRRFAGEAKRRMRTADGGYRRHHLQALAQRIEVGEETIRITGTRSKLLRVLAGGEAGPPHLGAGHSSRSASLVVETTANEVRTFVPNWLPELDSNQRPLD

SEQ ID NO: 5972 - protein, 539 aa, unidentified
  source 1..539: note = uncultivated organism
MPKVNCAVYTRKSNERGLDSEFSSLQNQEDACKAYILSQAFNGWEYYKTFEDGGISGGTMDRPGLQALLEEIRAHRIQVVVVYKVDRLSRSIFDFHKMMQEFSKYECNFVSITQSFDTSNSMGKLTLNMLLSFAQFEREVSAERVRDKLAATKAKGMWVGGVPSIGYDLKDKQLVPNEQEAEEVRLIFQKYLELGNIMTVAEWMNAQGYRSKRWKTKKGEERGGKPFSHSSILKILSNPLYVGKMPHFTAKKVYPGKQPALISQEMFEDVQAKVGNYKNGLREYRAYIREQTLMADKLFDDKKNPYKLTSTTKNGQKFQYYFIRKGVHIPVIQLDGFVLDTIRRADLSSVDLQADSSQISSDEAKKCLEQVICVKKGTNCRLQIALDKRVFLDICHNRQKKTEKPSNPVLLEVGAETIILRDTFYIDNVTSTRLQHGTSQNILTVRQLNESLVRGLARAWKLKKLLEKGLKTREWEKASGMNKRNFARYIHLCYLSPHIVADILEYKNPRNLTLRELMNIAEGNVDFKIQEQHWQSAEL

SEQ ID NO: 5973 - protein, 532 aa, unidentified
  source 1..532: note = uncultivated organism
MAALYLRLSRDDEGEEESASIKNQRKLLRAYCAEQGYFVYGEYVDDGYSGTSFDRPAFRRMIADIEAGLVNLVITKDLSRLGRDYITAGEYTERFFPEHGVRYIALNDGYDSDSPYTDIAPFKNIINEMYARDASKKIRSAFETKMREGSYIGNFAPYGYEKDPLNRNRLVVDYEAAPVVQEIFRRLRGGERLSEVARDLNRRGVESPIVYRCRKHGLDAGKYSGRGEWTSQSIYKMVRNMVYLGHTAQGKTTKVSFKSDKMIRNGQEDWYTVRGTHEPLIDKETFEIVTRQSCRRRCEHRTDFQNIFSGVARCADCGRNMSTTGSRSRDERYNLVCGQYKLRGSGACSNHFIGYNVLYHAVLEDIRRQIRLSREDREAITAALAEPEQQGGPDAERRTRAAAELQRRHAEIDRLLMKLYEDNADGKISDDRYAKMTAAYESEQAELAGKLEAVERSAPEKRPGGGDRRERLYALLDGVTEVRELTRELVFKLIDHIEVEQGCFEETEHGREKRQTIRIFYRFAGPEEGQAG

SEQ ID NO: 5974 - protein, 520 aa, unidentified
  source 1..520: note = uncultivated organism
MAAKTNSPTPIIRCAIYTRKSTEEGLDQQFNSLDAQRESSEAFIRSQQHEGWRINAERYDDGGYSGGNTERPAFKRLMEDIVAGKIDCVVVYKVDRLSRSLLDFSGVMGTFDKYGVSFVSVTQQFNTTHSMGRLTLNILLSFAQFEREIIGERIRDKIEANCKRGQWTGGYPVLGYDVDRSERTPKLIINAEEAVKVRRLFTMYLDLKALVPVCDELDKLGWKNKVWTTKKGTAKGGREFDAGSLHSLLTQRLYVGQIKHKTEIYAGQHDAIVDEHIFEQVQTQLRANSNNRGNRLPSKSGGLLKGLLRCPDCNVAMVHNVTRKKSLVYRYYTCIRAIKRGRASCKHPSLPAAEIESAVIQQIRCIAGDDGLRDEIVRQAAEAVCLQTAEFETQRHQLTRQLTREHEEVRRLATSNAYSTTTTARLAELHERIERGERQLRLANEQITEIETQSLTPRDVADAFDDFDRVWKALTTREQAELLGLLVAKVEFDQSDCTISISLHASGIASLETLQTEEVA

SEQ ID NO: 5975 - protein, 504 aa, unidentified
  source 1..504: note = uncultivated organism
MEAIYARQSLDKKDSLSIETQIELCKLESTGDVKVYIDRGFSGKNTNRPQFTKMMEDIERGLVDKVIVYKLDRLSRSLLDFAAMIDTFKRHDVAFLSTREKFDTGTPIGNAMLSILMVFAQLERETIQLRVQDSYHARSQRGAYDAAAPYGYQKAKAMVQGKHISTLEIEPESSAIVQAAFQAYAFTDESLGSIAKGLNHRGIPSPNGTEWDSGKLSRIMANPLYVKADADIYRFYESAGMKITNPIDDFLGERGCVTYGAWDRSRRKFSQWDKLTLSLGLHPGMIEPAVFLRCQQKLMHNVQLGNEGKGKHTWLTGLMKCGYCGHAMRVVASGRCIPRVSCSGKTNYGTCEEYVKRWLVADLEAVVEAELFRAVRQKQTLKAKIQQEEDALEKRRKVQIAKVEQQIQNLLDGLAEAKGITVQYLNERINALEGERRSLLQEQQQAKAANMGEENMRQLGDVLTLWEQMNLEQKRETAKLLIERIQIYNDKVKILWKYNFMEQA

SEQ ID NO: 5976 - protein, 521 aa, unidentified
  source 1..521: note = uncultivated organism
MMKKNKPNPTAPSTPRIRCAIYTRKSTEEGLEQEYNSLDAQRDAGEAYIRSQHHEGWVCLPDRYDDGGFTGANMDRPGLRRLLEDIDNGRVDCVVVYKVDRLSRSLLDFARIMEAFEKRNIAFVSVTQAFNTGSSMGRLILNVLLSFAQFEREMISERTRDKIAAARRKGKWAGGRPVLGYNVVDTKLVVDPVEAERVREIFQLYIEQQSLLKVATELNRRGWCTKQWITGNGRVFGGYAFTKTSLHYVIRNVVYVGKLRYKTEIHKGEHEGIVPQDVFDKAQAILAKNLVGGSYRHRNKHNALLRDKLRCAACDAKMGHSFSTSGNRLYRYYVCRRAVKHGWKECPSPSIPAGDVERFVASQLKAIVEDPGVVRDTLAQVRSKLDETIQRLTGERVALERQMRVEFADQGRLALAGGSRLAESHDRIRLAEARLAEIGKETVALRSAATKDSEMIKLLREFDGAWDALKPREQARLIELLVDQVSYDGHLGKLSITYRVSGIGPLERNTINHQETEHAHD

SEQ ID NO: 5977 - protein, 530 aa, unidentified
  source 1..530: note = uncultivated organism
MLNIAIYSRKSIFTEKGNSIENQINLCKTYCSTYLDKKSEINYLIYEDEGFSGKNTNRPEFKHLINDIKHNKIHILICYRLDRISRNVADFSSTLELLQKYGVDFISIKERFDTSTPLGRAMIYMASVFAQLERETIAERVRDNMIKLAESGRWLGGNTPYGFNIKRQSYITSDFKEKTLSILTPNDSELKVVKLIYSYYIKKRSIRAVEKYLNSNSIIGKKGGHIDITIIRRILRNPLYVISDSTSHKYLESIGFNVFGIPNGNGYITYNKITSISNTTNCIAAVSNHTGIIPSYEWLNVQSQLDINKSKTPRTGTGKNHSLFSGILKCKKCGSNMVIKFSGYNNNNIPYEYYVCSGKQNKFKAKCTTRNIRVAKLDSIILEKLNLYNKAIILNALKTSLDNFNTNFENQHIINIKSKIKENESLMSNLIKQLSKSTSEFVSNKIMKEINSIDNIIQNLNNELSSLKSSKSLSNTIDHATIKQISNSFSNLNATLNYIEDISQKRLLIHTLIKCVIWDSDNNTVEIILH

SEQ ID NO: 5978 - protein, 551 aa, unidentified
  source 1..551: note = uncultivated organism
MQEAEIYHAAVYARLSKEDERAGDSVSIESQVTMLTKYICDNGWKHTATYKDDGYSGTSFDRPAFLEMMSRVRKGEINLVVVKDLSRFGRDYLEVGQYIDVIFPALGCRFIAVNDNVDTIRNSNDMMAIFKNVMNDFYARDTSAKIRAVRKSSCRSGRYMGAFAPYGYVKDPADKHRFLIDEPAAEVVRWIFTLRAGGIGCPKIAKELNEKGILPPRSYYFDAKGQANPYERTNHRWNDCTVRRILENEAYLGHTVQHKEERMSYKDHRTKAVSPEEWIRVENTHEPIISRELWEECRMVDRLNSRPRQSKMKEVSLFSGLLYCADCGFAMRCQVTERKRKDGTKAHYESYMCGSYSRSGHTACTTHYIPRSVLEELVFSDIHTRAMEVSLKEEEVIRRITEQKLAQDRQGNAAMEKSAKVLKKRLAELERLVRSAYEDKVLGKIPEDICVRLMTGYQAEQGEKRAQLESVEKKLEESRKVQENVREWAALICSYRDADILDRDMLLKLVNRIEVSEACMVDGEKEREIRIHYRFVGYIGECYASAVSRTG

SEQ ID NO: 5979 - protein, 543 aa, unidentified
  source 1..543: note = uncultivated organism
MKKVTTIAAKTREEIQGRPQEARLRVCAYCRVSSNSNEQMESFETQVNYYTKYINSRPEWEFANVYADGGISGTGREQRTEFNKLLKDCEHGKIDLIITKSISRFARNTADCLEVVRFLKSLGVAVYFERENINTMDAESELILSVLSSIAQEESRSISENIRWSVQKRFRQGKVRVTTSRFLGYDSDEKGELVINPAEAEIVKRIFREYIAGNSIREIKKGLEGDGVKTATGLAKWPEATLRGILTNEKYYGDALLQKTYTPDYLTHKKKRNKGEVPLYHVKANHEPIISKEEFEQVQKLMAERAAEYGNLPEYREKYARQYAFSGRIICGSCGAVFKRRTWNTKLRSKQIVWQCSTYIKEGKAQCSMKALDDITLKKVFLRVFNRLYRNKEAILKPFMENVQKALLDGLKSESAKTIDARLEDITGQMKQLIRQQIKEDVDPTVFQNEYRKLKAQLDKLREERNKIGLMDDKHEEILKRTEKIYDYLQDMEDMLTEFDDDIFGAMVEHILVISPTHLKFELKNGLVLEEKFIKKKGIHGLQ

SEQ ID NO: 5980 - protein, 522 aa, unidentified
  source 1..522: note = uncultivated organism
MSAAVVAQAMMGLFAAVYIRVSSLAQVDGTSLETQETACVELARSMGYQVRPEHIFLETLTAAFVERPELSRLRRLVASRQVSALVVYTSDRLARDPLDLLNLLAEMGQHGVTVYFVQEDYEDSPEGQVIAFFRGYAGQRERLMFLERSLRGKMKKARNGKMPTRGAKALYGYDYDEQEDRRVVNEEEAAVVRRAFVLRQSMSTFAICCLFNEEGIPTKTGGKWTGTTLGRMLENRDYLGESFYNKTSTVRFADGSRKTTENDPSEWVPLGDYTPQIVSRELFEAVQKKLRDSSTRGNRNASEPHYLLTSFVECGDCGASVCGNGGDSKHRYYRCNQSYAKENKPKLCDAGGINVDRLNGEVWDCVVAALQCPDGIIADLLSNVGTGGGDVGDEKKRVEAELKRLDAEEVEIAALDVQRVYRREVLHGRMAKLNLRRDELQLKLKELNEQERLVEEASEIEGRIRAYCERLREGLDELDFNGKRQVLAALGVRVYATKAEWWMTGVIDPGFLVNEPASTCRR

SEQ ID NO: 5981 - protein, 550 aa, unidentified
  source 1..550: note = uncultivated organism
METTNATEYFAAAYVRLSKEDLDRSSGAKVESNSISNQKQLILDFVKDKADIKIVSIREDDGYTGTDYDRPDFQRMMDDIRAGIVNCVIVKDLSRFGREYINAGKYIDRLFPYYGVRLISINDGIDTISRSSSEDFGIMLKNLMNDNYCRDISIKIRSQLQVKRKNGEFIGPFAPYGYEKSEEDKNKLVIDAYAADVVRDIFNWKLEGFNQDTIAKRLNEQGVLSPMEYKKSKGISYQSAFKTKPQALWSAVSIRRILTNPVYVGTLVQGVRTRPNYKIKTVIVNEVDKWIIVENAHAPIIEAKNFLLVQKLLALDTRTSPNEERLFPLAGLVYCKDCGGPMIRRTQLDGRKKFYYYTCGENKKSGNCSSHRISVGQLETAVQKLLQEHIRMLVELDSCLQAIKHAPTQKLSIRKTEDRMTAVEAEIDRYRRLKTSAYEDLKEGILSKDDFLDIRNQYDARISDAMLALEQVRREMDLYLQNGTASGLWIQEFLEHRNIQSLTRLAAVECIERIDVCEDKRIEVTFTHMQDYQTLISQVQMYAMEEKGAS

SEQ ID NO: 5982 - protein, 586 aa, unidentified
  source 1..586: note = uncultivated organism
MQGVLTPACHVARRRCAIYTRKSSEHGLQQDFNSLKAQHAVCSAYIESQQHRGWTEIENTYEDAAESGATLQRPAMVELLADIESGRIDVIVVYKLDRLSRSLLDFVQLIDVFERYGVSFVCITQNFDTGDSLGRLVMNVLLTFAQFEREMTGDRIRDKKRAMAIRGLWPGGRAPLGYDLVEHHLVVNRVEAVIVGRIFDLYLEHQTLSGVARFCAEEGCRSKINRSRSGSPTGGVLLKIGSVRNILMNPLYAGYLLSAGKISAGVHESIISKETWERVTDIRARQIAERSKNAPNELLAGFIFDCFGRSMTANRLVKRGKLHVHYRSNQNAWGVRHRVKRMRVSAAQADAIAVSAIQNILDGRHELRSLLTDLGRTAAELRRACDKAAIASRRLEGVSRDQLKSIIQSIVSRVEISRERIKLVIRPLELEQLFDWDFVGLFRRRTEDTDRCRAHVIDIPCAGTIRLERLLRLPIAVRDKPAKATNKGLRKLISDARVAWELVEANRTLSPAELASRCSMTLSRFMRVLRVNYLAPDILTSIMDGTQPAELTRRTVIDANLPLDWTLQRKLFGFPEQPPLRSTENY

SEQ ID NO: 5983 - protein, 530 aa, unidentified
  source 1..530: note = uncultivated organism
MPVIKCAVYVRKSTEHGLEQEFNSLLNQDESCKAYIASQAFNNWEYVRTYTDAAISGGTMERPALKQMLEDISKGLINTVVVYKVDRLSRSILDFHNMMKYFDKYNCNFVSITQAFDTSTSMGKLTLNMLLSFAQFEREVASERVRDKIRASKAKGLWMGGNPPLGYDTKDKKLVVNEAEAQQVKQLFEKYLELQSVKRLVQYAEAQGIYSKKWISKKGNQKGGNKISLMGMHRLLRDMTYIGQIAHKKANTFAKGEQDAIISKDLFNQVQQALKNNSNNKTESHRSPNLLSGKLFNSQGERFINQVKTNKNHTKIHYYAQKGLFIPAAPVDEVVSNTISEFLNADLSHLPSDSASALKSVNWAALSGIQKRDFIQAIVDKAIFSNKQLIIYLDISPNSVRPFITDVYVNQSSLPMEFITNEYSVTITVPVVFRRYTNTKFSKAKSSLLTITENNNLIVKAFATAWRYKELYEQGMGPDNIRKQERISPRTLFNYLSLAYMNPNKINAILSGKSKLNITEIFNTAFANQL

SEQ ID NO: 5984 - protein, 616 aa, unidentified
  source 1..616: note = uncultivated organism
MSVNYGKYFDPADKRKIAIYSRKSKFTGKGDSIGNQKEECLAECRYRAASVGVTLSDDDFLVFEDEGFSGKSMNRPGFLEMQREYRNNNIKVIVCYRLDRISRNVGEFAGLIDELEKLNVGFISKSDGFDTVTPAGRTMMFMVTVFSQFEREIIAERIRDNLMALARTGRWLGGEVPTGYESVEVERIKEDNTTRTLHRLGQVSSQIAIVEKIYQLFMQLDSPVKVEAELQKQDVKTKRGNAFTRYAVRDILKNPVYMAADQEAYQYFQALGANIYADESEFDGTYGVAVYNRTKQEPETKKIFRPITEWVVAVGQHKGCISGEDWTKVQTMLQSKSRKSNSAPKKTTTSDVSLLGGLLVCGECGSFMRHKLTDRMHKLYDEPVYPYVCLTKERTKREGCKCDRVKDGNALDRWVCEDVRKLDEDGSVFVRQMEQAKKQIRGKTEGQEKQIEDLRKQIQQHEKVIARLLRSIGQDQEAETALADEYIRKDIAQLGQQIKDKEQQIAELEAIANSQQLSDNEFDLLRGMLSTFASSFDTMSVPQKRIALGTLINRIIWDGKKAHVIYFGCSGEITELPDLNGADISPSDGEEANTGGLLMKSSCTSATKRKPPRMSP

SEQ ID NO: 5985 - protein, 547 aa, unidentified
  source 1..547: note = uncultivated organism
MKVAIYTRVSTEDQAREGYSIEVQQEYLLDHAKRMGWEVYKIYSDDVSGYVIDRPALNEMLEDAKRKKFELIITYKLDRFSRKLKDLLNIVDELDDYGVAYKSATEPFDTSTSAGKLMFQQLGSFAEFERNRIKERVFPGMIKGVQQGNWQGARYAPYGYYYNREKKLLEVVSEEADIVKLIYTMYLSNRTTGQIAEYLYLKEYKTRSGGKFNSALVCKILKNQIYLGRLVWNQHHYDTKQHTNTRVGYKYVRNEPSKVIIAQGRHQPIICQDDFNSVQTKLRNNRRGVLHRRNVYDYPLTGILYCAKCGYRYQGTSSISNHRLKKRKRWYKCSCMGTYHIRCSNAAVKAEDIEPKVFGIVKKIFMHKDAVQGRIENLVKAHLCLNNEDIRKDLEKLNDLLKANLEKQSKLNDAYMDNLIGPEIYRDKGSLLREEEKKINMEISKCKIKLVEKERSEAYLRTLKLAIDNFDETKERISVVEKKELLKLIFESMHINGGQMVSVRLYHPFQQMYEEVLKECNLLKNQEVVEKIQSKKGVCILEPSVVK

SEQ ID NO: 5986 - protein, 518 aa, unidentified
  source 1..518: note = uncultivated organism
MKKCVIYARYSSEKQNEQSIQGQVDVCTKWIKAQDMAIVDIYHDEAMSGKTDRRPDFQKMIRDAEKGKFDFVVVYKLDRFARNRYDSAIYKAQLKKCGVKVLSAMEQLSDGAESIILESVLEGMAEYYSANLAQNVIRGMHQRAEQGKYLGGNVPLGYVIDKNNNFVLDEKGAATVRKIFEMYVAGKKIKDICTALNSSGHKTSSGSSFGYNSIYSILTNRKYIGWYEYMGVSIENGIDRIVTDELFASAGERLEKNKKAPAKSKSNVNFYLTGKLFCGLCGNPMVGDSGTGKNGTSHYYYSCVEKKRKHNCTKKNVKKEWIEETVVDIVCNQILKDDIMDNIAKEAYRLYEAEKADDSELKNLNAMLKETETVINNIMKAIEQGIITDSTKERLMEAEARKKDILLSIAKAEIKKPDISEEYIRFYLEDIRDKVFSAEDRTEAIIDTFVNAVYLYDDKIILTFNLKDGEGLKKLEFSDLSKFASPSSSMFGFSPERFTITILSELFIFGTAFKIRRD

SEQ ID NO: 5987 - protein, 544 aa, unidentified
  source 1..544: note = uncultivated organism
MNTTKIWNATLYLRLSRDDGDKEESNSITGQRELLRDYLSKHPDIRETTVRVDDGWSGSTFDRPAFQKMIEDVKAGLTDCVIVKDLSRFGRNYLDAGEYIERIFPFLGVRFIAVNDNYDSLGGKKSSDDLIIPFKNLINEAYCRDISVKIRSQLEIKRKKGQYLSAFAAYGYMKDEQDKNRIIVDEFAADIVRDIFQWKLEGISPQDIANALNRLGVLSPMEYKRSLGMKFATPFKTNAKALWSAAAVIRILKNHIYIGTLAQGKNTTPSYKVHKRVTKAEVEWCVIEDNHEAIVPKLLFDSVQRVLQRDTRRSPDAEGEAVSLFSGMVFCGDCGASMVRKTIPSGNKRYVYYVCSANKHDRSVCSAHRIRDNMLEDIVFSSLKVHIQEVVDMSELLAIADTAPLRTAEAQKIQRQLDKKQEEYAKLQKLLTSLYENLVSGIIDRDEYTRLKGSFSSRAAEAEKQMDTLRDSLVNIKERGTENVWMEEFRKHQGITALDRAIVVSLIDKILIHDDNTVELIYRWQDEFCWQLDVLRRAQIREAV

SEQ ID NO: 5988 - protein, 539 aa, unidentified
  source 1..539: note = uncultivated organism
MKVAIYSRKSKFTGKGESVENQVQLCKEYAIKHFNFDEGSFIIYEDEGFSGGNTKRPEFQRLLEDTQKNKFKILICYRLDRISRNISDFSQLINVLNKYNISFISIREQFDTTTPMGRAMMYIASVFAQLERETIAERIRDNMVQLAKTGRWLGGMVPTGYKSEPVVTVDKGGKQHKLYRLATVSGEIDIVKLIYDRYVSLRSITGVEKYLMEHNITTKNGANFHTASIRPILSNPVYAIADQTLYEYLLEKNYNVYSGIDEFNGVNGLIAYNKTIQDKDCKERYRDTGDWIVAVGLHEGIISGEKWIKVQEILKENKSRCYRKVKSTQSLLSGVLICSNCGSFMRPKTVQRENEMGQQVFYYICEMKEKSKRSRCAMDNINGNKLDSLILHELKIIMRQNPPLFDDVSLNVKLFSSDETAAGLEEDTIRKKVHEIDLGIQNLILAISKSTNSEAVEVLTKRMEELTCKKEELQNKLLNLQKNENREYGVHDLHMDIDGLVKFDDYAWELMSIKDKRMMMRSVIEKISWDGVKLIMTLY

SEQ ID NO: 5989 - protein, 519 aa, unidentified
  source 1..519: note = uncultivated organism
MKKVTKIEENRNLQSARPKLRVAAYCRVSTDSDAQLESLEAQKQHYENYITTHNDWTFAGLYFDEGISGTKKEKRPELNKLILDCKDGKIDFIITKSISRFARNTTDCLDMVRTLLDLQIPIFFEKENINTGSMESELFLAILSSMAESESHSISENNKWGIQKRFRDGSFKISYPPYGYDWNGTEMVINPVQAAVVKRIFAETLAGKGSQAVANELNAEAVPTKKGGRWTGTSIRGILINKKYVGDVIFQKTYTDYHFNRHVNYGDKDQYMITDHHEPIISREDFEAVAKMIAQHASEKGIQKGQEKYQNRYCFSGNIICSECGNTFKRRVHTCKEHKYIAWCCNTHLADKDSCSMLYIRDNDLKLAFLTMMNKLIYGHKQILRPLLTHLRNTNRGKSSTREHELQTLLLQNTEQQETLTKLMAQGYIDQVLYNKENNELLILADNYKAEIDSIQKSCNLDSEIITALSKLLRFTEHSEMLTNFDESLFNSHVNKVIVYSRNEIEFKLKCGLTLKERI

SEQ ID NO: 5990 - protein, 689 aa, unidentified
  source 1..689: note = uncultivated organism
MATAVYLRVSTEEQRERQSIATQREFGERYCQLHDLAVHRVYADDGVSGTVALELRPEGSQILKDARLGKFDQLLLYKLDRLGRETRLILNGVAELEKVGVRVRSMTEEFDTGTPTGRLMLTMLSGFASHERDMIRERCVAGTLRVAEAGVWLGGIVPFGYRKVGEARHAQLVISEDAIPGLSMSEAGVIREVFRMAAVERKSCRVIADRLNQLRIPCAYVRDDRLTLRGKRKQRTSGIWRAGRIRGLITNKTYMGVHEFGKRSVSGRPVILRQVTAIVGEEVWLKAQANLKSHLLFSSRNAKNQYLLRGLIKCGICGLTYIGVAAKRPNGRQEFYYRCNGAHSPSVYSKLGRCQSKAVRGDLLEQQVWSEVEAFLRNPEPVLQQLQARLESDSQGADQIRRQVVQLEGLLTQKLTERSRMVSLYRRGRLADADLDAQMDEIGKEEKGLETQLTEMRGKIAGADSIGATISTAQALLEKLRKRLDEPICWDLKRRLIEVLVAGGKVYTVECWGVKQCDITVTYRFSSPDQPIPLVLPQSYNTRSAIGMPTELRTVGDHLRRRRLVRKMLQKQVAEQIGVDTTSIHNWETAVTAPGFEYMPAIIRFLGYNPLPAGNSWGERLLRRRTTLGLSQEASAKRLGVDPSTLARWERGAREPTGALLSRVKGFLDEEEENKAVVPELGTLHLTIS

SEQ ID NO: 5991 - protein, 568 aa, unidentified
  source 1..568: note = uncultivated organism
MISQEQQANVAIYVRVSTTHQIDKDSLPMQRNDLITYAKLMLNTDKYTIFEDAGYSGKNTIRPQFQNMMKRMRENEFTHLLVWKIDRISRNLLDFATMYSELKNLGVVFVSKNEQFDTSTAMGEAMLKIILVFAELERNMTSERVTATMIARANSGLWNGGKIPFGYTYNVNTKEFDLDPKEAPVVKLIHNLYEENHSLLSVARELNGKGYRTRNGNEWSPVSLHIILHNLFYCGDYRYNVLKEGNRQKVKSKSEWVTIENHHKPIVDREQKKRIIAFLDSNAKLRKEQGLPNKARYTHIFSGIAHCEHCGKMYVSSISTANSNGWRYSKYLCPTKRKSKTACVGKSTSDLIIGEFVFNYVLNMLNSQKSKELIASPSQLQKYLLKGDAFCYIKDIEPDGLNDFYASIKTNNDKTMIYGKNSKIIPSKDDVEITKLQSNKKKIVRALDRLQKLYLYDDESMSEADFIIEKHKLVEEMDNIDEKIKILTTDDWQQSISDETLIKKASEFIITQRLSTRKYINYKKLAMSVDAEILRSFVNSIIDSIGVYNGKVQNIIFKNGLSHHFIFK

SEQ ID NO: 5992 - protein, 521 aa, unidentified
  source 1..521: note = uncultivated organism
MLDVRAAIYTRISRDPDSDSWSPDRQEILCRQLAQAKGYEIIDPPFTDRGFSAWNPKAKRPGWEALKESVRRGEVDVVMAYSLTRLGRRVAELLDLSDLLDTHNCDLVVVDMNMDTTSPGGKLIFTMIAALAQMESEQTSVRVKSAQKIKAERGRMHTGGKRQFGYGVEPTADTKEARQLAREAINREEAAVVRAVVSEIIGGKSLRQVAFDLNGAGLHTTAGNEWTGATVRQMVCSPRIAALRVYKGQTLQGDWEPIIDEERWLEVRTVIDARPGSHRGINTRRHLLSGLVQCGVCGVNMGAGAGDPPGRSSFKRYKCGKRPGSKACGGPSASRTSMDMFVTKKFFDFMAGARLRPVGQEGRSVAEIEADIVETEARLSRLARDHYIDGRLPENIFRSTNDELTESLAVLRRSRTTAVEEESLRKVALRPGNREDIEEWWESATLMERREALGRAIYKVVIHPAKVRGGNKFDTSRVEIQWRWDLYVRAGDAEWENMTDEEREQALIEAASEQVIVGAAT

SEQ ID NO: 5993 - protein, 527 aa, unidentified
  source 1..527: note = uncultivated organism
MIKVASYCRVSTDREDQINSFESQQKFFREYIERHPDWELCEVYADEGITGTSTKKRTQFNRMINDAYAGKFKLIITKEVSRFSRNLLDTIAYTRELKSLGIGVIFMNDGFTSLDPDSELRLSIMGSIAQEESRKTSSRVKWGQTRQMERGVVFGTSLLGYDVCDGKLTINPKGAELVRLIFHKYGIEKKGTSIIARELREAGFKTYRDNTVWSSSHIVKILHNEKYVGDLVQKKTITPDYLTHTKKYNRGEEELIIIKNHHEPIVERELWDTVQEELKKRNRKNSTASGHSNRYVFSGKMVCGECGARFVARSKTRKSGSSYMRWGCYTASTLGIKSVDIQGNLIGCDIGKTIRDDLAMEALTKAITSIPVDFGWIIQNLTNIVNAAVSASDDPMEDVQKLEKKIQQTMKKKEAIIEAYVSGDLSKEELQHMKALFDERLNPLKERLQACKKAKKPTSAQIHSDLQKQIQSIVTCRHIAEPLYKALLEKVIMQKDGTFQISIHHIPQVWHFRLQYHNTSREDNSVP

SEQ ID NO: 5994 - protein, 525 aa, unidentified
  source 1..525: note = uncultivated organism
MKKTDKNNSSQITRKRCAVYTRKSTTENLDSSFTSLDAQRESCEAFISSQKLNGWVLVTDHYDDGGFSGGDMDRPAFQQLMLDIADGKIDCVVVYKVDRLSRSLADFIRIVQKFEEYDVGFVSITQSFDTGTSMGRLMLNVLLSFAQFEREIISERTRDKITAAKKKGKWVGGYPILGYDINSDTHSLVVNENEAVQVREIYDLYLKNKSMGITANELQQRKWMTKSWITKSGNVVKGEIFDKSRLHRLLTNIAYIGKVKHHDDIYEGEHQAIVSEEIWNRVQETLAENRRTGGSSARKKHGSLLSEILVCGACGTPMIHSFTRRKNKSYRYYICQTAHKNGRHACPTKNLPAAEIEKFVFERIKEIGKSPELIEATIARVKRDFQKQMDLLNIEIARLQKEIGEMGSESERLKEELPKAEDEKRNGMKKQISEIRRAVSGKRRLLDEKNAALAEVERKSVCEEDVKESLAVFDPVWDVLYPQEQSRVAAMLIEKVVYDEPNDRISVTFHPDGMKNLAQELKAGM

SEQ ID NO: 5995 - protein, 700 aa, unidentified
  source 1..700: note = uncultivated organism
MTDFTKAVAYTRFSVAAHEDQASNSHERQLETARAYIERMGWLYAGSYSDDVSGTKDVADRPALSQLLEDAKSGAFSVVVAARLDRIARSVRLSLNLLHELQELGVAVVSVAEGIDTSTPAGRMARTMMMSFAELDREQIVARTVSGSRSLARKGILPGGSAPLGYAREGNQIVPNPAERDLIWAAAKAVLDGASTGEAAGVLNALGYTSRRSTAPWTHARVRRMLEAPSLKGVVVYGNVKRRHGHNTKLSRDGTPLHGEPITVLLPDPVMDEATWDRLQATLLARGYGKKRDALPYPLSAFSRCHCGEPLAGVASRDRRTYRCRGARWRAPGDNTQRCTQPRLGAIELEAQVWGAIAKQLSSFRLIQRAVKRRMTELGVKDSTGAERELARTRKAIADSESGIGEMVKVMARSGQTADAIEQAITELQADVVALRVREAKLAAAAVPAITTDDTALALLVRFSGALNHKRVPDPKTLERILIATKAEIKLAGPSERGAAPELVIDLDITVDAILELAAALGLDSAELSAGEKAGRKPWKRSRLAWVPLGGGIYSQTSLSADTDEEYQAELKELGAVEFLPDDGVEADQEGDRDDEGDESGGVRPVEPRPGGSGGSGGVRVRVPGGEGDRRARRLTTPDLSHHHAIGSHPQRLAHQVTQTHVPGTLHIGWSGLQVHHVRMLWLQLAGILHDDEALVCTDE

SEQ ID NO: 5996 - protein, 567 aa, unidentified
  source 1..567: note = uncultivated organism
MLRPNNVQVKKRKQSGKNKIWQAALYLRLSREDGDKEESDSVVNQKELLTQFISLEPDVVVYDVYVDDGWSGTNFDRPDFIRMMADIKAGKVNCVIVKDLSRFGRNYIDVGQYIEKIFPLLDIRFISVTDNLDSVKSPHTMNTIMVPFKNLINDEYCRDISNKVRSSLDMKRKQGKHIGSFACYGYKKDPEDHNHLVIDEEAAEVVRDIYRWYISGMSMLSISQKLNAMGVPNPSSYKKMQGLKYKNRYENIGMGKWPDSSVRRILSNQMYIGNLVQGTLKIKSYKVQVAQRQDKEDWIIVENTHEPIISKEDFETVQDLLLRNTRKAPERTTVHLFSGYVTCGDCGRSMARKENHHAYGDYTYYVCKTHTKIDKTACSRHTTRADKLENIVLSSIQTQVALAVDMDDAIRSISTNANASKESLRLEKLLEKAKDEVKEIESMTLDLYPDWKSGVISKEEYLELKKRFEDQKKNSMKKIRDLQDKIDDIERGQSGSNQFIDNFIAYKNIDKLTREIVVALIEMIYIYENNKIKIVFKYQNPFKEAMEYIENNKTLLKEEQAKALLGA

SEQ ID NO: 5997 - protein, 612 aa, unidentified
  source 1..612: note = uncultivated organism
MAKNDDRKIAIYSRKSLFTGKGESVENQISMCKQYIKSMPKYNGNIDDDDIVIYEDENFSGYYTERPQYQAMINDIKSKKIAIIVCYRLDRLSRNVIDFCNLKEILDKYNVDFISINERFDTTTPGGEAMLYMSSVFAQLERNTLAERVRDNMIELSKSGRWLGGSTPLGYKSIKLDKKNINGKKINLYALEIDEKEIELVRIIFTKFLETKSMSKLTAYMLENQFKTRNGVDFSRWSLKAILQNPVYAIADVDVINYFKKNNADVYVDIDDVDGKTGLMSYNKREQNRRAKTTKMKDVSEWIISLGKHEGIISGKRWVEIQEQLEINGHKTFQSTKNNALCSGILKCGVCGGPMYPKIRKDRNYEGELKFEYLCHMKTQSKKSRCNGKNANGNLVDKLVKDTIKSLSHKNSKFYKAIKELATTDLLELNNPNDEIKVLEMSYRKNQAIIETLLDRIKYIDIELLDSIQNEIKEVRKRNEEIEEKLKLLNRCAPNVINDKETAQIILELLEKQVSRFDDLDLVTRRNLLKIFTGSIVIDGDKLIINLIGAKDYSPLDNNEIRQDIKEKENNTIACSISKNDVLCVKPQKNVLLGEGGKIHSFRNTCWVRKRK

SEQ ID NO: 5998 - protein, 557 aa, unidentified
  source 1..557: note = uncultivated organism
MTNTVFAKDTYTELSPSEMRAAVYCRLSKDDGESEGDSSSIQTQRAMLEHYCAQQGWAVVAVYQDDGFTGLNMNRPDMTRMLKAIERRQIDVVVTKDLSRLGRNYIQTGQLIEEFFPKNGVRYIAVNDSVDTDMDSVYDMTPFRAVMNQMYSADVSKKVHSAYVTKARSGQFTGCLAPFGYCKNPDNTSQLIPDEDTAWIVKLIFDYAKEGYGPNYIRRKLEDREIPCPAWWNRKKGLRNKFTKFERENPETGHLIWDFTTIKEILQNPIYIGAIASQKQVYKFKTGWIKDKKPHEWLIVEDMHEPLVSREVFELVQEKAKSRKRPDAFGNYSIFAGLIKCGQCGSTMNIRRANQKGNERIYTCSKYNKYGVKHCSQHRMKYDVLYSIVLEQIRSYAAKALENEDEVISQLAIQSRGDYADERALVEKAIADDTARLAAIEKLIAKLYEDMIADRISAENFNAILAKSQAEQKALRERLQHNQSRVEHERQEHDDTTRWIELIKEYADIQELDTATLQRLIKKIVIHEDLDGDIIRQTVEIHFNLKGQPDKYKLIRE

SEQ ID NO: 5999 - protein, 528 aa, unidentified
  source 1..528: note = uncultivated organism
MRNGNGRRAPATAAPKPSQAIRCAVYTRKSTDEGLEQDFNSLDAQREAGEAFIASQRREGWLLVPERFDDGGFTGGNMERPALKRLLAAIEARQVNCVVVYKVDRLSRSLLDFARMMELFDRCGASFAAVTQNFNTTDSMGRLTLNILLSFAQFEREIISERTRDKMCAARKKGKWIGGHPVLGYDIDASARRLVVNPEEAHQVRRIFDLYLDLGSMLPVLQELDRRGWATKRWTTGSGQTRGGKPFTKSLLYGLLTNAIYTGRVNHKGTLYPGEHEAVIERSTWEQAQDLLDRNGRANGGGTKNKSGALLRGLLFCEPCGAPMVHTYSSKGTKRYRYYVCYRAQQRGWKNCKTKSVSAPTMENAVLEAVRKLGTDPQLAAEVVRQAEAQLARRREQHGKDVGVAETALQRLNVETAKLAGDTAMNPTARLDRLMELQRQIQQAEHRLSQLAVESRELEADQIDEAEALRTLAEFHPVWDELTTHEQVRLIQMLVAKVGYDGQTGKLTVDFRSAGIRELCEGGNQTRS

SEQ ID NO: 6000 - protein, 509 aa, unidentified
  source 1..509: note = uncultivated organism
MSKIERFEAIYARQSVEKEDSVSIETQIDDCKMKCENKDNVRIYQDKGFSGKNTERPDVQRLIHDIQQGIIKKVVVYKLDRISRNITDFYKLYEIMQANDCEFISRTENFDTTNSIGRAMMGILAVFAQMERENTQIRIKDNYQFRIKQGSWASGKAPFGFRNGKIEGVKTLIPVPVEMEIVKWMFSTYAYETNISLGQIQSKLIEKGFKGKQSKQGFSRTTLNHILTNPIYAVADELLYQYYQKKFIEFVNAPDQWDGTFAAAIVGKNGRSLRNENLDGIRIYITNVKGTIDSRTFIMVQERMEQNQQIASDNKPTNNLQELSGFLKCAECGSAIKMQTKPTMSCTGRSQKKICNVSFAGLKLETIQENVAIQIQEYLNNIHENTKQKQERQKKTLSEIAELEKQLNNLVELARLEGVSDYVKRDIEDLTIKIKDKQLKLKLDTAEDVISARLGMNKQFAYTSIFDKDGHVIFNYKDLAVDKKQAILRVLVNRILVHKDGTIDIDWRE

SEQ ID NO: 6001 - protein, 572 aa, unidentified
  source 1..572: note = uncultivated organism
MMRLSFRCAVYTRKSTEDGLEQDFNSLHAQREACEAYIRSQASEGWQLVKEQYDDGGISGATMERPALKQLLSDIAEGKVDIVVVYKIDRLTRSLMDFARMVELFDKNQVSFVSVTQQFNTTTSMGRLTLNVLLSFAQFEREVTAERIRDKIAASKKKGMWMGGPPPLGYDVDNRQLVINEQEAETVRSIYRLYLNCDGVRDLQENLDLQGIRSKLRVYANGKTVGGVSLSRGMLYRLLSNPIYIGLVSHKDKTYEGQHHGIIPQDLWDAVQRKLADNRANRSSRANASHPSLLAGLLFDETGDRLTPTHANNHGKRYRFYISHRLTIQQRQNNNGWRLPAAEVEQTVLSALVETLANPARLVSLAQLTEANTSTIDKCTGNAGRIAGQLQAGAGNSTRNFLQQVIMRIDVRPGSIQLQLCRKRLQSALIGETPSHQTTQATDIVMINLPFHLRRRGVEAKLKLTGEPRSKPSQDETLVQLTRHVHRWLDSLTTGKVSSIDDLAGQEGIPASEVSRTLQLAFLAPDIAKSILQGTQSVDLTAQALKRLGKLPAGWQEQRRLLGMQDLSRSTS

SEQ ID NO: 6002 - protein, 572 aa, unidentified
  source 1..572: note = uncultivated organism
MNTNAPECVAIYSRKSKFTGKGESIENQIEMCRQYIKMHYPEIADDKIETYEDEGYSGKSIQRPQFKKMMEDCHKHKIKMIVCYRFDRVSRNIKDFAELIQELEQLKISFVSIKENFDTTSPMGRAMMFISSVFSQLERETIAERIRDNMHELAKSGRWLGGVPPTGYHSQELVGSITVDGKTRKAYKLNVVKAEAELVKTIFSKFIETNSLTKTETFLRQQHIKTKNNRDFTRFSISNILKNPVYMISDEDAWNYFKNLGVEVYSPKESFDGVHGIMAYSKTIQTSGKTNQIKDMKEWIIAVGKHRGLISGADWVKVQNMLYQNKSKSYHKPKSNVALLSGLLFCGNCGAYMRPKLSGRTNAKGERIYDYLCETKEKTKGQDCKMKRPNGNELDRAVCEHIKALTEDKSHFLKELDKAKKSIMNQQDDFDQKLYNLKKSEKENEKKIQSLVEALSSGGETAASGYITTQINEIHKQNEAIKKQISDMENLTMGQTLTGVEFDILKEMLSNFSSSFDTMNIEQKRLALRSLIQRVVWDGENVHVYLFGASDKSIDLTGSETGSEEPQSDESK

SEQ ID NO: 6003 - protein, 552 aa, unidentified
  source 1..552: note = uncultivated organism
MTPPTEEKTVLHVYVRVSSAAQESKTSIDSQQELGAAKAKELGFAHKIWNEGGQSSSGEDLSNRPVLLSLLEEIEKGNVKQVFVFNTDRLSRNDTTWSLIRLKLVKYDVTLHTSSGAFILANQMDKLLLTMMSEISTYDNYLRAERSRLGKFRRVRQGQWLGGPPPFGFSIEAKKLVPNPNEVKWVRTIFEAYRDRRTPREIKQILLANGVKTRRNNDVWSLGSIEKLLTNTHYGGYYYVKDGKTQEVIRVECSQILPSSLIQEVATAKLGRTRQTRVKESNQQSFFLLREFLFCAQCDSRYSGRIFPSQYKSVYYCPRMERNYVNEKRTTEKKCDNRRYLKIDATDSLVWDTVVEVLAKSHLFKEEIKRQVFGDTKSEALQREHVKELKRKHRKIQLEIKEVTTTLVNIETDRFLKRRNPDELARIIQNVESERQRLEAMRDELSDEVHRLESQTKWVTWVAKFGERIEKMIDFTPNEKQLFLRGVIDKISVSTLDKQRHELSLHFKIPYVNDQLIWKDERYKSKGYTLVEGVSEVSIDIDSSKKSPPLKE

SEQ ID NO: 6004 - protein, 517 aa, unidentified
  source 1..517: note = uncultivated organism
MPQVTRIDPVFGLVGEHKLKVCAYCRVSSNSDDQLNSFAVQVKYYTKYIESHTEWEFVDIFADEGITGTCADKRTEFMRMLQLCKHSKIDLILTKSISRFARNVPECLDYARKLRRQGIGIIFEKEAINTLRMSDELMLSTFSAIAQEESMAISQRLRHMNHERMKRGEYVASLTPYGYTMDADRNLILVEDEAKTVRQIFSAYLSGASIGEIARDLTKAGIPKRRGTNQWNYITVYYILTNEKYIGDTLFQKTYTTDTLPFQGRKNKGEKPQYYAEGTHEPVIKKEDFIAAQTLIKSRSEQFGKRQPKGSYPLTRKLCCSECGSFYVRKTTGTRTAWVCHTHLLDAGACGSKRFSEQTIYESFIRMFNKLRYNNRTILKTALYQLDYVMNRKKHSDTAVIKLNQSIATLLEKKHALEQLRTKGYLTEAVFQKQCREIDNSIQQAKRDRDLLYDDQLEEAYTQAKGVLKITESYESEMMEFDAELFSALVETAEITADGTITFRLPGGFRFSERLQP

SEQ ID NO: 6005 - protein, 526 aa, unidentified
  source 1..526: note = uncultivated organism
MGKVTIIPQKINPITQMAHGVIKKRKVAAYARVSTESEEQATSYEAQVNYYSSYIKEKPNWEYVDVYSDEGITGTNTKRREGFNRMIKDALDGKIDYIITKSISRFARNTLDTIKYVRELKSNGVYVLFEKENLDTSDPKSELILTIMASIAQEESRSISQNVTMGKRWGVQNGKVSFAYASFLGYDKVDGEIVINPEQAEIVRLIYNKYLMEGKTRKAIADYLNENGVPTPSGKGKQWTINNIESILTNEKYKGDALLQKTYIADFLEHKSVKNNGEVAQAYVENNHPAIISREDWELVQAEIKKREGVGAAYSSNTIFSTRIRCEHCGSFYGRKVWHKGSPHEKQVFQCNGKYDKSHSRCKTPHFTEDEIKQKFMLAYNEAMTDKQRIIDDTKEVITLLSDTAEIEKRIADATTEIEIVAGLVEKLVQENASKIQDQDDYETRYQALTERYDKAKDELEKANDELLLKKARQKNLQAIVSKMDELDTVLLEWSDEIWLMLIEEAVAHENGTLTFKFKNGYNITK

SEQ ID NO: 6006 - protein, 553 aa, unidentified
  source 1..553: note = uncultivated organism
MKTVRCAIYTRKSSEEGLEQDFNSLDAQREACAAYILSQASEGWKAVPDLYDDGGLSGGSLERPALRRLLADIKLGRIDIIVVYKVDRLTRSLLDFAKLVEAFDAASVSFVSVTQSFNTTTSMGRLTLNMLLSFAQFEREVTAERIRDKIAASKARGMWMGGLPPLGYRPNGRSLTIVEEHAGLVRQIYRRYLELGTVRLLSDALNNEAVRAPERTTEKGFAYGGGRFSRGQLYSILKNPIYAGKISHKGKVWDGNHPALIEEAVWGRVQEQLAKNTQGHRTVRERSASLLAGKIFDPNNVPLITVHTTKGQQRYRYYVRRPDSATPAGSPEPTPMRIPANELEQVVTKAIARELNDPLTLAGRCGIVIRPEGLAALTSNAAPLSERLAKDRTAVRSLLVRAAVHPAHIDLELSPTGFAELLGLSAPEVPSPSVSLHVPVRLTHARKVGRLIERNGTAAIAKQDPALVRHLLRARQCWQELAKGEIDVTTLAKQVGVNPSYLTRLVRLNFLAPTVVDAILSGVIREEVGSRALIATDAIPASWRLQEERYLPS

SEQ ID NO: 6007 - protein, 560 aa, unidentified
  source 1..560: note = uncultivated organism
MSPAEAPAPRPVRCAIYTRKSTEEGLSQEFNSLDAQRECAQAYILSQRQQGWTVLPEAYDDGGFSGANLARPAVQRLLADIQAGKVDCVVIYKVDRLSRSLFDFARIMQILEKHGVSFVSVTQQLNSNTPMGRLTLHVLLSFAQFEREIVSERTRDKTSAARRKGKWTGGYPVLGYDPDPGCGRLVVNAREAVQIREIFDLFRRDGSVDATLAEVRKRGWQMKSWTTRKGQRHVGQPFDRAALVRLLTNVLYCGEVRHQGKVYPGEQAAILEREIWQQAQSLLRQSKSGQRMRKKPGALLQDLLRCGICGGRMVAGHSTKKQRRYGYYVCGQAQQQGAASCPGQSIPAARIERALLAGLVELAQAGERQPLREALQGWSALEHGARRRRLANVVERIDYDGRRGEVSVCWRAPLEGSPVSIPIRSRAAVRPVVVAQEESEMTTVARLPRITRLLALAVRFEGLLHDGTVRDYAELARLGGVSRARITQIMSLRHLAPVIQERILALPAVWSAAEEGVNERQLRGMAQRCDWREQMQMWEELESGLRESTRGGREKGRSRS

SEQ ID NO: 6008 - protein, 525 aa, unidentified
  source 1..525: note = uncultivated organism
MKRAIVYARVSTERQADEGLSIDSQVQACERKAAELGAVVLHVYRDEGISGTTDARPGFRAAIHRCSAGGVDLMLCWSSSRFARDQHAAITYKRELAAHGVKLVYAHSSVDLETMEGWMLDSFQQVMDEHYSRQVSADTRRSMMKAAGDGYFMGGRVPFGYEAVPAPDGRRRQLQPLEAEAAIVRLIFSQAAEGKGAYLIARDLNGQGLTMRGKAWSKNSVLYLLKNEVYMGRVIYNRFDRKTRQPRPEGAWLRVQAHPPLVSDDGWLQVQDAIAGRVPERGKTTGATQHVFAGMLRCGACGSAMQMTNGTGRGRKLYHYYACRGHKQGQPCTTKAIPADKFDQRMLGDLLDQVLNERVIQSVLDTLDTAAARWVKDRAARRTAMVLELRKAEAARGKLFEVLEAVGKGAPGLEATMQRISELSTQINRLEVSLVAIEDEPEPPVGDARVSAAEAAEIMRATLTGSRDIATLRAFLASVVDHIVIEHAELVVHYNPGCLVQMDGTPVRSKHGWLPDLGSNQGPTD

SEQ ID NO: 6009 - protein, 512 aa, unidentified
  source 1..512: note = uncultivated organism
MTVASSGEALRAALYLRVSTARQAEHDVSIPDQHRQGEGWCAAHGYELIETFVDAGVSATSDRRPEFQRLIEAASEQPAPFDIILVHSFSRFFRDHFELEFHIRKLARNGVKLISITQEVGDDPMQVMMRRVMTLFDEYQSRENGKHTLRAMKENARQGFWNGSLPPIGYRIVEAERRGAKVKKTLAIDPMHADTVRLIYRLALSGDGTTGPMGVKAIVEYLNDRRICTRDGGRWGIGQTHKILTRTSYVGRHRFNMHGKGKTLKPDDEIITVAVPPLIDQATFDAVQAHLRARNPKTLAPRLVKSQNMLTGLLHCAQCGGPMVMRTGKAGRYRYYACQKAGADTSRCTGMAIPMDALDTLIAKHMTARLLDQRRLKVILTQILERRRDRLARDGEDRLDELTRRGEEVRLRLKRLLKAIEMGSLSLDEPALQERLAYLQALQTRTAEEIRSLHAELNCAGTLAISPWLVRRVIKAAEERLLERGHGFRRGYVSVFAKQMAAEAGKVQIVRA

SEQ ID NO: 6010 - protein, 521 aa, unidentified
  source 1..521: note = uncultivated organism
MMIKRDESPSTTRCAVYTRKSTEEGLEQEFNSLDAQRESAEAYIASQKHEGWACLPDRYDDGGFTGGNLERPALKRLLADIEDGKVDCIVVYKVDRLSRSLIDFSKIVEVFERHCVSFVSVTQQFNTSTSMGRLMLNVLLSFAQFEREIISERTRDKIAATRRKGKWTGGMPMLGYDVDVRGGRLNVNEDEAVKVREIFEVYLDRQSLIETAKELDRRGWTTKSWITKKGHERGGKSWGKNSLFNLLTKRIYLGKITYKDEVYEGEHDAIVNEAIFDRTQRVLKRNGRSGGKHVRNRHGALLKGLIRCATCECGMVHSHTTKNGNKLYRYYVCHNAQNRGWHLCPSPSIPAGEMERFVIDQIKDIGRDTDLLADTLEESRRQRETAIGKLDTEKRSLERELKRYSTELRRLASQAGQDGLATDRLADLQDRIRAAEQRATEVREQIIALSRELVDAHEVGEVCSLFDPLWETLTAREQARILHLLIERVDYDGKNGTVSITFHPTGIKTLADEMNREEVDA

SEQ ID NO: 6011 - protein, 520 aa, unidentified
  source 1..520: note = uncultivated organism
MNRVEAIYARQSIEKKDSLSIEQQIERCKKKADNPERCEIYQERKSGKDTIHRDEFNRMMERVRAGRISKIIVYRLDRISRSLADFAKMWEELNTYGVQFVSCTEDFDTSTPMGDAMLKIAMVFAEMERKIIVQRVTDSYFALARKGFFMGGPTPFGFTKVQYLIDGKRTKAFQADPACKDVILQMFTQYATSDVSIGALARQCKEQGIQSARGTFFTSSSIGRILRHPVYVKADERVYAYFKSKGAAIYNPIEDFCGINGCYLYAPQQPYSKEAKKKKSGRKFSNLSNAQVIIAPHEGIVPAGIWLACQDKLDRNRQVPCVQRGRHTWMSGLMKCANCRLGVTVVNNNRGRNYINCYGRKKHQCRGRSYPWRLDEIESAAELQLFHRLHQLKTVSPIEIDLPESQGVSELRTQIIKIEEQMDKIEHEILLATSDSIQARWRQKQAALQMQLDECCAKLAELQSARNIKNQTFHPNVDVNFILHNWQTLELDTKKRIARTLIDFILVGDKREDGVQVFFK

SEQ ID NO: 6012 - protein, 518 aa, unidentified
  source 1..518: note = uncultivated organism
MNITEITTVKEKADTVLRLAAYCRVSSDSKDQLHSFAAQIRYYTDYAKKHPEYQLVDIYADEGLSGTSMKKRDELNRLLRDCKKGKVDRVIVKSVSRFARNTQELLTSLRMLKEIGISVYFEEQGIDTDKLNMEMIVTFPGMAAQQESESISGNMRWSYKKRMESGEFNSCKAAYGFDLVDGKLAINEAEAVVVRRIFDLYLQGHGKQAIANILNEEGIPKKHDEKKWHHTTICYILNNERYMGDALLQKLFTTDTLPYRRVKNRGEKPKYYVENANPPIVSKEIYEAAQELQKARNTEKSVRQESHPLSRIMRCPDCGRAFRRQMVAGKAYWLCSQSSGETSCQSRRIREDMVYDTFTTMVYKLHDNRSALLGTMIHQLELMQSRSGGTRETISEIDRQLADLCAQNLVLARLHTNGVLNASEYASQSGDIGNKITTLRIERKKKLAEDEDDELIDELKTLNDILEEHEPAAEFDESLFGEIVESITVDNNARLTFKLMGGIALAETIIEKGWCKSA

SEQ ID NO: 6013 - protein, 584 aa, unidentified
  source 1..584: note = uncultivated organism
MLTPIDIFLFFVYIRNINIVKPTQEEAKSMAATKDKKEKRVACLYRVSTKGQVDKNDIPLQKNTCREFIANQPNWRLVKEYYEKGVSGYRLSADERDVLQQVKEDALNGLFDVLLVFMFDRLGRRDDETPFIVEWFVKQGIEVWSTQEGQQRFDDHIDKLMNYLRFWQSSGESYKTSVRVDNSHQQMVKRGLYRGGSPPYGYKLINSGIVNKKGKELKTLAIDEEQSKVIHTIFNLVLTKGYGANRITKYLNKHNIPAKNGGKWNTGSVNYILRNPIYKGYISYGKNRLDGDSVKRTKKEDWILSEKPIEELIIIPEEQWDMVQNIRAKRDNNKGKNTIPNTKSPLLLTGYAYCGHCGSPLTTTYNYRKWTNVDGTERVKIIAKYRCSGKALNKTDCDGQTIYAQKKVEDSFHKTLKFFINNLQQIDFEEEIIKRKQELDQGNVKTLKKLQKQNEENYQELSALNAEVAKSIMGKSSFKPELLSQLIEQKEEEIQNINKQIQNLEKKIHDTNQHINSLKKLREFIPVWWDIYNKLTVEEKKMMLSYMLDRVNISRDGIEIKFDVWIGQLLNKIGVYPQIKGESA

SEQ ID NO: 6014 - protein, 568 aa, unidentified
  source 1..568: note = uncultivated organism
MKNAALAPSETPNAQPAQRAALYLRVSTPRQADHDLSIPDQRRQLEGYCLSNGWEVAAEFVEPGVTGTDDRRPAFQEMMDAAMEKPPAFDVVVVHSFSRFFRDQFQFEFYLRKLAKNGVRVVSITQVLGDDPASEMMRKIMTLFDEYQSKETAKHTLRAMNENARQGFWNGARPPIGYRVVEAEQRGTKIKKKLEVDPIHAETVRRIFRLALEGPDGRGPVGVMAIACWLNENNIRTRYGGRWGKGMVHQVLTRTTYIGQHRFNTYDAKKGRRKPETEHAIMEVPPIVTVAEFEAVQRSLKSRSPKMMPPRAVGGSTLLTGICFCACCGAAMTLRTGTSRSGQEYRYYTCATKATKGKTGCPGVSLPMDQLNKAVIEHLETRLLDPARLEVLMDQLIARREEWVTERRQHVAEMERRATEAETKLSRLYEAIENGLVDMGDPSLKGRITELTTIRDQARGNAERAVAHIERISPEITVESLHAFALAAKKKLRHDDGTYARNHVRAVAQRVEVHSKTDVRILGTRTELLRTLTAVSGVEAAVLGTRGFGPKWCREGDSNPHTVTSGGF

SEQ ID NO: 6015 - protein, 521 aa, unidentified
  source 1..521: note = uncultivated organism
MELVAIYVRLSDEDRDKACEFDESESIQNQKNLLIKYATEKGWGIYKIYCDEDYSGLDKDRPEFNQMLKDAEQGKFNIILCKHQSRFSRDIETVEKYLHNKFVEWGIRFVSVVDGVDTLDRHNKKSRQVNALINEWYCEDISESIRAVFRLKQNQGKFIGSFACYGYRKDEKDKNKLVIDEEAAAVVRQIFEWYLQGFGTQKIANLLNERGIPNPTKYKILKGLKYKNYFVKDNLGLWNKTTVKRILKNRMYVGDMVQHKYEKISYKSNKVKNLKSSDWVIVENTHEAIIDKTTFYNVQERLKKGVKSTGEGRAHIFAGKVICKDCKSTMVKVKNGAGNTYLRCKLYAISGKNKLCTSHSIRFDRLERIVEERLKEHFKLLNEEILLERLKKENGLNRRIKVLEREIAKIHQDILDREKAIKNIYLDKVKGLLDETQFMVFNDSFLKEKNELIERKKFLEIQVESIKNEEDRIQLLTERIKKYIGFKSLTHELINELIDYIEIGEKDEQTKEQEIIIHWLF

SEQ ID NO: 6016 - protein, 617 aa, unidentified
  source 1..617: note = uncultivated organism
MSMESTNTVRVAFYARVSGEEQTTGRNIEQQVAELQDSLPRSNCVVGVYKDDGVSGVIPLAERPEGARLMTDAAAGRFELVLATRLDRIGRSVPDLRQVAQRLSNAGVRLQCQTMVFGQDSMGTLFLNALGMIAEFERDLIKDRMLGGKRFKAKANGRWPGGTIPYGYGYDKGEPGKDGRWQIVEFEAEVVRRIYQMCVAENAGASIIADALTREGIPTPSAALTNPDSPRAKPKFRVGRTWERSQIARMLRNPTYSSRLFTAVDGERSDISSSAFVKLLRSGDWRKTGLIELRVPAIVDERLWWAAQDSLDARRKLPNRQHQGTWPLQARVTCASDDRGFKCRRNNKNGPRIYSCAARERRGLRDDARCEAPRLDAERLEAAVVWYVQGMLMTPKVGRAAVEDYLARLQALQDEAGKGLEPVRAGLNAVAEKAKRLENLYVWGHISQEDFQQQYRELAKTRETLEDEERQRQCQIDEFDSRRHDIERIRAAIADDRLGVSFLPSKGQLRVTLFKDDKAESQRKRTPNGVNKALSRPTTLRKGIESFDQATTEARFESPMELRRFFDLFDIKVVVHTHYVEVRGIFPNSIDLSLYEVDEVSSLHSRSASRRHSASSY

SEQ ID NO: 6017 - protein, 619 aa, unidentified
  source 1..619: note = uncultivated organism
MENIEVNEKEEKRVAGIYIRVSTEDQLRHGFSLPQQKENLEALCKYKGYEIYKVYQDAGISAKDMEHRPAFQKMLGDMRKGKINYIVAYKIDRVTRSVRDLEELISELEKYHCYLVCERDDVNTSTANGRFFIRMLTVLSQLEIEIVSERTKFGLEGAIKAGHLPKVPFIGYKRAEDKSVIIDESTRDLVLRIFNMYLEGKSYFQIANILNDEKVLADKKKHWRDGDIERIINNRIFVGDYECYKNDNSKETIIHYDVVESIISRPMWDDVQRQKEINQRAYRRNKVYLFVQKLICPKCCSIMICKGAGGKKEKYKYYHCKKCKIYYNEDQVEKVLMNFILGFIDYDMNVKKYFLPVLEDKELTKDNLKEIEDEIKTYTEQKERLKKALMMGVIEPEDITDEFATIDDKLDILNNKKINIIDVNKQKFSPQKLMADRDFTMESFAHDELFREELDLKWNEKDMLEKQEFLSKFIESVVIDKDKNGELHIQKINFRKSFLNAMSKLVNANAVDISFPIGDDKVGRLTSNEVMTTNEFEDYTKYISEYYNIEIVDVSELNDAYDKEKMLNIIGADNKNKRLLRVIKVKDNDFPIKQKEPQRKAIIAVGQPKKEANYDDLIY

SEQ ID NO: 6018 - protein, 573 aa, unidentified
  source 1..573: note = uncultivated organism
MSKPRDAQPQRRHGLRCAVYTRKSSEEGLEQEFNSLHAQREACEAFIRSQRHEGWACLPQAYDDGGISGATMDRPALQQLLADIRAGKVDVVVTYKIDRLTRSLADFAKITEIFDERSVSFVSVTQQFNTTTSMGRLTLNVLLSFAQFEREVAGERIRDKIAASKKKGMWMGGRPPLGYQVRDHKLIIVPAEADRVRHIFRRYCVVGSVRLLKEELGAQGIVSKQWTSTSGHSRGGKPIARGALYLMLQNRIYCGEIVHKDQHYPGEQEAIIDPQLWDAVQQKLAANAVERSTGGRARNPSLLAGLLFDGEGNRMTPTHAVKNGKRYRYYISHPLMTQTRAGSPAGLRVPAAEIEQLVANRIRQFLSEPDNIFKATEQQGWEAVDQQQLIDGGNRISSSWSTLSPIQIRTLLTTLICRIDLCRDRVDVHIRTERLATVLGRAPPVSGDPNLIITLSVPAQLRRAGKQITMRVERSDAFQAKPNASLIKLIVRAHLFEARLLQSRDGTCAELARRENLNRSYYSRAIRLAYLAPDITRAILDGRQPPGLSAARLVRYSSLPLAWPEQRMTLGFT

SEQ ID NO: 6019 - protein, 564 aa, unidentified
  source 1..564: note = uncultivated organism
MRRQVRCAIYTRKSTEEGLDQEYNTLDAQRDACEAYIRSQASEGWKALPARYDDGGYSGGNTERPALQALLADIRDHRVDVIVVYKIDRLTRSLSDFAKLADLLDDHEVSFVSVTQQFNTTTSMGRLTLNMLLSFAQFEREVTGERIRDKIAASKKKGLWMGGTTPIGYQVQDRRLILVEEDAEIVRSIFRLYVELGTVRQLKQALEERGIVTKTRTLPDGRVTGGQPFTRGHLYQLLSNPVYIGRIPHREESYPGLHTPIIDQATWEAVQKQLGDNRQGHRRRTRAKAPSLLAGILEDDQGHRFTLSHAITKGRRYRYYVEQTKDHDASPRRLPALEIEAAVRREVQGFVISPQRLLDALGPDLSARLVDQVVRRSTELTQFFDDTTRSQWMEAVRALLKRVVLSVDELRIEIAPATLRTLLRLDNADASPQSDPIILATPMEIRCRGNQLKIVIQSGNPADEPKPDMALIKAVARAHAWFERLATGEVRNVLDIAKAEGLTRPYVSRVLGLALLGPELVEAILDGRQPLDLTADSLILGAHLPMEWDEQLASITQNCRAPLA

SEQ ID NO: 6020 - protein, 586 aa, unidentified
  source 1..586: note = uncultivated organism
MKAAIYTRVSTSEQAFFEKRKAADSPKQEEQEKKASLRIQGERCAAYCAAQGWEVAEVYEDAGVSGAKADRPALNRLLADAKEGKFERVVFLKLDRFARNVRHLHNIAHDLKGYGVSIASVRDNFDTGTPSGRFFFTMLGAFAEFERDVITERMTDGRLDAVGEGKFAGGSTPYGYRNDPETKAFMVDEAEAAVVDKVFRLYVEEGLSHERLAARLTAEGVPTRNRRHPKANGGTWNSVVISNMLRNPTYKGQGYYGKTAVEHIEVANGNGQKDEKTYQRARPQDEWLPLAFPPIVTEAVWAAAQERAAANRRASQHPNEASEIFATAGLVYCGVCLGKMTGERRYYRRDGKEREYHYLSCSRQRKGLTECRKRPLVRRDKVDAQALQMVLEGFADPHKVLDACRVYSEQLAAAQEDGASLLAALRRNLVAKEKERDGYERQFAQGMITEAKACQHFARVDGEMAEWQADIERLKATAKQGAALKEIEGSAFRIADMVRDGAVQKMTLAQRRRLMRALVERVRVMADNEVKVDCVVPGLLEDGSGQAPCCVLSSGGSRRDSFPGTQGRTPSRPWRPAFSIGPLFLF

SEQ ID NO: 6021 - protein, 579 aa, unidentified
  source 1..579: note = uncultivated organism
MGEKKTFRCAIYTRKSSEEGLEQDFNSLEAQREACEAYVRSQEHEGWKLRPDRLDDGGFSGGNMERPALHQLIELVKAGRIDIIVVYKIDRLTRSLTDFAKLAEVLDRHGVSFVSVTQQFNTTTSMGRLMLNVLLSFAQFEREITGERIRDKIAASKKKGMWMGGVPPMGYDILDRQLVINEADAASIRRVFSLYLEEKTVPALLDRLVREDIRTAARYSAKGNHYGNRPFTRGHLYKLLANPIYIGRVPHRDISHRGQHAAIIDKATWDAVQAQLVENTQGSRTRRRRAKAQAHLLEGLLHAESDARFVLGAANKGSKRYRYYVEQLDADGAGTDRLPPTRLPATEIEAAVVTGVQSVLADQRGLLHRLEADGATEAPTVMQAASRLLQALGGRIDADLQGKLRQILRKVIVGHNRIQLVFSIANTRAVLGLAKPSGIWPTNEPNDAEFAVVVPFVTARRGRQMKLVLPGAGNGAAPNPSLVTAIVRAWDWAERLKSGEVASMAEICAAEGFTDTYVGQVLPLAFLSPELVEQILDGQQPAGLTANKLIWRERLPLRWDEQMGMFGAGYAMTYSTPIT

SEQ ID NO: 6022 - protein, 541 aa, unidentified
  source 1..541: note = uncultivated organism
MRVFIYSRKSVCTGKGESIENQIEMCRQYIFAKVSGADDTSVTVYEDEGFSAKNTDRPQFQQMLRDARRQPPDYIVCYRLDRISRNVSDFSTLIEEFNERGISFVCIKEEFDTAKPMGKAMMYIASVFAQLERETIAERIRDNMLMLARTGRWLGGTSPTGFTSEKLQELIIGGKVKTSCKLKENPNELRAVDTMFERFLELRSVSGVSKHLIKQGIKSRNGKYYSLLGIKQILQNPVYCIADKDARDYFTAQNSDVCFEEKDCSDKYGILAYNKRDYKKKHAPRQSMDKWIIAIGKHKGRVPGKKWVAVQNIMEDNIPTGKKPAKTHNDYALLSGLIYCDKCKNRMFAKQRSGKGANPDLYDYVCGSKLRGGTSLCDCQNIGGRQADDMVYECLIKYADESSSIFKLLEKLKRDLQGQARETPINSIETRIKKYSEETENLINTLSQGNLGSAFIQRVNARISELDDELSKLIKEQERLQKDANLSDEKMQADTLAEALSRLKDGFPGLSIYDKRALVKLLAEKIVWDGTDLHVFLGSGE

SEQ ID NO: 6023 - protein, 572 aa, unidentified
  source 1..572: note = uncultivated organism
MAKMAARTRCAVYTRKSSEEGLEQSFNSLHAQREAGEAFVLSQRHEGWSVIATPYDDGGFSGGTMDRPALKALLADIGAGKIDVVVVYKIDRLTRSLFDFAKIVEIFDAHKVSFVSVTQAFNTTTSMGRLTLNVLLSFAQFEREVTGERIRDKIAASKKRGMWMGGNIPLGYDLKARKLAVNNKEAETVRTIFRLYAELGAVRKVKAEIDRLRLRTKVQTPASGLIKGGLPFRVGHLYTILRNRLYRGEIEHKGEVHAGDHESIVDQVLWDKVQAQLASNASARRSGKSSKDPSLLAGMLFDGKGNRMTPSHAVKSGKRYRYYLSNNLIAGANRGRDGESGDGLRISAQEIEGHVVTAIAMFLADEPRVLTELCPAGTPPALASAATRRARSFGEELKAGGGMEHYESIRNLIARVKVDDGAICLSLNRTSLFEQLGIPFDNSSSGADDPLELRMSAELRRLGNEKRLIVAAHAPKTNPDVSLIKAVVRAHEWFEMLKNRTVESITDLAKIEDVQRTYPSRIIPLAFLAPDITEAILEGRQPIDLTLDRLLAAMPLPLAWDAQRTVLGFSAR

SEQ ID NO: 6024 - protein, 517 aa, unidentified
  source 1..517: note = uncultivated organism
MRAALYIRVSTDEQATEGFSLEAQKERLAAFCKSQGWAVHKFYVDPGDTARNMNRPSLKEMLQDAKAGRFDVVLVYKVDRLSRRVKDLQSIIERLDEARVMFKSATEPFETTASSGRLFLNMLSAFAEFESDTIAERAYMGMLANSRQGNYNGGGVPDGYIVKDKKFVPDPERAVIIKHIFSKYAGENIGGRRLAKWFNENKLFRRNGKKWSQWSIVEVLKNPVYTGDYIWNRFRYKGSDGRVRVRERDPSEWIVVENAHEPIIDKKTFEEAQKRLESRQKYRTRSKESNYLLTGLVHFKPCGIRLDGWTRVKNGVADRYYRCNRLRFETETPYCKECKTKSVRQEVIEDFIKRQMCSLKERLSEIKGLIENLKEKAVEAEEALSGREIDLEKKKARVKEEKENLLASYEGGGIDLKILGKKLNSLKEQRKEIENQLFLIKAEKNNKLIAQADADFTLSIIKEFPAYFEAAERKERKNLIQALIDRIDVEHDGKTTITFRLPIGQDDSQGCAWLEAA

SEQ ID NO: 6025 - protein, 531 aa, unidentified
  source 1..531: note = uncultivated organism
MKTGSTKTVRCATYTRVSTDQGLEQDFNSLDAQYDASQAYIRSQAHAGWTLLRTKYDDGGFSGGNTDRPALQRLLEDVRAGKVDVIVVYKVDRLTRSLADFAKLVELFDKHNVSFVSVTQQFNTTTSMGRLTLNVLLSFAQFEREVTSERIRDKIAASKRKGLWVGGMAPIGYDTKDRKISVNEAETAAVRTIFRSYLKLGSLNLLMTDLRKRGIVTKVRKLKTGKKVGGIPFTRGPLAHLLRNRFYIGEVAFKGEILAGEQLAIVDRTLFDAVQTKLDEQLNNHNAARTKSKALLAGRIFDDRGNRMSPSHARKRGIKYRYYLSSALFNGEAEQSGSIRRVPAVEIEALVVKSVRAHRKLSAPFDDLSLVNTHVVRVEVQAGQLVIQFTPTQKSKRRRAGTEDTLLVPWQKTTSTRRRELLLPFSESSNGQTARPIRSETRATLVASIARGRRWLNEIVSDPSANAETIAARESCSVRKVNMMISLAFLAPHLVKAAIEGRLPHGMGVVRLCDLSAEWSRQSQMLGLIPQ

SEQ ID NO: 6026 - protein, 592 aa, unidentified
  source 1..592: note = uncultivated organism
MTERHRKSLRCAVYTRKSSDEGLEQEFNSLEAQREACEAYIRSQAHEGWRLVPDRFDDGGFSGGSLERPALTTLLDLVREQRVDVIVIYKIDRLTRSLMDFAKLAELFDKEGVSFVSVTQQFNTTTSMGRLMLNVLLSFAQFEREITGERIRDKIAASKKKGMWMGGTVPVGYDVKDRQLVVNKTEAETVRTLFRLYLKHGTVKKVWDEAGRLGLKTKPRPKSDGRILGGKRFFPGHIYTALNCPIYIGKIPHKGESYQGTHESIIDQETWDAVQARMAQNRRDRHAFASARIRSPLAGLLFDAKGTRFTPSHASKKDGKRYRYYIDQALTKGITPATADLPRIPALEIEGAVRKGLVEFLGDLPKLLDALGEEILSTARERALKQAAHVIEELRVATPSTWMPLVRPVLQRVIVEEGAIRLHIAPRGLRSILASSDESVAAMSPNLTDDRDDKRAYQYLISATVQMRAGVMKIVMRNGNDELSGEPDVTLVKLVARAHVWAEMLKSGSANSVRNIADREFLTESYVVRVLRLAFLAPELVEDILKGHSVTSAAGWLAMKESLPLTWAEQIDVPTAEVENRNHTHRKTNRQP

SEQ ID NO: 6027 - protein, 569 aa, unidentified
  source 1..569: note = uncultivated organism
MTQQKRCAIYTRKSTEEGLDMAFNSLDAQREACEAYIKSQRSEGWLLLPTAYDDGGFSGGSMARPGLKRLMADVEAGKVDVIVVYKVDRLTRALSDFAKIVDVLDAAGASFVSVTQAFNTTTSMGRLTLNVLLSFAQFEREVGAERIRDKIAQSKARGIWMGGPLPLGYETKERKLVPIPAEVKTLRHIFELYLELPSVRALKERLDAEGIVTKVKNGKMGTSGGVPFGRGGLYHLLSNPVVIGKIRHKDKLYDGEHPAIIPLPLWKAVQARLAAHGVDRRAKNGTTRSALLTGLVHDHVGRPMSPTHSQKGAKRYHYYASSTAKEISDGIAEADSEQVIRVGQMAADQAIHFAIMRLFERDAVLNLLDPLDLDLSAIEAALAVANEASHRTGTKGGMPLRHLLQKFNFTMVMAPDRVTASIDKRCLVAMLLGQTPDTEQETYPLLLDVPLELKRKGNATRLVLAGHVRKSPDPDPKLVRLLVNAERERRAMFTPGAPKPNAHQVKLARLAYLAPDITATILEGRQPARITSRLLLRLADMPMEWREQRRMLGLRRRVSASHRRSRHTI

SEQ ID NO: 6028 - protein, 531 aa, unidentified
  source 1..531: note = uncultivated organism
MTKQLAGIYTRFSTSNQTQNSTETQVQGCLAYCQKNNIEVYKIYSDEETTGYNTNRKYYTKLLEDIRAKKINIVVIYDVTRGNREVADWFYFRKEMRSLGVKVVSTMERLGDIYNPADFLQELIAVGMGEHMLLQSRQKSIAGKNVKAATGAFMGGFAPLGYNIVNRKYVINELEAKAVKTIFEMYLQQASYEEIIKAVNDIGVLYGKRGNKISKTTIYSILNNERYTGTFIYNEYTNREMHRWIGKKNDDPIIIEGAIPQIIPKDVFDMVQEKLKSRKRAKNNKREYLLSGLIVCPVCGATMHGKTTKNSKGIESIVYTCPNKAKKLCDSKNIPAEEAEYRVKLALKKWMKNLDVKKFSEDFAVHSLACKDINTDKEEYLKLEKQIFDSKTLAQYSLEQGLFNARQEYLNDIEKLTEKKNQLAEKIAENEQIKIDREQIARQMESALNFITTNITEEKLKEGIQYFIKKILPREEGLLDVYIGLNMSLDSKKQTTSSEVVSKIGSPGRKAIILTTLKVYYETNYRKQYKN

SEQ ID NO: 6029 - protein, 507 aa, unidentified
  source 1..507: note = uncultivated organism
MKPDATICGLYTRVSSRNQADADYSSLETQRERLEAYCQSQENYSIFRVYEDGGYSADSLERPALKEMLRDIRDGRLNCVLTYKIDRLTRSVRDFHQLVDLFDRANVKFVSVTQSLDTQNPMGRLLRNVLLDFAQFEREMTADRTRDKMFQRAQKGLWNGGNVPYGYDSENKKLIANSQEADRLRFMFRRFAETPSLSGLRHELHQRGWYARSGKPWGKMALDHILRNPIYCGLIRFNEQRFKGEQEALIQEVLFTRVQSLRRDRGHASSKLSRVFLLKGLIRCSDCGSWMTPHYTQKKHKDGSVYRIPYYRCTKTMHFDNSVCQIKHVNADVVERTVVQELSNLSHNETFLQMSVDELNGDLKRKAGPLEREAAQIQKRQAEIESEIGRYVKALGQGKLSIERLEAEIGGLETDKRALHQQLDDLQRKINESAARDFNAELLRRTLRDFRTAFTALTAPEQSEALQCVLKTVTVHPQKLDLEIFELLEFLPGSQNRKKWLPGLDSN

SEQ ID NO: 6030 - protein, 540 aa, unidentified
  source 1..540: note = uncultivated organism
MKKAVIYTRVSSEEQIKGNSLSEQEKKCRYFIKAKDAEIIDVYEDGGRGGETKDRPMLQKLLEDAKSGKFDAVVVYKIDRLSRSLRDFLEMQDYFSKLNIELISITEAYDTSTPQGRLFVNMLGSFAEFEREQIKDRINMGQMASMKKGNWKGSAPYGYNVKDKKLVINKKEAEVVKKIFKMFADNCYELDRLTLGKAQKIVNGWKVPTKKAKSKNKKKTSATFWCPSTIRNILKNDVYTGETHIRRITKNNNPDIKSKRVIRPKEEWIEYVAPKIISKEIFNKAQITLKKNSEFAFRKQKYPEAVLSKLMYCSECGRKYAVYRKNNKEYNYYFCYCQGTKDYRTDKKCFAKTFVSHRLEDPVWEKLKEMLLNPDVLRRYIEKQVSGHKEGVDPMYIKELELRLKKIKAQKERLLNLYLVGDITRDKFKEKEDSINKQEDSITNEINKINQNKILKEGLIKKSLDFTTLYNKLNINLDNISADNKRKVFRLLIDRIETNGEGFAKVSCILPQQVVMQTNERVGKFTKLPTFCFRVRVKQV

SEQ ID NO: 6031 - protein, 531 aa, unidentified
  source 1..531: note = uncultivated organism
MANDKKPLKWVAIYTRKSTDENLGGDFTSLDSQREYCQAFIKSREAEGWRVFPVEYNDPGFTGGNMDRPGLKHLLSDARQGKFQAVLTYKYDRLSRNTKDFLHVLDLFDKHGIVYVSVTQPIDTGSSVGRLMRSILVDFSQFERELISERTRDKRAAMAKKGKWAGGPPVLGYDADEETKKLGINAAEAKQVRLLYETYLKTKSLSKTAILLNKQGLRMKKWTTRKGNVHGGRRFNKGNLDYVLRNPVYIGKISHKGDIHEGEHKGIVDSTIFERALRMLAANGKKNTSPNQDKHNFLLRGLVRCGACGQQMTPNFAYSKGRKYFYYKCVSVNKLDKTACPTKSAPARELERLILDRIAFLGKQKKVVDDVVERARQMTGTELPAKKKDRVRLIAEIGRQEAEVGNITSILAAQGPAAPQYRALMDKLGQVQGRREELEKQVQKLDCEVVELESRQIDAEIIRRNLESFSGFYTKLTPPQQKELLALLVGEVVYDTQASKIKLTLRPLPDLDFQVVGDKVSFDERLNWLRD

SEQ ID NO: 6032 - protein, 524 aa, unidentified
  source 1..524: note = uncultivated organism
MAKKVMKIPATVSQFTASPIDSRKKRRVAGYARVSTDHDEQLTSYEAQLDYYTTLIKSHDDWEFAGMYSDEGVTGTSTKKREGFQTMVADALSGKIDLIITKSVSRFARNTVDSLSTIRELKEHNTEVYFEKENIWTFDSKGELLITIMSSLAQEESRSISENVTWGHRKRMADGKVAVAYSRFIGYDKGENGSMVINEEEAKVIRLIYGEFLAGLSYHAIADRLTSLGIKTPGGKSKWSQSTVKSILQNEKYKGDALLQKSYTPDFLTKKQVVNNGEVPQYYVQGSHEPIIEPEIFDRVQDMIKQRASKRGYSGVTIFSSKIYCGECGAAYGSKVWHSTDKYRRVIWQCNAKFKEKKHCGTPHLTEDEVKAAFVRAANKLVSDRNLVLKELREIQRTLTGTDELEAEQKQLAEQMNADADAVQELIAQNARVAQDQTEYNLRYDALVSRFDKTKERYEQVTAEIALKGVRRREFGRFIKSVENLPEIITRFDEALWGSLVEKVTVYSKDRIVFTMTSGMEIEV

SEQ ID NO: 6033 - protein, 587 aa, unidentified
  source 1..587: note = uncultivated organism
MKEDNRKIAIYSRKSKYTGKGESIDNQIEMCKNKILSIYNNIDIENDVVIFEDEGFSGYYTKRPAFQKMMESVKNKEIKCVFFYKLDRISRNVKDFCEIKEKLEDYNVNFYSASENFENITPTGRAMIMMTSVFAQLERDTIAERIRDNMIELAKTGRWLGGTTPTGYKSEAVEKISVDGKKRKLFKLSQIDEEIKIVKLIYDKFLEYKSQTGVETYLIKNNIKTKNGKDYTRWSVRNILVNPVYCIADKDIYNYYFKQDIEIFSDESNFDGKHGIMAYNKTEQKANKSTKERDLNEWIISVGKHQGVIDGEKWIKVQNLLFNNEDKRYRKPNKNNALLSGIIKCSHCGSYMRPKLKGTTDENGNLRFDYMCELKEKSRKQRCSCHNINGNEADKLVLDLIEDLIKPNSDFRKKLSKLAKNEFTGSKKESIELNALEKTLKKNQSSINSLLDKIKYIDVALLEDITNEIKRLKADNEQIQKRIDELQNFSSDEVNTQSQAQIIENIMETYFTTFNELDLQTKRSLIRLIIPNITSDGKDIEVNLLGVRTESPKNKIPLCDNSKMLLYDHLRGKICDLHSYLAIDNLN

SEQ ID NO: 6034 - protein, 557 aa, unidentified
  source 1..557: note = uncultivated organism
MLDSSPSPQPESGLYVGLPAELSPAGSYDRLSSMSPTHDSFSPENQRRLNHDAAVRNGEHIDPKFELSDLDISGRKNVYRPGFEKAIRALLDGRIKTFYVAKLDRLTRKGMGHVGLILDELERAGGRIVFVAEGLDTSMPGARQVIAILAEQARAESDAISWRIGQWHAHNRRMGLWKARRPFGYVVVEGKLKPHPLEARIARRAVEDFLGGATFRAIARLLNEEGIKPPRVAIWYEEAQVKGHRVKKPQTETWSWNGVKKLLSQPVLAGLLSHDRKLVYDEHGDLVFAGEGIITVAERARILAEMERRSTIVRNAGRAERIGTRTGNGRPAKYLMTGFTHCGECGGSASLWTQSKRGRSVYRYYRCSPKAHGQNCRGCSFSAERLDEEVIGRLRAKLTALEPGDTLLDELAERWFAQGLPDQEADRRNLEEARDAAKARIADLYAARYGRGEFATGEEIATYEKLLDQFKAQRDAAEVALAKLPPRPQFDVAMLVDGELSVGVWSTLPLARQRFLLSLAVHQVWIYSPDVALGERIIVVWHGQEPPTPRRGGGRAD

SEQ ID NO: 6035 - protein, 510 aa, unidentified
  source 1..510: note = uncultivated organism
MKNGKILRCAVYTRKSVSEGLEKDFNTMVAQREAGESYIQSQKHEGWVVVDKHYDDGGFSGGNMERPALRELFDDIENGKIDIVVVYKVDRLSRSLMDFAKIIELFEKHNVSFVSVTQHFNTKDSMGRLTLNILLSFAQFERELISERTRDKMSAARRKGKWVGGVPILGYDISPDGNGLVVNRAEAESVRTIFDTYLDTRSALRTLEILEEKNIRMKSWRTVGGKMHVGKAFTKSTLYYLLKNTAYIGKIRYKGEIYPAEHEAIIDAEVFEKTAERMSSNFRERTTAKVRTKTEGLLSGILYCGHCNRPMTNKYTCKGGSKTYRYYVCQNAVQKGWKSCPYPSLPAAIEDFVVGEISGISSDEKLSAEVVGNFTKNVRAELADSVARENALEKALSEIRAELAGCTDSPKTEDLRREEIRHSEALEICRKRTEMLGKKCSKSEAELKRIFGNFDGIWANLNFKEKYELLGLLVEKVVYFGEKGEISVFYRENGIDIETAKNGNQKQNIH

SEQ ID NO: 6036 - protein, 523 aa, unidentified
  source 1..523: note = uncultivated organism
MKIQHPGEYRAALYIRLSREDENEGPSESVTNQKSLLQSFAAEQGLSVFDIYIDDGWSGTNFERPGFQRMIADIEAQKINMVITKDLSRLGRDYILTGHYMERYFPEHRVRYISLLDGIDTGIDSAANEITPFRAIMNDMYAKDISKKIRSVKRDKQRKGQFIGGKPVYGYKMHPTEKNTIVIDEETAPIVRRIFKMALEGTSCRQIAARLNTEGIPTPASYAGLISSRPGRYSGLWSGERISDMLQNETYIGNMVQGRRERVSYKSKKCLRRPRESWMVVEGTHEPIVDREIFQKVQLLLQSRRKTRCRTYDFPLKGLIFCHECGSPLAIVNRKNARGEDILYFICRTYQRSPKSGVCTGHMVQEKAVMEAVLFKIKEVCSPYLNPEDLLLTAKAILEETRKNERCRVGTRELQAKIRNLTSRLDTAYMDHLSGLLAEEDFQRIYQKLKTERNTAEKELNNRLQKVSFSAEEEAGKLTQKFLESALTSREVLISLIERVELTENRQILLKFRFRQPEPRASS

SEQ ID NO: 6037 - protein, 573 aa, unidentified
  source 1..573: note = uncultivated organism
MVGAGILRLDAQGKERSGMSNQIRCAIYTRKSSEEGLEQSFNSLDAQREACEAFVKSQQHEGWRLIATDYDDGGFSGGNMERPALKRLMADIQAGKVSVVVVYKVDRMTRSLADFAKLVEQFDKFNVSFVSVTQQFNTTSSMGRLTLNVLLSFAQFEREVTGERIRDKIAASKKKGMWMGGTVPLGYTAKDRKLIINEPEAVTVRTIFDEFLRLGNVHSLHDWLCENNIMSRRGNHFFRGPLYMMLRNPHYIGLIKHKKATYPGEHPAIIDRGTWDKVQAVLDENIQGKRRKVRATKESILTGILFDAIGTLYTPTHANKNGRRYRYYTSQAVIKKIGTSNAPGRIPAHDLEKAVVDRMLEWLQTPTQLLAAFRDETTVAPPEGIFAQIIAQAAATAQSWRERITADRAQFLRTVIDRVVIHQTYVEIRLRVPALLNEILGCGEISIDLPQIASIECPFRHVRQGRAVRLVVGDTNITTDASRQAILKAIARARRWYEQITTGKSSNIAQLAGIDGVSPRFIRMQMKLVQLSPQSIENMMTRPESLPLSLDDLLALIPMDWRKQSLGLSAKSA

SEQ ID NO: 6038 - protein, 533 aa, unidentified
  source 1..533: note = uncultivated organism
MKVAAIYSRKSKITTKGESILNQIELCKHEGTHLGIDKFIIYEDEGFSGKNIKRPQFQKMLSDAKEKKFNVLICYRLDRISRNISDFSTLINQLDNLHINFISVSEQFDTSSPMGRAMMYIASVFAQLERETIGERVRDNMLELSKSGHWLGGQTPLGYESKKINYLDSNIKEKTMYALSPIKEELDVVAFIYDKYLLYKSISQVFITVFQKNIKTKNGTDFNKKRIQLILRNPLYVRANEAVMKHLELIGMNVMGNVDGIHGILTYNKSKGSKTKRDIGEWIAAVSTHEGIIDAPTWLAIQQILDKNKNKAPRMGTSRAALLTGTLKCYKCGKSMIVKHGHISAQTNKKIQYYVCSTKDYSKGLRCNNPNIRVDELESIVIDTLKNITVDKIVLLEELYKIKSDITKNNFMENEINNLPSQIKMKQCQIDNLICQLSLDNEISEYIRPQILKIGGEIEQLKYKYESLKAISNKDKNNKWDANKFLNTLSNFSSLVDALDFNNKHILINSIIQSIYWDGATGSLQINPISLNP

SEQ ID NO: 6039 - protein, 523 aa, unidentified
  source 1..523: note = uncultivated organism
MVALYEQARSNARVLRGGMYLRKSRLDIENEKKTGVTDTLEKHKKDLLRLARKLNIDIVDEYEEVESGDSIIHRPQMLRLLRDVADGKLDCVVVIDLDRLGRGDLQDQGLILNTFKKSKTLIVTLDKIYDLSNEVDEDYAEFKSFMSRKEYKMITKRMKAGVRRYIEDGNYIPSKPPYGYEIVQNGKKRTLRIVPEQAEVIRLIFDMFLKGVGMRDIARELADMGYRSYYGNRLGHTWISRVVRNPVYAGYIAWGREEVRKSSEPGKKYDCRKRDPDEYMVVKGSHEPIISEEIFRQVQERLKEPPYSSPVQKSKEIVNPLAGLVKCKVCGYMMRRVVNGVTGKRIDYLQCGNFCPNRGTKLKDVEVGLIEALRAWLDQYKSDWYAYNEKKTTDQADIYTRKIAVAKKELNTLKKQMDNLYNLVEKGAYDIDTYMMRSRVLSQEIRNTEANLQQVEKDFAEYKRKLAGNQKIIPKVEKLLENYYNLSVEERNRALKSILNYAVYYKSKKWRGNRFELELSVKI

SEQ ID NO: 6040 - protein, 513 aa, unidentified
  source 1..513: note = uncultivated organism
MKNRAAIYIRLSKEERQQKQGSLQMQREILERYAEEKGFLLAGIYCDDGQSGVDFERPAFQALMRDIEAGKIDILLTKDLSRLGRNSARTTDLLDEYFPAKGVRYISVNEGVDTQAESSANLIAPIANAVNELYARDISQKIRSSLYARMEAGQYIGSFAPYGYRKSNKEHGKLERDWQAASVVRKIFTWASAGKTPAQIAEKMEQEQYCTPLEYRRSGMILRSQMRQYRWEAGTVRKLLRNPCYMGMLVQGRTQKTSFKAKRSKPLPKECWRVCMQAQEAIVSQEMYTQVQRMLAGRRRRPRGGWQNLFAGIVWCADCGARMSSAQSGGHHSLICGAYKRRGKDACSSHRLSYEALLKEVEDKIMMQLQTASVQKETMMGNLWQQLQAIAKTGQQERKRQQIYNKLRHLYDDKYSGKITEELFLQLQTQYEGELSGINGALALQIEMEEQWQCWKKMAERAWNPSALTREMLLIMIERIEVAQPKADLPVEITIQWKKRSRQESLLPNGFNV

SEQ ID NO: 6041 - protein, 505 aa, unidentified
  source 1..505: note = uncultivated organism
MSKKNVGIWLRVSTDDQAKGDSPEHHEERARTYAKFKNWNIVEVYHLEGVSGKQVLHHPEAQRMVRDVMNGKITGLIFSKLARLARNTKELLELSDFFNEHQADLISLEEDVDTSSPSGRLFYTLISAVSQWEREEIASRVRASVPIRAKLGKCTGGAAPYGYEWVDNELHLNEEEAPIRKLVYELFTKEKRRKTVARMINERGYRTRRGKIFSSQTVTNMLKDPITKGLRRVNYTTMKNGLVTAKPEEDWVFVKAPAIVSEELWEECNRILDQQTFKRKPAKRVSHLFSSHIKCHCGGKMYVVSNSPKYVCRACKNKIAIDDMNAIFHHELKGFLFSREKVQDYLSDAKNTIQDKQKELEALKKKERTLSEELANMIRLNTKGVLSDDDFPDHYNPVSEQRSQLRTHVAEMESELTNLNQYILDSDQILDETKDLHSRWEHLTFEDKRSIVELIVQDIIVGTEEIEINLLCSQSAMFSHHPLLKGGKKVKNPLRISYCLSEASL

SEQ ID NO: 6042 - protein, 556 aa, unidentified
  source 1..556: note = uncultivated organism
MEDRNQPFAIYSRKSKFTGKGESIGNQIELCKQYIITHYGESFADSALIFEDEGFSGGNLERPQFQQMMKEAKKKKISAIVCYRLDRISRNIGDFANLIGELNHLEISFISIKEQFDTSSPMGRAMMYIASVFSQLERETIAERIRDNMHELSKSGRWLGGNTPTGYQSERVTSVTIDGKQKKAYKLKRIPQEAKLVKRIYEKFLETGSLTQTETYLIQNGYKTKQGRLFSRFAIKAILSNPVYMIADQEAYQYLKEKKVELFAGPADFKGTHGIIAYNRTLQKQGKAHEMKEMEEWIVAIGKHEGLIPGAEWVSVQRQLERNKSKNYRRPRSNVALLSGILVCGNCNHYMRPKLSGRYNDRGEQIYSYLCSMKEKSRMKCCAIKNADGNLLDRLVIEELKKISEDKREFTRQLEEGRKLLKEEKQDYEQDVSRLEEELSQTEKEIDGLVTSIKVAGGTAAYDYIVRQIDELHKKKEQILTQIEVCKETAMGKELTDLEFDLLKDTLSNFEKTVEFMDVEQKRAAIRILVKRVVWDGDTVHLYLSGSKEPPCDSSK

SEQ ID NO: 6043 - protein, 580 aa, unidentified
  source 1..580: note = uncultivated organism
MGKRQQRRQTEEQDGRAGLYVRVSLDKRKHTSGGRAMADEIVSPETQEDRARSYCASQGWDVVITESDLDESGYRQHYSKRKGLMRLLDAVKRGEINKVVVFKFNRLSRRAREFLEICDLVETAGGGGIVSVTEQVDTSTPAGRLIRNIMASFAQYQSEELSEQIWETWLTKAKSGKRPPGKPPYGTIYAKGMLEPDPETHRHLLAMYETYAATRSIAAVHDYLTERRIPSANPAKEWTLTTIRKILTNSAYVGQITFDGEVYDGQWAPIVPVELWTQVQTVIQGRKSAALDRVDAHLLRGHVLCTCCNRPMWTQHSTRWIDGRRGSDRYYWCADPKTLRDGCTMPALHAGELEEAVWTVLVALSHNGQDDLIRAVEQRPTRNDGAHQRAELEQRRQKLESLTRQLFTLLHDGEITREQFRLQNRDYAEQLAEIQTGLAGLERSVPQRLTAGDIRTIVRSIQTATTTGEKRAVLAALEVRIAVTWQAVHLDMLGDRVRLPGRLLGERWYFGAEYHQLDYQGTMFTDKQIRFIQRTYTWADKQEIARRLGRTYMGLKRMANRLREKGLLAPATGRGARNAQ

SEQ ID NO: 6044 - protein, 697 aa, unidentified
  source 1..697: note = uncultivated organism
MPKDAQTEKPPLRAAIYTRVSRDFSGNHRAVERQEEDCRLICEIHGWEVTRVYSDNSISAYSGKTRPEYEKMIRDYKRGRIDVIVAWKLDRLTRSVRGWSDMVDELRHQGLRICTSDIGKVDLSDAGSEFILNMMVSTAQFESRRKSERSKRANVQRAQLGYIKRGTRCFGFGPDLQVVEAEAECIRRIYEVYAQGASMSAIARNIAGDADTLDLPHFDAPSVIFARERWERMTDEERANLTARQVMMLPRELFAQIPESQLKKYKAEDRRAIAKAQAKPEKKFDLAVTQQILKNPRYAGYVCYVPTIDGKCQPTNAHWTDFIVRDKTGEPVKAAWPAIVEPELWWQVQARREKNKYAGDGHRIDNNGAKIRHVGSGFYLCHVCGRPVRAGDGRYECVHHVSRMRKHIDQYVLAAAALRLSLPETFDLSDHANDDEVEALRREISDARSRLRSVRAGYEQWLVDGTGNIDDEMYTRASTRLTERISRLESRVQNLASPAVSPLATMLETESPATAFMRIKEISQVQAILRQMMDVTLYAHPGGKRYDASSLVSDVGITWKLLPSPEHMAMGLEDRERYASRLLEGAFWADLDFDAIDEEDLAPWARDLRNAPDFVFEAAHAALIAAVQARVDDLIAPYGDDEQRPVFATETETDPLTGDAVAIGGITSQPTDDKDATLGTLLRGIVETAPKERGSNE

SEQ ID NO: 6045 - protein, 540 aa, unidentified
  source 1..540: note = uncultivated organism
MDQSPKKLLRCAIYTRKSTEHNLDLEFNSLDAQREACESYIKSQAHEGWRLIQARYDDGAFSGASLDRPALQQLLAEVRSGKIDVIVVYKVDRLTRSLADFAKLVELFDQHSVSFVSVTQSFNTTNSICRLTLNVLLSFAQFEREVIGERVRDKIAASKSKGIWVGGPVPLGYASINKKVVVVPEEAETVRLIFRRYLELGSIGALLQDLDCGGIRTKRQVGPHGRTRGGIRFGRGSLAQLLRNRFYVGEVVYRGKVHAGEQAPILDRAQFEAVQTKLTGSAAARQLRLRASPAILASRIFDDRGNRMTPTHTNKRGARYRYYVSHALLQKRNSEAGSVARVPAPEIEAIVLNAIRERLEADNGNPAVTDDRSLIECRLDRVIIKSQAIEIHLNGRDSYAADMRSDATKNDDSGGLSPSPIVVLWSGATLAEVKGIVHSPTQRSAMNPETRDALLGAIAKARIWIDDLVEGRVSSFAEIAEREGKVERHIRLLAPLAFVSPRIISEIIDGGTPPALTVTGLAKGLGYSWAEQENHRPPGS

SEQ ID NO: 6046 - protein, 533 aa, unidentified
  source 1..533: note = uncultivated organism
MRAVIYARYSSDNQTEASIEGQIRECMEYATYNDIQVIGNYIDRAFSAKTDHRPEFQRMIKDSYKHAFDCIIVWKLDRFSRNRYDSAHYKALLRKNGVKVISAKETIAEGSEGILLESVLEGMAEYYSAELADKVTRGMKEIALKGLWNGGNVPFGYVINNERKLDIDPQAAPVIQEIFKLCNDGKTVKEIYRIMNERKVTRSNGKALRYNAIRYMLSNRVYIGEYHHMGVVIENSVPQLISEELFDAVQLELAKNSKAPARHTADEDYLLTTKLFCGRCGAMMVAQAGTSGTKGVVYRYYACVRQKKHQCEKKPVSKTKLEDFIVYKTMEFLKDDDIIERLSAKLYELQYTESTILPKLQEQLKQKEKEIENIVNAVQKGYATETLLKRLDGLEKEKREISDAIAKEQLKAPIFSQDHFKMALSNFRKIDITTQEGKRKIIDTFINAIYLYDDHLKIIYNANGKEETISLAELESSTLFSRGAPKRIRAHLAPFLHVSGFGHLRFSKLSLVLTFKKTQSATLLLVLRQHFIH

SEQ ID NO: 6047 - protein, 623 aa, unidentified
  source 1..623: note = uncultivated organism
MIGLPEKDTRKIGIYARKSKITETGKSIENQITKCKSLASLKFDASDDDIIVYQDEGLSGFYSDRPSYVRMLNDIKNNKLQAVICYKFDRISRRTIDLLNLVEQLRLKKVSFVSCTDDVDTSSKTGKIIMSLLASIAEFERDIIAERITDNLYELAKEGRWLGGITPTGFVSKKTYITSGGRKTSVNHLEPLFEELDIVKSIFKMFLEKRSIQSVVNHLKNSGIKTKNGLKHTRTSIKDILTNPVYAIADEETYLYFKSFDVQIYAERSDFNSVNGLMIYNKTEQSKELKDDSTAVLPKYIQKTEKKEIKEWIVSVGKHQGIVPGKEWIKVQKILDENKDKYVRPNEKTESLLSGLICCPICGKNMFTHRESGRYTEGKPRFLYKCQTKRADKTACDYKDVKGNGTDRFVVDMICSMSHEHDEYYNILCNNELLKSAQTESTAEQIKRYEKEITRANKEIESQTKNLRLAGDNVKQFILDDLSKLSDELSSLTQQKSELEERARKLLTDIQSIEKTKEIIFSFPKLMESLTYQEKSELLRKVIEKVFVVRNKDGDDKVHIFVKGMSENEYDVFSKKDSKRSQLCVRGKDSIFNTPSSICGQTYSLSWVITCNCLNKADCAYRY

SEQ ID NO: 6048 - protein, 567 aa, unidentified
  source 1..567: note = uncultivated organism
MSTVNNVQVKSRGRSGKEKIWQAALYVRLSREDGDKEESDSVVNQKDLLQQFVSLEPDIMVYEIYMDDGWSGTNFERPDFIRMMNDIKEKKVDCVIVKDLSRFGRNYIDVGQYIEKIFPLMDIRFISITDNLDSFKNPQTMNNIMVPFKNLINDEYCRDISNKVRSSLDMKRKQGKHIGSFACYGYKKDPDDHNHLVIDEEAAEIVRDIFKWYISGMSILSIAQKLNELGIPNPSNYKKQNGLRYKNRYEKMSSGKWPDSSVRRILGNQMYIGNLVQGVLKIKSYKVQVAQRQAKDDWIIVENTHEPIISREDFETVQELLQRNTRKAPAQKEVYLFSGFVKCGDCGRSMSRKHHHHDYGDYTYYVCTTHTKLDKTACSKHTTRADKLETIVLASIQSQIALAVDMEKAIKTINSSAKANKETVRLRKMLEQAKKEVEQAELMMLDLYPDWKAGVISKDEYIKLKERFEGQKFGALQKVQELQVKIEDAESGQDGTNQFLENFVKYRNIDKLTREVIVALIDMIYIYEGNKIKIVFKYQYPFKAAMEYIENNKELLNMPQVKALLGA

SEQ ID NO: 6049 - protein, 508 aa, unidentified
  source 1..508: note = uncultivated organism
MAIALYARKSIERENSISCETQLEYCRAMIKPDERNEKILTYVDNGFSGGNLKRDGFQKMMRQIELGKITKVLVYRLDRISRSLSDFVNILNTFKEYGVEFVSTQEAFDTSSPYGELIVKILAVFAEFERQSIISRITQAYEHRSEMGFYMGGRKPYGYDLEPTVINNVKTKRLTPITKEIEQVKYIYETYAIENVTLGRLLKNLTENDIKPLSGGGWTTAKLSNIIKNPIYVMADNRIYDYFQKFNTKIISPPESFDGIHGVQIYGKTKHEAGSLDWSDIKAVVMTHEGIIDSETWIKCQQKLAKNKQVRNAVSNKTSWLGGKVICGRCGRTMTTIKGKTGNGEIRRYFSCTGKTHFKDCKGTNVTIYAESLENMAYNEIAKRLESLKCVRTSEQKNLHPEINELRNKLKSIELAQQQIADILTKPEVNCDLLEILSKRATKLKNDKTEIQFKIDELESKEVDVKTAVNLSKKWKTASFEEKRGVCSIIVNRIIIDEDGNAEIVWNI

SEQ ID NO: 6050 - protein, 551 aa, unidentified
  source 1..551: note = uncultivated organism
MTRKLVRCAIYTRKSSEEGLEQDFNSLDAQHEACAAYIASQRGEGWKLVSGRYDDGGISGGTLERPGLTRLLGDIEAGEVDLVVVYKVDRLTRSLADFAKLVERFDVVGASFVSVTQQFNTATSMGRLTLNVLLSFAQFEREVTAERIRDKISASKKKGLWMGGMVPLGYDARNRTLVINEPEAKTVQTIFRLYLELGSVRRVKDEADRLNLVSKKRSFANGKFLGGVPFTRGRIYHLLSNPVYVGEIRHKAQTYPGQHLAIIDRATFDAVRAGLDANTSRNKICAVAEASSPLAGKFTDETGDRLTPTHANRQGKRHRYYVSRRLIVQSGEENADGWRLPSTVLETAVARLIVDALSHEPSVIQMVRDAAVETLRKLPSKAQGITADLTGHGRGAALNALVESGSIEPGRLSITLNATTLADRLGLPPTHINQEALALDGQFTMRRRGVEARLVFGDSASRVDETLLKNVAKGWCWFEEIKDGMTMKAIAKREGMSQRRIAHLVDLAFLAADIVQAIVDGRQPAALTADSLIKSQHRKLWADQRTWITSL

SEQ ID NO: 6051 - protein, 526 aa, unidentified
  source 1..526: note = uncultivated organism
MVFASYTRKSIYSDKSDSTKNQAKMCRDYVDFHYPGRVDSFLVYEDEGLTGSNTKRPDLQRLMKDIKSGLIDFLIVYQLDRLSRDIKDFSNIYAFLEEHHVQFISIAENIDTNTPIGKAMMYVSVIFAQMERETIANRVNDNMIGLADEGWWVGGNPPYGWRRTRITSSDGKNHVTIVVEEEEAEFVRSIGRIFLQNNFSLQQLERYFKKHNILTKNGKFFSTNQLHKLLTMPYCAPATHAVYDYYSNMGCIMSSRCPRELWDGTHGVMIYGRTTERNKKHTLQPPDKWRVCIGRHKPFMDESTWLSIQNQFTHNVFDKKMKHPIPLLKGVLRCKCGRLMMLARKSKVDGSVSTWYYCPKRMQQGTDYCDMSQIKANIIDDKVIDIFNKISNDPDAIREYLLVSVQDKDFNAEIKDANKTIIKIQNKIQNLTNVLADTPDTSAAKYILNTIDGLDKKLKLTERHIAELQSMEHIATETEQNICEKQIKIANFIRNFENFTYEERNAIARSCIKECVWDGNTLSVIL

SEQ ID NO: 6052 - protein, 552 aa, unidentified
  source 1..552: note = uncultivated organism
MARKSRKETAAVAVQEADAACRAAIYVRLSVEDTHTHSVSIETQQMIIARYLEQYPEISVYDTYIDNGATGTNFHRPGFQQMLSDIEAGHINCVIVKDLSRLGRNTIDTGYYIEQYFRIRSVRFIAVNENFDTANPEDAHSGIIIPLRNMINEAYAFDIGRKIRAQQRQAMKDGKFIGARTPYGYLKAEDDCHQLIIDPVAAVVVQRMFRWASEGAGLNTIAVRLNEAGVLTPSHYKKMQGKITHENLLGSGKWQTRTVGVILRSEVYTGDLVQGQTKTVDHRQVKADAEEWTVVRDTHEAIISREQFAAVQEILNQTASRAKAREVKAFTPNLLKGKVFCAHCGGSLHRQRNIRKKSDDVYFYHCLSRSRIRKDACPGVTIREDMLLDMLADMLQDALDTALGQYTLSLAELPQQAADRAELREKITSRKQEIQRLRGIVRSLYENLVQGVLTKDEYFDYKEKYESRIADLAVEMEQLEDGLRTMDTQIEQHRALEQDAAQIKTDRTLTGVLIDRLIDRIEVSHDKQITVRYRFQSEFETYAEVLKQCRNM

SEQ ID NO: 6053 - protein, 576 aa, unidentified
  source 1..576: note = uncultivated organism
MAYKNIKPGPKNRVAIYVRVSTVYQIDKDSLPMQRKELTAYAKLILGTDDVVIFEDAGYSGKNTARPRYLEMMSQVRQGLFTHILVWKIDRISRNLLDFVTMYQELKDLGVTFISKNEQFDTSSAMGEAMLKIILIFAELERQMTSERVTATMIARANNGLWNGGRIPFGYDWHSEEAEFTINTDEYNLAKLIHDKYEEMRSLVYEARWLNDNGYRTRAGNMWSPTVLQRILMSIFYCGDYRYNYYRDGKATKPKDEDEWVIVKDHHPAIVTREQKDRIISLLTANRRMIKNRGVHQATKYVHVFQGLMICGNCGMPMTSHIQHKKDWEYSSYSCGTRRQTSEKCAGKFTSDPILGEFVFNYILNMLNAQRNFDSINSPEELQSRLLIGDTFSYIAGIEADGLNDIYNVLSSGAVKGAIYGKSVKAKTSNKQAASELNTLRKQKQKLERALERLTNLYLFSEDTMSEADYIIQKTKLVDQIDELNDQIGYIVSDEWQSSVSDDEFIQRASEFIIAQKLTDRNYIYYKNLAKSVDREVLKTFVRSVIDSIIMDKGKVRQIIFKNGLSHKFIFKEEQA

SEQ ID NO: 6054 - protein, 503 aa, unidentified
  source 1..503: note = uncultivated organism
MTTPQTICALYTRVSSRNQLDGDYGSMETQRERLEAYCKSQDNYTVHRVYEDGAYSAETTDRPALKQMLADIRSGKVNCVLAYKIDRLTRSVKDFHLLMDIFDKYNVKFVSITQSLDTQHPMGRLLRNILLDFAQFEWEMTADRTRDKMHQRAQKGMWNGGTIAYGYHSDNKKLVKDEIEAPRVQFVFQWFSKDPSIARLRAELRRRGWLTRTGLLWTKTVLSYMLQNPVYLGKVSFNEKTYQGEHEPIIDEALFHKVQSLQRETVHATTTMKRPFLLKGLLKCSDCGSYMSPHYAQKRRKDGSIHRTSYYRCTRTMRFDNSVCRIKQMNADQTESAVIENLYDLTQNEATLDASIQELNRDLQAKVAPLQKEAAEVKARLAELETEIDRFMQALGKGTISVERLEKELEQRETTRKALQIRYDDLQQKINEDAAYDYNAELVKHNLRDFRKVFHALTPPEQTEAFQCMLKQITVFPEKLVLDVYEMADFSRGSKDREKWLRR

SEQ ID NO: 6055 - protein, 604 aa, unidentified
  source 1..604: note = uncultivated organism
MRTYEAHVCPLYLVYACQDKIIWQQLVFYDIESQNLYIKNVLFTIGREEWQKMRIFIYSRKSKWTGRGESVENQIDMCREYIYHNIENADGAKIIEYEDEGYSGKNMKRPQFQKMMEEIEAGNCNYLVCYKLDRLGRNIADLANLVETLNRLNVSFVSIKERFDTSTPIGKAMLYFAGVLAQMEREQIAERVRDNMIMLARKGRWLGGNTPLGFRAVEEEMVSVNGKNKKSFRLAIHEEEIKTARFIFKEYLEKQSLIGIVRYFAGHGIKTKRGNEYTTTAIRDILTNPVYCTADQEAFQFFWNLGCQVCMDQEEADGKHGLIAYAKTSSSQYKNRENSPEKWIIAKGRHKGIISGRDFSKIQNLILKNSKGGGRRHTPHNPVSLLSGLLYCSCGHPMRPKNYSSSQLTAAGERRFSYMCTYKELTHGKMCSARNVQGNTLDGLVCQKVLRYNEENSDFNQILRKAIGKMGGTGEKKVTAADLLEQEIQKREDKVQNLISVLAESGGNAVFVRQVEQEVLKLNQECLAFKREQEETGGESNICGGRQQAECLMDQLSSFQKLFDILTVPEKREYLRMILDKVVWDGEQVHLFICGSQCHDNSSG

SEQ ID NO: 6056 - protein, 542 aa, unidentified
  source 1..542: note = uncultivated organism
MPKYQATAYIRLSYTDDRSSESDSVTNQRKLIENFIERNPDIQIVSEKIDDGYSGIIFDRPAFKEMMQDITDGKVNCVIVKDLSRLGREYIETGRYLRRVFPTYGVRFVAITDNIDTAHEGSGDDLTVSVKNIMNEAYCRDISIKTRTSLDIKRRNGDFVGAFPAYGYMKSEENKNLLVPDPYASCVVQDIFRMRLDGTSALRIATVLNEMGILSPLAYKKNNGFPYAKHGYADKEDCKWSATTIIRILQDETYIGTLVQGKQGTPHYKIKQMEQRPSSEWIRVPDAHEPLIAKQDFELVQRIRRLDTRTSPKQDTVYLFSGVLICGCCGSRMTRKTNRVKGKEYHYYYCPTGKKHGCTNPVMLKESDLVECVKDSLKGYIDNVSCLQAILDGIDQSSINQALANEYASHIAANEQQVEQALEFKARLYESLITGTISKEEYTDYKARYTSIAENAKESIRVLKEKLADVLENRSERNRWISHFTQFSTMETLDRKAVVHMIQSIKVIGKKELEITFTYQDEYQKAIQLIQLAEQTSQRKVG

SEQ ID NO: 6057 - protein, 566 aa, unidentified
  source 1..566: note = uncultivated organism
MKCAIYTRVSTDMQAEKEYNSCEAQEERIKSYIKSQEELKLYQVYSDPGYSGANIERPALGRMLKDIVDGKIDCVLCYKIDRLTRSPKDFYALIELFENHGVSFISITEHFDTATPSGRLLRNIMLTFAQFERELSTERTKDKMYQRAEKGMWNGGTVPYGYKNKDKKLVINPEESEFVKEMFKMFIETKSLAETRRRINKKYKTRKGKKFSKTTVDNILRNPVYYGKLPYKENLYDGVHKPIITESMFLKAQSFHKKRYKRKTKIDHVYFLQGLLKCSECGSTMTPTYTKNKHKDGITPRYTKYYRCTKTYKHEWNSCNIKSVNADKIEDFVIDKLKEISKDKKTINRIVERANKNDELKINPLKKQEKEKIDELRVVGNKLQNLIDILAEVGIEKFPSIRKEIENLENKKKVLEFDLEGIKLSIQKEEKEKFETKIVLENLKDFSKKIGEISPTERPQLFQSLIKSISYGLDEVSLDIFYLPERYIQGLGNHRAYSAGRADVVGEASAEGRSPSKRGRRAPSCEADEHGLGGRWSAGGNWCSKNRKEWLSIANHVRRWAEKQVA

SEQ ID NO: 6058 - protein, 557 aa, unidentified
  source 1..557: note = uncultivated organism
MEQMQMNMPDIYDAALYLRLSKDDMEEGDAKSESNSIANQRELLRSFVKSQPDIQIFDIYVDDGYSGGNFDRPEFKRMTTDIEAGKVNCVIVKDLSRFGREYIEAGRWIEKTYPALNVRFISVTDQFDSKTADFSEKSFVVPIKNFVNESYCRDISGKVRSHQKIKREKGEFIGAFAPYGYCKDPENKNCLVIDSYAADIVRKIFSWKIDGFSLGAIAEKLNVRHVQSPKEYKKANGENYNSGFHSSDTPKWSAVQIKRILTNEVYIGNMVQGKQERISYKVKQRLDKPESEWVKVENTHPAIIRQNDFDVVQKLLQYDGRASKTSDSANFFSGFVFCGDCKTPMIRRVNQYKGKKKAFYICQTKNKGGDCTRHSIPEEVLKRIVLKEIQAYTALFVDYQMIMEELCEMQVSYDQVIGYDTQISKLQEEYNRYYSLKASLGDDLKEGLISKEEFDDFRESYGRKCEELEQMIENQKKLVKQMFEGGVSATVQLEDWKKSLEIKELDRTLLALTVDKIYIYENKQIKIHIRYQDMIEKMKVIRRFYAEHRTECRKEAR

SEQ ID NO: 6059 - protein, 553 aa, unidentified
  source 1..553: note = uncultivated organism
MLSNNLSKTYLCGGYLRLSKEDDGIAKSETLQSNSIENQKEYIEDYLQSKPEIRVVDFYIDDGYSGVNFDRPDFQRMLQDIKDKKINCVIVKDLSRLGRNYIEVGKYIERLFPFLGVRFIAINDNFDSADDAALSNNIIVPFKNLINDAYCRDISIKIRSHLEVKRKRGEFIGAFPVYGYMRGEDKNKLIVDPCAAEIVKEIFAMKMEGMSQQAIADELNRLGVLSPAEYKKEQGSGYKTVFQTHSRAKWTAVAVLRVLTNEVYMGTLIQGKESTPNYKVRVREKKPKEEWIRVENAHEAIISRTDFELISDILQKDTRVSTGKSAVSVYSGYLVCADCGCSMVRKKVRSGSLEYVYYVCSGNKKDKDICSSHRISENTLNMAITKTLQLHLKQLGDLQESIRYIRETSGNSDKIKKLVLQSEKRKEDIEKYNRLKLECYEDYKKELITQDEYMLFKKELDNRIEEIQRAITELGKKKRMLLDGGYEKESLLEKFLTSKEIELKRSILVRFISRIYVYEDHRIEIIFRYQDEIRQLLGIVEEIKQEVALEEVI

SEQ ID NO: 6060 - protein, 538 aa, unidentified
  source 1..538: note = uncultivated organism
MSRNNNRGRGEARESASRTNGTIRCAIYTRKSTDEGLEQEFNSLDAQRESAEAYIASQRHEGWVCIPDRFDDGGFTGGNMERPALKRLFAGIESGDIDCVVVYKVDRLSRSLLDFARMMELFDKHAVSFVSVTQQFNTTSSMGRLTLNILLSFAQFEREIISERTRDKMSAARRKGKWVGGMPVLGYDVDPKGGRLIVNEDESVQVRGMYQLYLEHKALIPVVQEIERCGWKNKQWTTKKGQERGGKPFTKNSLFRLLTNVIYTGKVDYKGTIHNGEHNEIVDIDLWQRVQDALRRNGSTGGKEVRNKYGALLKGILYCAPCGTGMVHTYTAKDNGKRYRYYVCLNAQQRGWSSCPTKSLNAHEIETAVVEHIRGIARNEEIIAATAAKVRVESGKRMAELETEQRGHERELKRLHTRVQKLVSESFTAASNGGAAMDQLADLQDQIRTIEQRMTAIREEVIAIQKEAVDEGDMARALAVFDPVWESLSPREQSRIVRLLVERVGYDGRDGRVTVTFRSPGVKALCSEADIRNREVSV

SEQ ID NO: 6061 - protein, 524 aa, unidentified
  source 1..524: note = uncultivated organism
MPQVQVIEPVNAIFQYAPPKLRVCAYARVSSDSADQLNSFSVQMDHYQNLIAKNEEWELADVYADEGITGTRSDKREEFQRMLSDCRKGKIDLILVKSVSRFARNIHDCLAAVRELKALDIEVEFEEDGLKTADMHDEMIIGAFSAIAQEESTSISNNMRWSYARRMQNGSFTCCCAPYGYDLIDGILIPNPKEAPVVRRIFAGYLSGKSMEQIADQLNADGIPCKNGEVKWLYTAISYILKSERYIGDALLQKSYTTDTMPFRTVRNKGEKDRYYITGSHEAMISRTVFEQAQQLMKARNALCPHKGYGRQYVFSQKIRCGKCGTNFSRRVTNGKVYWMCRRHFRSKELCEVRQIREDAIIQAFNRMYNKLKQNSGYILTPALSQLTDLKSKITMSDGKIGSINKEIAELTKQSLVLNRLRTKGYMDSVIFMQKTNEINQQLDLLKRNRRRLMESDADDQIICDCRLLIGIMEQGAPFLADFDEMLFYSMVHHIVVTEQDKLRFHLLGGFTLTEPLPGEVFGR

SEQ ID NO: 6062 - protein, 594 aa, unidentified
  source 1..594: note = uncultivated organism
MAPALGPNPVVPGKRNLRRASSVRDPRFSPTPKILTISTAVPSCTVNNSFCMPYSVGIQNPVNITPPPPPVLRKGEKRMRVAVYCRVSTDDQAGSKTIENQVDFARRYCALNGLEIYDFYCDDGVSGTVPVEGRPAGSRMLADARRGCFGAVYVYRVDRLARTALDILRTHQCLDEAKVALKSMTEGFDTSTPSGKFFMTTLGGIAEIERETIAERMRLGKDRALREGRWPGGPAPYGYKLNSGRLVVDGEKARAVSSIFSLYVQGGMSTAAIADYLNATGVPSPGAARAGGCQGKKWHGGRVWGILSNPAYRGVFVFRRRGEGEQVNLVCPPIVTGEQWEEARAVRLKNSLDARKNSKKEYLLKGLIRCGLCGRLYCGDGSGSGKRRCYYRCAGSTSGRRTASRCRAKSVRADLLENIVWNDLCRFVLNDREILFRIEKNAGRQVRDDVPEDGELPAIEAAIRVKKEDRRKLIGLFRQSLISEEELRSELSGISRELEALEKRRLVVVSLEEGRACAGDLRDRMRARVQRAGPGERRDLVRGLVEGITVDMAETGGKTVPRAVISYIFGGLPDSATFVETRGKYRLGVPRSRY

SEQ ID NO: 6063 - protein, 559 aa, unidentified
  source 1..559: note = uncultivated organism
MEKRNFSAGENAAADNKCWKAALYLRLSKEDGDKEESDSITNQKELLRSFVRSTPGIEAVSERVDDGFSGANFQRPDFQKMMEDLRAGTVNCVIVKDLSRFGRSFGEAGRYIEHVFPFLGVRFISVNDGIDTMQKRNHGDDIVIPFLNLVNDAYCRDISVKIRSQLDVKRKKGDFVGSFAVYGYKKDEQDKNRLVIDEEAASIVRDIFRWKLEGQSAQGIANRLNSLGVLSPMEYKKAAGLSYLTTFKTSNKAKWSAVAVRRILRDEVYIGTMVQGKYATPNHKIKKKFQKPPEDWERVAGTHEAIISREEFQLANSLLSRDTRIAPGESAVYPFSGIAVCGNCHENMIRRLVQVGDKRYVYYICSSGCKGYRIGENDLTDGVTAAVRDHISNILNLERILLFIDGLPLKQDEVKRLDRQIMRKREEIERYKKLIFSLYENLQNGLLNETEYRRMKESYNVLHTDAEQALGTLTREVEDIISCKGEKNVWIEYFKQYHNFSELTRKLLVAVTDRIVIYPKSRLEINFRYQYDYMRALSFAEAVSELHPVPGNELLTEVV

SEQ ID NO: 6064 - protein, 502 aa, unidentified
  source 1..502: note = uncultivated organism
MQVAIYIRWSTEDQGEGTTLDVQMEACQAYILSQGWAVLPERIYIDDGVSGGTLERPGLARLRAAVQAGQIDCVVVYKLDRLSRSVVDMVRLVLDEWEGHCCIKSAREPIDTLTQTGRLFFYQLMSFAEWERSVIRERTFAGKLRRAQEGKNPGITAAYGYRLGSQGLPEVAVDEACVVRLIFRLYLSGMGCTQIARHLDGLGHPSPAGRRWGSGQISRVLSNPIYMGTLVYGKQRTTRGRKVRSERPHVVREGAVAAIVDRASFEAVQALKARRPGVGRSQGSGRSLSSQSLLAGLLRCPCGHAYCGNGGTGPRHKYRYYCCAGARCGAGRIRQAELDGLVMHTLAARLAAYGGGLAERVARHLRRERDEAGAALRAAERDLARAAEKESRLQSLLLDGQITAAEYRELRAGLAGQLAGLTQRREAVLQRGAALAAMSAAQGLPPWEVLDPLEQKRLVGQFIVAVTARRDRETGSLELAIAWRLPEPCPLQGGDGRGAYPA

SEQ ID NO: 6065 - protein, 533 aa, unidentified
  source 1..533: note = uncultivated organism
MSGKEKTNGSLAMAPRVIMIPAANQETARKLRVAAYARVSSNSEDQKHSFAAQNAYYSKLIADDPNWELADIYADQGITGTSIDKRDDFLRMMEDCRKGRIDRILVKSSSRFARNTKESLEAVRELAALGVSVYFEEQNIDTAQVSGEVLIAMFAALAQRESEAISGRTRWGIQRCMEQGRFTPTAIPLGYRKDKAGNIFIDEEQAKYIRIIFKEFLDGKNSRDIAAALDMEQKKLGQVQGAYRWTYGAVIRILRNEKYTGNSIWQKTYRTDDLSHRKVINRGQKKRFYAKETHPPIIDKVTFEKAQRILDERQRKFFDSHAGASLLQGKIKCGKCGSNFRKVVSGGIAYQVCRNHAQRKELCSVRQIPESAIYAAFLRLHYQLKYNGSSVLTQLISDLRAVRTGSLLWNENIVEINKQISDIASQERLLTQLKQQGSVDPDIFISRGNLLAERRRELKLQKERILRSEEDHTIQQTQDMLDVLESGPDRLDAFDEQLFSDLVEKIVVVDNEKLCFRLLNGLEVTEKIERTQR

SEQ ID NO: 6066 - protein, 621 aa, unidentified
  source 1..621: note = uncultivated organism
MRIATYTRISTDEVNQPYSLGAQSERLASYVASQEDWELTGTFTDQMSGAKLERPGLTNALRAAKAGRFDLLLVYRVDRLSRSVRGLAEVLETLDAAGVGFRSATEPFDTTSAAGRMMVQMLGVFAEFERATIIDRVIAGMERKASQGGWCGGRHPFGYRAAKGEGTLDVDEAESPLLPVIFDLYVNKRLGTHAIANWLRDAGLSTRAGKPWTYKAILTILKNRTYLGEVHFRGTWSKGTHPPLVEKSLFDAAQAILSERGQDVSKRASNSSDYLLTGLVVCGGCGCHFTGTRATGRNATYRYYTCGGRQRNGTKTCSSDRLPAGALDDAVVQSLLAAYEDTDLFANAVAEAHGRAQLGHSRHEGELAALDAELAKVDAGIDRYLRAFETGAMPEAICGERVKALGSQSTALRVRREVLSDEMDEADLTAPSPEELSALRDRVTEALASGDPAPVKTLLQALIHEIRVDSRQAIHPIFRVPVGGGHPENDAVRAPSRSVEAKGLEPSNLLTASQALYQLSYAPEGMPHYQHSTGRRPNRSGTVQGRVPGPVVSPGGRLGALGRPTRCVGCIRACREASGYVQWQPMLPRSPSVWLSAVVVRSWNPGNPARCRMLLIGSVSK

SEQ ID NO: 6067 - protein, 541 aa, unidentified
  source 1..541: note = uncultivated organism
MTATRQRPRPAGTALGPPAGPRRVAVYLRRSTDDEHQPFSIDAQQTALEAYVKSQPGWTLVATYSDDASGASAQRPSLQRALRAARAGRYDVLLVYRVDRFSRRLSDLLDLLADLDDAGVSFASATEPFDTSTSIGRMLVQLLGVFAEFERETIIDRITSGMNAKAAKGKWAGGRRPYGYTIDPATATLVPHPAEAPHVQEMFRLYTRQRLGTRAIANELTRRGITTAAGKPWASLQVGHVLANPAYAGIIARKDVHVPDAHPALIDAATFRRAAEIAAARSGPHTQRAASPSDYHLSSLIRCPGCGCKYIGQSATGRSQTYRYYICFTRSRYGPTACNATRIPAGEADIAALQSLSAFYVQETEVLLASFDRGLARQNSGHDERQAQADAVAAQIQAKQAAVLRYQAAFENGTMDDVTAGPRLRELQQELIALKARQAELDDANAELPQPPPPGILGHLRDYLPSLITGQGNAIQRKAAIEALIHEIRITEKGLIPVYQIPAPDTTIPGQDPVRAMPDSEHQDGLEPRHLEPLRASDRRR

SEQ ID NO: 6068 - protein, 531 aa, unidentified
  source 1..531: note = uncultivated organism
MTQRLRCAIYTRKSSEEGLEQNFNSLHAQREACEAYILSQTGEGWSAIKTAYDDGGYSGGSMERPGLKQLMTDINRGLVDNVVVYKVDRLTRSLADFAKIVEVFEAKGVSFVSVTQAFNTTSSMGRLTLNVLLSFAQFEREVTGERIRDKVAASKAKGLRMGGRPPLGYAIVEGRLAIVEDEATRVRAAFDRFLTLGSIRALHEDGVEAKCWVNKTGSLAGGGAMSRGALDYMLHNPAYRGITRHKDKRYEGTHPAIVSQELWDAVQAKLAQATATQPGTKLLGERAMLEGLVFDDRGHPMVAVHSKRGVKRYRYYLSRAKLTGKAEAGSLHRISAGMLEQFLTEQMRPKLSPSWRPEDAEMDRLVAALQCVTLSEDQIEVRAMKAALSVELLSGQDVKHLDAATSSIRIAFHMRRRQHAVTLEAADGTPGQSARIDRALVRAVVLAKTWSRQLESGDVPSIKALARREGLCNHYTARLLPLAYLAPDIAETILAGRQGYGVSLAGLTAQPLPFSWSAQRDLVAQLGKRAG

SEQ ID NO: 6069 - protein, 530 aa, unidentified
  source 1..530: note = uncultivated organism
MSATATKRPAVSRRATANNALGCPPVTRPGTRSIRCAIYTRKSTEEGLNQEFNSLDAQRESAIAYIASQKNEGWLCISEKYDDGGFTGGNIERPALKRLMADIEAGKVDCVVVYKVDRLSRSLMDFARLMALFDRTGVSFVSVTQQFNTTHSMGRLTLNILLSFAQFEREIISERTRDKIASARRKGKYQHGKPILGYDFVPAPAPFTGRRLVVNQVEAGRVRRIFELYLEVESILRVADECNARGWTTKSWTTTAGRVVGNRAFDKTIISRLLRNPLYLGKVPHNGAVYDGEHEAIVDEDLFRRVQAQLKLAGKRGGASVKNSTGSLLGGLVRCRGCGCAMSPSSASKKKPDGARTRYRYYVCCNAVKRGRQHCAAPSLPGPALEAFVIEQVKATLADSPQMSAVVARAVDLLREAAGARIAEQTRLRAVLERLSGEEPTAATRREIERVRRTLAAVSAQVAADADRLIDEDEVAGAVEAFDGVWNAMTQAERAEFLRVVIASVEYDGQTQNVSITFNPEASATETPIR

SEQ ID NO: 6070 - protein, 599 aa, unidentified
  source 1..599: note = uncultivated organism
MKKNAAIYCRVSTEDQAREGYSLGEQLLKLQELCKFRDYNVYGVYEDAGISAKDTNRPKFKEMMEEVRKQNINVIVAYKLDRLTRSVRDLENLIVELEKCNCSLECAMDDINTSTANGKFFVRMLTVLSQLEIERVSERTKFGMVGAIKDGHIPVRKILGFMRDNKKLVINPAESEIVERIFDLYLKGKSYQNISNILNEEKVLNKKWYDSTILKILSNPLYKGDFISGGRNGTPVLYENVVEPIISKKLWEDCQEQSRKNTRNYTRRNNYIFFQKIICPHCHKIMACKAPGGSKKKYIYYQCNDCKTYIREDKLIVLLIEQITTIIEYDITVRQFFAPLLKHKVENTNELLEKEINNLKDKVIRLKDAYLNKIISIDEYKEDKEYLEKRIKDIEVKKQEEEELEQYNFTFEDVMLKRDLESIKCLINPLYHSSFEIRWNELTISEKQNLIMSYIESIEVIKKDNNELEIKNINFRKTFIEEYANLFNGGAINRFQDVSMNGEKVQIEVCAPMTKTEIEKHIKRLQINYPIDYQEIVKEKYNDHQFCLKYTRQNIFNEPLKMIPIINKKGLNKVDKFGIIEVPVPPITYLYADKIVSKE

SEQ ID NO: 6071 - protein, 548 aa, unidentified
  source 1..548: note = uncultivated organism
MQNKTFQAAVYLRLSREDGDVTDGGKQISNSIANQKELVMDFLKSHPEITVISTYTDDGYTGVNFDRPEFQRMLSDIREGKIDCIIVKDLSRFGRNYIESGRYIEKIFPMLGIRFIAITDGYDSINEDMGSDMIIPFKNLINDAYCRDISIKIRSHMDIKRRNGEYIGAFAAYGYLKDEENKNHLVVDEYAADVVRDIFSMKLCGMSQQAIADKLNADGVLSPMQYKKSIGVGLNSSFQKAVKPKWSYNAVLRILKNEVYTGTVVQGKCTTPNYKIKKRIHKDEADWIRVEDMHEAVIEKSEFDIVQEILLKDTRVAPEQAEVFPLAGLVYCADCGEPMVRKTVPAGGKRYVYYVCSGNKRDKHKCSSHSISEKKLMDGVLDVVKNYIGRVIAAAFAVEMIYQTPEMKPDIVKFENRLQKLREEAESCNNRKKNLYEDYKDGILSRDEYSMLRDQYQNQLGEIEKSIETITAERDGILANGTGKQEWIEKLRKYKGVNELDRKLSSFIIERVEVVKSNAINVTLRFEKALAEMEHMIELYSGEIKEAM

SEQ ID NO: 6072 - protein, 570 aa, unidentified
  source 1..570: note = uncultivated organism
MGKPNASGMARKPRIIRCAIYTRKSTEEGLEQEFNSLDAQREACAAYVLSQRHEGWILLPEFYDDGGYSGGNMERPGLRRLLAAVGAGKIDVIVVYKVDRLTRALSDFARIVETLDAAGASFVSITQAFNTTTSMGRLTLNVLLSFAQFEREVISERVRDKIAASKQKGMWMGGAVPLGYDVIDRKLVPNTAEAETVRHIFRRYLEVRSVRELMEVLKAEGIRTKLQVRKDGATRGGIPFMRGPLYCLLKNPIYIGQIPHRKATYPGQHEPIVPLEQWNAVQALLAHNGAERKFGTNAAEASLLAGMIKDGEGRSLTPSHASKKHQHYRYYVSSSAEECRASKPTRVPAGEIEKLVTEGVAQHLSDKNKLLDALQNAPLDAHGRDHLLHSWLALGARIPIMPRSELRELMMGIQLEVVVGANRCAATFDPECLRQRSERGEEAVSAALEHRVTIALPGALVRRGQELRLVYTSNGQACDGRRDPRLISLLAKGFAARTELLCQPASGNGSQAQIRRAHLSRVARASYLAPDIIEAVLSGRQPAQLTGRTILRAANIALDWYEQRRLFGFG

SEQ ID NO: 6073 - protein, 560 aa, unidentified
  source 1..560: note = uncultivated organism
MQKFIDMTYHAAIYLRLSKEDGDFSQLGEKKESNSIANQRKLIKDYLKHHPEIILTQEFCDDGFTGANFDRPDFQKMIELVKKKEIDCIIVKDLSRFGRDYIESGKYIEKIFPALGIRFIAINDNYDSAANQQAGNEIILPFKNLINDSYSRDISIKVRSNLDIKRRNGEFVGNHAIYGYQRSEENKNQLVIDKTAAPVVESIFRMKIDGFSPAQIADRLNQDGVLSPYEYKRHCGSRYQSGFRKQARTVWSPVAIYRILKNEMYTGTLVQGKTTTPNHKVKVRSTKDESEWVRVENAHEAIIPPATFDMVQKLMLEDSRSPVGGEAVHLFSGKVFCADCHSSMIRRKTKSHGKEYVYFICGANKQNKEICSPHRITEQAVYDTVLAVIQSQVSLALDLESALKELDGISWERRELERIERGIARQEEVIEYNKKMKAMVYEDFKMEVITLDEYKILKADCDQKIQDANDSIAHLIGNRNKVNSGLTGQQSWLSQFRKYQNIQELTRRVVIHFVERIEITADKQISLTLNHADQFQAILEFLEEYQGQQKNAQPVKKEVG

SEQ ID NO: 6074 - protein, 517 aa, unidentified
  source 1..517: note = uncultivated organism
MSKRSTTVPAVRCAIYTRKSTEEGLEQAFNSLDAQREAAEAYIASQQHEGWVCLPDRYDDGGYSGGNAERPALKRLLADIDAGKVDAVIVYKVDRLSRSLLDFARMMQVFEAKSVAFVSVTQHFNTNQSMGRLTLNILLSFAQFERELVSERTRDKIAATRRKGKWSGGFPILGYDVDRERMRLVVNEKEAERVRAIFDLYLEHSSLITVSRILSRRGWTTKSWTSRKGVPLGGGEFNKNNLHALLTNVLYTGVVKYKQERHPGEHEAIIDSATFEKVQKTLRANGSSGGMHVRNKHGALLKGLLRCAPCNAAMTHCFTVRGAKAYRYYTCCRAQKQGWDTCPSKSVPAEAMEQFVVDRIRAMGSDPELVAAAVEAAGAQEREAAEAIRAEAAALGREVRRLAADLRKTAATAGKSGHAAARLADLNEAIRRGEERLAELAQEVEAAEARVLDPGEAAAALARFDPVWESLTPKERAKLLHLVVQSVSYDGGAGTVSITFHPGGIRSLGVQVPEATA

SEQ ID NO: 6075 - protein, 534 aa, unidentified
  source 1..534: note = uncultivated organism
MKAIVRRCAVYTRKSTEEGLDQAFNSLDAQREACEAYIKSQAHEGWKLVKTAYDDGGFSGGSMERPAVQRLMADVKQGLVDIVVVYKVDRLTRSLADFAKIVEVLDSHGASFVSVTQQFNTTSSMGRLTLNVLLSFAQFEREVTGERIRDKIAASKRKGMWMGGTTPLGYDVKDRQLVVNEADAETVRLIYRRYLELGCVSALTLDLRAKGIVSKLKVSRRGNRHGGQPFGRGALYHLLQNRLYLGEIVHKDQTYPGQHPAIVPQELWDQVQQALAANRTQHHRARTEGSAHLLVGRLWDDRGQLMVPTYTRKANGQQYRYYVSQCLMDPSKGSAGSVSRISAEAIEQLVEKAVCDGLRPAEQKKWRSTSHADRSSRLRAYVEKVIIRQNDVEIGLTDQARQLSAGAQPSTALDKAERAIKVPVTMKLAASGKAIVSLDGSAPQESRVDKALLRAVTRANRWRELLESGVARSAYDLARHESCRVSYVQRHLPLAFLAPDIVEAIVAGRQPRSWMLSDMITDTACLSWTGYRPK

SEQ ID NO: 6076 - protein, 514 aa, unidentified
  source 1..514: note = uncultivated organism
MSRRPTRSSVEPETRRVAIYTRKSTTMGLEQEFNSLDSQRESCLAYIQRQPGWKLVDERYDDGGFTGANIDRPAFTRLMADVEAGKVDVIVVYKVDRLSRSLLDFVKVMERLGAAGASFVSVTQNFSTADAMGRLTMNMLMSFAEFEREMISERTRDKIAGARRKGKWTGGPVPYGYSVKDKKLLVNELEARVVREAFDLFLMHRQQAKVAHLLNERMLLPRGSKVTKKLAWSKEGIGRILKSPIYAGFMMYGDELHPGEHPPLIEESTYRAAQAILAGTSRVVRWTGTNPDYVLRSLVRCALCGEMMCPGSTTKPSTGKTHRYYRCSRREKYGKDQCAGRPLPAAALEEFVVARISNATADGSLAERVAKHLETLTAGKGEDFGKLRAELATKIAESSATASRLTEELVRLDGRARELIEQKLGVEADRLAASEQQLRDLERDAAELEIARKDHAWFVAALRDFAKVWVNMSPDNQGRFLRALIDKVVVDEDKGTCRVELIDFGAAAGTKEAA

SEQ ID NO: 6077 - protein, 521 aa, unidentified
  source 1..521: note = uncultivated organism
MSKNVTIIPPSEGRPDTLRVAAYCRVSTDLEEQASSYASQIRSYTELISQHEGWELVDIYADEAVSGTKTDKREDFNRLLADCRKGKIDRVLVKSISRFSRNTKDCLAAMRELMRLGVTVQFEKENIDTGTLTTELMVSVSGSLAQQESMSISQNIRMGYRRRMERGEFIASSPPYGYRNAGGGRLEIVPEEAEVIRWVFESYLNGQGIIAIAEEMNRRGIPKRHGEAAWIPYAVACWLRNEKYTGNTLCQKTFTTGFPYVSVKNRGEVDQFYIENSHPAIISQEIFDKVQALRKKKKAPVSAPSKFPLTRKMICGKCGAKFYRTVDRHGANGWVCSGHRDGNRNRKGACPNLPVRERDIYTAFIRMYNKLRLHEGIILRPALDQMEALESAVQRENPAMLEINRAIAQVTEQNYKISKLRTSGLLDADTCAAKLATLDAQLTQLRAKRRRLLRNDDISEMADALRQTVETLHQGPEQLDEFNEELFNEMVEKITVDTDHVLRFHLRGGFDVAEPLWRKTR

SEQ ID NO: 6078 - protein, 552 aa, unidentified
  source 1..552: note = uncultivated organism
MSNIPYATLSMEALQEYRAIAYYRLSKAHKNKKASESDSIANQRKLIQCFLDRHPNIVLVAEAYDDGYTGTNFDRPGFEEVLDAIKSGKANCVIVKDLSRLGREYISVGDYLEQKFPDWGVRFIAINDDVDSIKTNAGDDLIVPIKNIMNESYCRELSKKLRNQFQIQRGNGEFLGAFASYGYCKSPDDKHKLIVDEFAAEVVKGIFSLQVKGYSPSAIAEYLNNEHILPPSEYKKSKGLNYKSGFGSAKQVKWSAVTVIRILTNPIYAGTLVQGKRSTPNFKVKRMRVRPEHEWSVVKDNHPAIIDPLVFATVQRMMKRDTRSAPKASSVYPLSGVLFCPDCGKPMSRRTVTKGDKKYNYYVCSTYKNGNGCSSHSIECETMDGIVLRAIGSQVNVIVEMEKFLTELGTTDVWHARVRRLDSIIAQKRDELEKYEESQMSLYESLRDGILDRTEYNRMKQIYGSKIEEAQKAINELAASRDEAANNARQDNGWVKQFIKFQGLEDLTREVVFTLVDKIYVYADKRVKIDFNYRNDIDFYAGILQRQQREVS

SEQ ID NO: 6079 - protein, 580 aa, unidentified
  source 1..580: note = uncultivated organism
MERHDKTVRVAIYTRKSVEDAEDKAFNSIDAQRQMCESFIAAKAAEGWVALQERYDDYGYSGGDLNRPAYRRLMEHCEQGLIHKIIVFRIDRMTRSTKDFCEFDEKMKRLGVGFTSVSEPFVDTSSPMGELVVNLIVSFGQWERKTIQERIQRHFRTALDQGFFVGGVPPYGYKVENQNLVPDPATAKNVPHIFKLFLQLKATKKVAAQLQREGIERFPGRPWTMQSVHNCLRNVRYVGDANNHGKIVKGRQEALVTRELWDKVSSILKEVTTTPGKRVPSPETALFQGLVFCGHCKHPMSYRWSKRDTLGVRNYSYFVCQQDMRKGISTCPVRHVSVTTVQDVVEQELETVMLASTALLVAAANATTFTPEQIVAGFRRHTFWKELSLEDRRIIYRLFIRSITVFKTSLELRMNLPGPDAVDELKRTRYIPKDAQPDGDIHLEEAECLFVKVPVAFRTVSGRKQIVKDGKAAAPAKPSQQLLNTAMAQGTVLKSFAKAIAWMKLIDEGRAASISQLAELVGVDRHFVLHTLRLATLSPRIVRAALSGDLPDGFSLQKVRKIETDDWEEQERLLGFPPAS

SEQ ID NO: 6080 - protein, 531 aa, unidentified
  source 1..531: note = uncultivated organism
MAEKHLTDGTTALAAQPRVIKIEAAEKPQNAQLRVAAYTRVSSDSDDQLNSFAAQNRYYAELISSKAEWRMVDIYADEGITGTSAAKREDFQRMMADCRRGLIDQILVKSISRFARNTKDCLEAVRELKALGVNVRFEREGIDTANVSSELITAIYAAFAQKESESISGNMRWSYQRRMENGEFNTCKAPYGYRLHKSTLAIEEGEAAIVRLIFALYLDGKSRREIAKYLSEMEVPTRQDVFGWKESTVSYILNNERYAGNALLAKKITTDDFPRKKVRNHGEREQYYVSNSHPAILPSGIFEKTQALSKRRITFKDGKTVEHPLRKIIRCNKCGSIFKRRNTGGNEYWVCTSHFENRESCSIQQIPGKEFEKAICRLYYKLKHQSLPILEQMLETLQTIRDRRLLWSEDIVSLNKKISELSSQNQTLAFLKQNGLVDPDIFISKSNELTRQLRQAKLDKEKLMDAEGDATAQRTRELIALLEDGPDFLDRPDTELCGALVAEIIVESNDTLRFRLHNGLELRESIERTVR

SEQ ID NO: 6081 - protein, 597 aa, unidentified
  source 1..597: note = uncultivated organism
MKNAAIYCRVSTEDQAREGYSLGEQLEKLKDLCKFRNYNVYRVYEDAGISAKDMDHRPEFKKMLEDVKNKKVNVIVSYKLDRLTRSVRDLETLISELEKYDCSLECAMDDINTSTANGRFFVRMLTVLSQLEIERVSERTKFGLVGAIKDGHIPVRKTLGFMRDNKKLIINPNESDIVLRIFDLYLKGNSYQRIANIFNKENILNKKWYDTTILKILSNPLYKGDYISGGRTGTPVLYESVVEPIVSKKMWEECQVQTRKNTRNYTRRNDYIFFQKIMCPKCHRIMACKAPGGSKKKYIYYKCDNCKTSINENKLTALLVDEISSIMEYDITVKKFFAPLLKHKVENANELLTKEINSLKDKIIRLKEAYLNNIISIEEYKIDKNNLENKIKELEEKQKEERELDKYNFTFEDIMLKRDLESIKSMTIPNYQNSFKTRWNELTTKGKQNIMMDYIDSIEVIKKDNNNLEIKQINFRKTFIEEYANLFNTKAINCYKDISANGNNIQIETCAPMTKDEIKKYIKKLQLYYPIDYQEVEKKQINDNQFQLKYNRSNRFNEPLKIIPIINNNNFKTITKYGVIEIPVHPIPVMIPNFNIK

SEQ ID NO: 6082 - protein, 514 aa, unidentified
  source 1..514: note = uncultivated organism
MPTVTIIEPISKLKIAKKLRVAAYCRVSSNSADQQNSYAVQLAYYGSKFSDSETETLVEIYADEGISGTRDDKRVEFQRMINDCRKGKIDRIYTKSISRFSRNTRDCLKYVRELKSLGITILFEKENVDTAKITDEMMITIMGGLAQEESISISQNMQWSIRKRMQNGTYIASNQPYGYDKINGQLVINESEAEVVRRIFNEYLSGFGLNSICRNLNADGIIMGKSGIEWKKKAVRYILTNEKYIGDCLWQKSYTENVFPFKKPKNRGESDQYYVADHHEPIISREVFEAVQELLKKRSEEFGHTEFRKYPLTMKIKCGNCGRIFKRKESDSKVLWVCRQHDLDGELCDFKGIEEDEFYGAFIRLFNKLLLNYKTILIPLQKSLHELKMKKHLGNLNAAEIHRNIIQLREQSHVISNLRTKGFLTEAKYQEQTAEIRRKIAENQKDLKLLTHSDDDSETLEQIEMLIDFFKCRNEIMVNFEIDAFEFMIEKIIVNDQRNLEFHLLGGLKLREKL

SEQ ID NO: 6083 - protein, 532 aa, unidentified
  source 1..532: note = uncultivated organism
MIAPVRQVSAQTDERAVEAPHRTIRCAVYCRVSTDEQAALEYNSLQAQEEICRTYLGMRSRDPAAKETWEHAQTYVDSGLSGGTLERPALKRLLADAEAGHLDVILIYKIDRLSRSIHQFYRIWEVLERRGVDLVSATQDLNTSTSQGKLMLNMLLSFGQYERELVGERTRDKIAASRRRGRWTGGTPILGYDIRDGRLAMNEGEACRVREIFRLYLEHSSLTRVVEELNRRGWTTKCWTRKDGGDRDGRAFDKPALHRLLVNPLYAGRVRSNGSLHAGEHRAIVDEAAWNRANAHLRTSGATGGKSVRNKHGALLRGLLYCGACGYAMTHSFTKKGNVLYRYYVCVNRLKKGAHACPGGKVSAHEAERHVVGRIREIGSDPRLIAEVVRQAKVQLDEHRVALVAERRQLGKDLKRERASLRRLAAEQSRNGDGSGITARLAGIQQRIETVERRLVIVAQELDSAKRQVLDEGQVAAALSTFDAIWDALVPTEQARILRLLTERIAYDGRTGKLDLAFRPSGIGRLHELQAR

SEQ ID NO: 6084 - protein, 554 aa, unidentified
  source 1..554: note = uncultivated organism
MMKDNKKIYRTAVYLRLSKGDSDVDGCTKSESNSITNQRMICENFLKKNPDLKFAGFYIDDGFTGTNFDRPEMKRMLDDVDAGLIDCIVVKDLSRFGRERIETGTYIARTFKEKGIRFIAINDHYDTLTADGSETHIVMPIKALTNDNFSRDISTKVRSSQEIKMEKGDFIGAFAMYGYRKSLENKNVLIPDEYAAGIVKEIFADRLKGLSASAIAQKLNDAGILSPAEYKKKQGQKYSTSFQGAGISRWSAQTVIRILKDEVYTGVMAQGKRVKVSYKVKKEIRRPKEEWVRVENTHQAIVDQRTFDSVQMLLQRDTIRVADRKEPYLYSGLIYCADCGMSMIRRSDTYGKGRKVVNYICSNYNRNRQCSRHTIRESELTESILETLRSWIEIVADADRLAQRLNDMTLDYDSALEHDREIAELRKELLKYDTLKSSLYQDLKDGLINETQFNRYREEYTNRGIKVRDSIAEQERIIRDIYDKGISCGMDLDMLREKLNIGQIDRVLLVTLVDRILIHKNGDIEVVLKMKDEIGKVKILAEVAGFEMTGEVVG

SEQ ID NO: 6085 - protein, 562 aa, unidentified
  source 1..562: note = uncultivated organism
MSDQRTTASPIQKYLRAAYYGRVSTTDQVDGTSLETQCARCIAAIGLRGWELAGEYVDEGVSGAKGSRPQLDRLMADCRSGLIQAVVVSKLDRFGRSMRHLASLLGELDDVGIVFVSVAEAFDSSTPAGRLQRNMLGSFAEFERDQIRERTSSGRQAVALEGYWPGGPPPFGFKIVPDGRHSRLAIDESEAMVIRKAASLILDEGHSTYTAAATLNALGYHPRLAPRWSYVNLKLVLRDPRYSGRWEYGAPPGSWGKPVAFSENEISIPAILEPIRHEALVAAVMAQSMGPKNYEEHFYLLSKGMLLGACGTPMQGTSKSDRDGRWYRCRNRRPDSLEKCVCGRLHADDTEALVWSEVSRLLSDPAQLIALASEYLEVRSEQIAAEREEGEELSRQIDRLEQARTSRVTAALKVGLDPELLKEAIVEIDRDLALLRRRQQQRAALRHETAATSGRMAQLVAMAERAHERLDALSPAEQRLVLEALEIKVSVLSWDECEVCFGKGRVKGGLLCSTCRATRRVPRLQIEGTWTSALLDRLGGAGNLNAEVPRPRRGRPPHRRPP

SEQ ID NO: 6086 - protein, 576 aa, unidentified
  source 1..576: note = uncultivated organism
MKKRVYTLYRVSTLGQVDKDDIPMQKEACRAFAKEQGWEIVKEFSEKGVSGFKKSAKERDQLQQIQQAAVAREFDVLLVFMFDRLGRRDDETPFIVEWFVKQGVEVWSTQEGQQRFDTHVDKLMNYIRYWQASGESVKTSIRTRTRMEQLTAEGLYTGGVAAYGYRLVKRGRINKRNHEVYDLEIDEKEAEVVRLIFQKYVYEGYGAKRICNYLYEHNIMGRNGKNIPNVSIVRMIQNKSYTGYLINGNVETACPELRIIEPDLFERAQEVRHARKREKGANPLSYSSQALLCGIVFCAHCGNRMSLTSSTRKRIRADGTVIREKRIRYSCNYNVRHPGQCDGQSGYGVITLDNIVESVVRMKFAEIRECSKRKLLEEMRGKEQERVKQEIKRLEKELETKRQEQDMLKAETIRVIQGKSALDRDTLAEMMAETKAAVIKAGEDLQKAKAEEKALQEATKKMKRDCDDLFTWANVYEEADFGQRQAILHQFIKEVRVGRDYDVEIILNVSLDEFEEFKAHAWFPEDEKKGQMECKQAPKNVSSGSNASIVVMDEIGGQSLSIMPKTIAHASITYGG

SEQ ID NO: 6087 - protein, 521 aa, unidentified
  source 1..521: note = uncultivated organism
MHFATYGRKSVYSDKSDSVDNQQRMCREYVDLKFSGSVESFECYQDEGFTGANTNRPGLQRLLSDIADGLVDALVVYQLDRISRDVKDFANIYASLEEKGVMFISIKENIDTATPIGRAMMYVTMVFAQMERETIAARVTDNMIGLAKKGLWTGGNPPYGYRREHIQVNGKKHCTIVPVPEAAEYVLGIYKEFLDGGYSLQGMETEFKRQGRRTVNGAFFSTTQLHKILTMPYCVPATPEVWDFYSGLGCQMADERESWDGKCGVMIYGRSTEKNKKHQVQPHDAWVVTEGIHEPFVPADVWLAVQARFRQNTFEKKQKYDIPLLKGTLRCAKCGGLMQVSRKKLAHGRILSSYYCLKRMRQGVETCDMSMIKCSKLDDRVLAVFSEIEADPSVIRKYAEAESPSDDGSALRDLERKASVIRTRIGRLTESLADGSAASKYIIAQIEAEDLSLAAINREIEIAKTEARRSVASARSSAERSEEIGRMMRSLSGLSADEKNAIVREVVQECTWDGQTLFLRL

SEQ ID NO: 6088 - protein, 529 aa, unidentified
  source 1..529: note = uncultivated organism
MAYSEHTVWMAGLYARLSREDGDKMESDSIGTQLKMLYQYTDALPEISVYDTYTDDGYTGTNFNRPDFQRLIQDIEAGKVNCVIVKDLSRFGRNYKFSGYYLEEYFEDKGVRFIAVCDGVDSVHTTGCDMIIPMKNVFNEQYARDISRKVQAAFKTKQKAGEFVGAFACYGYKKSPADRHKLVIDEYAAGVVRRIFRMFQEGAGQMRIARTLNEEGILCPSAYKRAMGLNYRNCNKLDTTNYWTYSTIHNILKQEMYIGNIVQGKTRRRMKGKPKALPKELWVIRENQHEAIIDRETWETVQRLLAIQHVDLKLDENVSIFAGFLKCADCGRALAKRKDGNVLTYKCAGYTRYGLRVCTAHKIHDTVLREIILSDINAAIQKVSDLDGLFKAAAKRSEASACSCQGEIASCNSELCRVRKLKKGLYEDYKDEVISKEDYIRYREEYSAREAVLTARLDALNSRKETPGQEFESNPWVQKLLETGCIEELDRETIVALISYIKVFENQKIEIGYRFSECLDTMEKIALKL

SEQ ID NO: 6089 - protein, 506 aa, unidentified
  source 1..506: note = uncultivated organism
MENKICLGYSRVSSEEQAAHGISIDAQCGILEGYAAMTSQQIRIYEDAGYSGKNTNRPALQQLLSDCRSGSVSAVVVWKLDRLSRSLRDTLTIIEDVFQPRGITLVSVTESIDTSTPSGRMMLNLLASFAQLEREQDSDRVVMAHKHLARDCKYLGGHVPLGYCIDSEKHYQLDPVTAPVVRRVFEMYLSRSGYTPILDYLNSFTFAGTRKTPFGKSDLKFMLKNEIYSGTYVRRLGADPRHRITSPETIRVPGGVPAILTPDEWQRVCALRAQSERSAAIYNTRQIYPLSGLVHCAVCGAMMPLNYGGKDRDGSVQRYYTCRAKCTRPARLEGLQDAVFTVVENMAVSGADAIAAACSVANSYADAADEDHAAEARALDQQIMDINKRVASIVSFISGSGSAAPASLAEDLRRLEKDRDDLQARAAALRRPASRYDAKATATAILACKGIKKQPPGQQKLLLQAAVYKVLVSDEEYRILFNWHTGGGDDPPHHVSQSVTRFSSRS

SEQ ID NO: 6090 - protein, 538 aa, unidentified
  source 1..538: note = uncultivated organism
MPRIRCAIYVRKSTEKGLDMEFNSLHNQEEACRNYILSQAFQGWEFARTYSDGGISGGTMERPGLKQMLDDMARELINVVVVYKVDRLSRSIMDFHNMMREFEKHKCDFVSITQSFDTSNSMGKLTLNMLLSFAQFEREVSSERVRDKIRATRAKGMWTGGIPWIGYDSIDKKLIVNPTEAEQVRTIFEKYLELGSVVELARHLKSVGIFNKKWTAQNGKIKGGNPISVMSLHRILREKVYIGQIEHKRNKTVANGEHPAIISRELFDTVADKLSATSNGKSGRTNASPNILSRKLYTSDGVKFINSITKKSVGNRRPLYYYAARKNYIRTNDIDPLAQDIVTELLNADLSTLPTNIAHTLKQISFDYLNYTARCNLIRDLIDRAIVSDKIITFFIKPDPITLNKYTTDEFINQRSDPMQFIMNNNTIIIKRDIVITKGQQLTKYNTGRRGLMTFTENNHLIVRAFATAWQHRQHYEEHGSIRDLMRNKKTSDRTAQRYLNLAYMDPRQVNNIMSGKQKITIEKLFKIASCANTLLNT

SEQ ID NO: 6091 - protein, 552 aa, unidentified
  source 1..552: note = uncultivated organism
MDIKSNILFKVAIYLRLSKEDGNFSSNGKFESNSINSQREIIMNYLKEHPEMEIYDEYKDDGKTGTNFERSEFQRMYDDIKSGKVNCIIVKDLSRFGRDYIDCGRYIEKEFPSMNVRFIAINDGFDNFKAQSTDNIVLPFKNLINDSYSRDISIKIRSNLDIKRKQGEFISSFAVYGYKKHPDNKNQLIVDEYAAEVVKLIYKLKMDGLSPQSIADRLNNQGILSPMEYKKSNGEKLKTTFKKKNHSLWSHVAVRRILSNEIYTGVMVQGKRTTHNYKIKVQVHKKSEDWVRVENTHEAIISKKEFEDVKQLLLEDTRAFSASEAVHPFSGRIFCGDCGASAVRKTTKSGDKTYVYYVCCANKEDKNICTKHSIREDFLNEAVLTTIQKHILLLLDMKTALSKVEDVSWEQEELEKISTNIFIQEEIIKKNNELRASLYEDLKDGIISKEDYETLKVGMNERIANAKKAIAELNKSKINIEAGISEHQCWLEQFARFKNVNLITREVIVSLVEKIYIYEENEVEVVFNYRDEFKDIVSFLEKHQNRLRLEVG

SEQ ID NO: 6092 - protein, 536 aa, unidentified
  source 1..536: note = uncultivated organism
MDFAKREGFEICFADGKGAIYMDDGYSGYSLDRPAMNQLLEDARAKKFDLILVYKLDRFSRRLRDILNILDEFDVLGIQFKSATEPYDTTTSSGKLMLQQLGSFAEFERNRIIERVFPGMVRGVQAGHWQGSRYAPFGYSYDKTAKRLLVVEEEAQLVREIFQRYIAGEPCQKIAGDFFQKKILSRSGGTFNSSLVRKILRNKLYTGKLVWNAYHYDRKQKTLRGCRYVKNDPSKVIEADGLHQPVIELEVFSRAQNILDRNRRGSFHRKRVRDYVLSGILTCAKCGYRYNGVSNLKNHKTNEKRPYYRCSGRATRNIHCGNNDVRAEIPEAEVSEILEVLFTSGEVSKERMRNLITDHYREQAVGEVSHDLERLKKELQGCSAKLGKLTDVYLDGNIGKDIFEGKAQKLRNEEGEIRIKIERMELQLVEKEASKDYVKRAADVVRSSDSFRENLHPALRKELLKLVFKKLVIDHQQIASFELYEPFQGMYDKALAARGNVVLSERRWETCQQGKEKQTKRASKSQSCLLKPSDAK

SEQ ID NO: 6093 - protein, 557 aa, unidentified
  source 1..557: note = uncultivated organism
MNREGKRCVMYTRVSTEMQVDGYSLEGQITRMTNYAEREGMTIVNKYEDAGKSGKSITGRPAFQNMLDDIKSGEQIDYILVYKLSRFGRNAADILNSLELVQDYGVNLISVDEGIDSSQTSGKLLISVLSAVAEIERENILEQTMNGRREKARQGLWNGGPAPYGYTLNGDSLEINESEAETVRLIFDKFANSDLGYSGVAKYLNLTGIPKNRHTERDITKWSARCVQCILDNPVYAGKIAYGRHAKQKVKGSRDDYRIVRTEDYLLFDGKHKALIDEETWEKVKSKRASTGFKPPSRVGRERIHLLTGLVKCPKCGSPMYCNRHYWKNKDGTEKDVYYYYCGNNGNKRGHDCDYRAKLKKTDIEPYVIETIMELVRGDSFAREIERRIGQPSNSDALDRELAGYRKKLTEVETNKANLEESIDHLPLDVKYRERKLKDMEARLDGLYDTMAQLEERIADASLRKRAMEEEAITLDNIYKMLLSFNQIYDIMTEEEKKDLISCLIKDIRIYPNDEKAEMPLRSITFNFPIYMDDREVSKISWEKDKSLETLVCLERK

SEQ ID NO: 6094 - protein, 519 aa, unidentified
  source 1..519: note = uncultivated organism
MSSALVKEPKVVRCAIYTRKSTTEGLDSDFNTLDAQREAAEHFIKSQAAQGWKALPTRYDDGGFTGGNLERPALTRLMDDLERGEIDTVVVYKVDRLSRSLLDFARLVERFEKRRVAFVSITQHFDTSTSMGRLVLHILLSFAQFERELISERTRDKIAAAKRRGKWTGGPLVLGYRVDRQRRALEVVPEEAAVVKLVFELYERTLSMALAAQRLNARGLTLRTRVAEDGTTRGRPFNKNAVHRLLRNPLYVGKVRHNDDLFLGEHEPIIDPDIFERVQRTLDLRAAGAGTRRPRRSESLLTGLLRCLPCDAAMSTSHACNHKKQRYRYYRCRASQEGLRCPTGLLNANDVEAAVVAQVKALANSGALRDRILATLAEGDEGEAELLATKDRLEARITELGAEAKRLLGAFSSVDAGGRLLAERLGELERETDRHRAGVADLERRLRACAALHTEGEHVAKLLDAFDEVWEALVPEERREVLRALIARVGVDPESGTLRVTFHESAPPPSPQPTTEAAS

SEQ ID NO: 6095 - protein, 625 aa, unidentified
  source 1..625: note = uncultivated organism
MTKKQKKKAFGYIRVSTAMQVEGGYSLDDQENRIRQHAKANDMTLVDIFRDEGKSGKNISGRPGFQKMLEAIRNGQKIDYVLVTRLSRFGRNASDVMTALKTLQSHGVALWCIEDMLDSSTKMGDAMLKMSSIFAEMERENIREQTRAGRYEKARQGKWNGGQAPFGYRIGRNADGTSSGVLVVDKDDAKVVRQIFEWYANDNVGIAGISTRLNENGVRRTPRGNGSQSFFTPESVKKIIENPVYAGKIRYGVRKSTLVEGSDNVYKPKAQDDYKVYEGLHEAIVDGETFRRAKERRDRESIAFPRKRDNPVSILSGLLICPVCGHGLISTHTKGRTKKDGTPGKDTYGYRCRYTRKSHGAICTFTRQFPQHVLHAEADELFEMIWRDTNLFGQVIEDADKAMDMKKLKDEAERLTKLISGCDRRISKLSETIDRLDPDDAAYDRKYDDMQARLDSLYEEREHLEDDKADVDDKLAARNDLRDTIERVANDVTKTLKGLYQMSDEDKAVLYHQMFEHFELNPDADYRKGERVIKKAFLRVPITYGDESIDAFVPGDGSGNSWVPNNSRDKDDNVETVCLLSRQKVNREFKTPRIKAAPYLTMFPIKTIYSKRIIPYPVANSLIKC

SEQ ID NO: 6096 - protein, 507 aa, unidentified
  source 1..507: note = uncultivated organism
MKPVRCAIYTRKSTEHGLELEFNSLDAQREACEAYIKSQASQGWRVLPQPYDDPAFSGGNLDRPALKQLLADIEAGLIDVIVVYKIDRLTRSLADFAKLVETFDRKSISFVAVTQQFNTTSSMGRLTLNVLLSFAQFERELASERVRDKVAASRRKGKWTGGTVPLGYEAKEKKLVINLKEAETVRTIFRQYIALKSFSRLVQNLDQRGIVTKRRDTKVPKFRGGIPFTYGPLAHLLKNRVYLGEVHHDGKWYPAEHKSILDQKSFDQVQTLLAENRVTTQTRRSTSGALLTGKILDDRGNRMSPSFTVKNGIRYRFYISRALMRGRKTQAGSVARIPAQAIENLVITAIREHLALDVQTPDDQLRHLVVDSVADVVVHPKKIMIRLQSDNAQTIEIPWQASVKNGPALAPSSNYADQPDPKLLQAIVRAHAWLRDLKLGKFDSVEAIATSVKLHPKVVRQELRYAFLAPSITEAILTGDQPPTITLARIPKTLPLAWSGQCRTLGF

SEQ ID NO: 6097 - protein, 541 aa, unidentified
  source 1..541: note = uncultivated organism
MSDTKIDNRITALYCRLSQDDGNVGDSMSITSQKAILEKTAREMGFHNTSFYVDDGYSGTNFNRPAFKQMIADIEDGKIGTVLSKDLSRLGRNYIESGSYIEIFFPQHNVRYIAVNDGVDTINNSEMDITPFKNILNEMYSRDISKKIKSGKLIRAQQGKFMGVTAPFGLKKDPADKNHLIIDEETAPTVRFIYDLALKGNGTLRINKQLEEKGFPRPAYYKPQYFDMRDKHPEKIYHWDEETVTRILRNPVYKGYMWVNHTSKRSLRQKDRGYIRIKDRVIVEADHEAIIPPDEWDTVQDILDRHTKIKPCTSGYENIFRGLIYCPDCGMALLTHYDHRIKAEEVREKTCFQCRTYRVRGKKACTQHRIEAVDLEDAVLADIQAHARKAIRDKDKFIHDVMRRMGANGQEKAKTFSDKLAKLKKENAEADERYVKLYDDLSNGIITETKFKMLSGRIEEKQAKANAEIERLEKQIEGAKADVEAVTMFTNQLTEAITIKELSSELLNRLIDKIEVSEKECRDGETTQTVRIYYNFVGALI

SEQ ID NO: 6098 - protein, 563 aa, unidentified
  source 1..563: note = uncultivated organism
MEIKKKTIRCAIYTRKSSEEGLEQDFNSLDAQREACESYIKSQQHEGWVLIEKQYNDGGFSGGTLERPALKELFQDIEDGKVDTVVVYKIDRLTRSLMDFSKIVELFDKKSTTFVSITQQFNTTTSMGRLTLNILLSFAQFEREVTGERIRDKKAASAKKGMWISGIAPIGYKLVNKKLVIDNDYKEKVKFIFEKYLELKSVMTLKKHLAENDVKSRNEKHFSKGNLYRILQNKTYIGLISHKGSDYKGEQEGIIDKALFDRVQDLLTANRIRNKNCINSTNPSLLAGKLFDDNNNYMSPSHSNKKGKRYRYYVSQALLQSRKHEAGSVSKIPAGEIETVVSEEIRNFLSDTKNIQQYVENYDVHKQKELLSIKKDKIDNCFIRAVISKVVLYKDKVDIILCKNQLLKALESITYGKQLPEDLKNESKEPIFITKEIRISQTSRNGSVLIITDSEKPEVNVNSQLIKAIARSHYWNNLLISGEAKNNIDIQKMEKFGSKTYIKNILELRFLATDIVECILNGTQPRDLTVEKLFNIRTLNWDEQRRILKFEKSPPKIQSEKFS

SEQ ID NO: 6099 - protein, 554 aa, unidentified
  source 1..554: note = uncultivated organism
MTEKTYNVGIYCRLSNDDERDGESVSIENQKLLLQSYVRQMGWNEIDVYIDDGYTGTNFNRPGVQRLIEDAKAKRINLILVKDLSRFGRNYIEFGQYTDYLFPSFGCRFIALNNGIDTMSNNGSTDVMCFLNLFNEFYSRDTSKKVKAVKRACAENGKFMGTYPAYGYKRDPEDKHHLVIDEDTAPIVRRIFSMRAAGTGFMAIAIQLNEEGIPSPGMLYYQRKGKEDPRRVNHKWADATVKNIVRNEVYIGNMVQGKTGTMSYKNKKLISKPEDEWIRVEGTHEPIISRDVWDTVQSIDQKRVRKNAASDGIRSIFSGLVYCADCGFKMRNHTEKFTYKDGTPGRYSSFICGNYARSGKSACTIHTIYENALEQIVLEDIREKARFAAHDPEQLVRHIVSLKEKEAHSRRVSCEQEFKAVKARLDELERLMQSLYEDKYSGAVPQSVFQTLMRKYEAERAEKAEALPELERRVRAAAENCQDAGRWAEIIRQYTELTKLDESILFALVDRIEVGEAQKVRGVRVRDVKVYYRYVGNVDEAIADERREAYEQAV

SEQ ID NO: 6100 - protein, 514 aa, unidentified
  source 1..514: note = uncultivated organism
MASNVTVIPPKAVQPDILRVAAYCRVSSDSADQLHSYATQIKEYTERINGHAGWELVDVYADEGLTGTRMDKREDFNRMLADCRKGRIDKVLVKSISRFARNTRDCLASLRELSRLGVSVYFEKENIDTGTLTTELMVSVSGSLAQQESISISQNQRMSYRRRMECGEFITCAAPFGYRILDGKKLSIHAEEASLVKWIFQAYLEGQSTEWIAEDLNRRHIPTAWKSRGWHRQVIRKILSNEKYMGDSLCQKTYTLNTFPFEAKVNKGEADQFYVENTHPAIIDREVFDKVQTLLRKKADRKPVLHQEYILSRKITCSVCGSLFQRRADNRGIVKWGCRKHEHKASDCPVGRIPECKIYAAFVRMYNKLKQNEGIVLRPMLEQLDDLRTALLRENPAMLAVNQSIAQAAEQSYNISKLQSAGLLDAEAGAAKLSAISAQLTQFRAERRRLLKNDDIEETTETLRQMAEAVQQGPERMDSFDEDLFGMLVEQIVAESQTRVRFRLWGGIELVDQL

SEQ ID NO: 6101 - protein, 640 aa, unidentified
  source 1..640: note = uncultivated organism
MEEIVRCACYTRKSVEDATLDRDFNSLTSQREACENYIASQKSKGWVCLPEHYDDGGYSGGNMNRPAMTRLKEDIKAGKIDMVICFKIDRLSRSILDFAELQKFFEENNVHFVSVTQDIDTSTSSGRMLLNILITFAVFERDLIIDRVKTAIEGGKKRGKFCGGVPMLGYRSDPFTKKLLIDEEEAKTVRLIFEKYMALESIQATVAEINRLGLKTREWVSVSTGKKHMAKPWNTSSIHRILTSPIYAGYVSHYDTNYEGEHEPIIPRPQWEKVQQMLTGNSPVKRGQKRQRNSHPFSGLVRCGHCGCALTPTFTSKRGKKYCYYTCSALNKNAAHECTVKRIPAGDLEQTVISQLVGLFRAPAILLETLKAVRQKEELLLQNSERDCEMLQAHLTELKQRALKEEIDYDEVKKAATLLAETKRKRSLLREPTTEDEIIAALGDAAGLWEFMFPGARQELLQLVVGDITVYPDKLSLTLKIDGLKDLASEMAASGYFNEPHGDAAPIPESQQEVLDDGSIRLTMKLESKRIDGHRRVVIPAPGAEQLKQTSLLRAINTARQWMDMLINGEAKNVTDLAKRLGLKNGYVTRILSLNSLAPDIVEAILAGIEPDGLSIAKLTEQPIPEDWNEQRRLYGFPER

SEQ ID NO: 6102 - protein, 531 aa, unidentified
  source 1..531: note = uncultivated organism
MKVKPPVARLRCAIYTRKSSDEGLEQSFNSLDAQREACEAYVMSQAHEGWSALPAHYDDGGFSGGSMERPGLRRLLADIALRKVDVVVVYKVDRLTRSLADFAKIVEIFDGHGVSFVSVTQAFNTTSSMGRLTLNVLLSFAQFEREVTGERIRDKIAASKKKGMWMGGTAPFGYKPHERTLLIDEVEAATVRHIFTRYIALGSVHALKDELKSAGIRSRPSKRTEAAGGIFARGQLYHLLANRVYLGEIVHKDECYPGQHPALIDRGTFEAAGKMLAANRRERQDRNVTVDRSPLTGLIFDADGRPLCPVSARNNRGRLYRYYVSAQLQQGGRRVDRDGLRIPAPAMETLVFDRLSRISPSVTDWAGARRQLVRVEVDETAIIATVRPIGRPTLRNIDAPDFAERLDNGDVRISIASELRRWAGRTEILRPDRRRAAATCQIDRSLIRGLGRSHSLIAAAKSSRDCTVEELAQEQGAARSYIRRLSRLAFLAPDIQQAIIDGQQPVGVTLERLMRIDLPMSWADQRRMLGF

SEQ ID NO: 6103 - protein, 506 aa, unidentified
  source 1..506: note = uncultivated organism
MRSAVSTQQDAKRVGIWIRVSTEDQAQGDSPEHHEKRARYYAESKGWKVIETYHLEGVSGKAVAEHPETKRMLKDIESGHISGLIFSKLARLARNTRELLDFADTFQAHGADLVSLQEAIDTSTPAGRLFYTMIAAMAQWEREEIAERVAASVPVRAKLGKPLGGQAPFGYQWQDGKLTPDPKEAPVRRLIHELFAQHHRKKTVARILNEAGHRTRNGGRFSDTTVDRLLRDPMAKGVRRANYTKSAGNGKQWHLKPESEWVLTEVEPVVSVELWEQCNAILDTQRNARKPLSRLPAHLFAGLVVCHCGEKMYVPSNTPKYVCRKCRNKIPVVDLENIYQEQLNGFLLSPEDLHQYVAGAEQAIGEQEQLLESLDREKRKLEQDIDRLFNLHRDGEIPTQGFGKRYQPLQDRLDQIDQQIPQIQADIDFLKINLLSNDQVLYEAQTLADRWFKFDGQERRLIVEAITEQIVIGQSDVTINLCYLPVSPELMATKQHNFRGSWRPRA

SEQ ID NO: 6104 - protein, 557 aa, unidentified
  source 1..557: note = uncultivated organism
MNKESIVETHVKHTYYKKDLEDFKKRVKLNRVAIYVRLSEEDKNKLHPEDDSKSIENQKSMLKEYAIQKGWDIVEVYSDDDFSGADSERPAFKRMLLACENDEIDIVLCKTQSRFSRDMEVVEKYLHKKFIEWNVRFVSVVDNADTSIKSNKKSRQINGLINEWYLEDLSENIKTVLKHKKEKGEYTGSFACYGYLISPNDKHKLIVDPDSKDIVKLIFQMYMDGKGYSKIAEYLTRNNVPTPYKLKKLQGSNFVCKQGTTESSIWNKDSVRKILMNETYIGNLVQGKVENISYKSKKRRSIDKSEWIVTQNTHEPIIDMDTWNAVQRRFNSRGVRTSYNTGEIHLFSKKVYCSECGKAMARNNGYSKNHTFTYLRCKRKASNPLACTNGGSFRYDYLENIVLDELNKLIATYKDNSLKDTLEHELNLENEREIRLKELDSEKNKLNTTLLKKKSTLKSLYEDKEDGIITTEEFIELKQDWTEDIKNLNAKLVLIDESIQSLQKEQGKKEDINDILNKYDKIDKLDRVIIDSFIDSIYISSVDEETKKRTINIEWNI

SEQ ID NO: 6105 - protein, 512 aa, unidentified
  source 1..512: note = uncultivated organism
MATNNVKPVRCAIYTRKSTEHGLELEFNSLDAQREACEAYIKSQASQGWRVLAQPYDDPAFSGGNLDRPALKQLLADIESGLIDVIVVYKIDRLTRSLADFAKLVETFDRKSISFVAVTQQFNTTSSMGRLTLNVLLSFAQFERELASERVRDKVAASRRKGKWTGGTVPLGYEAKDKKLVISPKEAETVHTIFKQYLALKSFSQLVQDLDRRGIVTKRRDTKVPKYRGGIPFTYGPLAHVLKNRIYLGEVHHGGKWYPAEHKPILDQKTFDQVQAVLADNRVTNKTRQSASGALLTGKLRDDRGNRMSPSFSVKNGVRYRFYVSRALMRGRRAQAGSVPRISAQLIENIVINSIRDRLAPDAQTSDDQLRRHVVDSVTEVVLHTKKITISLQPDSSEVIEIPWQAPVKSAPALPPPSTDTDQPDPKLLQAIVRAHTWLRALQLSKFDSVEALAASVKLHPKVVRQELRYAFLVPSITEAILTGNQPSTLTLARIPKTLPLTWAGQCRTLGF

SEQ ID NO: 6106 - protein, 530 aa, unidentified
  source 1..530: note = uncultivated organism
MERLAIFWNKKHAKQNMTQEQKKCAIYTRKSNEEGLDQDFNSLHAQREAGEAYITSQKSEGWQLVENEYNDGGYSGGDLDRPALKDMIADIKANKIDIIVVYKIDRLTRSLMDFSKLVEVFDEYNVTFISITQSFNTTTSMGRLTLNMLLSFAQFEREVTGERIRDKIAASKKKGMWMGGSPPLGYQLDGGKLIPQPEEIKIVQFIFEEYLKCGAVKKLKDSVDGAGLKTPLRISQKGRSYGGAAFSRGHLYHTLGNPLYIGKIRHKEKLYDGLHGAIIETEIFEKVQHQLKGNSAAKSITWAKSGCLLKGLMYDCDDVIYSPTYTVKNNLRYSYYISQNLIQYRDHPNNVLARIPAHEIEKLIKLALKDWMMGIRGLRRAFPKQPDYYHELMIKNPIPLRRRFILSILQKVTVHSNKLIIEIDPEKLCKEIAVYYEIAFVNLSKSNIKIILPFKVLRANNGAIVLKSNQQNDHDPFNIPTDQLKRVVRGIIWRDEHFAGKTLKNIAAAGGHGENFVNRCIQESFEFPKN

SEQ ID NO: 6107 - protein, 516 aa, unidentified
  source 1..516: note = uncultivated organism
MIPARQRVGSRTPGEEAPKIRVAAYCRVSTDTDEQATSYETQVGHYTEYIKKNPAWEFAGIYADDGISGTNTKKREDFNRMIDDCMNGKIDMVVTKSISRFARNTLDCLKYIRKLKDKNIAVYFEKESINTLDAKGEVMLTIMASLAQQESQSLSQNVRLGLQYRYQQGKVQVCTNRFLGYDKDKDGNLVINPEEAEVVKRIYREYLEGSSYYQIGHGLEEDGIRTAAGSSYWLATTLRKILMNEKYMGDALLQKTVTTDFLTKKRVQNNGIAPQYYVEDSHPAIIPKEIFMRVQEEIVRRAHLETSTGRRRIYSGKYALSSIVYCAHCGDFYQRTHWDIRGTKKIVWRCVSRLHKKDNDINCPARTITEDLLQEVVVRAINQALTEKDTFLPALKESVERALSNRNSARIAEIDAELEKQQKELLRNANAKKGFDSIADKIETLRDEKHRLRLEDANNDGAKSRIAELEMFLDGLSGQIEEYDEDYARRLIERITVDDDHFTVEFKSGLETVVEA

SEQ ID NO: 6108 - protein, 563 aa, unidentified
  source 1..563: note = uncultivated organism
MASAAIKRCAVYTRKSSEEGLEQDFNSLHAQREACEAFVKSQAGEGWRLVKTAYDDGGFSGGTMERPALQRLLTNIGEGLIDVVVVYKVDRLTRSLADFARMVELFDDRGASFVAVTQQFNTTTSMGRLTLNVLLSFAQFEREVIGERIRDKVAASKRKGIWMGGSLPLGYDVRERRLVINPDEASIVRHIFERYPELGSVRLLKQELDRRGITSKIRTSNRGEARGGKPFSRGALYHLLSNPIYAGEIRHKNERHPGQHEALVTRELWAQVQERLQNGAARRGEGRKTEASPSPLAGKLFDEDGEPLYVQGAAKGQRRYRYYVSRSLVRGEGKDTRRGWRLPALEIEQAISSGAQGMLNDRAAITLALEESGNESTSPESVLQSAHFQLERLQSECERAAALAELTERAELGHEGIRLSIKLPLTLTDDKGDRPPNQLVLTKLVQTRMKRRGIEMRMVLEGGPSQSRIDVPMLKAVARARRWSLDLLSGRVRSLGELARREQVDGRSMRRLVRLGFLSPRILEAMVEGRQPPDLSLVALTRRIKLPPQWSIQEKVLGIPRLQ

SEQ ID NO: 6109 - protein, 531 aa, unidentified
  source 1..531: note = uncultivated organism
MRIANYARKSIFSDKSDSIDNQFRMCQNFAEALYGKKIEKYIKYSDEDYTGANTDRPSFQKLLNDVKSNMFDVVIVYQLDRLSRDVRDFSNVYSIFNEHNVMFISVKENIDTSTPIGRAMMYVTVVFAQMERETIAQRVTDNMIGLAGKGFWVGGKPPYGYEITHIIVDGRKHKTLKLVPDAVKFNLEVFHDYLRENISINHLEKLYRDQGKKTPNGCFFSMTQIYKILTMPYCVPDTQKVYEYYERKGCNMSLCPKDKWDGKNGVMVYGRTTQKSGKHSLNPPENWIVVPAHHEPFIDEETWLRVQERFSNKQTIKYSAKYPTPLLKGVLKCGICGRTLGVARKKTSPNRVGSYYKCYKRDREGSSSCNLSAIPCQVLDEIVQNTFDDIAMNPEHIYEYVGNNRPENKSNKNNLKDINKNIRISERNIKQLLDSLKDVAETSTARKYIVKELEREDLNLQALKREYDEAVAEEHRLQEESLSLDNTAKNIQLKMKYFKDMPLEAQREIVNDTIEQCVWDNESLTIKFKMS

SEQ ID NO: 6110 - protein, 554 aa, unidentified
  source 1..554: note = uncultivated organism
MTPKKVRCAIYTRKSSEEGLEQGFNSLHAQREACEAYVLSQAGEGWTALKTEYDDGGFSGGSMERPGLERLLTDIERGLIDVVVVYKVDRLTRSLTDFARIVEAFDREGVSFVSVTQAFNTTTSMGRLTLNVLLSFAQFEREVTGERIRDKIAASKKKGMWMGGNPPLGYDPPTDPLTRALVVNEDQAQTVRAIFAKYLELGSVHAVLAWLRNEQILSKAWVTSKGRKAGGLVFDRGALFHLLKNRVYIGEITHKGLSHPGAHGAIVDRPTFEAVQAQLQGQARRHRGRPTRVSTMALKGLVYDADGEAMSPTFTHGVRGKVYRYYVSSPLQRGTPKDPLDEAIRRVPAGAIETLVSGCLAQLSGGQHGALRGGSPAPLVRVEIHPTTVQLIVRPAAFFKGRGDPQAQLEILAARLGPGERIARDAAGEPLARVTLPCRLKFAGGRTWITDEGGNDILAKTHPDPALINALRQAHQLIAGAQAGPLGRPGDLELAAAPKSPYHRSLCPLAFLAPDIQRLIVEGRQPPGLTLARLIATPIPPSWGAQRQVFDIPC

SEQ ID NO: 6111 - protein, 550 aa, unidentified
  source 1..550: note = uncultivated organism
MSAKRQIRCAIYTRKSTEEGLDQDFNSLDAQREACSAYITSQKAEGWVALAGNYDDGGYSGGTLERPALQRLLKDIERGAVDVVVVYKIDRLSRSLMDFARLVEVFDRKGVTFVSVTQSFNTTTSMGRLTLNVLLSFAQFEREVTGERIRDKFAASKRKGMWMGGNPPLGYDVSNRKLVINHGEAETVRLIFRRNLDLGCVRLLCNDIRERGVVSKPRSFSTGKARGGKPIERSALYLILNNRTYLGKTTHKGNAYPGEHQAIVPCDLFDRVQRRLAELRPPVRVSTRAAQDAPLAGLLFDETGAPMLPTYTVKGQNRRYRYYTSRPAMKGEASRAAISRIPAPPLEHLISGALRRLDLRADTPGKAIDQIDILANNVVIHINRREAIAAWRSTGSETRQRTDRQILGDRRALLRTGETLINDGDRLILSLPVRARFRGGDATVLDPSGVTAPRQDPALIKALARAHQWRDMLLSGEVTSIEALARRSGLDRGHVGLTLNLAFLSPAIARAIIRGEQPPRLRLNRLLRETIPLSWREQEAVLLTSTAAQK

SEQ ID NO: 6112 - protein, 553 aa, unidentified
  source 1..553: note = uncultivated organism
MTKAAAYVRVNTSVQQIEGESLRTQRSSIQDYCTSRGWELVNIFQDAGVSGAKDDRPALQALLTAVKAGEIDAVVVRDLSRFGRSARDLLSNIQTLKSHSVTFISIKEGIDGSGAYGQFMLTTLAAIAELEMEMITSRMKENRLARWRDRRFFCGKPPYGYEWNRQEKRIEIVAEQGEVFQRIVKEYLELSKSLNEISLDLNAEGVPTRNNGSSRWSSGTISKILKSGDYLGQITVNKYLTDAKGKIIAHRPESEHIIFEAPPLITRARWDRLQQRLHSANSRSGRQSKASQEFLLYDLCVCGVCGAKMRSDYGTKRADGTRSRHYACYRHKAGPKKREIKGHEKCPLPLIPAELLEWQVFYVQLMKQLGLEPEHYEPLLDGKPKWDSKIDSLVKTLSNVQASLRRKEIALKNLDSLLEHDGFDQAAYSQKRNGFLLEIKALDQKLKDTQKDLDELRQRKTEEAEFSKLMSGADPFKTLTYRIINLPFADKYRLLRGVLDGPIVVGRSTSDPHVDRDPEDEMMKILEGIEMTIRHNHPLLLELLNEEHTTKSL

SEQ ID NO: 6113 - protein, 539 aa, unidentified
  source 1..539: note = uncultivated organism
MAAVRRTVREIPRAVILQIDEAEIQKTVVAAYARVSTEKEEQEDSFERQVSHYTTLITSKPEWEFGGIYADPGITGTRAEKRPDFMRMIADCRAGKINKVLVKSISRFARNTVDALKYIQELKELGISVYFENENIDTLTPGGEVLITILAAMAEQESRTMSTNIKWTYQKKFKNGEVILNTGLMLGYSKAGRKDEEGKEIYIINKPEAEIVRRIYREYLAGITVTRIARGLEADGIPTKLGKKKWSPKVIMSILTNEKYTGDAILGKTFKPDVLSKYRQKNTGQAPMYYAEGTHPAIIDKEMFEMVKVEIQRRKDEQVTAVGSSRFTSKYPFSGLLICGECGHKLRRHVRTVGSGMKVPAWGCANRIVNGRRECDSHHVNEDTLQHTYAAAIGDMIEDAEEIMAAVKDSAGLVMEPENKATLERVEQEIIDLQNAVLELHKAKQQRSVTATDYAAQIKEYSQRMQELEAQQAELQTTENRYSEVKMWLDSFAEHIQSGGIMNADDGMIMKQLVEQIIVNDDGIEVHFKCGIVASHEYM

SEQ ID NO: 6114 - protein, 575 aa, unidentified
  source 1..575: note = uncultivated organism
MKKQQKDEPQTQRQVGIWIRVSTEDQARGESPEHHEKRARMYAEAKGWRVREVYHLEAFSGKSVMGLPETERMLEHLRGGHVTALVFSKLARLARNTRELLEFADIFRDHGADLISLSEAIDTSTPAGRLFFTVVAAMAQWEREEIAERVAASVPIRAQLGKPLGGAAPFGYCWENRELIPDPKEAPVRKLMYELFLEHKRKKAVARLLNEKGYRTRNGSMFSDTTVDRLLRDPMAKGIRRANYTKSLGAKKHWKVKPEDEWVLTPVEPIVSEETWLKANAILNERRRKDECETKKTVHLFAGVVFCHCGQKMYALSNSPKYVCQKCRNKIPIDDLEAVFAEQLKGFFLDPQEITQYLGQADETIKTKDEALRALTAKRESLVREMDKIHRAYITDAITVQGYGRQYQPLEERLNQIEEELPRLQGEVDFLKIQLLSSDEILTEAKDLTARWPTLAPEEKRQIVEHVVERITIEKDAVEIHLCYLPTASEIAANGQRNLTGSSPSPAQTHREISRCAARPDPRSSSSPGAWRGPQGSDKLREDGWRLSAVADRYVAWPTSEQAHPSPDRPSRRRP

SEQ ID NO: 6115 - protein, 547 aa, unidentified
  source 1..547: note = uncultivated organism
MTTEQQADTVWKAGLYLRLSQEDEGEAESSSIATQRALLTEYAARSGLPVVDVYTDDGYSGTSFDRPGFQRMLRDIEAERINCVITKDFSRFGRNASETMEFMDKWFPRHGTRYISVTDGLDTEKRSPGMTASLMSTINELYARDISQKIKSALTIKMEQGKYISPFAPYGYRKDSNDKNRLIRDPAAAAVVQEIFRRAANGEKTSAIAEDLNARGILTPLQYRNANGAGIGVHSSGRRPEWTAGGICKLLRNEVYLGKLLQGKTEKLSFKEKTSTARKRESWIVVEGTHEPLVSQELFQLARTRCSSRRCLQTKGFENLFSGIAFCAACGKQMSPVKTRKRNGTYDLACGGYKAHGTCACSNHFIDHDSLCEAVLSVLGPCLTLTPEEKERLLAQLLRRDEKEKRRRTMGQEAEALAKAQRRKQSVAELTRRLFEEHCLGIVEEAAYCGLMEQYAAELAGLEQRIALLKAALQAPADGGVCRQRFSALLEESAAPKKLTKALLQRLVERIEVEQGAWTRDARGKRIKRQRVHIYLKCACEGNLGRQ

SEQ ID NO: 6116 - protein, 566 aa, unidentified
  source 1..566: note = uncultivated organism
MEENKKKAVAYLRVSTGMQVEGYSLDAQLASIERCAKAYGYEIVKIYKDEGKSGKSIEGREAFIRMFEDIESGDLNIDYVMVFKLSRFGRNTADVLTSLQRLQDNGVNLICVEDYLNSEHGAGKMMITVLSAVAEIERINILEQTMAGRRQKAAEGKWNGGFPPYGYSLNEDDILEINEDEAKAVRVIYDKYVNDGMGFNSIAKYLNRQGYAKIPRKNGTLTAWSAKLVKDIIDNPVYKGYIAYGRRKKVKKKGTANEYRMERQAEYPCNKGKHEPIISEELWEAAQELRKETGIASPPSSGRSRLHLLSGILRCPECGGPMYTNKNGWTRKDGTEILRYYYTCSRVYQARGIECQYTASLREDLIEQEVIEAVRNLVRDPLFAQEVKNKIGTEIDTSEIDKELENYRKALKQAKAVKETIEREIDTLPYDAPHRERKVQDLNRRLDRAYDELIDIEQQIDDLILKRQAIENNALTLEQVYKVLENFDLLFDVMSEEDKRKTISYLIKEVEVTKEPSGRKKSSTKSRLRSITFNFPIHYKGSEGDKLLWENGTHVETVVLMSRVDN

SEQ ID NO: 6117 - protein, 587 aa, unidentified
  source 1..587: note = uncultivated organism
MEKKEEKVIRAAAYLRVSTDEQIKGYGLPYQKEKVILYSQFQGYDFDQEKHMYVDEGFSGALPIEKRPALCKLFEAAERGGFDIVLVYRLDRFARKIYETIRGVERLTDNAVDFCSITEPFNTATPHGRYVMQSLAALAELERETIKERTSSGRRMAARENKWIWGTPPYGYDIDPDTKKLIVVKKEAKWVVKFMEWIVDEGMTLTSVQKRANEMGVPCYTKRKRKSKSKKLSGYWHKKTIAKIISNPIFTGTTYFFRFKKQFLGLTSLLDESVQNDKDDWVEFKTEKVVSDELFEACQRQLLKNREFAARNIKNDYLYNKLVICGGCNKKMFASTKNAKKDTQNPFKFYHGARKAKWREVLEVDNRCKSCGQIAETKLNKIWDALGGLFNNPDYVVGNLQAAVKKSGKTISQIYTLIQVKKARLVQVQKKLQRIDEVYVNGTLFKSREEYNKKRLIIKDEEHSLKKEILVFEKELNKDKVDVEKAKKDLVEVYKKISVGFGVATYEQKAAIIHLVVERIIISKDKTIADVQLKVQGPSHFSFSDVIKDSETDGLCKQRANGDYTSPHNKIEQSQLTNTVLCNQRFH

SEQ ID NO: 6118 - protein, 521 aa, unidentified
  source 1..521: note = uncultivated organism
MTADNLARKAIIIPASQAPESVQLRVAAYCRVSTDSEDQKNSFSAQNTYYTTLITGKENWTLVDIYADEGITGTSAKKRPDFQRLLSDCRKGKIDKVLTKSISRFARNTTDCLEAVRELKALGISVVFEEQHIDTGVVSSEMLTAVLASCAQAESESISKNMRWSYQKRMEQGTYVPSSLPYGYRLRDAQIEINVQEAETVCEIFQSYLSGMSKLDIAQSLNQRGILTRKGNCWDYCAIRYILKNERYAGDSLWQKSYSTESMPPKKVRNHGERHQYFAESTHPPIVTKEIFQAAQTLVQERKAYNPTYGLTSEDLLNGLIRCGHCGSKFRRKNVNGQIHWACRTHDKDAGLCPITAVPAEQIANAFLRMYYKLKHSSILDRQKDSLITVRSRQMLWRPDVIELNKQISNLTSQSHMLTVLNQQGAVDPDIFISQTNQLAQQLRKAKRQKEKLLERDGNDALSKTRELMEILEYGPESLDAFDGELFRELVEKIIVESNERIRFRLINSLELPEEIERTVR

SEQ ID NO: 6119 - protein, 524 aa, unidentified
  source 1..524: note = uncultivated organism
MKRKPRTDEPKRTTIRCAIYTRKSTEEGLQQEFNSLDAQRESAEACVKSQQHEGWVCLPDRYDDGGFTGGNMDRPALKRLMADIDAGRVDCVVVYKVDRLSRSLLDFARIIETFERHRVSFVSVTQQFNTTHSMGRLTLNILLSFAQFEREIISERTRDKIAAARRRGKWSGGMPILGYDVLPTTKLAVNEDEAVRVRAIFEMYLKERSLLPTVQVLNSRGWNNKRWQTRKGHSRGGKPFTRASLHKLLTNVTYIGRVKYKLEDHPGEQPAIIDPEVWAQVQSLLRRNGRTGGLEVRNRFGFTLKGLIRCAGCDCAMTPSHSVQNKTKHYRYYVCLRATKHGWKSCPAPSVPAGMEKFIADQIREIGRDPALRRETVREVREQERERLTRIDAELRQIDRDLAAWDADIRRLLVNPHSETGGRQAGLLAELHERIRAATCRKTEVQQEKAVAVRPVDEREVGDALALFDPAWNALTAKEQGRVMQLLVERVDYHGVEGRVEIAFHPAGLKTLLSETKPAPKKGA

SEQ ID NO: 6120 - protein, 569 aa, unidentified
  source 1..569: note = uncultivated organism
MKCAIYTRVSTDNQAEKEYNSCEAQEERIKSYIKSQDELSLFKVYSDPGYSGANIERPALGRMLKDIVDGKIDCVLCYKIDRLTRSPKDFYALIELFDNQGVSFTSITEHFDTATPSGRLLRNIMLTFAQFERELSTERTKDKMYQRAEKGMWNGGTVPYGYMNKDKKLVVNPEEAEFIKEIFRIFIKTKSLAETRRRINEKYKTRKGKKFSKTTVDNILRNPVYYGKLPYKDNLYDGVHKPVITESMFLKAQSFHKKRYKRKTKIDHVYFLQSLLKCSECGSTMTPTYTKNKHKDGITPRYTKYYRCTKTYKHEWNSCKIKSVNADKIEDFVIEKLREVSKDEKAINKIVERTNKNDELKISPLKKQEKEKIDELRVVGKKLQNLIDILAEVGIERFPSVRKEIENLENKKKVLEFDLEGIKLSIQKEEKEKFETEIVLENLKDFSKKIGEFSPEDRPQLFQSLIKSVSYGLDEIDIDLFYLPKGYIQGLGNHRAYSAERADTVGEASADGRSPSKRGRRAPSCEADEHGLGGRWSAGGNWCSKNRKEWLGCRDSNPDNRIQSPGPCH

SEQ ID NO: 6121 - protein, 527 aa, unidentified
  source 1..527: note = uncultivated organism
MKPSVAKPVRCAIYTRVSTDQGLEQDFNSLDAQRDGAEAYIRSQAHAAWTLIRHQYNDGGYSGGSTDRPALQRLLTDIRARKIDVIVVYKVDRLTRSLADFAKLVELFDSHGVSFVSVTQQFNTTTSMGRLTLNVLLSFAQFEREVTSERIRDKIAASKRKGLWVGGMVPLGYQVKARKVLVIKEEAARVRTIFRRFLELGSLNLLMTELRQRKIHTKVRRLSSGRTVGGNPLTRGPLAHMLRNRFYIGEVAFKGEILPGEQLAILDRKLFDAVQRRLDDQRTNHTITLASSESLLMGRIFDDRGNRMTPSHARKNGKRYRYYLSSALSQGRAEHAGSVRRIPAPEIETLVIDAVRKRLKESNPATNYDLINTNVGRVEIQAAQIVIKLARKGNRTTNRKSNNAILYVSWKKTNLKRRREIIAPATSGQDVRPIRSETRLALVTSIACGRRWLDDIVTGVVADVEEIAAREKCSVRQVNMTISLAFLSPTLVKAALDGRLPRGIGVARLRDAPAEWSKQHAMLGLPS

SEQ ID NO: 6122 - protein, 531 aa, unidentified
  source 1..531: note = uncultivated organism
MSTLAEAQAPPQTIRCAIYTRKSSEEGLEQEFNSLDAQREAGEAYIASQRQEGWVALEKHYDDGGYSGGSMERPALERLLRDVEAGAIDCVVVYKVDRLSRSLLDFSKIVEIFDRYEVSFVSVTQQFNTTSSMGRLTLNILLSFAQFEREIIGERIRDKIAAAKRKGKYTGGMPIFGYDVDREKRRLIVNPEEAEVVRRVFRRFVQLRSPLKVAQELNADGITTKRWITKNGTVREGHAWNKHAVSRVLNNQKYVGEVTHKGEVYPGEHDAIISRKLWDEVQEILGEHHHHRSARTRCKTPALLKGIIRCGHCGNSMGVTFTKKGAKLYRYYLCVHASKNGYASCPVKSVAAGDIEAAVIEQLRGVFRSPDLIARTYRAASSRDAAELEQMRLEKGETEDRLRVLKKMAADLRRNGRKGNGAGDAAAAELSRIREEIAQTENQLATAARDLELRQAEELSERDVIDALQSIDPVWDELFPAEQARIVQLLVDSVVVNPDGLQVSLRSNGLRSLITELRGAVDDVRKRSGKE

SEQ ID NO: 6123 - protein, 656 aa, unidentified
  source 1..656: note = uncultivated organism
MNSDKVVRCGIYTRKSHEDGLELEFNSLDAQRESAENYIASQKENGWIALPEKYDDGGFSGGNMERPALKQLMTDVKAGSIDCIVVYKIDRLSRSLLDFTQLIEMLNKYNVNFVSVTQHIQTTDSAGRMMLNILMTFSEYERDIIAERIKDKIAASKRRGKYCGGDPIIGYDVDPEKKKLVINEKESEIVKYIFARYPELGSAKKLAAELNEKGYRTKTWTSKKDKFHEGQEWNTGHIFRVLNSPVYLGKVTHHEKTFPGEHEAIISQKEWDKVHQIFEDSCHGQKRKSKIETNTPLRGIIRCGHCGGAMAPTYSRNGKRRYTYYFCQKDSKRAVSTCPLKRIPGGDVEKAVIQQLGAVFRTPSLMAQTFAKASELETSEREKLVIEKQSCEREIYNVQSEIAKLMGTNLPEKDEKIESVKNLVTRLNGIKDELVRFKTEPIEEQDIGNAFGNIEELWDMLFPAEQYRLMRLMIESINVMEDSISITLKTDEMPSLIAELSGIDVSERKEKDRIGKESGTVYPEILPEGKVMLRVPAFFKYKNGRKIIITPETLEGKNPDSPSKVQNPIVNALRNAHEWRALLESGKAASVAALARNLNLSRPYVTRILSLTTLAPDIVTALINGEEPSGLSLDKLVSGFPDDWEEQKKMFNIKSA

SEQ ID NO: 6124 - protein, 568 aa, unidentified
  source 1..568: note = uncultivated organism
MAERSRQLRCAVYTRKSSEEGLEQDFNSLQAQREACEAYILSQRHEGWRALPTPYDDGGYSGGSMDRPGLTRLLADIASGQIDVVVVYKVDRLTRSLTDFARIVEVFDASQVSFVSVTQAFNTTSSMGRLTLNVLLSFAQFEREVTGERIRDKIAASKRKGLWMGGFVPIGYEASGRTLKVNEGEAETVRTIYRLYLELGSVDALKGELDRQGIGTKVRPGRDGAMAGGGPFSRGHLYRLLQNPLYIGQIAHRGEVYPGQHPALIDQDTWEAVQAGLTERGHQHRVRGRARQPSLLADLICDENGTRLTSTHAVKDGKRYRYYVRSGGGGEQERSWRVPAPEIEGLVLDQLRRSLGDEAWIGDAMISRGGSPADLRAILRRAEQHRAALLSATPQVRATLLALLHRVSIARRAVTIEIRAGALLDDVDPADETALVITVPASLQREANANRLVLPGARPAGKAPDPALIKAVARGHAWFEELASGRAPTISALAAREGVTDRYVSCLLKLAFLAPSTVERLLKGEAALSLSTKQLTLNTDLPLGWSEQVQSTASSCRAERIDSVRPGD

SEQ ID NO: 6125 - protein, 585 aa, unidentified
  source 1..585: note = uncultivated organism
MSARKIGAIYSRVSTMAQAGPNKSSLDSQLAECLAEARRQGYEVPEDLQFEDRMSGRREDRPNFLRMMAAGRRKEFDRLFVWAVDRIGRTFRASVNAVEELKEMGITTYSLQERDLSDTFIFGVLAGIAAREIQHMKERTIPAKEILREEGIFVAGRAPFGYRKREDGRLEKCPSEAAAVRQIFRACISGMGRIQIAHMLNDDNVLPPEVLVLMPDGRKRRMRPGQFEANDGYGGFAAWLERNKASVIGLPAWKSGTVANILTNTAAYGYLRPAERHDEKGNRLPKRETVKLDIVDGPIISEAEFRDAQRAKADRNVAVAHPGRRPTRPWLLVGRIFCGCCGSRYIHTDSKGTHYYVCNVRKNREPRGACTAGPYVKMVDVDNEVKAAIRDLLTIRLGGPERMKELILSQVFRDQRELERNIENVEADLAIADKVWKEKQAEVRDLRKAGYDLKMMPEVRDDLAKATENRERIASALYALMDQKTILDQKIAVDADALSRVITHISSGLHSMTAREAAEGQPANVTMLVKMLVKRVTVNQDRTRTIVLNDDPPAVAQAFVKLLETATGDIKQVDGIKRHLEKMHV

SEQ ID NO: 6126 - protein, 519 aa, unidentified
  source 1..519: note = uncultivated organism
MILKRVAIYSRKSITTDTGDSIENQIAAVEKYFSTDKCEFTLFEDEGWSGGNDKRPDFQRMMTKIKNNEFDVVAVYMLDRVSRNVVDFINFYDTLKKHNVAFTSVTENFDSSTMMGKMYMYLLSIFAEMERENISKRVKDNKLFLTKQGQWCGGKPPTGYTLTKKTVNDKKITYLELDNDKKQIIIDIYNKYLELGSLHKVQQWFLLEHNIKWSLSTVKYILSSPVYCISDDNSYKYLSNQYKIYGEPDGHSGYITYDNRKNASTKREWKSKDMFVSVSQHEAIIPSSLWIKIQELQKERATAPRPKASKISCFTNVLKCDICGSPMTLNYNHTNKDGARNYYYICTGKRSYGTSYCSNKWIKQKECDEKIIQFLETVTSSKSNFQKMLNTKVEDNSVDKDIKKIEKEIIKQNNVIKELTEKMIVLRGPALDIVTNQMNEIGDHIVELKNKLNLLERKSLNQKNSSRSVDMIYSEIKKLPAILRDSNIDIDRKRDLVNMFLDEIRWNSNTQLLSTSINT

SEQ ID NO: 6127 - protein, 546 aa, unidentified
  source 1..546: note = uncultivated organism
MLASKNIYRACVYTRLSRDDGDKPESDSIANQKALIRDYLHKHSEIQIVSEHSDDGFSGVNFERPGFKEMMDEIRNGKVDCVVVKDLSRFGRNYIEAGNYIEKVFPFMGVRFIAINDNYDSNDQSQADSLVIPFKNLINDAYCKDISVKIRSQLEIKRKKGEFIGAFVVYGYLKDPDDHNKIIVDTYAAEVVRAIFRWKLAGFSQNRIAKKLNDKGVLCPMEYKLSLGVKVQTNFRVHKQAKWSPVTVTRILTNEIYTGVLLQGKSSTPNYKVKKRFKKDRTEWIRIEKSHEAIVSPGEFQTVQALLQKDTRISPEAETLYPLAGMIVCGDCGQSMVRKIVPSKNKRYVYYVCSTHKAKLGCSSHSISEKILDAVVLQAIQNQIAEVINMEKLLKIAETLPENQRNVFNYDAQIVKLKEEIERDKEFKLKLYENLQQGMLDQEEYFIFKKNYEKKIRAAKKTIKNLEEERESVTKANAEEYTWIDHFKKYEGITTLERQAVVNLISEVRIYEGKRVEVDFLYADEMKRALKIIHMAEEKNLREVTK

SEQ ID NO: 6128 - protein, 560 aa, unidentified
  source 1..560: note = uncultivated organism
MKRVRMLLRVSSDQQLEADGDLSIQRKILVEYIEKQEEWILDEKEYFEGSKSAYKNTASQREILQEILQDAQKKEFDILVPYKDDRVGRLMWDTSSYIMNLKNCGVDVYTVKDGCISPEADDIMGQMMLTFRYANAQKSSADTGMRVKDTAQKLVEQGKFMGGKAPYGYELEYSGEVSKHGRALKHLVVVPERAELVRYIYSLSFNKEFGSSKIAQVLNKNIQYKELAPNGVWKSGTITSILTNPIYAGYTAYKRRERTNGKYKRLDNKEWVLAKEADLSIQIIEPELWNRTQEKRKLRGKKYIESLENQDVTVIHKNEGMLALIDVIYCGYCGSKLTNGSKYNYWTIKSTGEKKASKTPVYKCQGAWQGIPHSEVGQFRANEIEPIVFEAIAAYIGKLQENENVFDEIQRNQNKEKTVIAKELRKEQEEAEKIRKKITVMEEKIPDAMSGEYPLSLEELVALIKKQKEALERQETVVKEKELTLQNAEVSVNDWEELKQKIPTWQEVFLNADGEAKRVLVNRLVRRIEVKKGEIKVFFKINLEDFFCQPRISDDSGVPE

SEQ ID NO: 6129 - protein, 548 aa, unidentified
  source 1..548: note = uncultivated organism
MAMAEQIGSRTQARRLRAVGYCRVSTRRQADHQVSLEEQQKKIDATCVLRDADVIEMFVEPGVSARSDQRPEFKRMLEFACNPANGVDMVIVYAFSRFFRNATQYLHYKDLLKQAGVRLVSATQDIPEGAHGELMETILAAFDGHQSEVNAGIVRDMMMANAEEGYWNGSAPPFGYRTRVALVLRRKEKKVLEINEEEAAIVNTVFRLCLHGHEGGAPMGIKAITTYLNTKGYRYRGKAFYTASVERILKNEAYIGVHYYNRIDSRTRKVRPPSEWIRMDVPAIVDQETFDAVQRTLQARNPRKTPPRVVTGPTLLTGLAVCEKCGRGMMLRTGKSGRYKYLTCAKSATEGTGCGHSIRMDKIDEMVIKAVEEQVFAPERLIPILQAMTDRTDDTRRQLETEIDRQRIAVAEAQSRLERLYDAIEAGVAELHDPRFRERVDLAKLQIREGTASLEALRQRGSARAELSPIMVRRFSSGIRRRLRDADPAFRRTWLHMFVSKVTIGRDRIRICGPKDQLLKAVSGGENSARAMVPTFAREWRTRQDSNL

SEQ ID NO: 6130 - protein, 748 aa, unidentified
  source 1..748: note = uncultivated organism
MTRVALYARVSTDMQAESGKSIAAQLAEMREYAAKRGWTIVAEFTDPGFSGTNMDRPGLEALLAAAEQRTFDILLVHELSRLSRRLFDTFRIFEKLGKLDIGLASVKEPDFDFSTPTGRLFLTILAALHQYYIDLLKMHTRKSKRQRAREGLYNASITPYGYRHTGDANIPPVIVEEEARAVREMFQRYATGRYSAQEIADWLNDAGFRARSGRRFSKDTVADMLRNPFYKGFVAYRQGSRNQSAGELFPGKHQPIVSPDLWDLCRRIRVQRRGAPRTYQPKYRVYLLNGIATCDVCGRKLRAQGAKSGSYYREMSRARGFVDCPSARRGVRSHVVEEQVGAIFRRLRLPPDWQARLEELLDQDDDRPTLESRRARLIAERRRLKEQYIRGDFDEDADIYERELNRIRRELAELPAPADLETIRRAATTLEELAQVWDEADPADRRDLLRLALREVKVDMPQGRVATIEPYPIFVPLFRQLPLLREVSFGVFVPLWPPELAQELGILPILPPLTKIPNPQETPAWPPVPTLPDELVGKRVTPTLSVWLKARRKEKQEIGRVVELARPGALALQVDSRKWPQVTVERVQDLRALPDESISFLWTPFALQRAEDRETLVTEARRVVEPGGTWAFVDVMPASMPGHWLYRFFPQAWENEERRTWNASRMYNELVKIGFRVRLERRTFYQAVTLGVARGMAGARERCPQLAILPDEVYTAGMAALEEAVEQEGKEGLIGSEFCLVEVTAVRG

SEQ ID NO: 6131 - protein, 534 aa, unidentified
  source 1..534: note = uncultivated organism
MDTGTEQEKQKIYCAIYTRKSTSEGLEQEFTTLDAQRESGINYIKSQKNEGWIALDDPYDDGGYTGANTERPALKKLIEDIKIGKINCVVVYKVDRLSRSLIDFTHLLELFDKHNVTFVSVTQAFNTNTSMGRLTLNILLSFAQFEREIISERTKDKMGAARKRGKWLGGRPPLGYNWVKETKSLAINPKEAEVIKTIYDLYLKGYSLKHVAQALTEKGWRSKSYITKDGRKADGNAFQNTTINHILHNTLYIGKVSYNGEVYEGKQEAIIDEDTFKRAQDLLKKNRNYQELVRGKKVINILTKLLFCKPCNRPMIATYTYKAQKTKYRYYVCTHAQKFGYHTCNTRSINALEIEKAVAECLFNHPEGVKLKDNWSNLTSQEQKSFLVNLIKQVDYDVAAKKLFIAFSDGTTQEYSTDLKEVRHITTHDPKVEIKNEPKLRQRLILAYQAQELLDSGKATSIKQMAQWLNMSAIQLHLIVELLFLSPKIQKEILMGPNEIINAIPEYKANLIAREFDWTKQLNSWQALTQGTSL

SEQ ID NO: 6132 - protein, 527 aa, unidentified
  source 1..527: note = uncultivated organism
MDFNKEEAKMQEKLRCAIYTRVSTDNQAEVEFNSCEAQEEKIRAFIKSQENMIIYKVYSDAGSTGVNLNRPALQKLLEDIKQGNINIVLVYKIDRLTRSPKDFYYLMEIFEKYKVDFISITERFDTSTPAGRLLRNIMLTFAQFERELASERTKDKMLQRAEKGLWNGGISPFGYKTLNKKLVPHEQEAKVVKLIFETYVDTGSIAEVYNTLKEKNILNRHGKVFTKSSIKNILSNPVYIGKLKYAGKIYNGLHQPIISELLFNEAQELHKKKIREMKLFRNYLFAGLITCEECRSKMTPTYTNKKAKRGRKRYFYYRCTSTLKRDWQVCTTKQVNADRLERFVLENLERVSKDEPYIENLCFKLNHNPDELVRNSLIKNKVSGDRAGFELSREQLKIEPKGLIFQLKTFLNTLSSLSRAEQVLLIKEKIDSIKYSKKRIRVNFKYSLKINNLNPSQQGSGQVGVGGGSLEKENQNIPSFYSSDLVRKEIMAPRAGLEPATRWLHLIPEFPQRVDYLFTIFRRNVGT

SEQ ID NO: 6133 - protein, 513 aa, unidentified
  source 1..513: note = uncultivated organism
MPRKVQTAIRPSPQRAAIYTRISSAELQIDGYSLDAQRTACERLAQERGWEVTAVYTDPGVSAKTTERPAFRQMLEDAQSGRFDVIVVHKLDRFSRSVIDVLLLLRELERLGITLVSASEPFDFTHPTGRVVLTMLAAFAEWYLNNLSAEVSKGLEERARRGIWVGEVPFGYRVAFKKDGGDGIPVPDEWEASGVRLAFEKYATGQYSDADVARILNEAGYRPRGRGKRALPLFGKDAVTLMLRNRFYIGEVQYRRQWYPGLHEPIISRELFERVQKVRAERRGKLGVTARKTSRVYILAGLARCARCGWPMRGSASTGKRYYRDPAWDQARDCDQRMVPADAAEEALGDFLRRLCLPPDWQERVLEIVGEEAGRPAQEIRLEQERIEGQLERLKRLYILGDIEETEYRLERDRLKAQLDALTPPRMPDLKRGAELLQDFRKIWDGATAEERRQIVRTLLAKVYLDADRGPVVAIEPKPEYEPLFRLVEDQFVSPDNSRPVGPVKGKMPGGSH

SEQ ID NO: 6134 - protein, 552 aa, unidentified
  source 1..552: note = uncultivated organism
MREYVYFVAIYLRLSRDDEDIDGSMKAESNSISSQRDMIRSYVRAHDDMELFDIYVDDGYSGANFDRPEFKRMMADIEAGNVNCVIVKDLSRLGRDYIEAGRLIQKTFPAFHVRFIALTDNFDSQTADSNTKSLVLPVKNFINDSYCRDISQKVKSCQKAKREQGKFIGSFAMYGYLKSPEDRNQLVPDGYAAGIVRNIFAWKIGGMSSQAIAQRLDGLGVLSPMEYKKSLGAHYSTGFQTKTTAKWSAVAVIRILTNEVYTGMMVQGKSEKVNYKVKRAVAKPKEEWVRVEGTHEAIISREEFEIVQGLLKVDLRANAGDGCAHLFAGVLYCGDCGEPLCRRVRRYKGVTKVSFICSTRNQGRGCTRHSISEEELKTTVFSTLQTYLSLFLDVCSQLEHLQKLEVDFEEVARFDKEMERLHKEQDKYLGLRAGLHEDLKTGIITETDFKNFRAIYEEKYEAAKEALHKQEEMLKQLFRNGVASGAKLERLKEAVKLTELDRDTLVCFVSRIEVFEDRKIYVEFRGQLEFDKMLVLQDYISSKRKDEEGVTA

SEQ ID NO: 6135 - protein, 557 aa, unidentified
  source 1..557: note = uncultivated organism
MKNIACMYLRLSREDGDSSESNSISNQRQIIKSYAKENDIKLSYEYVDDGFSGSNFDRPHFKNMIDDLNKGKFNIIIVKDLSRFGRDYIESGKYLQKIFPEKGVRFISVNDNYDSENADMSDTHLILPIRNFINDSYCRDISMKVKSSKEVKRKNGEFIGAFAPFGYKKDDKDKHKLVIDKEVSHIIERIFNMKIEGYSSKAIADFLNSIGTITPSKHKENNGDNFNTGFVVKNAKWDAKMINRIISNKVYIGVLEQGKTTKLNYKSKKEIDVSKEDWIVIQNAHEPIISKSIYLLANKMLLRDVKQSKDKPCILSGMLYCKDCGSPMVRRKVKAKDGYNIFYICSEYNNTGDCSRHSIKEEYIIKATIHALNDYLSKYNELLEKVSAIDVSKLTLKVDFDSLNAEKKKYERLRQSLYMDLEEELITTEEFEKFRNNYLIKIREIEKQIITKQNIVEELKAKINDKGSLVSDIVPNIDSDNLNRLSLVSFIDRIEIGEDNAIHFIFNNIDTVHLLEAIVEGEKESNKKDDSRLISIHQYLGNQIDISNSSTAIGGVC

SEQ ID NO: 6136 - protein, 538 aa, unidentified
  source 1..538: note = uncultivated organism
MCLVENGGKEAQQVAEVICIPKTIPERTGYQIRSIRVCAYCRVSTDDDGQYHSYDAQMEYYKGLIQKNPAWKFCGIYADEGISGTSRWGREDFQRMLEECEKGRIDLILTKSITRFARNTVDTLSTVRHLKEIGVSVYFEKEHLNTMTEESEGILTVYGAVAQQESENISQNVHWSAVNRFRHGTFVISRRPYGYDKDEAKELAVKKDEAAWVRRMASMYMNGMSGVRIAEYLNQNQVAAPYGGLWSSEAVLRILFNEKTVGDCLHQKTYSTGTVPFRTERNHGKKPQYFIRDDHEGILCRDEQMRLQQIKRHRLGHRARMKSCGNEGAYILSGKVVCGECGRVFIRKKEQRQKGVSIKWRCPGHRSEACQCYTNEIWEADIERMFVNTFNTLKEHADEIVDPVIRGMKKMQETNGLHEALDTLNQKKLELKEQRHILRQLKANECIDSALYFEESRKIERELSRCRSEEKQLHSRGIHQDTITGLQATLHQLQGYDGKMQAFDGDQFILLVREVSVGKERELGFHLRCGLNLYEPVL

SEQ ID NO: 6137 - protein, 566 aa, unidentified
  source 1..566: note = uncultivated organism
MTDAVSRAANIDAAPIPANVATYLRVSTGRQAEGDLSIPDQRRQIQNYCATKNWNIVQEFVEPGSSATDDRRAAFQSMIDAALEKPATFTVIIVHSFSRFFRDQFQFEFYVRKLAKNGVRLISITQDLGDDPMSVMMRQIMTLFDEYQSKENGKHTLRAMKENARQGFWNGSLPPIGYRVVSAGLRGTKTKKALEIDPIHADTVRLIFQLSIDGVGDTGPLGVKSIATYLNERNISTRDGGRWGLSAVHKILKRESYIGRHHFNTRNFKTKTLKPATEHAIMQVPPIVTEAEFNAVQRILKSRNPRSIPPRTVSGPVLLTGICFCSTCGGAMTLRTGKNGRYRYYTCSTRKRVGETGCCGRTVPMATLDRAVTAHLESRLLDPQRITRLLHEILQKRTEWIQRRQGHIGDLRKRATEAEMKLNRLYDAIENGVIDASDPSLKNRVAELSAVRDQARADAARAVATLERSGPVLTEEGLKRFALAARRKLRNEDGTYRRDHLRALVQRVEVVNKSEARITGTKSELFQVLVAAKSVESAGAGVLTFVPKWRALGESNPSCKNENLES

SEQ ID NO: 6138 - protein, 562 aa, unidentified
  source 1..562: note = uncultivated organism
MSDRAVIYARFSSARQQEQSIDGQVRYCTQYAEQRGYQVVGTYADRAISGTTDERPEFQRMIADAKQHKFDYIIVWKLDRFSRDRYASAMYKHELKKNNVKVLSATEGIGEGDESVILEAILEAMAEMYVKQLSQNVTRGMREAALQGRHASGTAPYGYRIEDKRLVIVPEEAAVVRYIFEEYAKGVSKRELADRLNARGLRTHTGAPFSFNSFQNILKNEKYIGTFKWSDIVIEDSCPAIVDKELFAKCQQRIKANKRNVGRKAKTKIEYLLKGKLFCGHCGAPMVGDGGTSKTGKKHYYYTCTTRKKGECDKAREKKDFIEWYIVEQTLEYVLQPARLEYIAENVIAAYNKSYNTNELEELKARKAVLEREYDKITDSLIHATSERMIDAINRKAAETEARLNALEDDITTMSAGCEAALTVEEVKAWLSSFCNGDAADPEFQRRIIDVLVNAVYLYDDKVVIYFNVRAGKQISYIEMQNTVESATHNDGARGSIIKPLCPPLILGGTFLVPPKIFIQAKRRWCESKATVPRFEPREEPKVKTVLRTDFRESVDQTDGRR

SEQ ID NO: 6139 - protein, 545 aa, unidentified
  source 1..545: note = uncultivated organism
MPIAIYARVSTEEQRERQSIETQYELGQSFCKVQNLPVFRVYGDNGVSGTIPLDRRPEGSQIFRDARLGKFDELLVYKLDRLARDARHTLNAVAELEKMGVRVRSMTESFDTSNATGKLMMTMLAGFAAHEHSVIKERSLDGTNRVARAGAWLGGIVPYGYRKTGEKATARLVVSEEPIPGLDLTEAEVVRMIFRMATVERRSCHYIAARLTELSVPCAYQRDDRLVLRGKRKQRTSGLWRPARVRNLIISSTYKGVHEYGKRSRTKNRATIPRPVPAIVDEKTWSKAQENLHTHFLFGVRNSRNQYLLRGLMKCACCGLTFIGVANQRPSGKKEFYYRCNGNQGARGLYGAHGERCPSKAVRGEALEQMVWGDVLEFLRKPGVVIERLQARMRDEANDGAKNRERLRRLRGLLEGKADERAKVVGLYRRGRLNDGELDQQVEEIDKDAAGLVAQIEELEGKLAGTDSNGAVLEGAEALLTRLRKRLDEPLTFERKRQLVELLVGGIKIDTIRDGEKRENIVTVTYRFPSAVESCTDTDSSPLPA

SEQ ID NO: 6140 - protein, 566 aa, unidentified
  source 1..566: note = uncultivated organism
MKIEPKRCAIYTRKSHDEGLEQDYNSLDAQRDAAMNYIASQRSNGWQALPDSYDDGGWSGGNINRPALQRMMTDLRAGLIDIVVVYKIDRLSRSLTDFAELQTEFEKYGVSFVSVTQEINTSTSSGRMMLNILMTFAQFEREVIAERIRDKLSASKKKGKYVGGLLPLGYRGDSVNMKMVIEPEEAKIVRLIYDEYLRTSSPKAVQRLLEGKGIRGREWVSKKGLRHGGRPLSIAVIRDILQNPIYIGKLRYRGKVYDGEHEGIIPVKLWERVQSTFKANFESCHQRAGRDLKPFAGLIYCGPCNAPMFVATVTKPNGRRYRYYICRVDEKRAHRECPLHRVPAETLEQLLLNRIAALLKTPTMLAKICGGELRNALDTRQAGEALENIATLWSAMFPVERYKLIHALIQRVLVFENEVRIVFRAEGIAGLLKEAGADFSVSSGSVDLECVLTVPCKLRRHAGQVKLHSADEQEDGPRLPIQTALIQAHQGMEQIISGKATTMRQIAQALNMDRSFVARTLQLANLAPDIVKAIWEKRQPVSLTLDKLRRGIPDSWEEQRKIFLGK

SEQ ID NO: 6141 - protein, 517 aa, unidentified
  source 1..517: note = uncultivated organism
MAGRKTDAPAVRCAIYTRKSTEEGLEQEFNSLDAQREAGEAFIASQKSEGWVCLPERYDDGGYTGGNTERPAFKRLMADVEAGRIDCIVVYKVDRLSRSLLDFTRIMEALDKRGVSFVSVTQQFNTTSSMGRLTLNILLSFAQFEREIISERTRDKIAAARRKGKWSGGRPILGFDVDPQGGRLLVNEAEATRVRAIYELYLDRESLIATIAELDARGWTNKQWTNKKGRESGGSPFNKHSLYSMLTNVLYTGRLTYKDEIHDGEQPAIVDDETFRRVRRILKRNGATGGKYVRNQFGAILKGLINCVPCNCAMVPTHATKKDRRYRYYVCANAQKRGWHNCPSKSIPAGEIEKFVVDQVRGIGSDPTLLAETLGAARAEAKARIKELEAEKSGLMRELGRHNAQMRDLAGSVGSGGTATDRMADLLDRIRGVEQRLAEIREESATLGRDLIDEKEAARAMAAFDPVWETLTLREQGRVLRLLIQRVDYDGDKSTVSVTFHPTGIEMLSREYVEETA

SEQ ID NO: 6142 - protein, 568 aa, unidentified
  source 1..568: note = uncultivated organism
MARKSRKKIGVTEITANQESKKPYVAALYARISVENERKREADSIGNQIQLLKDFVSENQDIQMFDVYSDDDISGTDFIRPEFSRMMNDIRDGRINCVIVKDFSRLGRNFLESGEYIEMVFPFFGVRFIAVTEHFDTLNQQADISVQLKNLANEMYAKDISRKICSTMRSIQEQGKFAGSKAPYGYRLNPNDKHCLIADEETAPIVKEMFELLADGNTLHYIATSFNARGIPSPGRLMYERGISKTDKFKNSKWYMQTVSRILQDPVYLGWMVGGKFRSNFHSGGMKGSSSVPKEEWIITKGTHEPIVTEDLFNQVQGYFAETKKAYGQVAKYNSKSKKNSIFKGHLRCGECGQAMFLRYKKNRHGERKGWYYCALHENYNSSYCPKKSMKQEDVESIALQLIKTQIQLFTDARTFIAALNKKESSKTKYRIYQDQIHSVQKQIARYMGLKASLYEDYADGTLVRDDYIRMGQEYAKKADELRIFQTELEKEAEKYSPAYAMSGGFAQMVEEFKNIEQLDEKVVDAFIDEMVLYHNGHVEVHFNFRDELDEVIHMAAIRKKEGKRYAV

SEQ ID NO: 6143 - protein, 543 aa, unidentified
  source 1..543: note = uncultivated organism
MANRVVRCAVYTRKSTEEGLEQEFNTLHAQREACAACILSQKHEGWQLLPEFYDDGGYSGGNMERPGLKQLMADVESGRVDVIVVYKVDRLSRSLADFAKIVEVLDRVGSSFVSVTQAFNTTTSMGPLTLNVLLSFAQFEREVTGERIRDKVAASKKKGMWMGGPVPLGYDVKDRKLIINPAEAATVRHIFERYLALRSGPQLVDELMASGIRTKLRAFKDGRQVGGVPFTVGPLSHLLNNPVYVGEVRHKGTNYPGQHEPIISQELWDEVQSSLASNRVNRRIGGWGRAPSLLTGMLFDQTGRLMTPTSSAKAARRYRYYTSRARTGEMLSAREKAKIPAGELERVVIEQLLNWLERCGGTNLKGTSEEIDEQCVASNIFAKRLAAGTFHELRGELLSRNARIDLMTESIKISFDEAKPSGAVHRACLELKSELVDRGSDLKLMIAPDTGQQQRDPDPVLVKLIVHAFAARESLLSGTADTITSEYSLLHRSRLARLSYLAPDIISAIVAGNHPPALHGRRLLRAANLPLDWDGQRRLLGFA

SEQ ID NO: 6144 - protein, 541 aa, unidentified
  source 1..541: note = uncultivated organism
MKVGIWIRVSTLDQAQGESPMHHEERARMYAKAKGWEVVEKYDLSGVSGKSIIDHPETKRMLDHVSSKKIDGLIFSKIGRFTRNVRELLELSDYFRKHDAHLISLQESIDTSTPAGKLLFTFTGALAEWEREEISERVKASVIVRAKMGKSLGGKAPYGYKWVDKRLEIDDEVAPVIKLIFETFKNFRNVKRTIRHLTGQGYSLKGNKITHTTLLRILNNPAYKGKRIVNSTKSLGNGQRWERKSADEWIIQEVPTIVSERLWRECQVVLKERNTNPPPRESGYPFGGLVKCKKCGSKMYYAYTVKKDSSQVPRYVCRFCHSKVDENELDEAFLGGLKHLVLKTDTIVHELKNKRAKLIDKENELERLKKEISKSTNRLSKLMDIFADGVISKNDFTEKYHELRGRISSMKNEVSRIQGEIDFLKVGDINTREIIASISTLPTLWKQMLNKEKIAFVKAMLSSLTYNEAKREVEVVYGVISFEKVTEPMSLRFSGGSQTRMRLLPVPDKEISIQNFRSPYGSHRFAPRGPGGSLQGSRIKK

SEQ ID NO: 6145 - protein, 598 aa, unidentified
  source 1..598: note = uncultivated organism
MSARNRDIPNAGRGQSSSSGSSQSAGRSSQPRLRCAIYTRKSTEEGLDQEFNSLDAQREACAAFATSQVGLGWKLLPDRYDDGGISGGTMDRPALQRLLQDIRDRKVDVVVVYKIDRLTRSFADFAKIVEVFDGHSVSFVSVTQQFNTTTSMGRLTLSVLLSFAQFEREVTAERIRDKIAASRKKGMWMGGTVPLGYRVQDRKLLIKEPEEAAIRGLFHRYLELKSVPQLAREVSRQAAEKARHEVSDGESNPLHGFERYSTRPMFHGMLYKLLTNPIYIGKVRHHDEIYDGEHEPLIDVDLFEAVRQQLAEGAPVPKGTAMHGNKHLLTGLLFDDTGDRLSPIHTTVHGRQYRYYMSRRAIKSAGSAPDSWRIPAHEIEKVVRGQAIRVLQDHALIAGWIEELASTDHIRTGLASAASLALSLSEHEQLDRQRETLSLLFRSISLSTSMVRFEVKVQEIVQHLVDADVRDFDNAVDAPQIHVIELPIALRRRGIGTRIVIDSPYVKPEPDSALVDLIARAHVYFDKLTSSAAMSTTSIAEAFNVDRADVGRILPLAFLSPKMLDAILTGSQPASLTPRHLARADMSVDWAEQDLVLQ

SEQ ID NO: 6146 - protein, 501 aa, unidentified
  source 1..501: note = uncultivated organism
MYTALYARQSIDRDNSVSIETQLEYCKGALRPDEQQYGVRCFSDRGYSGKNTERPDFQRLMKEVRRGRARKIIVYKLDRISRSIVDFVDMLRDFRRYNVSFSSSQEGFDTGSAYGEMICKILMVFAEFERESIVNRVRDAFEKRSDVGLYTGGRQVYGYRLCETVIHGIKTKYLVPEEKEAEQVRYIFDAYSQPSVTLRTLQAELLANNIVPLRGADWTTGKLGSMLRNPVYARADADIYSYFEQKGTRIVGGLESFSGRHNVQLYGRTVHDASLDDWSDMKIVLLESEGLVDSETWLKCQHKLEQNRQIGNSLSNRTSWLSGKLVCSLCGHTMTTVRSGSRRYFMCSGRTNKKTCKGIKPTIYVSDMEDMMDGYISEKLKNIRGKNKDRSAEDTARLNELKLKLKSAEQKLDSVAEAVMNSGAVPELISVLNEKALKLTEEKRHYLSAIEVLERASSAETTDLSKKWDKADFAEKRSVCSILVKAVSLYENGDAEIIWNI

SEQ ID NO: 6147 - protein, 554 aa, unidentified
  source 1..554: note = uncultivated organism
MKTIRCAIYTRKSSDEGLEQSFNSLDAQREACAAYILSQASEGWSALPEIYDDGGLSGGTLERPALKRLLAEVAAGRVDIIVVYKVDRLTRSLFDFAKLVETFDAAGTSFVSVTQSFNTTTSMGRLTLNMLLSFAQFEREVTAERIRDKIAASKARGMWMGGTPPLGYAPNDRSLVIVEEHATLVRHLYGRYLALGSVRRLMDELARSGVTVPARTTVGGKPLGGGAFTRGQLYQILKNVIYTGRIGHKDKVYPGLHPAIIDEATFAAVQAMLSDHLQGHRTRAGVAEASPLVGRILDGNGDPLVATHATKNKVRHRYYVSRALQQATSDTGLRIPAREIEALVIERVQRLVRQPLELATMAALDVQVHQVADLHARCEALAEQFEARRSLALLAVVTRVQVGDATVTLTCDTAALAKALGTEHRSDAPSTIEIGCAARLTRSGRALRLVQDGGATAKATPDRSLIRVLVQARRWWGMLRGGEISTSELAVREGVTNSYVARVLRLAFLAPAVTEAILAGRQRAGVTVASLTAEGAVAADWQTQIATLLPARGR

SEQ ID NO: 6148 - protein, 539 aa, unidentified
  source 1..539: note = uncultivated organism
MSQKYKPVAAIYVRVSTTKESQKDSPEHQEGICREKARLMGLEVLDDWVYEDRDSGTSIIERPAIQKLLEDAQAGRFQAVIFASLSRFSRDLVDSMALKRMLVDSLKIRLISIDENYDSGIDQDEFKFQIFSAVNQKQSEMISLSSRRGIRQSAMKGNFTGSIPPYGYKKAVINGRKTLVPDENESKIVREIFELYTAHKLGEKAIVKVLNERFIPSPKGGVWGITTIQRILQNEAYTGVNVFSKYETIKVHSLTDLHDRRKKLVQRNKTDWERSAIGQTHEAIIEPEVFRAAQEIRLKRGGGRRGGIRNRKNIFAGLIFCEHCGASMVSMKSKSSRSRSNGKEYRYLICSRRRRQGDAGCQNDYWLPYEEFRDTLLADLSEQLSAITSVDELFEKHQGLIQSDRHDHEKEIAELNAKIKRYREAIFSLRKDLVDGRIDQEQMEYEKQQFEKEIRQLEQRLVEKRENQQKRENIFRLYQEVREALDDLLELKYDDDEDFDELHLILRKLVERITVSREGEVVIRTTYRMKITTDQLQEV

SEQ ID NO: 6149 - protein, 552 aa, unidentified
  source 1..552: note = uncultivated organism
MGSTNEVPKRSIRCAIYTRKSTEEGLDQEFSSLDAQRECAEAYILSQRAEGWTARSKRYDDGGFTGANLERPALRELLADVEAGELDCIVVYKVDRLSRSLLDFARLMEVFDRRKVTFVSVTQQLNSYSPMGRLTLNVLLSFAQFEREIIGERTRDKLSAARRKGKWIGGYPMLGYDADVNTKRLVINPTEAEQVRRIFALFLESGSLVQTLDELRRRDWRLKRWTTRKGIPHEGKHFDRPGLVRLLTNVLYIGEVRHHGKLYPGEQEAIVDKSAWKKANALLEGRRRGSESGSGSQEPAILKGLLECGVCGASMVPGYGNNHGRKYPYYTCLSLQKRGAKACPGQTVVASRIERVIVDRMYELAQDPARPELRERLQVSRREWDGLEGAERQRILANAFERIRYDHRRQQASLRLASATSKSETIEASISGRLFATPKDRSSAAGRQPKLSRLMALALKFEALLQEGAVKDHTEVAYRGGVTRSRISQILNLRNLAPQIQEHLLLEPAPHVTERMLQKLTRELDWRKQVARFDALRCRIEPVNPSVATPAV

SEQ ID NO: 6150 - protein, 570 aa, unidentified
  source 1..570: note = uncultivated organism
MNKKYFLAAMYLRLSRDDSDVGDVTDKDGRLKSESNSIGNQRELIRAFIYEQQDIELYDIYVDDGFSGSNFDRPEFKRMISDIEAGKVNCVIVKDLSRFGRDYIESGRYIQKIFPALSVRFIALTDHYDSFHADAGESGIVLPVKNFINDSYCRDISTKVKSQFEVKRKNGECIAPFALYGYRKADNNKNQLVVDDYAAEIVRKIFNWKMEGVAVSAIADKLNELGILSPKEYKKSTGANYRGGFSGAVKSMWSSATVKRILTNEMYLGHMVQGKTEKINYKLKKSVEKPEKDWVKVENTHEPIISEDVFLVVQNLLKVDGRVSPVSEKSSFFTGILFCGDCGEQMIRRINRYKNTQRVYYICSTKNRGEGCTRHSIPEDALKQLVLEMVTKFANCFLQEKQMFEKALDMETNFESIVHYDTEIARLKEEQDKYYSLCSGLYEDLKEGIITKSEFERLHSEFKRKAGEFEEAQKKQELMIKELFKNGVISAARLKTMQDCAELREIDRYTLCSMVKKISVYENHRIEIEFYYTDQYRIMREVNKRIKDEQKKNCVAERGVHKNGQSIQTR

SEQ ID NO: 6151 - protein, 531 aa, unidentified
  source 1..531: note = uncultivated organism
MKVRKRDRPKEAAAPGSRMRCAVYTRKSSDEGLDQEFNSLDAQRESAEAFISSQKTEGWVCLPDRYDDGGFSGGSIERPALGHLLRDIEAGKIDCVVVYKVDRLSRSLMDFAKIMEAFDRKGVSFVSVTQQFNTTSSMGRLTLNILLSFAQFEREIIGERIRDKIAAQKRKGKWAGGVPVLGYDVDRSGPSPRLVVNAREAVRVRALFDLYLDKQSLLPVVRELRHREWTNKKRVTKKTGKVIGGKPFNKATLHNHLVNPVYIGKITHKGEIYDGVHEAIVDPEVFERVQKLLRYNGRTGGFEVRNKYGALLRGLITCKACGYAMTHTFTKDKKGGPRFYRYYRCTHAIKNGADECPSRTLPAAEIERVVVDEIRGLGSDRALLKQVLADAHATIAEEREGLVTERADLKRTLDRCHRELQTLAAGGLADTDVSQRIAELHEQITAGDKRLPEVEKRIGELDAETITQAQAEAAFRGFDPVWENLIPREQARLIRLLVSAVEYDAVKSSVSVTFRPTSIRAFLDRINKEAA

SEQ ID NO: 6152 - protein, 611 aa, unidentified
  source 1..611: note = uncultivated organism
MEETVKKPIRAAIYIRVSTDEQIKGYGLTVQDEKLRAFVKLHDYALDEKHIYRDEGFSGSLPVEERPGIKKLLEDARNREFDVVITYRLDRMFRKTKLLLEMVDELEKHKVGFKSMTESFDTTSVTGKGLMSILAVIAEMERGTIQERTMNGRASAARDGKWVTGVPPYGYILIKKTKKLKIHPEEARWVKTFFKWVVTERLSLREIQQRANDMKIPVPRRKVSEKKTLNYWHKRTLGRILTNETYTGTAYFRKYKRPFNNLTSLIDENMLRDKAGWISIIVPSIVSKGLFEECKQQLIKNREFSIRNQKRTYLFSKIIYCGNCGFKLFGGFQPSRKENGTGTKYYHGLCTKNDVGTTKRCSTCDQIAEVRLLPVWDQLKEILKRPELTLNKLAKYNDDRGSKDDSEERLKQVDKTLASLQTKRQRLAQLYAEEEIDYKSYKASIVECKTQEDHLQQEKLRLQRHLLTKKEIKEISEVINIQYKKLTDRLDMLTYDEQQMAMRLLLKRVIVYPKKAEAEVELNFNPESKELSTLIESPISGLFLAQLRDNNAKNGLTTLEEEAIETALWDKSIKNCLAITNSNPTNPTQKSIRSVVNGRLRDKTDGRVSGI

SEQ ID NO: 6153 - protein, 538 aa, unidentified
  source 1..538: note = uncultivated organism
MSDKKIRCAIYTRKSTEEGLEQEFNSLQAQREACEAYIKSQKHEHWQLLSTEYDDGGYSGGNMERPALKRLLADVQNGFIDIIVVYKIDRLTRSLMDFSKIVEVLDKHNASFVSITQHFNTTTSMGRLTLNMLLSFAQFEREVTGERIRDKISASKKKGMWMGGKPPLGYYRKDKKIYPDEEKVSLVRSIFEKYIELKSTTLVKEWLDKQGHKISVGNLNCILRNKAYIGLVGHKGTWYPGEHQGIVPIELFEQVQAVIADNRINRQHYDPKKSLLSGKLYDDKGNAMSPSWSTGCSGKTYRYYVSQAIIRKEPGKVGKVSKVPLSKLEQFIDNWFSEFLKDKTKIYPYIQQFGVSKQKEIIKQLSSYPIVRDIEKSLIKRVQLHTNKIEITLYQEQVIELLNAIYENREMSLLKPEKLKHKTTYTETYRIGTVANGAKVIVGQFIKPRKQSNKELIKILNQAYTWHQDILDGKTTQEIANREKVCVQYVRRILNLSFLSPKIVRSILNGTQPADCTLKKLLSIKTSNWQEQEQIFYK

SEQ ID NO: 6154 - protein, 565 aa, unidentified
  source 1..565: note = uncultivated organism
MKVAGYGRVSTQGQIDGTSPEEQRRSIETECLRNGDQLVNFFSDMAYSGSDDDRPGLKQLLNESKTGQFEVVMFTKLDRLGRNLRDIKNILHEISVNGLKYKCIQQPEISNQGFYGDLMLNILAAFAEFEASIIRDRTNSGRMSNWRKQTSVIGSLPFGYKHAEGKIVCDDKEAEIYQWIVSMYLYENLSFRDIAIKLTSEGIPTSSGKSEKWHNVTVSKILKNPAYTGQAIQNKFEFKRKRSVVKGKQYYCVSKVQKPDEQWISIKYPPLISREQFDQIQSKTQYQKRKAKKHHVGYENHFMAENVLFCGYCGSRIKKRIKPSGKIQYCCYWWEASNKERQVSQREKCKLKYEDADEIDDMIFDEIVKILSNPGRFAKNWFKNFDIDNLIKKSKILMERDNAFGLKLAEGFKIIKNTKNPELKAIYELAQKKDEKDFEENQIALKENKRLLEFSQNKYNRLETLYNSMNQGKAEFIKNWFPTVAELSAFLYNLPFEEKKRIVESIISPENGGKILIRRCNDIELGEEELIIDMDFNIDLNRIEALINSLNKNELLNKLNSGRIP

SEQ ID NO: 6155 - protein, 545 aa, unidentified
  source 1..545: note = uncultivated organism
MKNLTDNRIYRADAYLRLSKEDGDKVESDSIANQRDLIRHFLADKPDIQLVDEQIDDGYSGATFDRPSFQKMMEDVKSGKINCIIVKDLSRFGRNFVEAGRYIDQIFPEYGVRFIAINDNFDSAKGRSQSDNVLLPFLNLVNDAFCRDISIKVRSQLEVKRKKGDFVGSFAVYGYLKDPDNRHKLIVDEFAANVVRDIFKWKIDGLSQQRIADRLNELGILSPMEYKKNCGMAYRTGFQVSTKAKWTAVAVGRILRNEFYIGTLVQGKRTTPNHKVKKTIEKPNNEWVRIENNHEPIVTIEEFSAVGRLLLQDTRVAPDQNTVSLFSGLIFCGDCGQNMVKNGVCKAGKTYSYYMCCTNRAKKGCSSHRIPEQAVADSVLMSLKEHISTVLEIEKTLEFLAGLPLQRAEVQKADARLVSKQEEIKRYEKLKATLYEALADGLIDKSEYLELKAVYDKKMQEARSEEVKVKDELESILQNQSVNSQWIEHFRAYQNIDTLDRRMVVTLIERILVYEDYRLQIEFRYQADYERALAMIQASGVKEVV

SEQ ID NO: 6156 - protein, 528 aa, unidentified
  source 1..528: note = uncultivated organism
MEKELLTAGSLALEQKQRSVIVIDATEHPQEVKLRVAAYCRVSSDSDDQLNSFAAQNRYYTTLIASKENWALVDIYADEGITGTSAQKRADFQRLMADCRRGLIDRVLTKSVSRFARNTKECLEAIRELKALGIGVQFEKEHLDTASMSGEMTAAMFAAFAQAESESISKNMRWSYQKRMQEGTFNTCSAPYGFRLECGQLVINREEAEIVQFIFHAYLSGAQPLEIARELAEHNTTARQWSEQTVKYILRNERYAGNAMLQKKYTESTFPYRRRKNYGEVNMYFVSGSNDAIISEATFKQAQALLQDRAQKRVCKPNPQPLNKMIVCGCCGNSFRSKQNKGIQYMVCCTHDSNINACGVAQIENRVFYSGFLRLYYKLKHQGVSILSQLQQNLLTIRSRRMLWSTDVIELNKQISNLTSQSHTLAQLKQQGIVDPDIFISRSNELAEQLRAAKQKKERLLDAGSDEIITQTQELLDILDAGPDFLECFDEELFCELVDKIIVESNERLWFRLKNGLELPEAIERTVR

SEQ ID NO: 6157 - protein, 533 aa, unidentified
  source 1..533: note = uncultivated organism
MNRVYCLYRVSHRVQAEENDIPMQRISCRTFAKERGWEIVRELSEKGVSGYKLSMKERDAVVELREDAMAGKFNILLVYMFDRIGRRDDETPFVVEWLTRNGIAVWSVCEGEQRFDNHVDKLTNYIRYWQAAGESEKISERTRTRIRQLTEEGFFTGGQCPYGYELIKGQRHNKRNQPLNDLHICENEAATVRLMFDKAQREGLGPMRLAKYLNEQGILTRKDKLWNPATISRILTNRIYLGILRKGDAESPQLEKLQIIDDSTFERVYEIRTIRGKGVSEQMTTIPIQTRGKALLSGFLYCAHCGARVNSTTSRKEYRRKDGSLYRRDCRTYRCNASMEGVPVDCTGQRTYRAECIEAAFVEAISALLTQLEALPVETIMEYKYQIALKERRDEYKQAKATLEEKHRDYEALKNEIGKALRGESGFKPELLREIIGDTTKSIASMTERLYELGAKLQNAEQLRREIEVKQLKYCGLNQIFTNGTMEEKKMLMSIIVHRIEIAEGYKLSIRLTEDFDRFLDGLIETRACFDLI

SEQ ID NO: 6158 - protein, 621 aa, unidentified
  source 1..621: note = uncultivated organism
MMEHNANGGGAKPPVNIAIYTRKSNDENLNGTVTSLESQKSCCRSYIEIQREKGWQEYPESFDDPALSGKNLERPSMRRLLKAVEEGKVNGVIVYKLDRLTRSSKDFHHLLELFEKHSVAFVSATESIDTKSPQGRLMTAIMVQFAQYDRELDQERSKDFHLARAGKGLWCGGLPPLGYDSKDKLLVVNEKEADLVRRIFDLYLRHESTIKVALELNRMGFRGKLYQTITGRPFGGKRFDDDQVIRVLRRKIYIGFVTNSRTGKEFPGQQKAIIDPKTFEQAQKILDEHARSEGHVIYMRNKHNFRLKGLVRCAECGSAVTGYTRPKGKVTYRYYRCMANKSGLFTPCVFKCIQAAKLEEFVVEKIAAVGWDQALITQAVKKVQDLTKGGVKGLEKERRGVSERLKTTRREIENLVGMVKGQGVSVEASEELARLENVKRELEAKSGELEAAISHRTTAVYDVDAIAGALQRFARFIYQLPIEMQIQAIHLLVKQVLVGKSGILVTLHELPIADLDEALNVNGGGAPKKFNPRRLTARRGLDTTVRLDHSETDERTPVVELEQNWRGQEGGDTAAITQPPVPELEKTHLIPPIPISLPCDWARIANGERVIRENPPEVDAT

SEQ ID NO: 6159 - protein, 597 aa, unidentified
  source 1..597: note = uncultivated organism
MKKNAAIYCRVSTEDQAREGYSLPEQQEKLKDLCKYRDYNIYKVYEDAGISGKDMDHRPAFMEMLEDVRDKKVNVIVAYKLDRVTRSVRDLEILITELEKYECALECAMDDINTSTANGRFFVRMLTVLSQLEIERVSERVKFGMVGAIKDGHIPVRKTLGFMRDGKKLVINPEEKEVVVRVFELYSKGYSYSKIANIFNEEKVLNKTNWRENSLQHLLSNPLFKGDFISGGRVGNPIYYENVVEPIVSKELWEECQVQTKKNTRTYQRRNDYIFFQKILCPNCHRIMACKAPGGKKKHYIYYKCNDCGCYVREDMLEEKLIEEISLIIEFDMVVRKYYAPLLKHKLENPNDLLKKEINILKDKVNRLKEAYLNQIIDIDEYKSDKEHLEKRIKETEDKLKVENELEEFNFSFDDVMLTRDLESIKYILDPLYHNKFLKKWKEMSIKEKQELIMNYIDSIEVIKTNDDVKTKNINFRNTFIKEYAKLFSDGGLTRHINVSSNKATSEMEVCYPMTREEAEQYVEKLSKHCPIEYVEVKKQKYGNNQFRLDYINAEENTIPFKMIPILNKKGIKKVESFGVIGVPRPPILLHIEEKQT

SEQ ID NO: 6160 - protein, 523 aa, unidentified
  source 1..523: note = uncultivated organism
MRRRRTPSRATPQKVVRCAIYTRKSTDEGLDQDFNSLDAQRESAENYIASQKAEGWECLPDRYDDGGFTGGNMERPALRRLLADIDAGLIDCVVVYKVDRLSRSLMDFARMMETFERHKVSFVSVTQQFNTTHSMGRLTLNILLSFAQFEREIISERTRDKIAAARRKGKWGGGRPLLGYDLVPLPGGSRLVVNEEEATRVRQIFDLYLEHEALIPVVKVLDERGWRSKQWTTKSGKPIGGRPFDKNSLFKLLTNPAYLGKVKHLTELFDGEHAAIVDEQTWTKVQQILKRNGSNGGVQVRNRHGALLKGLLRCVPCDCAMVHSVTAKGPKRYRYYVCATAMKRGWHTCPSKSIPAAEIERFVVDQIRKAASDPAILAATVRQVRVQSEKAIGKLEQERERLERELKRRGDALRELLAEPDVATASADVLRTREEIKALEQRRTEVRDRIIAIGRELVDEKQVVDALKVFDPVWDQLTTREKVRVIQLLVERVDCDGAQGTVAVTFQAEGMRALFDGKTEDAA

SEQ ID NO: 6161 - protein, 566 aa, unidentified
  source 1..566: note = uncultivated organism
MTATAIKRMRCAIYTRVSTDAGLDQDFNSLDAQYDAAQAYIRSQAHAGWMLVHTRYDDGGFSGGSADRPALQRLLADITAHKVNVVVVYKVDRLTRSLADFAKLVELFDAHGVSFVSVTQQFNTTTSMGRLTLNVLLSFAQFEREVTSERIRDKIGASKRKGLWVGGVVPLGYQAKDRKITVVEAEAKTVRHIFRRYLELGSLSLLMADLRRTGITTKVRSLANGRTIGGIPFTRGPLAALLRNQFYIGQVKYRGEIFPGEQPAILDRKLFGAVQSKLDQQSINHNQARHQSGALLTGRIFDERGNRMTPTSAIKNGVRYRYYISAPLVQGQPQNAAPINRVPAALIEKLIITAVQNHLEPKKEKQGSQGPDPIADTDLIATHIARVEVKQDHLVIQLGTAAEQQSGPETKAGLPEQPSNKDEGKSVVRRNDPKAKLLIVPWKKPPSKQPRQIISPAGLLSRQDRRPIRAETRATLVAAIATARHWLDELVAGTMQGVEQIAEREKCSIRQVNRTITLAFLAPSLVQAAVEGRLPRGIGVARLRDLPTEWTAQYKLLGLSLAEPHF

SEQ ID NO: 6162 - protein, 658 aa, unidentified
  source 1..658: note = uncultivated organism
MYKEGKKCVLYVRVSTEMQVDGFSLDGQRNTLKRFAEREGMIIKDIYEDAGKSGKSIEGRPAFTRLLNDIKNGLQIDYIMVYKLSRFGRNAADVLNSLELIQAYGINLISVEEGIDSSQTSGKLLITMLSAVSEIERENFLEQTMNGRKEKARQGGWNGGFAPYGYKLENGNFLVVPEEAEQVRMIYDLFVNSSLGISGIAKKLNKQGIGKNVDRPNSYSTRWTQSTIKNILDNPIYCGYIAYGRTKREKVKGSKCDFVRIKNDNYQIGKGHHEAIITDEIFNQAKKKREETGVLFPSNVGYNRIHLLSGLIKCPICGGPMHVTKNIKTNAKGERVSKHYYACTNNRHNMSKVCNFNRLLAKDKIEPYIKLLVKEIVNSETFISALNKSFSNKVDTNSINKLIENNKKKLRDYMLNKTRLEEQIDTLPFDIARRDEILSNLNARLFKLYDEIGGVQDNISDLENELQSAKNSTMNIDNIISYMKDFDNLYEIVTDEERRNIIRYLFEEIQIYSDFKDNHIIKSVKLRLNPVVEETNESITLEYPVTDEMNELMYNKICQEIEKNKIKATPIVKEKVPRAPIKRKVGISYNRKQPTYSQIKNYIKETYNMNVSSLYIAQAKKELGLDLQVDSSSADKVPQCPKEKMIALTETFKHFNML

SEQ ID NO: 6163 - protein, 535 aa, unidentified
  source 1..535: note = uncultivated organism
MKMLRCAIYTRKSSEEGLDQSFNSLDAQREACAAYIVSQKGEGWKPVSKLYDDGGFSGGNMERPGLVSLLRDIGAGLIDVVVVYKVDRLTRSLPDFARIVDQFDRKGVSFVSVTQAFNTTTSMGRLTLNVLLSFAQFEREVTGERIRDKIAQSKAKGMWMGGAPPLGYAGHERTLKIIPEEAATVRHIFARYLELGSVHTLKLELEQQGVTSKVRISGKGNRTGGLPINRGALFHMLRNPIYVGDIPHRDKVFTGLHEAIIDRPLFQAVGVLLAANGGTARTRRQSSPSLLTGLLKDANGRPMSPVATSQGDRTYRYYVSTEVQRGEPRARKGRHRVVAHAIETAVVEALREVIGDPQADWLDLRSLVASIMLIDDSVRLMFGPGLESRASRRSRQELVETSDGLMLTLSLNLTRRGGKSWMTASTDAPANRRRIDKVLVAGLRRAHHELRQAGVDVMLQKPAWREMSGINDPYIRKLVRLAFLAPDIQQAIMDGQQPVGLTLQVLRESDIPSSWDAQRRTLGFTQSPAASCLIC

SEQ ID NO: 6164 - protein, 504 aa, unidentified
  source 1..504: note = uncultivated organism
MKAAIYTRVSSEMQTDGHSLDAQLSACRRLCADRGWVIVTEYTDVESARTTERPQFQQMLIDAEWGQFDVIVVHKLDRFSRSVTDTLSTLRQLDGYNVSLVSISEQFDFTTPVGKVLLTMLSAFAQWYLDNLSAETSKGKRARVDQGHWNGMIPFGYTVEYVKDGGDGIPREDPQTAPGVRLAFESYATDQYSDREIAQLLNQADYRPQAARASRGLALWSKDSVRYLLSNRFYIGQVQHHGQWKPGRHEGIISADLFMLCQTVRQRRHGYRGGAVSRRGRVFPLSGLARCQRCGSAMRGYSCQTTQIRYYRDPAYDQCRSCSQRMVRAQEAEDALGEFLSTIQLPEQWQQRVLQLVRESAEQNDAEQTAARLRGSIQRLQQMYQWGHIEQQEYLGERTRLEAELAALLPAPAPNLERAAEMLQNFGAIWQAARPEERRSILRTLLDAVYLDAENGPVTAIQPKPDLAVLFTLTQAGTTGVPSSPVRVLSALSARTRSGSLPTR

SEQ ID NO: 6165 - protein, 547 aa, unidentified
  source 1..547: note = uncultivated organism
MKVALYTRVSTEDQAREGFSLDVQRDFLLKHAKDQSWEVFCSISGAKVYQDDGISGYTMDRPALQRLLADAGKKNFDLILVYKQDRLSRNLKDMLNLLDQLSRWGVGYKSATEPFDTTTSAGKMALHMLGTYAEFERNRLVERVFPGMIRGVQAGHWQGARYSPYGYTYHKEKKLLEVVPVEAENVKKIYEMYLSNKSTVQIAGHFYKEKVKSRSGGRFHAKLICDILKNPVYLGKLVWNRHHYDKNNQSRKTYRAIPNPPDQIVTAEGIHQVIITQEVFDKVQARLRANRKGGERCMTKFDYPFTGVLVCARCHHKMHGISAMTNSAQKKRKRWYRCSAAYMHDIKCKNSMVRAEMVEPQLFAIIEKLTKNKEVLAVRLTRLIKAQVEPSEAFLEMIKEQKKLIQENLRQQKKLSDIYMQDCMSFEVYKPQAADLRDEEKRRRSRLAELELKLLAKEKAKGYQQYVREVVNRFTEAKDELDPIRKKEVVRVIFKEILIKDRKIVEFEVFEPFKSFLEGREPCQNKLLEELMPSESLGCALRPSDAR

SEQ ID NO: 6166 - protein, 532 aa, unidentified
  source 1..532: note = uncultivated organism
MTMVQAQSIMKAAPRITVIDPRPPEQAKLRVAAYARVSSDSEDQLNSYIAQVDFYTKYISSKEDWEMVDIYADEGLTGTEAQKRDDFNRMINDCRAGKIDRLLVKSVSRFARNTGEYIQFMRELLRLGISIYFEKENLDTAKMTSEQAADLYGAFAQMESTNHSSNMRVSNRIRMEKGIFTPPTPPYGYRLVERELEIDRDEADVVRYIFRAYLDGQGKEDIAKELNELGVVRGHGRERWYPSTIHYILTNISYTGNMIWQKTCATDTFPFRQIRNTGQKPQYFVEDSHPAIVSQEDFQRVRELMARRREQFLSHAQRRPSVYSRRVFCGVCGSMCRRKDIRGKVYWVCHRHDQEKSRCPVPQVPEAEITSAVLRLYHKLAQDPARIFRPMAERLRELRELELRSNRKITDIDKEIARLSEQNLVLVRLKSKGYVDPALYLSQQDEITHELKELKKLRRRALEASGEDQQLQNTEAILEYLEDSGRPFQRETVDEELFEFLIQRLTVYSAETVKFRLYNGLELAETMERAVR

SEQ ID NO: 6167 - protein, 500 aa, unidentified
  source 1..500: note = uncultivated organism
MIAVYCRQSVEKKDSISIEQQEAACRSLCFEKDYEVFADKGFTGANTNRPAFEKMMKAVEKGKITKVIVYKVDRISRSLLDFVGIYQRFEMHKVEFVSCSEQFDTSSAMGKATLQIIMVFAELERSMIQKRVKDNFYERAKKGLFLAGVAPYGYRKKKVCIEGVHTSMLEPDDEHQEKIEIVRWIYEEFCIKQSIGEIVRQLNERGALTNRGKAFSSTGVSRILRNPVYVRADADVYRYLKSKGANILQPIEAFTGENGCTVYGTRKGKTMAKFSCLQGEYVQLNRHEGCIPSGKWLKAQRILDSNRPVSNSGKGENTWLTGLTKCRFCGMGISVVNGGKPGRRYLNCGGKKAHICGGRTKTMTFDDIEEIAGNSLTSYFSRFRFQAEECFEDQKENLMKIQLTNIQEEISSLIQKLAGADHILQEYISQRVVTLDSEQKKLNEQLKQLMKKRECTDLSAYYSEKLSQWKELPFDIKKLIARVFIEKVIIGDGDLTIVYR

SEQ ID NO: 6168 - protein, 506 aa, unidentified
  source 1..506: note = uncultivated organism
MVAIYCRQSVDKKDSISIETQEESCRLKLTKSENESVRVYSDKGYSGKNTNRPEFQQMMSDVVAGRINKIVVYKIDRISRSVLDFELIYRELKQYNVEFISTQENFDTTNHVGEAILRVILTFAQLERETTQKRVTDNFYSRAERGFFLAGKAPLGYIKVKDSIEGKETSRLQEDTNTSHIVKYIYRRYLSGDSIGTIVAKLNSADCEISHNITFTNVRISRILANPVYVRANADVYSYYKGAGAILHNNVEDFDGIHGLTIYGRRQGKTKSKFRDLTGEHIQLNRHEGFIDADDWLRVQYRLGENKALKNSGSGTHSWLSGLVKCGFCGYAASVVNGQPNGKRYVYCGGRKHHICNNSKCGLTFDDIEQSVEMQLIEYASNLKYETNRTNIQNNEEINKLKVEMVKLEEEIDNIVKSFAVATSTILQRKLNERMTQIESQLNSIDSELSKYSVRQKHDVDVESIIPMLDSWEDLEFEDKKAIAKLLIERVVVYDSKTPIEVVFNI

SEQ ID NO: 6169 - protein, 563 aa, unidentified
  source 1..563: note = uncultivated organism
MKRVRILLRVSSNQQLDADGDLSVQRQIVQEYVAKHENWKLDTKEYFEGSNSGYKNSVSDRDVLQEALHDAQAGEYDILVAYKDDRIGRRMWEIGAYVMTLKQYGVDIYTVKDGCISPEADDMMGQMMLALRYGNAQKQSADTGMRVKDTAQKLVQNGKFMGGKAPYGYRLELSGEISKHGRALHHLVIVQEEAEVVRYIYTLSLCKEYGSSKIAKILNQHEQYKNMAPNDVWKSGTITSILTNPVYAGYTAYKRRERINGQYYRLGNDEWIIASKANPDITIIDEDTWNLTQDRRRRRSDKYIKTLEHKDGNIIRKNDGMLALIDVLHCGYCGRKMTNGSKYNYWTIKDTGEKRASKIAVYRCQNALAGVPHNKTKQIRADIIEPIVFQSIAEYIGKLQENDDIFEEIENNHNIERKRKQTELNKEKQSLKKLQEKIKIMESKIPDAITGEYPLSLEELMSVINEQKEAAHHQRDIITEKESESQEDSISLDDWKELRSEIPTWQDVFLNADVTTKRVLVNKLIERINVKKDEVVIRFKINLDDFIPQPRKCGDSGVPEPWL

SEQ ID NO: 6170 - protein, 545 aa, unidentified
  source 1..545: note = uncultivated organism
MNGPINKLSRCAIYTRKSTEHNLDLAFNSLDAQREACEAYIKSQMPEGWRLVPDHYDDGAFSGASLDRPAVQKLLADIHARQIDTVVVYKVDRLTRSLADFAKLIELFDSHAVSFVSVTQSFNTSSSMGRLTLNVLLSFAQFERELIGERVRDKIAASKRKGLWVGGPVPLGYAAVDKKVVVVMAEAKAVRTIFERYLALGSVRALADDLIGRGIRSKLRKLSNGRTIGGGTFGVGALAYLLKNRFYIGEVVYRGEVHRGDHAPIFDRALFDAVQARLAAQAVARRCRLRGSPALLSGRLFDDRGNRMSPSHTNKAGARYRYYVSQAVLQKKPQATGLIGRVPAAEVEALVMTALRNHLQASGTEPQTLGNERELVEYHLEQVTLTPKHIKLQLRQDVEAPDHANDSQAPPNERLKLIAIPWTSPVSAATKGIIHVPAHNTPMKPSRRDALLTAIATARQWVDDLAHGRAATLAVIARREGIIERHVRLLLPLAFVSPRILSALLDGTAPANLTVTTLARALPWSWAEQERRHLHRPLPGLLPKC

SEQ ID NO: 6171 - protein, 535 aa, unidentified
  source 1..535: note = uncultivated organism
MSTLGKPVVRAAVYTRKSSDEGLDQEFNSLDAQHEACSAYIASQRHEGWKLIKKRFDDGGISGGTLERPALKALLCDVESGLIDMIVVYKIDRLTRSLSDFAKLIDCLEAKGCSFVSVTQSFNTSSSMGRLTLNVLLSFAQFEREVTAERIRDKIAASKKKGMWMGGMVPWGYKVHSDPKIQSLEICEERSSDIRHIYDLYEQLGCLSKVKRAVDTLWPERNWSRGRIHNILINPIYIGKIRHKRDVYEGLHAAIIDQDQFDRVQDQLQRRSVIKRGKHPSRGPSAYLVGKVYDETGDRLTPSRSKKSSGRVIRYYYSNRLISGGADPTGWRLRADMLEGLLSEIVGQRLTEALNQFRLAPQIKPHVLVEAKNRLEHLDTKAILDLIKRVDLSETKASIQLDVEKIAALIQTEISKLDLELLRIEEPVTLSKRTNGTKLTWVGYKGEPNHALIRAIVTAQAWVEQIKAGQSVSDILQAHNIPEGMIWKRIRLAFLSPKILRAIVDGKTNRDLTIKMLTRHDLPLDWSEQQALFLS

SEQ ID NO: 6172 - protein, 513 aa, unidentified
  source 1..513: note = uncultivated organism
MKPDIKNCAIYTRKSTEEGLDQDFNTLDAQREACEAYILSQKAEGWKAIKANYDDGGFSGGNIERPGLKELIKDIKASKVQTVVVYKIDRLTRSLTDFSKLVEVFDEHGVTFVSVTQSFNTTTSMGRLTLNVLLSFAQFEREVTGERIRDKIAASKQKGMWMGGHPPLGYKRVERKLEPDQIERKTIDLIFNKYLQFKSVRLLAEYLSSQNIKTPQRVSKKGRTYGSKNYSRGHLYKILNNPVYIGKMRHKDEIYEGQHEGIIDNNIFESVQKLLNEQSVVRTTKSHDSGQLLKGLLYDVDGIIYSPTYTSKCKKRYGYYISQSLLQYRNHPKNVLARIPAHEIEKTVTQGLQAWLSDYRNITELFTSTAAQTLKWISNQHFDIQHNDVRTILNMVVLAQSEMTLKIDTIKLQQYLADTLEVALKTPSLKEARICVPYKTKRANNGEVIVQTMNNDKDLLDIPQDQLTRIIKGIVWRDQHFAGETLCSIAKCHNHGENYINKCIQESFAFLSV

SEQ ID NO: 6173 - protein, 532 aa, unidentified
  source 1..532: note = uncultivated organism
MTKRVRTNTIDGVSSSVAGEKRRIRCAIYTRKSSEEGLDQEFNSLDAQREAGEACIASQKNEGWICLAERYDDGGFSGGSMERPSLERMLRDIEAGKVDCVVVYKVDRLSRSLLDFARIMEAFDRKGVSFVSVTQQFNTTSSMGRLTLNILLSFAQFEREIIGERIRDKIAAQKRRGKWAGGVPVLGYDVERSTGSPKLVANAKEAPRVREIFQMYLDKGSLLPVVTELTRRGWANKRRITRKGATKGGRPFDRATLYVLLTNPVVTGKIVHKDQIYDGEHEAIVEQSIFDRVQHQMHENGRTGGIEVRNKYGALLRGLLRCKSCNSAMTHSFYGRGGRFYRYYRCIRAIKSGSQACPARTLPGAEIERVVIDEIRSLGEDRGLLDQVLAETRTTVDEEGAKLRQERGELLASLKRLDKELQELIADPAPTRTVTARLAQAHEQIADSRRRLGEVDALIASTDSAGITRDEARKALKDFNSVWANLSPREQARVLKLIFATVEYDANAATVAVTFRPTGIAALCRGKLQEVA

SEQ ID NO: 6174 - protein, 556 aa, unidentified
  source 1..556: note = uncultivated organism
MSNQIHCAIYTRKSSEEGLEQSFNSLDAQHEACEAFVRSQQHEGWRRIATLYDDGGFSGGNIERPALKRLMADIHAGKVSIVVVYKVDRLSRSLAGFAKLVEQFDKFNVSFVSVTQQFNPTSSMGRLTPNVLLSFAQFEREVTGERIRDKIAASKKKGMWMGSTVPLGYSAQNRKLIINEPEAVTVRTIFDEFLRLGNVHSLHDWLCENNIMSRRGNHIFRGALYMMLRNPHYIGLIKHKKESYPGEHAAIIDRGTWDKVQAVLDENVQGKRRKVRATKESILTGILFDATGTLYTPTHANTNGRRYRYYTSQAVIKKIGRSNAPGRIPAHDLEKAVVDRMLEWLQTPTQLLAAFRDETAVAPPEGVFAQIIAQAAATAQSWRERITAHRAQFPNTVVDRVVIQQTYVEIRLRVPALLNEILGGGGKISINLPPIASIERPFRHVRQGRAVRLVVGDTNITTDASRQAILKAIAHARRWYEQITTGKSSNIAQLAGIDGVSPRFIRMQMKLVQLSPQSIENIMTRPESLPLSLDDLLATIPMNWNQQVVCTPALSA

SEQ ID NO: 6175 - protein, 536 aa, unidentified
  source 1..536: note = uncultivated organism
MSRKKIEKDPVTDLPVVRCAIYTRKSTSENLDMAFNSLDAQREAGDAYIKSQKHEGWVVLPEQYDDGGFSGGDIDRPAFQRLLADIENGGVDCVVVYKVDRLSRSLMDFVRIMEVFERHKVSFVSVTQLFNTGNSMGRLMLNILLSFAQFERELVSERTRDKIAAARKKGKWSGGYPILGYDIDPAGRRLVVNDAEAEQVRHIFDLYLKNLSLGETVKVLNEMGWTTKSWKTNKGHLKNGASFNRDRLHRLLTNVLYIGKVPHKDEVYEGEHDAIVDMETWERVRNALAANQKNRGRNAANGNGGLLKGIIRCSACDSAMVYTYTMKGDRRYRYYVCSKAQKNGWKSCPTRSVPAGEIEDFVVDRIRDVGKNPKVVEATVRKMEEEFRKSRKVLESDVKCLRQDVQKLVDERKRLVEALGRAEGGAARVLTDRLSEVETSLEEKHRRMSGVKEEIVDAENNHIDYGVIKKALSDFDPVWDALYPKEQARIIQMLIERLDYNGKDGELLVKFRPVGMKALAVEMSGSAGGNGGGMDA

SEQ ID NO: 6176 - protein, 577 aa, unidentified
  source 1..577: note = uncultivated organism
MIDSDQIIKRKRCAIYTRKSSEDGLEKEFNSLDAQREAGKNKILSQRHEGWELINEHYDDGGISGGTMERPALQRMIDDIKAGKIDIVLVYKIDRLSRSMLDFLGMIKFFDEYNVSFVSVTQDLNTDNAMGRLVLNVLQSFAQFEREIASERIKDKIALSKQRGMWMGGAIPLGYDAVGGKLEVIEEEAEVVRFLFDSFIETSSPTETIRQAKENGYKSKTRKTSNGKYCPGRDLTKSSLYQILRNKLYMGKIEHKEKGEVYDGLHDAIISEDTWEKAHALLNTDSKYRPRKSKNDRPYLLKGILFDPKGYALTPTYTKKKNKAYRYYVSTHAIKTTYDNCPLKTISAPFMEEIILEQVKRALTNVEWVQKMQSQNKDATIKLTDIRKGLKDFDMMWAELFPVEQARIIQLVIEKITVHPDKIIIAFHPSGMLSVLHEFMPDLKTCDDIDDPMVMEIPVQFQRKVKRKRITTPEGHSVINMNDKNINEPLVRAIARAHRWQEMLETGKAKSITKLAHQENLKTSYMASVIRLTDLAPDITAAILQGNQPSTLQLQDLLRGGLLPLDWNEQRNQFGFV

SEQ ID NO: 6177 - protein, 584 aa, unidentified
  source 1..584: note = uncultivated organism
MNNKVEVIAPTSKTMCLKGTKENKLIRACAYCRVSTDNEDQKTSYDSQRIHYKNMIEENPDWEFVGIYADEGITGTQTKKREQFNQMMNDALNSKIDLILAKSISRFARNTVDTLNCVRLLREHNVDVSFEKENIHTLGLSNELFLTLYSAFAQAESESISENVKAGVRMKMKRGELVGKYAPFGYLYDKEKDIIYPDESKKDIITYIFEEYSKGVGFRTIALNLNSLGIPSPSNLKWCHASVRRIITNEKYVEDLKTGKYYTENVLTHKKKVNYGEKEQYFTSNHHEPIISRELWDKCQEILTIRSKIIKQDGNRDKFSRKYPFSSKIFCGICGERFIRRSYKIRSDGKEVAYWICRSHRNKIECSNLIHYKQEELEDIFVIAYNKLFQGSNKYINSFMKKVNEVICEKQDNLNHKKIQDEISKLENKLSNLIDLQLDGTISKEILNQKNLEISNKIKEYEQQLKDTENVELTRKQKLEQIDKISNTLKQYKGLTKFNEEVFNSLVDKIIIGEKLENGKEDFYKIKFILKTGELINENLPNGKLDIGSSFGKYGFTITKQELVEKEDNVSAYVLQRHSHIKTT

SEQ ID NO: 6178 - protein, 522 aa, unidentified
  source 1..522: note = uncultivated organism
MSKRHPTAAPAPETRRCAIYTRKSTTMGLEQEFNSLDAQREACSAYIRRQTGWTVVDESYSDGGFTGANIERPAFQRLLADIDAGKIDVVVVYKVDRLSRSLMDFAKVMERFNAGGASFVSVTQNFSTADAMGRLTLNMLMSFAEFEREMIAERTRDKIAMSRRKGKWTGGPVPFGYSAKDKRLVVNEVEASIVREAFSLFLQHRRIFAVATALNERGLLPRGCAARPAKHGLRWTKDSMARLLRSPIYDGQMMYGDELYPGEHPRLVDDATFRRAQRILEGAERELRFGGLNPDYVLRGLLRCKHCGDPMTPASTRKGKGLWRYYRCSGRDKHGEGVCQAKPLPAGAIEAFVVERISEATKDGTLATEVKMLLDARIEKKRSDIAELRGKLPGRVADAAANAAQYSEDLLKFEGRARELIEKKLRAEGDRLAAAERQLAETERDLLDLHDASIEADWVAGAIANFSKVWELMTPENRCRLLRALVVSVEVDEKSSKVEIELVDFAGDSEAKRREGKPKDAA

SEQ ID NO: 6179 - protein, 539 aa, unidentified
  source 1..539: note = uncultivated organism
MNEKRNGVNAATVPAPDVRCVIYTRKSTTEGLDSNFTSLDAQREACEAYIKSQTCAGWRLLPVQYDDGGFTGGNMDRPAFQRMMSDIKDGKIDCCLVYKIDRLSRSLLDFAKMMEIFERHNVSLVSITQSFDSGTSMGRLILNVLLSFAQFEREIISERTRDKIAAARKKGKWVGGYPVLGYDIDPLNRRLVVNEEEKKQVSAVFDTFIETRSFSETLETLSKMGMETKTWTTRKGKVIESRPFNRARLICLLSNPLYIGKVPYKDEMYDGEHEAIIEMETWSRAREILCNGYAVGRSAAKTKRNGLLSGILRCASCDAPMTRTYAMKKGKKYSYYVCSNAHRNGWKSCAVKSVNAGDIESFVSERLRDIGGSEEMMREIAVRAAEDHKRKKETLENEKDRSEKDITKLNAEIARLTRKDAGKKNNGNGKDMERHAEIGRLVESATARVAAINGELMRLEGSVASEKEVERAFSLFGEIWDVLHPKEQKRIAHLVLDRVDYGGQDGAVSISFNPSGIRALATEMSMKKRKGAGDNHVRK

SEQ ID NO: 6180 - protein, 505 aa, unidentified
  source 1..505: note = uncultivated organism
MDAIYARQSVDKKDSISIETQIDLCKRELLPGSKVAIYLDKGYSGGSMNRPEFQRLLEDVKSGKITRIITYRLDRISRSVLDFANLIDLFEKYGVTFNSTQEKFDTSTPMGKAMLNITMVFAQLERETIQQRIRDNYYARGEKGMYLGGPPPYGFTKIECQTEQGKIKQLETNPYTSQTLARLFEMFGDELCSLGQISRSLNEENIPSPNGTHWDSSKVSRILRNPATVKADVDVYHYYRRRGCKFTNNLADFALGKGCYLYGKREGHERKYTDVTDHTLSLAPHDGLISSDLFLRCQKRLDDNKQIDNRNRSQITWLTGLIKCGTCGYSTVPKRSNGGQYTYLYCMGKTHHSSCTIAGNLGLLSTVEAVIEERIFHWAERYSDLRATTAVTENGERTRLRIRAEEVNVSIQKLIDLAIDSSDITAKYLNEKMAELENERTRLEESLDALNEHRHEKLGKEIADVATEWDHLALNQKSTIAMLLINRISLFKEEIEIEWKYNFDM

SEQ ID NO: 6181 - protein, 559 aa, unidentified
  source 1..559: note = uncultivated organism
MKRQVSQQPATADRSGDVRVGVYVRRSTDDEHQPYSIEAQDTRLTAYIGSQPGWRQAARFADDASGATTARPGLKRALAAARADVIDVLLVYRVDRLTRSLRDLVTLLDDLDHAGVVFRSATEPFDTATAMGRMLVQMLGMFAQFERDTIIDRVIAGMERKAAAGKWKGGRRPLGYRVDKATSILVPEAGGAAVVQLAFGLYTQDRVGAKTIAHTLNERGHRTTTGGQWSAHQVLRVLANRVYLGELTFRGINVVGCHPAIIDQAMFAGAQRILTARGEDHSKRAANTSDYLLTGLMRCPSCGKAMIGTRAHGRSRVYRYYTCFTRARYDTARCNASRLDADAVEQAVITALAGFYRDQHNLIADAITAAQASYQAGQDGKRAELAAAEHGLARTSAASDRYLDAFENGTLEPEDLAERLAQLKARSHQLRARRDELAGRLAALPAAPPPATLRQVADSIAGIIASGGHSQRKALIEVLIARIKITGPDRIVPVFRIPQPPAADRPQVLAGPATTHRAEAEDPVRALTNLVELRGFEPLTFCMPCRRATSCAIAPCPRR

SEQ ID NO: 6182 - protein, 523 aa, unidentified
  source 1..523: note = uncultivated organism
MSVPSSTPRKAAIYLRISLDREMDGLAIDRQREQCEALAKYRQWQVVETYVDQSKSATDRTKVRPAYDQMVADYKAGAFDAIICYDLDRLTRQPRQLEDWIDASELRGLALVTANGDADLSTDGGRMYARIKAAVARAEMERKGARQSAAQLQRAKQGRAPKGMRPLGYAVNGEVIPDEAEAVRAIYRLFTRTDHPESLRSLARGLSGTKSIAGLDPRPKHSHIVSAERAERRLAEGKTPRPIEPDGEWSPSTVLGILRNPRYAQMSTYTPKTAQPDGGRRRAWRAQILRDDAGEPIRGQWDAIVDDETWWRAQSILDDAERVTNTSGSTKRKHLGSGLYRCGVCGAKVTGAPRGYRCAKHVQRDDQGNVTVTSLMRSGAEVDVFVLKVIAKRLKKPDALRMETVADTASTSSGINAAISEQRARILRAQHDYDEEIIEGRDLKRIRDAAEARIAQLEAERLTRGQAAGLAPVLGADDPSQAFLDASLEVQRQIIDVLATVTLMPQLRGRKTFNPDSVNIEWR

SEQ ID NO: 6183 - protein, 535 aa, unidentified
  source 1..535: note = uncultivated organism
MIYKLRSLTNCPASSQACSSHSFMKKAVIYARYSSDSQSEQSIDGQLRVCKEYAERENIKIVDTYIDRAMTGTNDHRPDFQRMLRDSKKKGFDYVLVYKFDRFARSRHDSAVNKAILNRNGVKVISATEQISDTPEGIILEGMLESFAEYYSAELSQKVKRGRKESRIKGLYVGGRVPFGYTVEDKIVKINEKQADIVRQVYNDYISGMRLKDIAIKLKKQGVKTNNGNDWTINQISRMLRSPYYCGKVYADNTVYTNIYPPIISEELFDRVNKSLQTGKRTAAQKKAPTPFILSGKLVCGKCKANMTGDSGTGRNGIHYYYKCVNRKRKHTCDKKGVEKDYIENYVVCAVKEFLKHNRQLKELSQAVADIFNEYIGKDVVLNSLNAQMKEIDRQLNNLANAVANGIFSKTTNQKLNELEQEKEDLEIKIARQKAKTITPLDADKVYNWFLSFQNIDTTDKLACRRMIDMFVNKIVLYDDYFNIYFNTSDDESKNIKLDNSEDFEEIEKEQPSGSDCSHLVPRVKTRLNFRVLQG

SEQ ID NO: 6184 - protein, 574 aa, unidentified
  source 1..574: note = uncultivated organism
MTTEHKSAVRCAIYTRKSSEEGLEQSFNSLDAQREACQAFILSQRQEGWRALPARYDDGGYSGGNLDRPALQQLLADVEAHKVDTIVVYKVDRLTRSLADFAKIVEALDARGVSFVSVTQQFNTTSSMGRLTLNVLLSFAQFEREVTGERIRDKIAASKRKGMWMGGVPPLGYDLKDRKLIVNPKEAQLVCDLYRLYLELGYVPKLKIHLDREGIKSKVRISVAGNRSGGKPYSRGALYEILKNRIYRGEVAHRDQVYAGEHEAIVPQELWDQVQAQLRSDNQGRRTGIRATAPSLLVGLLQDAHGNGFTPTHAVKNGRRYRYYVCQPANDNKGSTGNRPTRLPAHEIESLVLTRLRTLLQSDHEVMDQLGLPTDDPALTQRLVAAVGNSASQWPSTPPQKMHELVTRVMKRVVVHPERVELYVSRSHLRDALITDRSTTSCQLRGDDLFVLEAEAKLKRCGGEVRLVLPPNAKGDIPGRSSPSLLKAIARAHDWRERIMNGTAQGRRSIAAQTGLDERYASRVLDCAFLAPDIVEAILDGRQPHDLTAQNLWRNLPTNWVEQRKRLGFRQIRV

SEQ ID NO: 6185 - protein, 544 aa, unidentified
  source 1..544: note = uncultivated organism
MLPKQTEYIAGIYLRLSKDDERNGESLSIENQRRILTDYVKEQGWTLYDEYVDDGISGVSFDRPGVQRMLDDAKNGKINLIICKDMSRFGRNYIQVGQYVDYIFPSYNIRFIALNDNIDTANADSASMDMLPIMNIFNEWHAANTSKKLKAVIASGAKAGKYKTPNPSYGYLKGDDEFCTPVVDPYAADVVRRIFEMRAKGMSLLQICGVLNEEKILLPSDYRCQRTGQVNKTTNDHLWGIGNVKCILNNEMYLGHLCQLKTTTVSYKNHKVIRKGKEDWVIIENNHEPIISQELWDKVREYEKSVSRGKMTKSRVTVPLSGLMYCQDCGNKMRVHSGAGGNKMLTGYTCGLHSRCGKGCCSSHYIREYIMEEIVLNDLKAMIDLTIDEDAAKQIFLAKRSGMRDTQSAEDSKRIAYVKDRLTELDRMIVKVYEDNVNGKVPDEVCKTLLEKYQAEKTSLQAEQAELEKRMETAMQDEQDVEEFIRRLKKYAGAEALTREMCLDLIEYVTVDEYVKDRTKPRKIHVYYKFLDEGLKDKRNALVQ

SEQ ID NO: 6186 - protein, 543 aa, unidentified
  source 1..543: note = uncultivated organism
MSEKVYRTAIYARLSQDDGDKAESNSIVNQKALCEEYIRKHDDLEAVATYVDDGYSGVSFDRPDFRRLEEDIRAGSIDAIICKDLSRFSRNYIDSGRYLEKIFPAIGIRFIAINDSYDTLTSDPASDSFLIPFKNLINDTYCKDISVKVRTNLNAKRRRGEYVAAYTPYGYKKDPNNKNKLIVDEYAADIVCQIFSMYKDGMSICKIADRLNEVGVLSPMEYKLSEGIKYGTAFRTGAVAKWSYKAVKRILTNEVYLGVLIQGKRGTPNYKVHKEQMRDESEWIRVENTHEAIVPYDDFMAVKNMIGRDMRTSRINKENNVYSGFFFCADCGQSMTMKIVPSKGKNYFYYVCTTHRRHEGCTSHAISVNEAQTAVTNAVKTQIANVLDLADTVEYIESLPVTKRSSFNYEAQITKLEEEIDRCRKMKLRIYEDFTDGVINKEDYVDFKNQYESIIKDKTISLDKIRQKKDELSLSGGIDRKWVSLFRKYKGIEVLSRRVLMSLVDKVLIYEKHRVEVFFKFRDEYARLEEYVNDNKDLIPDIK

SEQ ID NO: 6187 - protein, 571 aa, unidentified
  source 1..571: note = uncultivated organism
MDSKQKNRVAIYIRVSTQMQIDKDSLPMQRKDLIAYSELILNTTDYEVFEDAGYSGKNTDRPEFQRMMSQLRTGAFTHLLVWKIDRISRNLLDFATMYNELKDLGVTFVSKNEQFDTSTAMGEAMLKIILVFAELERNMTSERVTATMISRANNGQWNGGRIPFGYNYDPIERAFSINDAEADLVRFMHDWYERERSLVRLARELNDAGHKTRLGYSWTPTAIDIILRNIFYCGDYLYNVHKDASRQKVKDESEWVTVRDHHPAIVSREQKDRIISIMEANQRLRKERGQYDYRVKHIHVFGGILYCAKCGSMMYSSPVGKRDGWPHSIYHCPSRRKSINLCDQTTISDTKVGEFIFNLVLNMLNAQASFTSDMTSEQLQSRILCGEPFKNISCINRDDLEHLRSLLLSGKMQGSIYGKATDIKKPPREAAGISKLKSRRQKTVRALERLRNLYLYSDDALSEKDFILEREKLEEELDEIDQQIAIYENEPGNAPDDDIFIQKSSEFIISKNLQGRNYIYYKRLAQSVEPSVLQAFIRQILEKAVLEDEDFKSVTFKNGIELRFEYKKEPN

SEQ ID NO: 6188 - protein, 564 aa, unidentified
  source 1..564: note = uncultivated organism
MKRIRMLLRVSSDQQLEADGDLSIQRKILMEYIQKQEDWILDGKEYFEGSKSAYKNTASQREILQEILQDAQNKEFDILVPYKDDRVGRLMWDTSSYIMNLKEFGVDVYTVKDGCISPETDDIMGQMMLTFRYANAQKSSADTGMRVKDTAQKLVEQGKFMGGKAPYGYELEYSGEVSKHGRALKHLVVVPERAEMVKYIYSLSFNKEFGSAKIAQLLNKNSKYKELAPNGIWKSGTITSILTNPIYAGFTAYKRRERTNGKYKRLDSKEWVLAKEADEAIQIIEPEMWNRTQEKRKLRGKKYTEKLENQNITVIHKNEGMLALIDVIYCGYCGSKLTNGSKYNYWTIKSTGERRASRTPIYKCQGAWQGIPHNEAKQFQAKEIEPVVFEAIAAYIGRLQENVFDEIQKNQNKEKTAMAKELRKEQEEAEKIRKKISVMEENIPNAMSGEYPLSLDELVTLIKKQKESLEQQEIVVKEKELAFQNAEVSVNDWEELKQKIPTWQEVFLNADGEAKRVLVNRLIQRIEVKKDEIKVFFKINLDDFFCHPRISGDSGTIQYRRGLV

SEQ ID NO: 6189 - protein, 612 aa, unidentified
  source 1..612: note = uncultivated organism
MKGAKKKDLMGLGLHPEVRMKRCAVYCRVSSDENLDQSFNSIDAQREAGLSFIRSQQAEGWIALDGTYEDPGFSGGNMERPGLQRLFRDIRSGLVDMVVVYKIDRLSRSLADFAKMVEMFDSYNVSFSAVTQQINSASSMGRLMLNVLLSFAQFEREVTGERIRDKIAAAKAKGMWMGGPVPHGYQVIERKLIVQPDEAKVVKRIFKDFAELRSVAMVIQGLKKDGVNARSGKPFAQQTIRTLLTNRTYIGELNHKERSHPGLHDPIIDRGLFDCVQEIFEHDARLRGSRNPRTAFYALLSGLLFGPNGVKMLATWSRGKTGQKFRYYRMLGYGGKAQPTRRSMMFAMKEVDRLVLDQVYSVLKSPAMLEGTILEVERVRPDITELSVYQAMQNMAAIWNELYPQEQRKIIEALIERVVLSDQELEITWKWIDWNVSLDQLRPNGIPAELVRRETVGRMDMIKVVGEIQTINIEPSAEGERPVVKTVIPIRHRRKGIKNVIEPNPALSAEGAGPQEKPQFEMPLLTALSRAFYWQWLLDEGKVESGSEIARREGLHPSTVNELLRLTILAPDLTQKILKGEQPEGLSILWFTRNRLPVDWREQRTLLIIGSA

SEQ ID NO: 6190 - protein, 578 aa, unidentified
  source 1..578: note = uncultivated organism
MSAPSKRSIRCAIYTRKSSEEGLEQSFNSLDAQREACQAYILSQRQEGWRAIDVQYDDGGYSGGTMERPGLKSLLADIEAKKVDTVVVYKVDRLTRSLADFAKIIEAFDARGVSFVSVTQQFNTTSSMGRLTLNVLLSFAQFEREVTGERIRDKIAASKRKGMWMGGPAPLGYDVKDRHLIVNEKEAEHVREIYRLYLEFGCVKKLKAHFDERGVKSKIRVSSSGRSTGGTSYSRGALFSILRNRLYLGEVPHKEQSYPGQHAAIVDRDLWDKVRMLVAENIHARRYSTNAKAPSALRGLLYDEDGTRFTPTHARKRGKRYRYYVSQKVIEDAASATGKPGRFPARELEKLVLARLKGFFSSTEKVVSALALPDDELGITQKLIGSAAWYAKRLDETSNSSLCETLETIVARILIHQESVEIQLDRDKVRAQFLGPDHTNPQAQNATNCLDHEPITLTIKTKLKRCGGEMRLIIPAPSSDRDPGTAMPALVKAVSRAHEWVRLIVAGEFKDQRAIAKAAGLNERYVSRIIQCAFLAPEIVEDIIKGRQAPEMTLITLLDKVPLSWAEQSAKIALAGEE

SEQ ID NO: 6191 - protein, 658 aa, unidentified
  source 1..658: note = uncultivated organism
MSKKIQKARCYIYTRVSTMAQTEGYSLEAQQDRLRGYATYRGLEIAGEYCDAGKSGKSIKGRPAFRQMMEDILSQKDGISFVLVYKLSRFGRNAADIMKSLQLLTDIGVHLVCVEDAIDSSTQGGRLTLAILSAVAEIERENITSQFISGKMQKIQDGKWYGGPPPYGYKSLGKELIQDPYEAMIVRKIFNLYLQDDMMKSSVAGYLNDSGVLRRKDRQDDKSEQEPFTREFISRILKNPVYCGKLVYGRRTNKKDKDGRLIKSDPEQRLMIEGMHEPIITEEEWERVQEKRRKNSTWGKKVIEPERIGLLSGLIKCPVCGAGMVARSRRQVNKNHGGYYKISHYYYCRYYGKANGRTCSFHRTYRQEKIDDAVFEIVSNLCTYPEFREAVNYSLQDQGTKEKLQDELDRQRKELRNDELELRRLGDRLDNLDVFEANYEKEYQQIQTRMDICYDRIEETESRIAAINEQMTTYAESRRTADDIEKMLNHFRILYQKMTYQEKREMYRLFIDHIEILPETGRDGKVLKSISFRFPGQYGELPLVPQETGRNEENPKVDRKSETGKEFCFTLECTNLEQTAVETKATYAEIKRYIQDNFGLKVSSLYIAQIKRKYGLEVGEQYHKSANPSRKILTCPAAKEEAIKAALVHFKMLIEKSS

SEQ ID NO: 6192 - protein, 552 aa, unidentified
  source 1..552: note = uncultivated organism
MRKQYFLAAMYLRLSRDDSDAGGVTAKEDKRKSESNSIGNQRELIRAFLCEQQDMELYDSYVDDGFSGSNFDRPEFKRMIRDIEAGKVNCVIVKDLSRFGRDYIESGRYIQKIFPALSVRFIALTDHYDSFYADAGESGIVLPVKNFINDSYCRDISTKVKSQFEVKRKNGECIAPFAPYGYRKADHNKNKLVADNYAAEIVRKIFSWKMEGMAVSAIADQLNELGILSPKEYKKSTGINYRGGFSGAVKSRWSSATVKRILTNEIYLGHMVQGKTEKINYKLKKTVEKPEKEWIKVENTHEPIVSEDVFRVVGNLLKVDGRISPISEKNSFFTGILFCGDCGEQMIRRVNRYKNAQKVYYICSTKNRGEGCTRHSIPEEALKQLVLEMVTKFANCFLQEKQLLEKALNMETNLEAMVCHDTEAARRKEEQDKYDLLCSGLYEDLKERIITESEFEHLRSRFQRKAKELEEAQKKQERMTEELHRKSVLLAARLKTMQECPELKEVDRHTLCSMVKKIVVFEDHRIEMEFYYTDQYHMIQEAGRNGQSIQTR

SEQ ID NO: 6193 - protein, 554 aa, unidentified
  source 1..554: note = uncultivated organism
MQSIKKKYRAGSYKRLSREDDLALSNGKNESNSISNQRDLICHFVQSQPEIEIVKEYADDGFSGVDFERPGFIQMLSDLREGVIDCVIVKDLSRFGRNYIEVGIYLEEIFPLMGVRFIAISENYDSIDRNKGNDQLIIPFMNLVNDTYCRDISIKVRTSLEMKQQKGEYVGSFAPYGYQKDETDIHKLLIDSDAAAVVKRIHKLAVDGMSCGNISNLLNKEGIPSPAYYKQMNGEKFTTGFQRDSRAKWSPLTVRRILMNRVYIGVLEQGKTFSINYKLKQRKHRDASEWYCVEDAHEPIISKETFEIVQKLLSSDFRTSPTEKKVFLFSGLLVCGKCGEVLIRRKKTIKGKQYVYYGCYDKNKKLRCSHISIREELVEQAVLMTLRQHIATVIRTTEILSEIQNIPYKNREVKTIDRQIESIDKELKKYRNLKLRLYEDYHDKFLSKNEFQELGKIFDEKVESARCSWEEMIFRKEQFLTGNTSSQIWVKKFTDNKNIESLNRKLLLTLINRIIVYPDNEIEVVFRYKNEFAIADKVLSEYKSYNEMEVSTHG

SEQ ID NO: 6194 - protein, 548 aa, unidentified
  source 1..548: note = uncultivated organism
MAAEQPEQRRCAIYTRKSSEEGLEQDFNSLDAQREACEAYIKSQVGEGWKLINDHYDDGGFSGGNVNRPGLQQLLKDIAAGKVDVIVVYKVDRLTRSLPDFAKMVEVFDVQDVSFVSVTQQFNTTTSMGRLTLNMLLSFAQFEREVTGERIRDKIAASKKKGLWMGGLVPLGFEADGRTLKIIPEEAETVRTIFTLYRDLRSSWKVKQEADRLGLRTKLRTFKDGRTSGGMPFRYGHIHRIVHNPLYIGQIQHRGVVHDGQHHAIIDTELWEATRFGRSTESERRGKRKAKPIPYPLRGKLFDEEGVALRADASRKGGRRYRYYLSASASPGDSRSEGDKSRPSWRLSAPEIERIIDGGIRKLLEDPAILAHSAIESGIPESDVPRLVEHSSSVTAKPIQLLERAQLHPSHVAVWLEPSRIADGIVGCIRHDLPMDIRRRGVETRLTLADSASHQLVDPALIKSIVRARRWFEDMATGRATTLDEIGRREEISDRFVSARISMAFLAPDIMARILSGDQPIDFTTTELTTRVDLPSKWSDQRKLLEST

SEQ ID NO: 6195 - protein, 504 aa, unidentified
  source 1..504: note = uncultivated organism
MPAPEWPNTPILGFIYHYDVVAQRTAIYARISKDDPDDPRLGVTRQREDLEREAARRGVEIVARLEDNDRSGSGEVTRPDFDRLIEMIRNREVDLVLAVDLDRLSRGWKPFATLYEACQEARIIVGWLGGEANFATGTGLLEMELRASFAREELRKLKTRTRRKHQELAEKGMDAGGGRPFGYEKDRLHIVESEALLIREAARRTLAGEPLRGICIDWARRKVATTNGRRWSSHVLKRILISARISGRRERVRVDGEKRKGLGEITAKATWLGIISIEDSDRLRATLMDPARSREAVPRKYLLAGLLTCGSCGKPMHSSTARKKTEKRQSQRRGYACIKGPGFSDGCGHIRINAEPLEALIVETLNQLADDGALTRALKARSEDPRLDQKLARVEAKLAELGRAFANGGSVIALRSATDELERERALLERQREAQRRRLSLDGLPKTALRGAWAAMPLERQRAVLQLLLKRIEIKPATRRGPVFDDQRVHVTWTDEKEVMPEPS

SEQ ID NO: 6196 - protein, 508 aa, unidentified
  source 1..508: note = uncultivated organism
MAVAVYARKSIEREGSISCETQIEYCMAMIKPEERNEKILTFVDNGFSGGNVERDGFQKMMKKIRQGKISKVLVYRLDRISRSLADFVSILDTFKEYGVEFVSTQEAFDTSSPYGELIVKILAVFAEFERQSIIQRVTQAYEHRSEMGFYMGGRRPYGFELEPTVINNIKTKKLKPVAEEAEQVKYIFETYAAENVTLGKLQKNLADNDIKPLSGGGWTTAKLSAILKNPIYVMADNSIYDFFQRLNTQIVSLPNDFDGVHGVQIYGKTKHQTGSADWSDIKAVVMTHKGIIPSEVWIKCQNKLAKNKQIRNAVSNKTSWLGGKIICGICGRTMTTIKGRVSGGEVRRYFVCTGKTHFKDCKGTKTTLYAESLEDMVYDEIGKKLETLKGVKTVKSKSLPTELNELKNKLKTAELDERKIADVLTRTEVNSALLEILNKQAEKLKSYKEELLAKIAGTENTEPTVNTSSGLLKKWKNASFEEKRGVCGIIVNRIIIDEDGNAEIVWNI

SEQ ID NO: 6197 - protein, 543 aa, unidentified
  source 1..543: note = uncultivated organism
MKVAIYARKSKATEIGESTDNQVEMCKNYINANFPGETHTFSVYIDDGFSGKDIRRPQFAEMMQAAKRNSFDQVVVYRLDRISRNIVDFMSITQRLSDQKIGFVSINERFDTTTPMGRAMMQIAAVFAQLERETIAERVADNMLMLSRTGRWLGGRAPYGYSSERVAADRTKGTKQYSRLVIADDIYLVRLIYQKYLELGSVHGVQRFVFDERILNKDGGKLTDTFIKGVLRNPVYCVADETAYEYFSDMGSVLPDDKTDFDGTHGIMPYNRTTGRTSASIDHDPSEWIIAVGEHEGAIAAKDWVRVQRRLNENKNRYVGFQSSTNSYALLSGMLYCAKCGKRMYCKPQNKKGRKDSAKTFFYVCETQKKYSSKACSTKAVMGGKLDRAFLEELGRYRLPESELGKCLLKYRGAGLVVKKQNAELEAINVKTREAQQKLEGLAAIFAEKRGTPMEDMLKEQIDEVIENIGKMRERAAKLEEEKNRNETKRSLADSFDYLVEEFLNGYEKVPVPILRDQLKEFIERIEWNGDTEELSVFPVGAR

SEQ ID NO: 6198 - protein, 516 aa, unidentified
  source 1..516: note = uncultivated organism
MKRTAKAEPAKPTQVRCAVYTRKSTEEGLEQEFNSLDAQREAGEMYVRSQAGEGWHCLPDRYDDGGFTGGNMERPALRRLMADIEAGKVDCVVVYKVDRLSRSLLDFARMMQVFDANRIAFVSVTQQFNTAGSMGRLVLNVLLSFAQFEREIIGERTRDKIAATRRKGKWAGGMPVLGYDVGEGTKLKVNEHEAERVRAIFRMYLEHGSLLPVVQELERRGWRNKLWATRKGPARGGKAFTRTSLYKLLTNVVYAGRVKYGDETHAGEHAAVVDTALWEKVQAALARNGRSGNAVARNGFGALLKGLVRCVPCGCAMTPSHSTRKGGRRYRYYVCSSAQKRGWSTCPSKSVPAVQLEDLVVNQVKAVGGDPGLLREVLAEAGEQAEAAARERQAELRIVEKDLRARHGELKALSQRIEPGAGNGPLLARLADVQEGIAAGEERVRTLREGIEHGRLRQLPADEAREALAMFDPVPSCTVRPEHEVRLQVEAVGRRRGTYRHAGQPDRPSLGVSGRR

SEQ ID NO: 6199 - protein, 556 aa, unidentified
  source 1..556: note = uncultivated organism
MARGNVKKVAIYIRVSTVEQSENDFSSLDGQLSQCQAWIENRNKIKSQNYEIHEIYKDTRSAKDLKRPGIKRLQKDAKDGKFDLIVVTKLDRVSRSLHDFLKLVSELENEGVDIAVVTQEIDTSTPAGKALQRLLLVFAEFERDMNSQRTKEKMLESAKQGLWQGGYPPLGYNIGKGAKLVVNEEEVKEVEEIFERYIELKSTLKVANSLNNDGYQTKEWVTRKGKPKGGTEYDAGKVIRVLKSQVYLGKIEHNGEVYEGKHDPILDQDMYDKAQRIMANNRIRPKAYQSGNSPALLSSVAKCGLCSSTLTTTNTQKNGKKYYYYKCLKKNEEGNTEDHAPKPLSVSALDEFVFNSFQLLKETPQLLRAAKRKTEFEGTSKMEKLDKQIAQLKEKIKSTKQEISKTKSFLTENIGDRSKDILLDELENLALKKEEFEDEIKLCEKEKKHLARQTSINISTYKKILNYFISEWKDGDNKKREHIVKTLIHSVNANVDENGTGMIEMQYIADKQLEKDWHKIRKCEPGKDQVRTLASIGSPGRIRTYDPAVNSRLLCP

SEQ ID NO: 6200 - protein, 641 aa, unidentified
  source 1..641: note = uncultivated organism
MNEKAEKKRCAVYTRKSVEEGLEMEFNSLDAQREAGENYIASQKMNGWVCIPERYDDGGWSGGNMERPALKRLMSDIEAGKIDMVVIYKLDRLSRSLIDFADLQTFFDRHSVSFCAVTQEINTSTSSGRMMLNILISFAQYEREIIAERIRDKIAASKKHGKFCGGVPMLGYKPDPDTKKLQIVPEEAKTVKAIYEKYMLFRSLRCVVSELNRLGSHTKEWTSARGRAHKARPWDTGSVYRILSSPIYAGYVSHYDEHYEGEHKAIIDRAVWKSVQEMMRGNRGNTNGKKRTSLGNPFSGLIKCGCCGAVMTSTYSCRHGRKYFYYFCQRRSRNPEHVCGMKRIPAGDIEQAVMKQLAGLFRTPSILRATLDAVREREDALRESLSHDREILDAKLGELKKAALEGNADLAGLKETGSRLAEVKRQLDVLVRSSTEEEIIAALGDASGLWEFLIPAARYELLQLVIGSIVVSPDKIKLVLRVEGLKQLAEEMAVGGYFSESHDVSEEELPEMEQRVLDDGGIELTMPLKLKSIGGHRNVIVPEGNGMTLRQDAVIRAIHNARKWTDMVVTGQAANLSDLAKKLGLAAPYVTRILGLANLAPDIVEAVCNGCEPEGVSLARLVKGFPDDWVEQRMVMGFQSQ

SEQ ID NO: 6201 - protein, 558 aa, unidentified
  source 1..558: note = uncultivated organism
MKKIRCAIYTRKSSEDGLEQEFNSLDAQYEACAAYIASQKAEGWLLLPERYDDGGISGGTIERPNLQRLLAEVDRGTVDQILVYKIDRLTRSLADFAKIVDKLDAANASFVSVTQSFNTATSMGRLTLNMLLSFAQFEREVTAERIRDKIAASKKKGLWMGATVPLGYAADGRSLKITEPDAGVIRKIYDLYLKHRNVRLVKQDVDEQGLKTPVRTLCSGRVKGGAPFSYGHVHYILTNPVYAGRIRHHANVYPGQHAPLIEPKVWDDIQEQLKSDAARGRTFTKRNRNGAKASASILVGKIFDQTGDRLTPSHSKTSKGRRLRYYVSHRLVRGTAPRDPSGWRLPAPELEAKVGELIARHMNRPDFRTGIVHNASTEETADLSTKLSSKGETEADATNDACSTHLTLVDRIDIAPGEFRISISQERLAGLLDVDPTRLVEDLLTIAAPFQHRKRGVETKLIIGTKSADVDKTLLRNIGHARRYFDLVRSGKTIGEIAETEGFSKRRVQQLIELAFLAPDVIRSVREGRQPTGLTSDWLLRHAYSPIWSEQRDLFSTL

SEQ ID NO: 6202 - protein, 546 aa, unidentified
  source 1..546: note = uncultivated organism
MTNTPTPRRAALYVRISRTKDESVSLERQERDLRAACDLEGWEVAEVIVDDGKSGTKDRDGATRALEMLRSGAVDILCVWALDRWSRQGLRAVADLIDVLKARKDAMFFAKKDGLRSDAQAWRIVASVLAEVAAMEAENTSARILAARAEHLSRTAPEDQRFLGGRAPFGYRVIANPHGPGKALGIDEYEAHIVRTVAERLVSGEILASVTRWLEAEQVPTPQSEARRARQSGASGAGHDRGRWRVTTVRNLWRSETLIGRTTRREPLMGPNGKPLLDDKGRPKLERRLVTDRAGLPVTRWAPVLDLDTFAQLQARLPGHGRVQPRRMASWLSDVVFCDGCGGKLYVQKVKRAHGEERYFRCAGRGDALDTCPAPATVSVDRIEAYLEDAFLGFGGHLPELTVEERVSAPDVVVELRDIDHAIEDTLRAFRADGADYATLTARIEALKGRRRETLARPSTPSTVTRETGRTLADVWGELGDEPAARRDHLRQVIGRAYIGRATNSRAALTRERVRIVWNPDREVDLAEGNSSGPNPDRAARRRPRR

SEQ ID NO: 6203 - protein, 516 aa, unidentified
  source 1..516: note = uncultivated organism
MAEIIVIPPSKTVDRTIKKLRTAAYARVSSDSEDQLNSFLTQMDYYKQYISENPEMEFIDLYADEAVTGTSKDKREGFLRMIADCKEGKIDLILTKSVSRFARNTYDCISTVRELKSIGVNVVFEENEIDTRKITAESELIAIASIAQEESVSTSNNVKMAVRSRMKNGTFKQGSAPYGYSVHNGVFTIVPEQAEIVQLIFRAYKEGKSLIKIAKELTDMQIQKADGSSKWVPNHIKYILRNVRYKGDALHQKFYTTEFPFKCKINRGELDMYYMKNANPPIVSEELFDKVNALLAEKAVRFNPIKEKFTEDYPLRLKIYCAECGSAYRLKPSKTKHWLCRNRDIGLRRCTNPQIAEDKVYKAFVKTYNRLVKNKETILVKMLNELKLLKERKISSKHEIYDISEEIAKLTKQVLVINKLQAQGYIESASYYEKLNEINAKISELTKEKRSLMGRDVCDGAIKTTTALISVIDKKGAIGKFDSRVFGATVEKIIAQRSMLTFVMINGMKITVDAEV

SEQ ID NO: 6204 - protein, 521 aa, unidentified
  source 1..521: note = uncultivated organism
MRRLLEHCRAGLVDCVVVYKVDRLSRSLIDFVQLLQELEQRQIAFVSVTQQFNTATPMGRLVLNILICFAQFERENIAERIRDKMAASRRRGKWVGGAPPLGYDVDYQAKRLVVNPAEAETIRHIFTRFTQVRSACVIVDELRQKGIQSKSWVSKSGKEHPGRPFTRGNIYKLLHNHTYLGEVFYNGESYDGEHDGIIDRSLWDRVHAILAQNHRSRGNANRSNRREKPKRKTVPGFLKGVIRCRHCATAMTTSWTRGSNGAQYRYYRCVGAQKNGRDSCPVSSIPAGDIEQAVVQHIRRVFQAPSAVQAISQSARRIGDAEQVLVDHQAVLDAMGKLDEVWDELFPAEQCRVIEDLVEAVEVSLECSTLRLRVGALQSVVQEVQGEYRDEAADDDVRVIELPIQSLRRSGRKRMVIGPSADVPEPVQEAEQRDPISQALARAHRWLEELESGAVSSITSIAHRHRVDESYVRRHLRLTTLGPQVIERLLDQSDQGTSLNQLVKGPLPDDWGQQAQVLRVS

SEQ ID NO: 6205 - protein, 532 aa, unidentified
  source 1..532: note = uncultivated organism
METQKLGGIRKAAELGYDHQVWNEGGKSSHSSEIEDRPVLFDLLSEVEKGNIHHLYVYNTDRLSRNDRTWSIIRWKLKSNDVVVHTTSGRIDLSNPIDDLMMGLLSEISQYDNKIRMDRSRRGKLYKVQQGFFRGGPTPFGYTNEKKRLVEDPEESKWVRFMYKAYSEGKSVNEIRRTLNDNNVITRRGNPYWSLGSINKILRNSTYVGWYEYTDKKLEETVRVETPPIVERPIWDAVQNRINRFLERKHQINRSKHSYLLRDFMFCGHCGSKMSGRRGPNNHFYYCPKKERSWTTDPDYQPNWERGKGCGLVRSLNIQRTDTIVWDVVLNLVRESKTLREEYRQNFLQSVTESRQKAKSLDKKLLKRKKRFEIELKELEETIAGFEASVLLKRFSGDPVTIRNRLESELLSIKEKLDAVELDEKRIEDEQRWINWLDRFESDIDSKEEYSEEERKEYLSGILRKIVVHYNEESNDHSLEIEFEVPIVDDRLIYNNPERRKEGWVVDSGETRFVLESLPISKGGRPRKSKPA

SEQ ID NO: 6206 - protein, 558 aa, unidentified
  source 1..558: note = uncultivated organism
MKYKQNIGENKRMRQHKRNFTLIELLIVIAIIAILAGMLLPALNKANGGWSGGNINRPALQRMMTDLRAGLIDIVVVYKIDRLSRSLTDFAELQTEFEKYGVSFVSVTQEINTSTSSGRMMLNILMTFAQFEREVIAERIRDKLSASKKKGKYVGGLLPLGYRGDSVNMKIVIEPEEAKIVRLIYDEYLRTSSPKAVQRLLEGKGIRGREWVSKKGLRHGGRPLSIAVIRDILQNPIYIGKLRYHGKVYDGEHEGIIPEKLWERVQSTFKANSESCHQRSGRDLKPFAGLIYCGHCNAPMFVATVTKPNGRRYRYYICHVDEKRAHRECPLHRVPAETLEQLLLNRIAALLKTPTMLAKICGGELRNALDTRQAGEALENIATLWSAMFPVERYKLIHALIQRVLVFENEVRIVFRAEGIAGLLKEAGADFSVSSGSVDLECVLTVPCKLRRYAGQVKLHSADEQADGPRLPIQTALIQAHQGMEQIISGKATTMRQIAQALNMDRSFVARTLQLANLAPDIVKAIWEKRQPVSLTLDKLRRGIPDSWEEQRKLFLGK

SEQ ID NO: 6207 - protein, 528 aa, unidentified
  source 1..528: note = uncultivated organism
MKNGNGRRAPVLVEPKLSQAIRCAVYTRKSTDEGLQQDFNSLDAQREAGEAFVASQRGKGWQLVPERFDDGGFTGANMERPALRRLLAAVEARQVNCVVVYKVDRLSRSLLDFARMMELFDRYGASFASVTQNFNTTDSMGRLTLNILLSFAQFEREIISERTRDKMCAARRKGKWIGGHPVLGYNIDTAARRLVVNPQEAHQVRTIFDLYLDRGAMLPVLQDLESRGWRTKRWTTGSGQFRGGKPFTKSLLYGILTNAIYTGRVNHKGVLYPGEHEAIIERTTWERVQDILDRNGRTNGGGAKNKDGALLRGLLFCVPCGEPMCHTYSAKGVKRYRYYVCYRAQQRGWKNCKTKSVSAPAIESTVLEAVRRLGTDPQLAAEVVRQAREQLAQRREQRAKDVAVAEAALRQLNAETIEVAGDTARDPTARVDRLVDLQRQVQEAEHRLTQLATEGREIEADHIDEADALRALTEFNPVWEALTTREQVRLIQMLVARVGYDGQTGKVTVDFRSAGIKELCEGASTTKG

SEQ ID NO: 6208 - protein, 575 aa, unidentified
  source 1..575: note = uncultivated organism
MEQKTENRIYRAAIYVRLSKEDGDKEESDSIVNQKDLIKSYLSDKQDITACMECVDDGYSGADFERPNFRRMMKEIEAGNIDCVIVKDLSRFGRNFVEAGRYIDQIFPALGIRFIAVNDGFDSMNGRTSSDRILIPFKNLINDAYCRDISIKIRSQLEIKRKKGDFIGSFAVYGYLKDPDDRHKLVVDDYAAGVVRDIFKWKLEGASQQRIADRLNGCGELSPMEYKRFCGLNYQSGFQINPKAKWTAVAVGRILRNEFYIGTLVQGKRTTPNHKVKKTVQKPSGEWVRVENSHTPIIDREDFYAVERLLLQDMRVAPEEETVYLFSGLVFCADCHQNMVRNSVCRNGKTYVYYMCGNNRSNHACTSHRISESVLEQSVFLALKQHIEVVLNMERVLGYIETLPFRQEEVQKADAQLIKKQEEAARYSRLKKSLYESMMDGLISKAEYLELKAVYDTKMQEAQAAEIKLKEEMENLLKNRSSNAAWIERFRQHQNITELTRHIVVTLIDRIDVYEGCRMKINFKYQDSYECAVALINGVNRIHPLNGILEIPCLEETPQSAEETAQVSAVAKGVL

SEQ ID NO: 6209 - protein, 536 aa, unidentified
  source 1..536: note = uncultivated organism
MRFAVYSRKSKFTGKGESIGNQVEMCTAYIISHFPETDSRDILVYEDEGFSAKDLNRPQFQKMMRESREGRFCFIICYRLDRISRNVSDFSSLMEELNERGISLVCIREQFDTSSPMGRAMMYIASVFAQLERETLAERVRDNMLMLARTGRWLGGTPPTGFDSEKVTELVFEGKLKTSYQLKSTCELRTVKLIFGLFLEHYSITSVRRQLASQNIKTKKGNEFSNQGIRQILTNPVYCCADGDAYRYFQQRGSDLCFEPDPRSAHCGLLAYGKRECKGGNESFADVSNWIIARGKHMGVVSGRDWVMVQQRLEDNKPVKRAVKAHNGYSLLSGMLCCAKCGSKMFAKTRSHPSSQGAFDYICSGKLKGTRATCDCKNLNGHATDSLVFDFLKRYLTEDDSLFRQLDLLRKKYQSEQSGATGDGCAKQIRQCETEMETLLSTLGNSPVSEQLVQRVDRRIVELEKQQAYWKERQRETEEKSDKTTEQIDQTARALLDVNQCLEWSTVPERRELLQSLIHRIEWDGVDLSIYPRSRL

SEQ ID NO: 6210 - protein, 528 aa, unidentified
  source 1..528: note = uncultivated organism
MSGPGIRCALYTRKSSEEGLDQEFNSLDAQREACAAYVKSQTSEGWRALADHYDDGGYSGGTMERPALKQLLADVTAGKIDTVVVYKIDRLSRSLTDFTRMVELFDRHDVSFVSVTQPFNTTTSMGRLMLNVLLSFAQFEREVTGERIRDKIAASKARGMWMGGTLPLGYDLPTGHSRTLVLNAAEAETVRLIFTTYLELGSVHALERWLDQREIRSKLRVVRDGRTLGGQRFSRGALFHLLRNRTYLGLIPHKDMAHPGAHVPIVDAALFEAVQHGLAANARRKSARSGHVARASLTGRIFDADGAPMSPTFSHGSKGQVYRYYVSAPLQQGRALAGDSSSIRRVSANAIEGRAAAIVERLVPTAGADPLGIILRIEVHARSLELLVPIARLGSIRSRLGEGEQAYADPVNSDASRIVVPISMRLRGGRTRIDGGAPSAARRDPVLIKALRSAHAMLACDTRGLPIVDVAPASPYLRKLIRLAFLAPDLQAQILAGQQPDGLTLERLMHMPMPANWSDQRAAFEAAI

SEQ ID NO: 6211 - protein, 534 aa, unidentified
  source 1..534: note = uncultivated organism
MTSMIATREPANRGKRASTKTIRCAIYTRKSSDEGLQQEFNSLDAQREAAEAYIASQKAEGWVCLPDRYDDGGYTGGNTDRPALKRLLVDIEAGRVDTVVVYKIDRFSRSLADFMRMMTVFEEHGVAFVSVTQAFDTSSSMGRLTLNILLSFAQFEREIIGERIRDKIGASRQRGKWTGGTPVLGYDVDRSNGSPKLVVNAAEASRVRQIFDLYLELGSLLPVTAELERRGWRNKAWTTRDGRKRGGLPFDKCRVHKLLTNVLYAGKVTHKDEVYAGEHEATVSVDVFARMQQQLIRHGRNGAADGRNRHGALLRGLLYCRSCRRAMSHTFTTKGNRRYRYYTCTNAGKRGRAACPSPSLPAAQIERAVVDQLRCIGQDTDVLRETLTQARDQVESAIDRLTGERREIERALARTHADIRRTAAARNGATTTAPRIAELNDRVREAEQRVVEIDARLCEMRQELVDEADVTAAFADFDNVWNALSPREQVRVLRLLVSRVEYAAADSSIEVTFHPSGIKSLGDGDTDKPVEDAA

SEQ ID NO: 6212 - protein, 550 aa, unidentified
  source 1..550: note = uncultivated organism
MAKQTIEYKVGIYLRLSQEDMRSGESLSIEHQREIVTKYVSEQGWTIVDEYADDGYSGTDFSRPNVQRLLDDAQGGKINVIVCKDLSRFGRNYIEVGRYIDYIFPMYNIRFIALGDGIDTADRNSNAMEMMPIINMFNEWHASSTSKKIRAVMESNAKQGKYKCTYCAYGYTKADDEKNTPIIDPDAAEIVKRIFTMRSQGMSPRKISDVLNGESVPIPSDYYYAKIGKVNPRNTRHLWSQSTVLPILRNPIYIGHMAMMRRTTVSYKNHKTIRKPEDDWIVVENNHEPIISQELWDKVREVERSVSRGKRCSDGELRPLSGLMFCADCGHKMKSAGSSRRKKSGEMVRYRFFNCLDYSLFANRCFSHYISEKDIHAVICEDIRSLARSVITDEEQARQDFLSQKAEISERKSRGDRKKLNESRNRLAELNNLMQSVYEDKVNGKIPEDICLQFLTKYETERKELQAIVAEIEERSAAEKKDQEDVEEFIRRLKKYADVQDLTRELCLELIEYVTVGASVRGQPREIHIYYKFMHKPLINKNNLFDNENV

SEQ ID NO: 6213 - protein, 506 aa, unidentified
  source 1..506: note = uncultivated organism
MTQQLRAAIYCRISKAKGTKKTQSVEDQERDCRDLCELNGWQVGDVFVDNDISAADPDKARPAYNAMMKALAKGGFDAVVVTMADRLHRQPNELGQFVDAYLETGMTKVATVREGDFDIGNPNGLKNFRDAGSSAEREIGILKIRVKRQKQSLADRGEYAGGRRPYGYRVVTKKQEVAGSPAGLFVDESEAVVIRECATRVIDGESLLSIVRDLNGRAVPTVRGSQWNTTTLRDMLLRPSITGLRVHGGEVIGEAAWEAIIDRPTWQQVTDILTNPERLTPRASWEYPLRGVLKCSVCGRYLSAMPRKGHRAYGCLKMAGGRMTGACGTIFAKADTLEDFVFSQVLPLADAPDLRDALRAAEQGSSDEIAELSRANAEDSAMLSELDTDYYTLRRISRATHLKQSGALRELIEARSAQIATMRGHSVLDRLGGDVVANWPTMTADERKMILQAMVVDIRVKPAVKGCTKFDPDRVDIVWKLSAQAMRVIGDAVREIEAQMVDGMLA

SEQ ID NO: 6214 - protein, 528 aa, unidentified
  source 1..528: note = uncultivated organism
MNIGIYSRKSKITESGESIKNQIELCKEYAYNNFNVKNLYIYEDEGFSGGNTKRPKYQEMLSNAKERKFDVLICYRLDRVSRNVLDFSNILELLTSHNIEFVSIRDHFDTSTPMGRAMMYIASVFAQLERETIAERIKDNMYKLAETGRWLGGITPLGYKSTRIVDESTGKSISILSNVPQESKLVEIIFNKYLEFGSLTKLQLYTLKNNLKTRNNKDFNISSLKNILTNPVYMAADNEAYNYFLENNSLINKELSSKDFDGTHGIMAYNKNNEKKNAPHKNELSSWIISIGVHHPIVTSTNWIKVQNILLSNLHRNYSLGSKTAILTPLIKCKNCRVPLKIISKYEDKHVKHFYYKCRVKESSHNTNCHVKNLKGNLCEEIIFDSIEQYLSVDKLIDKLQNYINTKTDFDKDEEITKLEKKISETKNAIYQLTLILSSKTSSASKYIIYEIEQMDDKLQSLNKQLKMLTDTTTNDTDKDYNLNYLTNGSIHNLLSNEQKKILINKIIKDILWDGDKLEVELLPVNNL

SEQ ID NO: 6215 - protein, 519 aa, unidentified
  source 1..519: note = uncultivated organism
MIKWRNICKGYPKFIFEKFIFGLKNPLIYANLISGQISVTPDFMEWKSHRLPPNKKVRSDNMKEQSKFFAAMYLRLSRDDNVKAEHDGNAMINGVSKAESNSIGSQRELIRSFLNEQEDIELYDIYVDDGFSGSNFDRPEFNRMMKDIEAGRVNCVVVKDLSRFGRDYIEAGRYLEKIFPVLGVRFIALTDHYDSISADTGERQIVIPVKNFINDSYCRDISTKVKSQLAVKRKAGECLSPFAVYGYRKSPENKNKLVVDDYAAEIVRRIFRWKIEGMAVSAIAKKLNELHILSPKEYKKSTGLNYRGGFTGGSGSQWSSSSVKRILTNEVYLGHLLQGKTEKVNYKVKKSVEKPKEEWVRAENTHEPIISDSDFEAVQNLLQTDGRVSPESKSLSPFMGLLFCGDCGEQMVRRRVRYKEYRTGGLSQKDYVEYKMCKENRLRDLEKQEKNFREQEVSLERDGETYLKAVRALIKLKNEQVLTRELIESLIDKIYVYPGKMVEVLFTYSDALMERQVKK

SEQ ID NO: 6216 - protein, 574 aa, unidentified
  source 1..574: note = uncultivated organism
MKNNQNPECRKVVFYGRVSTEHEAQTYALSNQMQWYEELKKSYQNWIVVDRYVDDGITGTQAKKRPEFMRMIEDAKTGKFDLIVTREVSRFARNTIDCLEVTRQLKNYGVEVFFVQEGIWTMENEGEMILTIRAMVAQEESRKMSERIKAGQAISRKNGVLYGNGNLLGYDRVGDSYVINEEQAETVRMIFNMYESGMGLQAIRDELIKGERRNSSGLVKWDNTRILRCLHNSAYKGVVAYNKSYRNNYLEQKVIVNHAEDTIEYVKAKFEPIISEEQWEHCKQIRESKRQLRLVNVEGKAKMQYIGLHNGGNVWTKKLRCRCGSSMRMDKWRPKLNGERPVGFKCYNQLNKGANKITDRASDGFCDMHAICGWKLEMMAKAVFRKVWKEGELLEKSIKIFMNETVMEQKDIERIKNDYNLQIKRLNEKAERLIEMRMDGEIDRETYLRLKATVDADKKQAEQQLLDYENLPRVAQTHPFTKEEVKKHLLEFVSFNNTDFDENIVDKFVTQIKVESETQFSWYLCFGAEENFETEKKLYCTINIPFKDALKYRNKRKQLLRKNQYQDLVINVYI

SEQ ID NO: 6217 - protein, 551 aa, unidentified
  source 1..551: note = uncultivated organism
MPDGGSRRALRCAIYTRKSTEEGLEQDFNSLDAQREACCAYILSQRHEGWTLVPDHYDDGGYSGGNLDRPALKLLMAELAAGRVDIIVVYKVDRLTRSLADFAKIVEILDRSSASFVSVTQSFNTTSSMGRLTLNVLLSFAQFEREVTSERIRDKVAASKAKGMWMGGPIPLGYRLGERKLIIDEQEADTVRDIFRRYLELQSATQLVEELDRAGIRSKPRINRFGRDYGNAKISRGALYRLLQNCLYVGEVAYKGQIYPGQHDAIIDRTTFEAAQQMLAQARVERRLGTNAKEPSLLAGLIWDGHGRRLTPTHCSRRNRRYRYYTSQTDNVSVTDAAWRVSAPDIEGLIIDRLRTMLVNAQEQTIASGSLDGDAIGQLNERVGGMLTRLGSLVGQREPLLQLIQRIDVLGERLRIEADLHPIDASLGGRLVHEHPIGFVRSGKQVKLIIPPTCTTSPAANRNPSLLKLVAQAFAARREMERSGSIEQVAERLGYGREYVADLIRTSYLSPTIISALIHGTQPASLTRRRLVRTDRVPLSWSAQERMFGFI

SEQ ID NO: 6218 - protein, 528 aa, unidentified
  source 1..528: note = uncultivated organism
MGIEKTYKVGMYIRLSREDGDDRESESVENQRDIITNFIESKEDLELVDEYVDDGYTGTNFDRPGFKRLKEDVDNGKIDCVITKDLSRFGRDHIDTGFYLERYLPSLNIRYIAIGDQVDTLDSRGLGFLTFKLSFNDYYSQDISNKIRAVKKRKQEKGEYLGTYAPFGYKKDTDINNRNHLLLNEDTSEVVKRIYKLYLDGMGISKISNLLNEEGIPDPSSYLNTERYNKCSHKWRKGTIYRILKSEVYLGTIVSHKSYKINHKVKKRITVPKNEMIYVKNKHEPIIDEETFNKVQAKLSKSGESRNRVNYNPIKQFVYCGVCGRKASLKTHKRKVKSGEIHIHQYFRCNKKGESWTNCDNGTIRNNILLPLVEKTLKEECSKIVFSKGNLTSIYEQAKESTNNKRVLIKRQIEKSEKEISSIEKKIEQVYADKIEGVIRTEDFTKFYDSYQEKKEKLNTKIRDLKKDLTEMNNDKIIDYRKIKKLAEECLNMEKLDSTLLEKLIDRIEYFKGRKIKIKFKFTENKVK

SEQ ID NO: 6219 - protein, 540 aa, unidentified
  source 1..540: note = uncultivated organism
MTSAVATREPASHRKRASARASTVATVRCAIYTRKSSDEGLQQEFNSLDAQREAAEAYIASQKAEGWVCLPERYDDGGFTGGNMERPALQRLLADIDRGRIDCVVVYKVDRLSRSLMDFAKIVEVFERHNVSFVSVTQHFNTTNSMGRLTLNILLSFAQFEREIIGERIRDKIAASRQKGKWTGGTPILGYDVDRSNASPKLVVNAAEASRVRQIFDLYLELGALLAVVAELDRRGWRNKSWTTRDGRTRGGLPFDKCRVHKLLTNVLYAGKVTHKNDVYAGEHEAIVPEDVFQRVQQQLLRNGRSGAAEGRNRHGALLRGLLYCKSCNRAMSHTFTTHGNRRYRYYTCTNAVKRGRAACPSRSLPAAEIERAVVDQIRNIGEDPEVLRDMLAEARKQTESAIGRLTGERREIEKTLARLHADIRRTVSGNGDAATAPRVAELNDRVRDAERCVAEIDAKLSELREELVDEAEIAAGLADFENVWQALGPREQRRALRLLVNRVEYDAADSSIEVEFFPTGIKSLANPGTTEQHGVEEAA

SEQ ID NO: 6220 - protein, 562 aa, unidentified
  source 1..562: note = uncultivated organism
MATNSNTASKQNTKTRGAVLYTRVSSDEQAEKGTSPDVQRDACLLMAAQMGLPVVEMCPDLGVSGVRYSSRPGIQRALALIESGEADTLIATKVDRVGRSAAVILDIASRVRKAGGQLVTSDARFDDTPMGQFTLTVFAGMAELERNNIRERTKSGAVRRAQEGFQTQRSRSPFGLHVVRKADKERGLYEGSAAGSYVPTEAAPVAVEMFTRYAGGQSLREVCRWLNEAGVGTQFGGQYWRPSQLKKVLVNPVYMGQATYGKHKRSTEEVGDRTVQHLSIQETYLSIECPALVDEATWRMVQARLSEGRAVFGGNPARRHLLGGLLRCPLCGRGMHGTKREKRTHGGRSVQQVHIYACPDSRASRNPGKVVCNRRAYSAGEAEAACLRGIVDAAGMPDLITSALAAYRADEAAAYDPQEAGRERQRVETSLRSLDAKEQATIEAQIEARMNHVRADYAPMFGKIADERARLLARRKELDVQAEAACGDFPRPDDAALLATALRDVGRVLSSALLTDGEKHDVLARVIEGIVPEGENEAGEGTYRVSLRGLNGVEKGHSVKML

SEQ ID NO: 6221 - protein, 568 aa, unidentified
  source 1..568: note = uncultivated organism
MTARTRIRCAIYTRKSSEEGLEQGFNSLDAQAEACAAYIASQRHEGWRPVNARYDDGGVSGGTLERPALARLLADIEAGRVDMVVVYKIDRLTRSLADFARLVERFDATGCSFVSVTQAFNTATSMGRLTLNVLLSFAQFEREVTAERIRDKIAASKRKGMWMGGLVPLGYDRHPDPKRRGLVVNAAEAEVVATIFRLYEAHGCLRVVTEEAARLGIRSKRRVFPSGGTRGGAVLSRGQVHFLLTNPVYRGMIRHKDTTWPGQHEAIIDDALWTRVQEKLAAASARLRGRRLEDGDREASAPAAPLAGKLRDETGDRLTPSHAQRHGRRFRYYVSHRLVVGKTTPDPSAWRLPGPALERAIARLIAGHLETAARRCALLDAPLTACATDRSSRANDLCARLRAGDPALLASLLRGGDVAPGSITLELDQEGLATTLGAAPAEIARSVLAVTAPFHLRRRGVEARLAAGDREAFADAVLLRRLAEAHRLVAALRQGVPLARLARQGGHSESWIRTRAQLAFLSPRIQAAILEGCQPPELTLERIVRTGVPLDWAEQERRFGLEGQGIAS

SEQ ID NO: 6222 - protein, 520 aa, unidentified
  source 1..520: note = uncultivated organism
MASARDNLARQNIFIPATQPEEQITLRVAAYCRVSSDSADQLNSFAAQNTHYNTVISTHDHWEMVDIYADEGITGTSAAKRGDFQRMLSDCRKGRIDKILVKSISRFARNTAECLEAIRELKALGISVFFEEHNIDTKMVSSEMLTAVLASCAQAESESISKNVSWGNRKRMESGSFTPSSAPYGYRLVNGKLVVEESEAEIVQSIFAHYLSGVNPDQIARQLMQIDTSGKVWSRHTVEYILKNEKYMGDALLQKQYTTETLPRQKKNNYGERDMFYIENFNPAIINREIYQKATELREQRRGKCSFMAREHLLAGIATCEQCGCLMRVKKKGEQDYLICRTHNEDSESCPITQIPVVTIYESFLRLYFNLSRHGADILAEMIRNLHTIRNRQMLWHPDVVELNKRISDISNQIHTLTLLNKQGIVESDYFISKNNQLAEQLRKAQQQKEKLLDREDDEIIKQTKILLEVLEDGPEFMDQLDEELFCELIDKIIVESNTKIRFRLKNGLELPESIERTVR

SEQ ID NO: 6223 - protein, 543 aa, unidentified
  source 1..543: note = uncultivated organism
MEVRKIAKKTVSVIEPKQSLLVDKAKYQQTRMAAYCRVSTDSAEQKTSYETQKQVYTDMIAKRKDWEMVGIYADEGISGTRADKRPEFNRMIKDCLSGKIDYIITKSVSRFARNTVECLEYVRMLKARNIGILFEEQNIDTLKCDSELYLVIYAGFAQSESESMSKNITWAFRKNFEDGKVVFNYSKMVGYRKGNDGNPEIIPEEAEVIRNIFDWFLAGRTPREIVDLLIADGIQTKCGKQKWSVGTIQSILRNEKYCGDAILQKTVTIDCISKTHKKNTGEAPMYYVHNNHEAIITREQFNKAQEELLRRNTIAPKMSSRTISAQGRYSRYALTEILHCDECGSRYKRCTWAKRGVKKVMWRCVSRIEHGTQYCKHSPSIEESALHSAIVRAINRFNQENEITYRLLMKASLSDALGIGGSNEEMELLTRRIDTLNAKMMKLINDAVSEGRSIDDNEGEFKEISDEIAQLNSRVSAIKELIANDESAKDRLESINAKVEELKDGITEYDDTIVRQMIECIKVYGDKRIEVIFGGGTSIIEEL

SEQ ID NO: 6224 - protein, 522 aa, unidentified
  source 1..522: note = uncultivated organism
MPQLKVLNAATYPRVSTMRQVQEGFSLEAQRENLSYFARQQGWNVVGDYGDEGISAKNVEDRPGVKRLIADIKKGKINVVVLYKFDRLTRDARDTEDFIELIQNYNILVYTLSGGFVDVSTPSGRFNTRILGAAAQFERETTIDRVIDGNIKKVKKGYSLCSCTSSYGYDRPKHQEVQTINPKEAEVVKRVFKMYSKGKTFTEICAVLNSEKIPPKNKGKIRKRRNSDEYYTVNSVWQPKTIRNMLSNVNYIGYVRYGCEREQVSLDEAANYENRGKGFITKGLHEPIIDIELWDEVQSLLSKIKSVHKTNYSKNDVYYCGFLICGFCGQSLTTNRTNHKRKDNSIASFLGYRCVNREKHLCPALGMSHKKVEIAFLNYMDKIQDFDDIDNLELDENINTLELDNLKKRLLQRNNKLREIMKLFMDDLLNYEEYINMKEAIEKEIVELKKRQEKEEIKLKPKDKYTYKNDIAKNIKEHWKYLLDEEKREFLIRFVKEIIIVNKDKDRHNGLPEILDVKFYND

SEQ ID NO: 6225 - protein, 556 aa, unidentified
  source 1..556: note = uncultivated organism
MEKVKDQFAIYSRKSKFTGKGESIGNQIELCRQYLCSHYGESYGEDAYVYEDEGFSGGNLDRPQFKKMMQEAKKKRFTAIVCYRLDRISRNIGDFANLIEELNEMHISFISIKEQFDTSSPMGRAMMYIASVFSQLERETIAERIRDNMHELSKSGRWLGGTTPTGYKSQSVKTLTEEGKVKKAYQLRLVPEEAKLVRLIYETFMETGSLTQTETYLIQNGYKTKYNRLFSRFAIKAILRNPVYMTADMEAYDYLKKKKVDLFAEKEEFNGQFGVMAYNRTLQKPGKAHEMREMDEWIVAVGKHEGLIPGAMWVKVQKQLDRNKSKNYRKPRSNVALMSGLLYCSECGDYMRPKLSGRFNQEGEQIYSYLCTMKERSRMKCCSMNNPNGNLLDQMVLEEIKKIAENKEELALQLNQYEKLLDEGRQESEADILRLNEDILHLDEEISGLVASLKKAGGTAAEEYIVAQIEELHQRKEEISSHLERLKVSLINQELSDGEAELVKKTLSSFSNTLDTMDVEQKRMAVRAFIKRAVWDGKNIHLYFLGSEEPSGESSK

SEQ ID NO: 6226 - protein, 567 aa, unidentified
  source 1..567: note = uncultivated organism
MDNMKTNRIFHAAIYVRLSKEDNASDSGTDKAESDSIVNQKELIRAFLADKPDIEVCAEYADDGYSGANFERPNFQRMIREIKAGHIDCVVVKDLSRLGRNFVEAGRYIDQIFPVLGVRFIAVNDGFDSVNGRTSSDRILIPFKNLINDAYCRDISVKVRSQLETKRKKGDFIGSFAVYGYMKDPADRHKLVVDEYAAGVVKDIFKWKLEGTSQQRIADRLNDRGELSPMEYKRFCGMRYQSGFQVNIKARWTAVAVGRILRNELYIGTMVQGKRTTPNHKVKKTLLRPSEEWVRVEGSHEPIIDKEDFLAVERLLLQDTRVAPKEETVYLLSGLMFCRDCGHGMVRNSVCRNGKTYVYYMCGNNRANGICSSHRVSGGQLEQSVFLTLQQHIAQTADMDHVLAYIETFPYRQTEVERAERQLLKKQEEAEKYTRLKTSLYESLMDGLVDKEEYLELKALYDGKLQEAQTAMAKLREEMESMLQNRTGSTHWIEQFKKHQNLTGLTRHIAVTLIERIDICEDCRIQIRFKYQDCYERALSLIESVEKIQPPNTAHGRESIASRREAI

SEQ ID NO: 6227 - protein, 605 aa, unidentified
  source 1..605: note = uncultivated organism
MNTLKAKRGPKKVAIYLRVSTDDQVEKYGPKIQKEAILNLIESRKYTDEPFIFAGEEYVYFDNGISGTIPPDERPALARLKEEITFSNPENRPFDVVIVYRIDRFARKLKVLHEIIDFFEESEIKFVSVTENIDTTTPFGRAILSIIGVIAELEIETIKQRTQAGREVSAHSGTYMGNAPVYGYKKREDKKLSIIREEAEGVKTIFDLYVNKKYGIGKIAKYLQDHKLLSPESSTIKNKKREGTSKKQNSPFHWNDLSVRRILKNELYTGIYYYAKSKKGKKLPKEEWKKSDYSMPIIIDLLTFEKAQKILEKSKTINISSRKRPEPYYLSGLLTCDACFHLKGNNGHRNNWNGVPKLMKGNNKYAYYYVCSRKSHSKYNTKCKTLPLPAKEIEDFVIENCLKLISNPLAVYKHQQTLSSSKTEIKKLHNQQEKINGLISGIPNRKRQLSIQHEHGLISPKELKERTQEINNSELLYRNELRDIYEKIAQNNISDGYLKTLELFSEKYQNVLKKVSGNKELVEEVIHMLVDEIVIYSRDKKNTDIIAGPKKDGQEVPFRLSMRLKLPQDILAEISSQEHLINPTIEKTSESTDVSSSVSNTSRGR

SEQ ID NO: 6228 - protein, 548 aa, unidentified
  source 1..548: note = uncultivated organism
MVEGTGKVLRCAVYTRKSSEEGLEQAFNSLHAQREACEAFIKSQQHEGWVLDPTPYDDGAFSGGNMQRPALQAILAEVRAGRVDVIVVYKVDRLTRSLADFARIVDVLDTAKASFVSVTQAFNTTTSMGRLTLNVLLSFAQFEREVTGERIRDKIAASKKKGMWMGGVPPLGYDATNRKLVINKAEAETVRTLFEMFIACRSVDKLLPKAEALGLRTKSRLTVKGATGGHPFSRGTLYHLLENRTYLGEVVHRGASYPGDHEAIIAADLFSTAQAVIAANRRTRKMGANSPHPSLLAGLLVDDKGHRFTPTHTQKGGKRYRYYAMAAHGSEPAYRLPAIEIEPIIHDAVLAFLSAPGRVIEALGSVDAAAAGLALGKAAELAGQWNVTCDQSRRRAANDLLDGVVYRPEGLDLRLRLSAFGDYPDQVATLHLPTQIARRGVTLKLVVDNAGPRDDARLLSFIATGEAWFQDLADGRVATIAALAEREGCTRAYVRRVINAGFLSPKLKAAIRDGTHPVDLTIAALAHAGPLPLDWNDHLGAIKNGAAR

SEQ ID NO: 6229 - protein, 506 aa, unidentified
  source 1..506: note = uncultivated organism
MASTSNGTPKSARCAIYTRKSTEEGLNQDFNSLDAQRDAGAAYIRSQTGEGWTLLPAQYDDGGYTGANMDRPALRRLMADSQAGKVDCVVVYKVDRLSRSIRDFAKIMEIFEKHGTTFVSVTQQFNTTTSLGRLTLNILLSFAQFEREIISERTRDKQSAARKRGKWTGGHLILGYDLDSPSSRLVINSGEAERVHSIFEWYLAGESVFSITAKAGQLGWHNKQWTTREGKTYGGNPLHRAHIYNLLANVLYTGRIAVDGELYRGEHDAIIDEETFDLVQARLKQNSTNGDHRHRTRMESLLRGLIYCASCGSAMYQTYSSSKERRYRYYVCSRAQQQMENYCVTRSVSAPAVEDAVVESIRRVSVHPRVLEETARVIRHRLTEEIARLREELNAVQLRVKNLKSQVARIRKPDANREAELKEQIDTGEARTAELKREIVVRERARVDGDELRKTMEPFDALWKAMNIQEQSLLLRQLVEKVGYDGRTGKVTVSFKSASIKELCQK

SEQ ID NO: 6230 - protein, 550 aa, unidentified
  source 1..550: note = uncultivated organism
MRILNQKYYAGLYKRLSREDAMAGGGGKNESNSISNQREYILNFVKSHSEIEIVKEYADDGYSGVNFERPDFLRMLEDIKTGTINCVIVKDLSRFGRNYIEVGKYLEEIFPLLGVRFIAISENYDSAYTNRGSEQLVIPFMNLVNDAYCRDISVKTRSSFELKQQKGEYIGSFTPYGYKKRPDDIHHFMIDQKSGEVVNRIFEWTIAGMSNQNIADKLNREGIPSPAEYKKRQGENFKCHFQKNLQSQWSALTIRRILENRVYIGMMEQGKTYSINYKVKKRIKRDKEDWYCVEDAHESIIDKDTFYLVQKILGMDSRTSPGEETIYLYSGMLVCGKCGETMLRRRKVAKGRKYVYYGCYDEKKSIRCKNICIREDKLDQAVLKTITKHIASAIQMTNMIEEINKIPLEEREVKSLERMIEEKEKEITKFEQLKLKLYEDYSDSFIGKEEFESFRAIYNKREKESISIKKELELKKKQFLEGDTQTQKWLDYFKRYENVESLNRTLLLTLVERITVYSKSEIEVLFRYKDEFACFQELSSDNLKGEIICG

SEQ ID NO: 6231 - protein, 583 aa, unidentified
  source 1..583: note = uncultivated organism
MADSRKVSSSPGKKMRCAIYTRKSSEEGLEQAFNSLDAQREACAAFVLSQKHEGWVVLPALYDDGGFSGGTMDRPALQRLLDDIRAGQVDVVVVYKIDRLTRSLFDFAKIVEAFDARGVSFVSITQQFNTTTSMGRLTLNVLLSFAQFEREVTGERIRDKIAASKKKGIWMGGLPSLGYDVQNRKLVVNEEEAGTVVHIFRRYVELRSVRVLQEKLDAAGIRSKRRILADGTPFGGQKLSRGALYLMLQNRIYRGEITHKGNAYPAEHQPIVDKVLWDQVQAILAENRVDRATGADAKQPSLLAGLIFDESGERLTPSHAVKKGTRYRYYVSRSLIVGTAKDKSTGRRIPASNLETLIITKLRSFLADGGAVLNVIREEHVNGAAQSRLIARGVKIAKEIESLTPDRIRVILMTVISRVDIRPDCVEISVRRSRLIELLGLGSIDLVTQRGTPDNEAKDVLMLTVRARLQRVGREMKMLVENTDDQTKADPGLLRIVARAHDIQERLMQKSGLTLHAIASQEHVTPGYVSRLLRLSSLAPEIITAIVNGKNPPQLTAKKLMRLALEIPVDWTAQRKLFGFHAR

SEQ ID NO: 6232 - protein, 524 aa, unidentified
  source 1..524: note = uncultivated organism
MLRCAIYTRKSSEEGLDQSFNSLDAQREACAAYIASQKGEGWLGLPGRYDDGGYSGGNMERPGLTRLLSDIEAGRIDVVVVYKVDRLTRSLSDFARIVDRFDKRGVSFVSVTQAFNTTTSMGRLTLNVLLSFAQFEREVTGERIRDKIAASKKKGMWMGGNAPLGYIGHERTLKIIPEEAAIVRWCFARYLELGSVHVLQREMKDRGIVSRVRTSAAGRTTGGQPFGRGSVFHLLRNRLYVGEIVHGDKVWPGLHEPIVDRETFEAVQTLLTKSTTPRRVRAKQSPASLTGLIHDATGGLMSPVTARHSGNTWRYYVSSRLQKGVGVAMPPDGLKRIAAVPVEELVAGALRELIGDPTASWAVLRELITKVTVHTDRIALALTIEARARAVRDIPPPAADGSTTLVVSAKLQKRAGRVWLEAGASGRTERRRIDRTLVAGLRRAHRELAKVGIQPSARTPSWLNCQGIDDRHTRRLATLAFLAPDIQVAILEGHQPVGVTLKDLIERPLPLSWEDQRIALGITA

SEQ ID NO: 6233 - protein, 561 aa, unidentified
  source 1..561: note = uncultivated organism
MTARVQCAIYTRKSSEEGLEQAFNSLDAQREAGLAFIQSQRHEGWHAISTHYDDGGFSGGNMDRPALKRLMTDIHDGKINTVVVYKVDRLTRSLADFAKIIEQFDAMQVSFVSVTQQFNTTSSMGRLTLNVLLSFAQFEREVTGERIRDKIAASKKKGMWMGGFVPLGYDLRDRRIYVNPKEAETVRTIYSNYLRLGCVMALKDYLDRNRIFSKSRTSGNGAKTGGTSFSRGALYKILKNRIYAGEIAHKGGVFIGQHDAIINREQWDQVQKLLIGNHQGKRRKARVTKVSLFTGILFDAAGNRYTPTHSNKAGRRYRYYTSQAVIRKAVQTEEPARIPAHDLEAAVTERILEFLKSPRGVLKALGYQRDRKSKYSELLRQASEKAKSWDGISAQHRERFLKAILDRVVINSDSVEVKMRKEALIRQLAGKTSPQSDECREYISLFCPFRVANHGKALRLIVGNDQAPSQVNTHAILKAVARARAWREQLISGEANGIEHLASLNHLHVAYVRRILPFARLGPAAIEAILNEQIAPDLSLDSLLGRIPMAWKEQAWIIGRA

SEQ ID NO: 6234 - protein, 521 aa, unidentified
  source 1..521: note = uncultivated organism
MKVFVKNCAIYTRKSTEEGLDMEFNSLDAQREACEAYILSQKAEGWQAVKTHYDDGGYSGGNIERPALKNLIVDIEAGKIDIVVVYKIDRLTRSLMDFSKLVETFDKYGVTFVSITQSFNTTTSMGRLTLNVLLSFAQFEREVIGERVRDKIAASKKKGMWMGGASPIGYRVEGRQLVPDKASADTVQKIYKTYLRLDSVTDVKNELDRLQIKSREWVSKKGIVHPACYFSRGLLYKILRNPIYIGKIAHKNHIYEGQHEPILTQELWDKVQEKLAEHAGKKRGSLNDQQEGNFLKGKLFDQDGNYYSPTYTMKGNKRYRYYINQSVLQFKIKPVGIIDRFPAHELELRIETEIRQYLFHPLKLEQVLNLPNDRYVQQLQLIPKKNDQILKVDLFDFIKKIVVYPERLEIKINVIKLKNLFKAILGVCLPETIGEDIADINIPYEVNRTKAGAILIQPEGASEDILKLPPDRLKRLVQGIAWRQDHFNGKTIRSIAQNNNCSEALVGKLINASLDARSYSL

SEQ ID NO: 6235 - protein, 544 aa, unidentified
  source 1..544: note = uncultivated organism
MLSSENKTGSYLRLSREDGDKLESDSIKNQRELIKEYAAQHESIHLIEEYVDDGFSGTTYERPDFQRLITDIKAGKINCIIVKDLSRMGRNYIETGRYLEKIFPLMGVRVISILDNYDSFNSDSEYDKIIIPFKNLINDSYCRDISAKIRSQFDVKRKNGKFIGSFASYGYKKDPEDNNHLVIDPYAADIVRMIFRMKLAGSNQQRIAEKLNSMGILPPAEYKRSQGYNYDCGYRTGKNPKWEITSINRILVNEIYTGTMVQGLNRKINYKVKRSQAVPKDEWIRVENTHEPIIEKELFDTVQRLLQLETRTAPDKGEIYLFSGLVVCGDCGQNMVRRKVKKNGKDYAYLHCRTHKKGEGCSPHQISAEKLELIVLSAIQVQIELLVRAESILKTIDYIPEEQTFVKTVTCQIEELDKEIERYQALEAQAYSDKKDAVITDDEYHMITKRFSYKLNDLTEKKNQLQDTKIQLLKNKIHLKPWIQDFKKYRNIEKLDRSLVVELIDRIIVYDKTNIFIQFRHRDEIQEILSLSEVESVQGLEDLA

SEQ ID NO: 6236 - protein, 547 aa, unidentified
  source 1..547: note = uncultivated organism
MATKLRCAIYTRKSSEEGLEQDFNSLHAQRESCEAYVLSQAGEGWSALSTLYDDGGFSGGSMDRPGLKRLIDDIGAGKVDVVVVYKVDRLTRSLADFAKIVEAFDARGVSFVSVTQAFNTTSSMGRLTLNVLLSFAQFEREVTGERIRDKIAASKAKGMWMGGMPPLGYDVRDRKLIVNEAEAEIVRRIFERYLVVESARGLVAELHRDGVMSKAWASRAGKAMGGRPLHRGAVFHILASRIYVGDIVHKEKVHQGQHAAIIPRELFEAVAAKLQAGTTERTGRVKRAAKAALVGKLFDDRGQLLSPSFSYGRNREPYRYYIAMELQVGRGRTPASSMIQRVSAPAVESFMVALLRRLSGRDEIDTPDLLEIISRVELRAAETHVVLNTAALLPDDHLELAPESVRRRLEPSEHLVSEPGLAPRLRIVLPQRLQLRGGAKCVLGADRNNAAINPALAQALRRAHADLASLSASPLTDPVTMQDAVAPATQHGRLACRLAFLSPGLQRAFLDGTHPRGLTLTAMTDDTMPLAWDDQPAWLQAVSARLR

SEQ ID NO: 6237 - protein, 575 aa, unidentified
  source 1..575: note = uncultivated organism
MNKPAVIYARYSPGPNQTEQSIEGQLRVCYDYAEREGYSVVSEYIDRAITGRSDDRPDFQRMLADAKKKHFQYVIVYKLDRFARNRYDSAIHKHSLKQHGVRVVSAMENIGDNPESIILEAILEASAEYYSVDLSQKIKRGRHDAAKNGKHIGGGLPWGYKSVEGEVMLDERKRPYWKQALEQYADGVPKKDVIGAINDAGFRNRNGKPFGLTAFQKGFISPINIGVLKQGEFIHECPAVISEETFKKILERNKLNKRIGGRNKAKVEYVLSGKLFCGYCGSAMLGVPGKGRHGGIFHYYSCGGRRRHNGCKKKHEKKDFIEWYIVEQTIEYVLTPARMKSIAAAVVAEYDKEFNNSKIKELERMIAKLDRDIEKYVEMLLEAPKAARVKINEKIELFDQQKTDLEIDLTKLRIATGIRYTEEDIMAWLKQFCKGDLFDESFRRRIIDVFVNSVYLYDDRTVVFYNIRGGKQVSYMEMIDATEQLELEIEETNPESGVRMVNDLMEARGVEPLSENIATQASTGVVTVLMSPKQRPVTGFRSGQPDYLLPSTPGGDQTSYPTKVGPLSRHMGDAG

SEQ ID NO: 6238 - protein, 518 aa, unidentified
  source 1..518: note = uncultivated organism
MNGRNGTNTASEIRCAIYTRKSTDEGLDQAFNSLDAQRESAEAYIASQKAEGWVCLPDRYDDGGFTGGNMDRPALARMMADIEDGRIDCVVVYKVDRLSRSLMDFSRMMATFEKHSVSFVSVTQQFNTTHSMGRLTLNILLSFAQFERELVSERTRDKIAASRRKGKWAGGRPILGYDIDRSGPHLVVNDKEAKQVRAIFELYLKKESLLKTVAELDRRGWHTKRWTSRKGIVHGGVPFNKCRVRNLLSNVAYIGKVRHYEHVYEGEHDAIIDAAVFDRVQNLLRENARTGGTHARNKHGALLKGLLYCGPCGLAMGHTYTKKNNSTMYRYYICGQAQKRGWHSCPSRSLPAPEIERFVVERIRCIGRDASLLSETLAQAREQEESQIREFEQECRAAEREQKRLSRDIRSVVRDADADPHAAARLVDLQDQQRNEELRYTQNHQRLEMARSRIVTREDMETAMAAFDPVWDALCPREQARIMHLLIRRVEYDGGKGTVSITFRPDGIKTLTKGGVPA

SEQ ID NO: 6239 - protein, 539 aa, unidentified
  source 1..539: note = uncultivated organism
MERTETICPTKVAAYIRWSTDDQTDGTTLEVQRESCMHYIKAQGWQFSDGLCFIDDGYSGGSLDRPAITRLREAVREGRVSCIVVYKLDRLSRSVLDTVNLVLEEWDGKCHVKSTREPIDTTTPAGKMFFYMLVSYAEWERSVIRERTLSGKKKRAEQGKNPGMKFPFGYCRGDKVGEYAIDEAQAAVVRRVFRDYEAGKGLLTIANELNDDGTASKFGTPWRATSIQYMLRNEAYKGVLVFGSRIDVKDKTTGKRKVVTLSEPRHARVERALPAIIDAELWERVQRLMKQRALAPRRNLAGDYLLSGIARCRCGSPLVGNLIDGKYRFYACAARRNQGAALCNAATLHADHVEQKIIDAVKAHYSQSSEDGYVTSVLADLRHQLQIAEAAVEQWTGKADELNRRMARLHRDYDAGELTGRIYSERVEATQAELAEVKEGLLLAQAQVSDLRQRLDSGETIRGEFRQLVNTVSTWESLSGEEQKQVLRHVVESLTVWCVSKERDPRNRRKFLHVVDADLVLRKISEDFVVMPLATVSVH

SEQ ID NO: 6240 - protein, 652 aa, unidentified
  source 1..652: note = uncultivated organism
MDRTLLAPLRLSHFRDSSLNPAGQRARITDYAEDNEDHVIFVDVDMDVSGAMPIRERPGLGPWLAPDKIGQIDGFLADEMDRLSRDMLDYLQFARDMAALGKIIIDVSDGTDTSTERGRQALEDRILAAQREREKIATRRRKAAERLSDEGRWGGGTPGYGYSPRCICHGERRCPEPPDRQQGWWRVQDPEEAPIAKWMVQQRIAGRGFSAIADELNERGIPAPRGGKWHATTVSKILTSPLLLGHVVVLKGETGVKGTPGYKKGQVVATRRGKDGQPVMFTDEPLIDQMTWDELQEAIRAGSRGRGQAQSRHMLYRVLFCRSCSPRPFEPETAVRMYGSRRHTTWHEVRRESVQFASQDQLAALGAFILEQRKRASLSLRQLADLTTLSDSSLNKIERGLQRPSVRALRLISGAFDMTVEMLLAEVSPDLELEPERPAEREHPAYYTCKSCGLNIRLDRIEPLIEALVLHEAGGRVLLEKRVVHGDDHAADIARLERAAERRRELLADDPGDEDMKASLAKTEAQIAALRSRAHEPDSFEWREAQSGIKVADHWAALDTAGRAKFLRDWEVTCLADGQGAETRLGWLELYSDAFRLSDSRLCPAALPALITHSQEWQRVPGAVLPSRVAASPSRRPRKITKPACVAASSPN

SEQ ID NO: 6241 - protein, 639 aa, unidentified
  source 1..639: note = uncultivated organism
MSESSEAKIKRCVIYTRKSTDKGLEEEFNSLDAQRESAENFIKSQKHNGWRLLPVHYDDGGYSGGNTERPALKRLMEDIKAGGIDILVIYKMDRLSRSLLDFMNLAEFFEKHNVSFVSVTQDINTSTSSGRMMLNILMAFGQYEREIIGERILDSVAGKKRRGKYCGGGPVLGYDVDDKKLVINPKEAKVIREIFKLYAKLGSGREVARIMNEKGARTKSWTSQKGKFHPGAKLTSKALYRILSNPLYIGMVPHKEKTYPGEQDAIIDKPLWDQVQDLLQENRPLKPGAKRNPIDSPFKGLMVCGYCGGAFGITYTKKKNRRYMYYICIKDNNRAEHECPLRRFAAGDIDKIILRQLNYLFKNPAILMKLFELLREREEEQSKELLERQAELEKAQQVIRDQLQSGGDIITLREEFNKLNQELDGVKSELNSLKEIYSTRDLAETCSSIEAVWEELFPVERYKLAHLLINKITLYKDRIVMDIKHHGLKSMIRDLKSEPEITAVTPVGQDTIQLTIPMLVKRWNGRKLIMMPDELENDEPEKDESNAVAKKLAQAYRLMAMIEAGKYSTRTRLAEDLGLDQSMVVKTLNLLNLSPKIQKMIVENKMPDGMTLERLYGNIPIEWEEQEKIFGLKQEVQHA

SEQ ID NO: 6242 - protein, 544 aa, unidentified
  source 1..544: note = uncultivated organism
MNEPKLWDATLYLRLSREDGDKEESNSISGQRDLIRDYMSHHPELREYAVRIDDGFSGSTFQRPAFQEMLADIKAGKTNCVIVKDLSRFGRNYLDAGEYIEKIFPFLGVRFIAINDNYDSNRERTSSDDLMIPFKNLINEAYCRDISVKIRSQLEIKRKRGEYLGSFAAYGYMKSETDKNKLVIDEYAADVVRDIFRWKLEGISPQGIADRLNSNGILSPMEYKRSLGMKYTTSFKANAKAQWSAGSIIRLLKNPIYIGVLTQGKETTPSYKVHKRISKAKDAWTVIPDAHEPIIDKADFDRVQKVLSLDTRTCKDDTVVQMFSGMVFCGDCGASMVRKAIPGKDKKYVYYDCSENKAHKNVCSSHSIRDAELEKLVLLSTQQHIQAVIDLQSILEITDTAPLRTAEAQKVQRQLEKKQSELERYNRLLMSLYESLTDGIITREEYKHLKESYSNQSSEAEKQLLALQEILEDIRKHGSSNQSWMDEIKAHHNITSLDRETVVTLIDRILVYEDRRVEIIFHWQDEFDWQTDIVRRTQIEQEAV

SEQ ID NO: 6243 - protein, 527 aa, unidentified
  source 1..527: note = uncultivated organism
MNKPKIRSQVTSVPSLRCAIYTRKSTEDGLEQEFNSLDAQRESGEAYIKSQAHEGWECLPQDYDDGGFTGGNMERPALRRLIADIEAGQVDCVVVYKVDRLSRSLLDFSKLLEVFERHKVAFVSVTQQFNTTNSMGRLMLNVLLSFAQFEREIISERTRDKIAAARRKGKWSGGMPLLGYDVDPKGSKLVVNQSEATQVRTIFELYLEHQSMIETVKELDKRGWKNKRWVTKKGKVRGGLAFSKTSIFKLLTNVTYVGQLRYKDEVNKGEHEAIVTQDLWQGVQSQLQKNGRAGGVATRNQFGALLKGIIRCVPCDCAMIPSHSTRKGAKRYRYYVCNTAQKRGWHNCPSKSIPAPDIERFVVEKIRSVGKDACFVKEIVEKSRTQAQVQIEQFNAELNGLDRDLVKWNNEIRRLVLQSQLEDFKSPAVDRLAELQDRLGHGQRRATELREQTMIMQQRLIEESDVTAAMDAFDPVWDSMTLREQIRIVHLLVEKVDYDGTNGKVSITFHQNGIKKLAQEICPETAA

SEQ ID NO: 6244 - protein, 537 aa, unidentified
  source 1..537: note = uncultivated organism
MTQTYNAGIYCRLSRDDERIGESVSIENQRVLLTRYVQEQGWRLVQTYVDDGVSGTTFDRPGLHAMISDVRAGKINLVIVKDLSRFGRDYIETGKFIDVIFPSLNCRFIALNDGVDTLQHNNEMLAIFKNVMNDFYARDTSSKIKAVRQSTCKTGKYIGCYAPYGYIKDPADTHHFIIDEPAAAIVRKVFSLRLTGIGYRAIAQKLNEEGIIPPRDYWYQLLGRSNPRRKNGFWNTETVKKIVRNEVYLGHMVQNKRGTVSYKDHKQIDKPKDQWIRVENTHEPIIDQDTWNLAVEIDQMHTHPRDRSGEGVSTFGGLLFCMDCGYALRHQTEHHKRKNGTVAAYSSYVCGKYSMSGRTACSTHNIYETALMKVVLADIRMKAEMVSINEKTVVEKITEKMQSLSSQETAAVKKTAKALAKRLAELEKLISATYEDKVKGAIPEAVCVELLNKYQAERTEKANQLSALEQQMEDTRAVENDAKAWADLIRQYHSVESLDRETILRLINKIEIGAVHIEDGQKERDIRIHYKFVGYIG

SEQ ID NO: 6245 - protein, 542 aa, unidentified
  source 1..542: note = uncultivated organism
MSRARNGAARPGVEVRRCAIYTRKSTAMGLEQEFNSLDAQRECCEQYIAARAHEGWQLVAERYDDGGFTGANIERPAFQRLLADADAGKIDVVVVYKVDRLSRSLLDFAKVMDRFNKADVAFVSVTQNFSTADAMGRLTLNMLMSFSEFEREMIAERTRDKIGAARRRGKWTGGPVPLGYDVVDKKLVVNDLEAVVVREAFDLYLEHRSALTVTQLFNDGGRMTKRHRAQNGNVRKARPWTKDAVLRLLRNPIYAGLMPSGEGLHQAEHDAIVPRETWERAQAILGNGTRTRKRPRNPDYLLRGLLRCACCDQALTPASTRKNGKAYRYYRSIVRDKKGRGDCRARPLPAEAIEEAVLAELRKATADGTLADDVLARVQAGAESRRRTLAKERAALPQAIAELAAEGQALVAKLRETTGPASRLLDERLDEVGAELARREQRLAEVEHQLESLHEMVAEAEWVASVLREFDGIWSVMTPTNRYRLVHALVAQVVVDDASGKARIALADIGVDVGAAPEADEDGPGAPTPLAAAEPLAAEVSP

SEQ ID NO: 6246 - protein, 608 aa, unidentified
  source 1..608: note = uncultivated organism
MEEKKIAGIYIRVSTEDQAREGFSLGEQKEKLIDLCKFKGYEVYEVYEDAGISAKDIKHRPAFQKMLNDIKEGKINYIVSYKLDRITRSVRDLEELISKLEKHNCYLVCDRDDVNTSTANGRFFVRMLTVLSQLEIEITSERTKFGLNGAIKSGHLPGTLPFGYKKNGNKKTVINELEKDIVIKIFNMYLEGKSFQQIAKILTDEEIVKGKPWRDTTIDKIINNRIYMGDYEQYKRISKKINQEPVIYMNVVDPIISRTVWEECQRQKEINQRSYTRDRVYVFFQKLKCPKCGRLMKCKGSGGKKKKYMYYNCEHCHYNIREDLVEAKLMDFIFDLIEYDEAVKEFFLPLLADKKDSNSVEIIDKEINDLLKQKDRIKKAYISGVVELEDFKLDLKDIDDKLEILKDKKLKNIDISNFNFSPQKVMADRDIKRCELEDLGMLNKYLKSKWDNQSKEEKQEFISKYIESVTLEKENNKLKIKQILFRSSYMEQLNKLGALGIVDFKIPITINNELTHSRISIGLTREQLKDYIDRLSEKFETKYYEVYRKLNNKNYDEISFSGELQKDEKIIKYIPIRENISPLKEKDDINLGCITHIVKTFDDTETSN

SEQ ID NO: 6247 - protein, 577 aa, unidentified
  source 1..577: note = uncultivated organism
MENTSQSKIAIYSRKSKFTGKGESIENQIELCKNYIQTMYGDSALADIVIYEDEGFSGGNLERPKFKEMMATARAKNLRAVVCYRLDRISRNIGDFASLIEEFGNLGVSFISIKEQFDTSSPMGRAMMYIASVFSQLERETIAERIRDNMHELAKTGRWLGGQTPTGYASESVESVTIDGKTKKAYKLTLLPNEASVVSLIFDKFFETRSLTKTETFLINDGFKSKKGNYFSRFTLKLILQNPVYMIADEEAYNHLTENEASLFSDKADFDSVHGVMAYNRTVQKPGKAMKFLPMQDWIVSVGKHKGLVPGKRWIETQNILEGNRSSSYRNPRSNVALLSSLLFCAHCGDYMRPKLTTRKNPNGGYTYSYRCVMKDRSLRQACNNKNINGNLLDQAIIDEIKKIAEEGSDFFRQYKEAKRTFSTNQEDYEKNVQRLKKSYDENEKAIGTLIITLSKASGSTAEQYVIQQIDSLHKANEQLKVQIEEIESLVKIHTLSSDSFGMIKNLLTSFKNTIDQMSIEEKRAAIRSVIRKIKWDSETIHIYFFGSEGEVDLKTLAGGADSPSNKLPMDCGLNED

SEQ ID NO: 6248 - protein, 533 aa, unidentified
  source 1..533: note = uncultivated organism
MLNLPSFNDLKTISASIPVQAPRQRTFSVISSAPEIRKTKVAGYARVSTAHEDQKSSIAIQQRHFLSQAALHNEWQFVGIYCDIVSGTKKEKRPELQRLLQDCKEGKVNLVLTKSISRFARNTTDLLEMVRSLSALGAGIVFDREHIDTRMMDSEFLLTLLASLAEDESHTISSNCRWGIQKRFRDGTYRMSTAPYGYDVRDGNLVINDSEAAVVREIFDAYRNGASMRSIARNLNDRGIPTKRAGEIQKNNARVSGKWNSSGIGDILDSLTYTGDMILQKTFKDQKFNTRKNEGKYPLFYAEEHHPPIIDHSTFEDVQQIRDRKRVQRKGNARYVFTGVLTCGCCGSALTRQKVKSGNVFWICAQHRQKADLCPLPPIPEKAVQGAFVSLMSALHKNDAPIQAYLALAISEWRQAQGEKLTSLERKREEGQQKLKNLEFLRGQTHEYQEKQNKLRLELMEIVAELDTIKEKRITRIEELLQSVHDWNCSSYFNPDTFQRFVDGVTVEGREDFIIHFRCGLSLPKEAKKVKTA

SEQ ID NO: 6249 - protein, 551 aa, unidentified
  source 1..551: note = uncultivated organism
MAADRSRRRRCAIYTRKSSEEGLAQDFNSLDAQREACEAYIRSQAGEGWQLVRTRYDDGGYSGGTLKRPAVVQLLADIQAGKIDTVVVYKVDRLTRSLADFAKIVEVLDAHEVSFVSVTQQFNTTTSMGRLTLNMLLTFSQFEREVTGERIRDKIAASKQKGLWMGGHVPLGYEPDGRTLVIVEAEAETVRTLFRLYLELGTVRSVKEEADRQGLTTKVRPGASRPMRGGRPLSLGHIYYLLSNPLYVGRVPHNGESYEGQHPAIVDPETWDTAQRRLAAQTPARQVQRSTRSRSLLQGKLFDEAGGLLTPSHTVKSGRRYRYYLSRNERPTPTGSVGEGRSQHLRLPAREIERLVEDAVVALFASPGELVQLARESGISQSRVSKLVEHVRGWRGQPLDVVKRVDLRAQEMTVQIDLSPHLGSEGAVVHHVVPVHFRRRGGDVRLVLHGSQEGSSDARADPAFVKAMVRGRKWFDDLASGRASSLVEIAKAEGVTDRYVGHLLPLAFLAPDIVASVLSGTQPVDLTAEALTKRISLPLAWASQRKRLGFD

SEQ ID NO: 6250 - protein, 563 aa, unidentified
  source 1..563: note = uncultivated organism
MRVNCLYRVSSKQQLHEDDIPVQRAECMEFISRQKGWEFQKEYLEKAVSGYKTSVNNRDVLLEILKDAKEKKFDILLVYMSDRLGRKEDETPAYVANLNNLGIEVWTVKEGQLKTAEHIDKLLNYIRFWQAEGESRKTGMRVKSAQETMAKQGKFIGGKAPYGYDLVRSGEISNKGRALMKYQINNEQAEVVRKIFEYAVNYGYGAFKIAKTLNEEGIKPINDAWKACTINQILQNPVYKGYIAYNRRQRSESGGTFERLPMENWIVAEEQNPELVIVSEKIWNKAIEIREKHKSDLKKARDSKNGTYSTTTKGTLALMGIIYCGYCGNKLTNGSRYDYWTTKDGERKKKIVGKYRCTNKANATMLCNGKTLYRADEIEPLVYKAITEYLNTYKELEVYDEIIEIQEKEREKLKKKLHSINSEISTNRKDIRTLEENIPKALRGDSPISAEKLSSLIKDKEQKIQLLQNDYDLVNNEYEAMKITKNDLKAINSIVYNWSNLFMDLTIPEKKVVLGKLIERIDVREEDIRIKFKITLEDYLGDSSAEYIPQLLPRKTIDFPLPE

SEQ ID NO: 6251 - protein, 531 aa, unidentified
  source 1..531: note = uncultivated organism
MRGERSLRENGTGLAQRAGIRCGIYTRKSTEEGLEQAFNTLDAQREAAESFINSQRQEGWTASPQRYDDGGYTGANMDRPALKRLLADVQAGTINTVVVYKVDRLSRSLLDFARIMEILDKHGATFVSVTQQFNTTSSMGRLTLNVLLSFAQFEREMISERTRDKMSAARRKGKWVGGNPVMGYDVVPQGGSLVVNREEAQRVREIFALYLELGSLIPLVEELDRRGWRMKSWTTREGRKAGGKAIAKNSLYNLLTNMIYVGKVDYGGHVYEGEHDRIVDDDTWNKVQGALNRNGRRGGRNIGNKYAALLKGLVRCGTCDVGMLHTYVNKKNKLYRYYVCVKARQRGWAQCETRSVSAPAIESAVVEQLRGIGRNPSMVREVLRQLAEHRGNESAAIGREKAGIETELRNIAQEMKENVSVAGTAGPAAALATRRLAELQDRVAVLSSQLAERRQQLAAIEAECVDAKDVEAAMRDFDPLWEQLSTWEQERFIRALVAQVRYDGKTGTVTLGFRSRGLKDLCNGTSAIREA

SEQ ID NO: 6252 - protein, 526 aa, unidentified
  source 1..526: note = uncultivated organism
MKITEITAEKKDDGIKRLAAYCRVSSDSADQLHSFAAQLRYYSNYEKQHNDVKLVGIYADEGLSGTSMKKRAEMNRLIQDCEQGKIDCIIVKSISRFARNTQDLLQTLRLLKTYGVTVFFEEQGIDTAQLNSELFLTFPGMIAQQESESISGNMRWSYKKRMESGEFNCCAPAYGFDLINGELVVNETEAEVVRRIFDMYLHGAGKERIADALNDENVSTKHGTKKWHHTAIHYILNNERYMGDALLQKRYTTETLPYRQVPNNGEKPQYYIENSNPQIISKDTYHAAQRLQQAKTSHNTDAAENILSQRMFCPICARSYRRLYSGNNKYWVSVLKRKTECSCSAYKIYEEAVHEAFSILTYKLKANSELLIGRLIKQLEQLQKRYGTGGNRIEEIDKEIAQLSAQNHILAKLNNNGILGAAEYSEQSSTIENKIYSLRIERRKKLSESQEDEMLDELKTLKQIIEGYSPKPVFDESLFDLIVKKIEIIDNATLRFHLIGNMELTETINLKVRCKQHDKKDDAVRV

SEQ ID NO: 6253 - protein, 610 aa, unidentified
  source 1..610: note = uncultivated organism
MNEEKKIAGIYIRVSTEDQAREGFSLGEQEEKLKALCTYKGYEIYKVYCDAGISAKDMEHRPKFQEMLKDMQDKKINYIVAYKLDRVTRSVRDLEELITLLEQNNCYLVCDRDDVNTSTANGRFFVRMLTVLSQLEIEIVSERTKFGMVGAIKSGHIPGIKPLGYMNDSTRKTIIDPSTAPIIKRVFDLYLQGKTYLQIANIYNKENVLNKKWRDCYIEKIINNKIYMGDWEQYKSIGKKEGLEPIVYTDVVDPIVPRYIWYECQAQKIINQRTYTRDRVYTFFQKLKCPKCGKIMKCKGSGGRKKNYVYYNCEDCHENIREAYVEEEFEKIVGQLLRFDNEYNELFLPLFADKETKFNKSDIEREIINLTRQKERIKKAYMSEIVELDDFKEELKIINEKLDILSKQLEKEKDLRNRNNFTPEKVMADRDIRRIFMQNGNDVSLFLTEWKTMTKEQKQEFVARYIESLTFEKDEKYHNGIHLIDLKLNTEKVNRLSELSLSQVPIKFETNGESVILNVSYPLKESQLKSYLKELKKSGPINFYIHPTFNYSLEDMPQEIVFDLNEDEKVLKLIPIIKDMDNKENISNKFKLGIVTSVLKTIGKDSKEIP

SEQ ID NO: 6254 - protein, 575 aa, unidentified
  source 1..575: note = uncultivated organism
MKIAALYARVSTGNQEKQETILSQVSEIKERIAKDGLMLGDNLSFGDEGWTGSVLARPELDRLRDAVKSKLFQVLYVYDLGRLSRDFLNQLILKKEIEDAGIKIVSLHDINNETPESGFAQNVMGLFHDYERIKIAERFRRGKLYKAKNGILFGWNAPYGYKYIKGDKKTIPGSFEVVKEEAEIVKMIFKWFVDDQITIRKVILRLFEQKILPRKNKKGYWSTSTLSRLLRDETYIGKTYFNKRVAVESINPRKKDGYRKIKKTSRKNRPPEEWCPISVPAIIDENIFIRAQQQLKTNSQFCMRNKVYEYLLSTLVKCTCGNTRAGEGVKSHLYYRCTDRVNRFPLPKECFVPGVSATILDTKVWNEIYNLLTDPKQIEKQYSRWNVRIATIQNNDDYIDVEKLKKELDEQKEQEERFVKAYGAKVISLEQLQSQLMEIKLKKSQITSKLTASRNNIPPAQKSIILPDLRQFCDTMKAEIEELDFKERQYVVRQLVDTVVTDGAIASVEGSIPLVIPQENTKNNYGQSSINRYRRFTKRWKINPFQRLTQKTGCQRCQLSILHHRAQCRNYRSPR

SEQ ID NO: 6255 - protein, 540 aa, unidentified
  source 1..540: note = uncultivated organism
MKEIRCAVYTRKSTDEGLDKVFNTLEAQREAGENYIKSQKHQGWVLIDKHYDDGGYSGGNMKRPALQDLLEDIKAGTVDMIVVYKIDRLTRSLVDFSKMIDVFDQHNCSFVSVTQNFNTSDSMGRLTLNMLLSFAQFEREIGSERVRDKQAASKKRGMWTGGVVPYGYQAINKKLEIKPDEGKAVKFMFETYVKYKSAVAVAKLMADNGYKVFRRDAVKRMLRNPLYMGKVKYNDEIYEGQHEAIVSAELFEEVQKIRETKSTSMRTCLYKRNEVGILRGLLTCGCCNTPMTPVSSQTRKERRFYYTSNRAKYYGYHTCSNGPIPVPVMDECILKLIGPLLTDISVLNALIKKVTEKKTAEIYKIMKDPDTVIQKLPERHKLLLVRLLVTGIMVQYDRLEINWSDFAMNLVPDNYKKKMTGNCMILDLPFVRKKGALILSLPSDIVQNVSYNSELIKALGNAFKYKKMLTQSKLSISELAFQLEKDPGYIGRILRLTCLAPDIIKSILYGTQPASFYLQRLLREDIPPIWEDQRKLYGFS

SEQ ID NO: 6256 - protein, 568 aa, unidentified
  source 1..568: note = uncultivated organism
MKVIAIYTRKSKASDKGESIQTQIKMCEEYIQRLYPEEETKIIYYDEGEGKSGGDSQRTKFRKLMSDAKKNVYNVLICYRLDRIARNVSAFSDLIEELSAHNISFISVKEQFDTTTPMGRAMMYIASVFAQLEREIGAERIKDNMRELAKTGRWLGGTTPTGYESEGYTTVTVKEVNQENEVERKKKKAFKLKKVESEGMLIEMLFEKYRSFQSLTMMETYLLNNDIKTKNNKRFTRFALLSIFENIVYAKNDKNMYNYLTEKGIEIYAKKEDFDGKHGMIAYNKTKQVKHKANQKNDMKDWIVSVGKHPGYISGKEWIEVQEIIARNSQKRYRRPRKNKSILSGILKCKCNSYMRPKLHSGRTYANGDDRFFYMCEMKELSRSHRCNVHNIDGNKLDLELIRQMKTWFAPNAKIVKEFQKISEAEPTEENNENQDLERLKKVYKNNEKSLNKYISKIIYVDAELIDEINKEVKRLKTENKKIQERIQELNAKNSTKTFTPTENEIARLALEVINNYFDTFTDLDVLKQREILRMFIESAVWDGETVEINLSNTKKNEFFYFPLGSNK

SEQ ID NO: 6257 - protein, 555 aa, unidentified
  source 1..555: note = uncultivated organism
MSQNKSGMVCRAGKYLRLSKEDGDLSSTIKLQSNSIENQSQYIDEFLLGKPEIRIEECYIDDGYSGVNFERPGFQRMLEDAKAGKIDCIIVKDLSRLGRNYIEAGKYIERIFPMLGIRFIAINDNYDSADEDNAANNMILPFKNLINDAYCRDISIKIRSHLEIKRKNGEFIGAFAVYGYRKGEDRHRLIIDDYAAGIVKEIFRMKIQGRSQQAIADELNRLGILSPADYKKEQGSSYKSYFQKNTRAMWTAVSVCRILKNEVYTGTLVQGKESTVNYKVKVRREKAPEEWCRVENAHDAIISRNDFEIVQSILKMDTRASVGQKEVEIFSGMAACADCGCSMVRKKVIKKKIPYFYYRCSGNKRDKDFCSNHDICADELHETVKKSLQAHVNFLAGLQKQVRERDTISGGGTPMDLVGSQAEKQEDDIRKYERMKVECYEDYKSGLLLKEEYVLIRREMDKRIEEAQKIIRALTEKKSRLSEEQTEAFQSFQKILNDAEGLLERSIVVRFIEKIYVYDHHRIEIVFRYRDEIERLANLVQEAQRQELHKLQEVG

SEQ ID NO: 6258 - protein, 565 aa, unidentified
  source 1..565: note = uncultivated organism
MADTPIKRCVIYTRKSSEEGLEQDYNSLHAQREACEAYVRSQAGEGWRPIKTAYDDGGFSGGSMERPALQRLLEDIRRNMIDVVVVYKVDRLTRSLADFARMVELFDAQKVSFVAVTQQFNTTTSMGRLTLNVLLSFAQFEREVIGERIRDKVAASKRKGIWMGGTSPIGYDACERRLIVNQDEARTVRHIFERYIELGGVRLLKEDLERRGIFSASRASKKGKLRGGKPFSRGALYNLLSNPIYIGEIRHRSERFPGQHEPIISREVWEHVQLQLSSRAVRAGEGRKTTAPASPLAGRLFDENSEPLYVQGSAKGQRRYRYYVSKGLVNGGADQSETGWRISAPQLEQTIAAAAAAILDDRAGIALAFEASNRDEQLPAVLKSAQVCAERLRSTTETASALAELTERVELRREGVNLSLRLPFPTLGSGNAEDRGRLVLNRFVPMAMKRRGVEQRIVLGGTAATTEVYQPLLKAVGRTRKWVGELMAGQIQSVDDLARRENLDGRSVRRLLGRGFLSPRIVEAITEGRQPPEMTVIALSRRLVLPVLWSAQEKLLRVSSGLLAE

SEQ ID NO: 6259 - protein, 568 aa, unidentified
  source 1..568: note = uncultivated organism
MRAIVYARVSTDAQERDGTSLETQIRACLDYAAAAGWSVVATVRDAASGFSLERPGMTRVRDGMRLGEFDVVLAYAVDRLSRHQNHIGVLFDEAEGWGVKFEFVTERFEDTAIGRFILAARAFTAEVEREKIAERTMRGKAERARAGKIPQATGKGIYGYRYNPATGRREVDLVQAAVVRRVFAEFCAGAGFSRIASDLNRDGIAAMAGGTWFPLTVRRLLLNETYTGRTVYRRTKVTFLRDPQTGKKRRHVLERDESEWIEVEDATPPIIDPPTWELACAMMADPARVKRGAQTEGDFRLRGHIRCIECGTPMVGQTLNRGRYRYYRCRRSYSGGFEGRCGAGYVRQDGLEAAVRDELARVLANPELILQQAGQHQEAAPAGQDPAELERRIADVAEQQQRLARLFVSGTLPEDALNAESKRLATERALLEADLAVLGADRPEPARRTPTFAEAVAAAGVLRAWLATAGEADYRLMLQALSVTVTAGQDHAVIAGVIPGLTGAPDRGQRPVLSSTGRTSASPRGRSPAPGCRFRPRGGRRPAPRGSSSPGQPARFPSRSARPAGTGC

SEQ ID NO: 6260 - protein, 530 aa, unidentified
  source 1..530: note = uncultivated organism
MEETKEVKPIRCAIYTRKSTTEGLDSDFTSLDNQRESSESYIKSQQHQGWVLLKETYNDGGFTGANTDRPALQKLLDDIRQKKIDCVVVYKVDRLSRSLSDFVKVLQFFEEQQITFVSITQHFNTNTSMGRLTLNILLSFAQFEREMISERVKDKMGAARKKGRWVGGLPGLGYEIDKPTKKLVINSGEATLVRRIFQLYLEKNSLLRIAQILNAEGLRTKVYPKRKNNSGGVLFRNTNIQLILRNPTYMGKIQYEGKLYQGLHEPIVTEEVFKKVQETLKVNCRVRGVSKNRKFPGLLTGLFRCAACKTSMCHSYARGRNKNFNYRYYVCLHAIKHDRKDCPTKSVVAIAVETKCMEFLIKLTRDKRLIDESWPTLPLEKQSAILKEIVKGIEYDGHTGKLWIELNSDLNKHEFELPLDQLKTRLPDTTGIAFANEPLIRKQLLLAHQIAAMLADGRARDLKQIAGWTGMNIFRLYQIVNLLNLCPKIQEDVLSAESGRLAKITERNIRHISNELDWQKQTALWQQSLA

SEQ ID NO: 6261 - protein, 1120 aa, unidentified
  source 1..1120: note = uncultivated organism
MAKKSVEVLWPSAKEETVEKKSEKIRVAAYCRLSRQSGDKRINSLENQLKYYTHHIRSHDEYKLVGLYYDGEISGVTIDDRPGFKRLLRHCDEGLIDLVLTKSISRFSRNAKDLLEVVDHLSDLGIPVIFEKENINSLERKNKFFLTALAAVSQDEIVNIAHNSTWGKNKRILSGSPIYRRQFGYEIIKADDESFPLIHQEEAEIIKEIYELFLEDMKINDIAKLLTDRGVKTISGHTIWSHTLIRNILENRSYIGEKITNQKISALSQKATFLQDSEKDMYLIEDAYPRMISNERFDKVQKKLMEEKAKKAPGTKISHSCSKRIHCGLCDVNYHKNRKKYHIEWVCSVKQKQTRLCDSPRLTDKKILLLMKEVIKERYDFKNPKVLKEMKGELEWVNKNDRFEFHRLSLLSKLQIAKEKLKQRPEDEAVVAEKEKVERTLIEFEHLATMIEEDRKYRDLAIEALRKAKSSEDFLERASIDVLRAWVMEIKIFSLEVYQVHWYDDIYTTVGNFENLEREMELKRERLINEELVLKPKKKRRDFLFVEEYEFNGAGGKDPPSPILRGENVQAVRVEEYSSINIIDRIRREIRESKFVGQPARKKLRIAVYARVSTDDPVQLGSLEAQMAYYTYVVLKNPDYRLVKVYFDEGVSGTKAENRAGFQQLVADCKKGKIDRVITKSISRFARNTVDCLEYVRELKSMGVSIMFEKEEIDTAEKDGEILLTVYSALAQEESRSIGENITWGRRKNVERGSVKLSRLPYGFDYHKDGSWVIDHEKALIINRIYDDYLSGKSMLRIAKDLTQDKIPSPKNNSAWGQTTVRKILNNPSYIGDVLYQKHYTSDTISGKRVMNNGELPMYYIEDNHDAIISKEKWNKVQDLIKTNLKTKHRNKPLSREEFYKSFQCGSCGCPVIHVQSLSGGEKKHYWRCRAATMKNHSEECSEKGIREENIEHTFMAMLQEMKNSKKLSEQVNEAIEEVRLKEHEEEELERLENEIEVYYQNLYDTVEDGKKHGEDTEAIKMITVYIMDIHDRIRRFEDRKEKVIDIREELKWIKKELLALEPFNPKKERVPFRRDIFTRLIKSGTFLADDVIEYKLSIGVSWTARDNRKQHWKLPMKTK

SEQ ID NO: 6262 - protein, 501 aa, unidentified
  source 1..501: note = uncultivated organism
MRVAIYVRVSTPGQVDEGYSLDGQLNSCNAYAVSQGWDIVITYVEEGESAKDLNRTEVKRMLEDAATGVFDVLLFYRLDRLTRSVRDLHKILDTFERLGIKFRSATEMYDTTSAMGRLFITMVAAMAEWERSNLAERVRFGKEQLVREGNWPGGPVPFGYEWDGEQMNIVPDEYTTLRELRRLYMAGIGLRNIAMELNNRNLLRRDGLMWNPVTVGYTLENPIYAGKIRFGSKMKNGKYEHRKKGKKADVIYADSGIPTIYSWEEYEDHMKIIQKKEKYGNPKSNNYWFTGVLRCGRCGSKLKGSTYTNVRKDGTKYEPTRLYKCYSREKGQGCNMPMLRQVVAEEMIMEYVESITVGREYTAAAREDLGLREQSYTSEIESIQRDLRTLSDRRRKWQYMFAEEMISESDFRSRKREDDEQERLLKEQLEHYKSLSVGSNPQAMDFLVDMKRNWDTSNDAERRDWMQTIFEGIVFDCEDETGVGAHRFKTLRFSITDVRYN

SEQ ID NO: 6263 - protein, 535 aa, unidentified
  source 1..535: note = uncultivated organism
MDKKINKEKTLIKCAIYTRVSTSEGLEQEFTSLDNQRESAESYIQSQKSEGWIALPECYNDGGFTGANTDRPALQKLIENIKAHRINCIVVYKVDRLSRSLLDFSQLLEFFDQNSVTFVSVTQHFNTNNSMGRLTLNILLSFAQFEREIISERTRDKMGAARKKGKWIGGCIPLGYNLDKENHKLLINPEEARIVQELFSLYLKEHSLLEVTKIANSKGYRTKIRKLTEGKQGGGVKFSSTSMEKILKSAYYAGKVKYQNELYPGEHERIINDETFMKVQNALHTNPAKFGTRKPIGKKLGLLSRILRCKACNSSMYLAHSVKHGVLRYSHYVCLNAQKRGYQECPTRLVNTGLMESKIMEFLRKLSDDQRLTPDTWESSPLSEKRIILKDLVKEIRYDGGTGILEIVLNSTQKTHAFNVSKAELKYHAVTPKDRLIQSEPQLCQNLLLAHQIQDLINKNKAKGIKEVSGWLNLSHVRMCQIMGMLFLCPEIQEQILLSRKEKIFDIPEYKVNEIAKELSWTKQKDVWKNLMERI

SEQ ID NO: 6264 - protein, 519 aa, unidentified
  source 1..519: note = uncultivated organism
MKKITKIVKNSKDTVMKEKLRAAAYCRVSTDSEEQLVSLETQKLHYEAYIKANPKWEFSGIYYDKGISGTKKEKRSELLRLISDCEQKKIDFIVTKSISRFARNTTDCLELVRKLVDLGVYIYFEKENINTQSMESELMLSILSGLAENESLSIAENNRWSVQRRFQNGTYKISYPPYGYDYINGEMAVNKEQAEVVKFIFKETLAGKGAGKIADELNEKGIKPKRGNKWASTTIRGMLSNEKYIGDAILQKTYTDDNFNRHANYGEKDQYYIQNHHEAIISREDFETVDKLINQRGKEKGIVKGSGKYQNRYPFSGKLKCSQCGSTFKRRIHTNGNKKYVAWCCQKHITQADECSMKFIREDNLERAFITMMNKLIFGRKFILKPLLKGLRDMRKADSISRISELEKLIEKNTEQKEMLIKLMAKGYLEPALFNKENNELEIEAESYRDEIESLNFVMNSEISKTHEVRELLKFTNKAQMLTTFDGEIFESFANQVFVYSKEEVGFQMKCGITLREVL

SEQ ID NO: 6265 - protein, 588 aa, unidentified
  source 1..588: note = uncultivated organism
MEERKRKKAIYARKSKYTGKGESIENQIDTCKHYLKTYFDINITDDDIIVYNDEGYTGANTERPHFKEMMKAIKNNEIDTIICYRLDRISRNVLDFANLYEDWQEHDVNFISVSERFDTTTPMGKAMLFIAITFAQLERDTIAERIRDNMYKLAKTGRWLGGNVPLGFVSEKMEKLNINDKKTTLYKLAPVDDEIDIIKTIFQKFLEFKSQTQVESYLIQNDYKTKRNCDFSRWGVKNILRNPVYAVADQDVLNYFLDNEVEVYNEHDQFNGTHGIIGYCKTEKTKTGRVKYKDLQDWIVAIGEHKGIISGKDWVEAQNILKANEDKNYRKPIKNDAILVGVLRCSHCKSLMRAKLKQNLTPNGKLRFDYICGLKMKSKGDKCSCKNINGNEADDLVIQGMKQLAQPTSEFYQAIKSIASDDDYNSKNQVDEINILEKNYAKNETDINNLINRLALVDDDILDEVQAKIKELKQKNKKILANIQELKKAQPTNQVIDDQETAKVVFDILNNYIDKFDELDIISKRNLIKLFVGNIETDGKNLYMDLIGSRNHTITTKPQLFNDDNNDNQEGLSATHNGQIVLLSDSGE

SEQ ID NO: 6266 - protein, 555 aa, unidentified
  source 1..555: note = uncultivated organism
MKKVIAIYARKSKATDKGESLQIQIEKCKQLAQYKFADFDLEFILYEEKEGRTGANLEREKYQEMMKKITSGYGRVDILLVYKLDRLTRSVQDFTEIYNKLQRYGTEFISVKEDFDTTTPMGRAMITITVVFAQLEREVIAERIQDSMIELAKTGRWLGGKAPLGYESAKKYYQNQSGATKTKHYLTILEEEAEVVRKIYELYLYYGSLTKVETYFINNRYRTRKEQDFRRYSLRFILTNPVYCTADQMIYQYLRKEGYGVYGNKEEYDGKKGLMAYNKTFGGKEKEQGIAGEKTRWNPIKEWIIAVGEHEGIIISEDWIKVQELIKENQKKSFRSSPTTEALLSGLIRCQCGHFMRPKTTGNLLGDGEKAFYYLCEMKERSKGCRCNMKNIPGNWLDRKIEDYIGHIGEKITPRYEKCIEKTTILATETSRDENLKKIREENLKFMENLRKGILMAKDERIIMDFVNKLEEYQRENVEIENELQQYVDGTEESYHNLYQRLVKFDHILWNELYYEQKKYGIKNLIEKIQWDGRSVKIYLSGSNTAKLDVAQMNC

SEQ ID NO: 6267 - protein, 536 aa, unidentified
  source 1..536: note = uncultivated organism
MNTAILNFERSEIPHVRERVFTSIDQRQTDTLKLNVAGYARVSSDSTDQINSYIAQVRHYSKIIRENKEWEYVDIYADEGISGTSADKREDFQRMLEDCRKGKIDRILVKSVSRFARNFMECIAIIRELHMLGVSVYFAKENIDTAIAGDDLMLSLQSLWAQRESISISGNMRRGVRMKMKTGTFLPSSTPFGYTLDVESRTLEVDESQAEVVRRIYTAYLSGQGMQDIAEELNRDHVPKRFGKEKWHTSTIFYILTNISYTGDAVWQKNYTKDSLPFKQVKNRGEKTKYYVQNDHPPILSHEVYKQVQCLIEKRREKHAGSTPKEYLLSGKVMCGDCGRIHRRKVTSGKVYWVCRQHDYGKVHCTVPQIPEAEIYNALLRMWNKLRHYRQDIIGSMIEQMQLVAERRFQRNDRLRQVNSELVSLSEQAHVLKRLNAKGYMEPALCFEQMRELNDKVKDLRILKTSLMGQDQIGAKIAEFEALYAALDAGPDWMEVIDEELIGEILDKITILSPEQISIRLVCGLELTETIERAAR

SEQ ID NO: 6268 - protein, 564 aa, unidentified
  source 1..564: note = uncultivated organism
MKRIIDQIYRVAIYLHLSKDDGDFSFSDGGKTESNSIQNQRELLHAYLAKHPEMELYGEYKDDGRTGTNFDRPDFQRMMEDVRKGAINCIIVKDLSRFGRDYIECGKYIEKIFPQLGVRFISVNDGYDTAASSSTDSLVIPFKNLINDSYSRDISIKVRTNLEVKRRQGEFISNFAVYGYCKDPADKNHLIVDEYAADVVQNIFKWKIEGLSPNSIAVRLNKLGILSPMEYKRSHGSRYSTKFKKNTIAEWSHVAVRRILQNEVYTGVLVQGKRTTPNYKTKKFVYRNEDEWVRVEGTHEAIISRPQFDLVQKLLLEDTRAGAEDTAVHPYCGRIFCADCGAPAVRKTVRSGDRQYVYYVCSANKSNREACSKHSIREDVLNSAVLATIRKQIELALDMDRALQDIEKLSWERFELRKLDANIELQNETIQKNNNLRLGVYEDLQNGILTRDEFISMKLEFASRIAEAQKVIEQLTHRKSEIQHGLSKQQSWLAQFREYENISEVTRSILVSLVERIKVFENSEIEVVFRHKDQFTDILTFLEAQKTHTHSESKVIPMPRLEVV

SEQ ID NO: 6269 - protein, 552 aa, unidentified
  source 1..552: note = uncultivated organism
MCKAETKQQLLGKEVIYMSFNTTGIQRKNNNAALYMRLSKEDVDSFESASIENQRKILRAYARDNGIDIYDEYIDDGCTGTNMERPELNRMKADIENGKIGVVITKDFSRLGRNSGQVMTMLDDYFVKHHVQYIAVSEGIDTMCDGAVGIITPVLSFTNEMYAGDISRKIRSSLKIKMKNGEYIGAFPPYGYKKDFEDKNRLVIDRDSSMVVKQIFDYAADGHSPKQIAEILNSKKILTPSLYRYKVNTHLSKNAFNRSDSWTAGTIGKILRNEVYLGHTLQGKTVKPSFKSKKCYSVPKDDWIKIENTHEAIISEETWEIVRKKMQSRAQKREKGFINIFSGIAKCADCGKNMSSSPTRKKGARANLNCGGYKLGGTKKCTNHAIDYDVLYNTVSIALREQISFTEEERKQILDEMMKSVNTNKVKSEKAQKKLDTVENKLAQLFDSKYSGEIDNTTFEKLHMQYEREKAQLEEIVCRQEKTETVKNDVSEFKSQYERFSKLILEYENLPNLTPEILFKLIERIDVHQGKYINGVKHQQIDIYFKFRCNTK

SEQ ID NO: 6270 - protein, 541 aa, unidentified
  source 1..541: note = uncultivated organism
MDESRLAVPCDSPARVRCAIYTRKSTEEGLEQEFNSLHAQREAAEAYIHSQKQLGWTAVDTPFDDGGFSGGNLERPALQKLLQQIEARQIDCVLVYKVDRLSRSLLDFARLMERFEQSSVSFVSVTQQFNSTTSLGRLTLNILLSFAQFERELISERTRDKMSAARRKGKWVGGTPVLGYDVHPAGGRLIVNAAEAEQVQEIFDLYRRHRSLAVLAAELNQRGWTSKTWQSRQGVRHAGRPFTKLSLRDLLSNAIYTGKVQSQGERYPGEHPAIIDTAVWEEVHRDFREADRSPGVPHRPQEALLGGLVICQHCAQPMLATYSDQGRRRYRYYVCQTARQKGWKACPTKSVSASLLEDSIALQLRARLSVAEQRRSLPVDHSEWMQSQVEQIRYDGASGVVRVQLRSVTDSGVQESFQYAIPRRRGRALPSFPLRGAQDTLTRPPRLARLLALAHKLEGVVRSGRVQDYAELARLAQVSRARIGQIVMLGQLAPAIQERILFLSTEHAGQIAERELLHIARLPRWDHQCESFERLLSARAL

SEQ ID NO: 6271 - protein, 531 aa, unidentified
  source 1..531: note = uncultivated organism
MEKQEKKKINCAIYTRVSTTEGLSQEFTSLDNQRESAESYIQSQKSEGWVALPECYDDPGYTGANTERPAIQKLMTDIKEGKINCVVVYKVDRLSRSLLDFSQLLESFEQNNVTFVSVTQAFNTNTSMGRLTLNILLSFAQFEREIISERTRDKMAASKKRGKWVGGRPPLGYDIDKVNRKLVINSKEAEIVKEIFDLYLEKRSLLSVAVALNEKNRTTKSHATLEGNKSGGVKFKSTSIQSIVKNPFYIGKVHHAGQLYQGEQERIISDEIFQKAQEILTNNRRERKVAGVVTNIGLLNSILRCKACDSTMYYIYSKKGTNKYHYYLCMNAQKRGYKSCPMRLVSAQAVENKFMEFLRTITKDPRIEAKVWEVLTLEERIPILKSIAKVANYDAINGILEIVLHNCEKSRQFAVKLTELKHIPYHRQQAEINKEPLVRQNLILAHQINQVATERNCTLKEIASWIGITHARICHIANMLLISPRIQEEILLSDDKALSSIPEYKLRDITKELDWNRQQEIWNRLLKSQQN

SEQ ID NO: 6272 - protein, 540 aa, unidentified
  source 1..540: note = uncultivated organism
MIVAFYARVSTTKQAEKDLSIPDQLRQMKEWSKARHYQVAAEYVEPGASATDDRRPVFQQMIADACMSPPPFDAIIIHSLSRFFRDMVEFALYERRLKKHGVIVLSITQQTSDDPAGEMARRIFSLFDEYQSKENAKHTLRAMKENARQGYFNGSTPPYGFRAAELEIMGNKGKKKRLEVDPSEAAIVNTIYQLYLDGHEGRVLGVKGIAAYLNNRGFTMRGGKWRKTIISKIIASRIYLGEYVFNKRDSRNQRIKPESEWITITLPPIVDADTFQRVEQRRSERDSSNTPPRVVNSPTLLTGLLKCGVCGYPMTIATGKGGRYRYYKCTSKINIVGKKECENSNVRMEILDRLVLQAVAEKVFTPKRVEMMIEGLKVNLKDAHPDHNEQIRQLSKELEDIKQQTDKLFEAVEKGFLPLNASLHERVHKHEARRQEVLMELARLRHQKEMPIARLSKKNIAAFCVALKEMLLDRTSHFGKEYMNLLLDEIRVIKNEVHLQGSYAALASALSIGSNKGFNKVPSFDPYWLLSADSNHGPDG

SEQ ID NO: 6273 - protein, 523 aa, unidentified
  source 1..523: note = uncultivated organism
MTGQVYIAAAYCRLSRDDGGLESVSIETQKKIIADYCKSNGIMIYDYYCDDGFTGTNFDRPHFQKMIRDIEEKKVNTVIVKDLSRMGRDSAEVSNWVDKRFFECGIRFIALGDNIDSGIAEYDSFYFAVRNVFNEMYPLDCSKKTKMALTTRAKNGQFVGSKAPYGYKKSETDKHILEIDENVSDNVKLIFKLASENNYGFNKIARVLSEIRIPTPKEYAEKKENPSCDWNLTSVKKILEDEVYIGNLTYGRRHKVSFKSKKIIKQSKDKWIVTENTHPAIISREEWEKAHNNLKSRKRTRQCGEQSIFAGLVYCDTCGYALSLSPSKTQDDFYCCNTYKKKGKNRCSIHYIKYSDLCDIVLKDIQKQIKLFTKDENKYAELLKSRVEENSSETIDKALEFVKKAESEIEKTDTIITKLYEDRVTGKLPEETFTMILTKQNAKKIELYKELAKAKEKYERAKESQKNIEYFLDIIRSVKKVTLSAELLNSLIDRIEISDKYVVDGKTRQDVKIKYKFIYTQLL

SEQ ID NO: 6274 - protein, 531 aa, unidentified
  source 1..531: note = uncultivated organism
MKIAIYSRKSKFTGKGDSIGNQIDRCKDYINFIFMEDKDIKIEIFEDEGYSGKNTDRPAFKKMMHMIKLKELDAVIVYQLNRLGRKVKDILETIDIFKEYKCALHSVTEKIDTSSPMGTMFITILASISQFERDDLIQRITDNMYLLAREGRWLGGQAPLGFNHVRESFIDGHGKTRYYSSLVINEEEIDKVIQMFNLYLEFESVSKVHKYLLKNKVRGKKGGYINKSSIMSVLVNPTYAMCNEDIAEFLEEQGFIVTKQEMGKGVLTYCKRTNDKTRNNPKLAATSQHDGVIPAEKWIKVQELISKNRFNKPNRGNSNVALLSGILHCKCGAVMNVVKACQLKNGTRSYYYACSMKIDSSNTICNMKNINGEIIDKRIVEEVVGYDSSKVIQELDKILKNDYFINNNTEVDEINSTIQQLKNKKGNMFLQLQTLDSNLDKEVILEYHQIIRDINFQIKELEESLNSVIQKNATIINEEIDIEGIRNKINNFQSTFDILNHEDKKKVLRNIFQEIVWDSICNTISITYTYY

SEQ ID NO: 6275 - protein, 533 aa, unidentified
  source 1..533: note = uncultivated organism
MENSKSTKTALRAVLLLRVSTAKQVNGDDDCPLPVQQNKCTEMCKENGWIITEVVNESKSGFKNDMYDREAILKILALAEAKEFDVLVVFKQDRVGRRGNQTTEYIAKLISLGIRIFSATDGEIKLDSIDSEFLVTFKGLLAKNESENISIRVKEAMVYTVESGSYRGGAPMFGYKTEETGVITKKGRVQHRLVVNEDEAYYVRRLFAMTVNEGKGTTQLANYLNNNGLRTHKGALFQANNIMRILRNPLYTGHNDTTTAKAPYQEELRIIDDETFLRTQDILDQRSKKHAEERAVSLTNLGSALLSGNVFCAECGARIVENCSTSKHLTKSGDIHKYTTHRYICCNRAHGIKSENCQSAYLAAEIDEKINEMVKSILANIAGSPEEEAINKSYGARIKELTCLVKSAQTELKKLCEKKEKLTAEIANVLIGESSFTSEQLQTALEAVEKSISAAEEKLKDSKTRLDNLDSERKAVESGYTKLTTWVEEFDRASVERKKMIIAEMFPRVELSRGYNVKVTVNRAFKPYMEITN

SEQ ID NO: 6276 - protein, 656 aa, unidentified
  source 1..656: note = uncultivated organism
MKKIAIYSRKSKFTGKGDSIENQIEMCKDHIKKFITQDAEFSIYEDEGFSGGNLNRPQFKTLLEDIKERKIDLLICYRLDRISRNVADFSAILDLLQENKVDFISIKEQFDTSSPMGRAMIYIASVFAQLERETIAERIKDNMLEMAKNGKWTGGKIPFGFKSEKIVYIDDDSKKRQKSILKHNLKDIEIVESLYKKYLELGSLHKLEVYCHENNICSSTGKIFEKSTLKVILQNPIYVKANSTIIDYYESNGWTVYGDIDDNKSLLTYNKTESITKNGKITKGIKDKKDRFAAVSSIDGYLDPKLWLKVQLQFENNKDTFPRLGKTHNALLTGKLICGNCGHRMLIQHGRLSKKTNEKLLYYVCSLKKTSRKSLCDCRNAKVKDIDQLVLNTLKELDLYKDMIIDGLKINYKNISNKDIEITRLETLLKENNSKINVLVEKLSQDFDNVLNEVLLPKIYDLKKECDKINSDITRLKKEKLNSENNSLELSFLDTLLNQCKVIDELDYEKQKQIINALIDTIYYYPNNDGGDYKIKIKFIKSIEDLDLKNLNDVVKRQYEKLSFNSHRISSMNKTTVFNEIFNQKEKSILDIYNNETIGDKIKLLRIKSGLTYNQFAKKIGVSIMTIYRWEKGIRIPNNIHLDIIKQNFNISLDKN

SEQ ID NO: 6277 - protein, 511 aa, unidentified
  source 1..511: note = uncultivated organism
MREILRIDPLLGKTRAKTRVAAYCRVSSSSADQLNSYAHQINVYQTLISSRPQWELVEIFADEGITGTSAVKRPEFMRMIKMCEQKKIDLIVTKSVSRFARNVKEALEYVRRLKLIGVGVMFEKEGINTGSLADEMLLNTFAAIAQEESTSISQNLRLANKKRMADGDFRNAAEPYGFERIEGRLVPYSPEADVVREIYRCYLNGFSTGEIAKKLNERKVPTKKDCGKWSSYRIGYILANERNIGDSVYQKSFTTGFPFKRKKNRGEEDQYYSTETHEGIVDRETFHRVQMLLEKRREENARKTEITEYPFTGKIRCAKCGAILRRRVIRGRERWCCSAHVEGSAKCDAHYVQTDRLESGFITMINKLRFGSKVLENIEANYLKIIRLIKKTDEAERSYHKDIAELNGQLLMLDQLRGKGYLAQDVYQQKAKEIEKKIADLKSTRSVQSSSELDDNLKEIRRLKARLEELTDPMTSFDGRLFSEIVVSGTLSTDDELTLQFIGGLKFSERI

SEQ ID NO: 6278 - protein, 548 aa, unidentified
  source 1..548: note = uncultivated organism
MARKSRKHLEEQSASVVTSMKLWRVALYIRLSVEDKGDHGDSLETQRKIMEAFLALRPELKQVGIYTDNGSTGRNFDRPAFAQMMEDVEAGKIDCIIVKDLSRLGRNVIDTGYYIEKYFPTKGVRFIAINDQFDSEDDDNSCNRVTLPLKNMINEAYAFDISRKVRTQAHESMKAGEFIGARPPYGYLKAPDNCHKLIVDVETAPLVREIFQWAADGVPLNVIVTQLNERGVITPGTYAAQKGWIAPTSKLVGSGLWQTWTITKILNGEVYLGHMVQGKKTTVGHTQVNVQPEDWITVKNTHEPLVSEELFLQAKEMRQQLSTKWKDANKNPYSENVLRGKIFCAHCGKNMHRQRSHEKYFFHCISNDRIAKDFCVGNPRLQENDLFQMILSIILKEARVIIGNRMKIKRSDAKVEVKRKAMTEQLSKLRKQTTEKQKFLKGLYENFVLGILTPKEYTDMKSGYEAEIAALVAQAQAIEDNLKALNSELEQLFSLADKLEQLKEKPKLTAALVSELVERITVSDKNTINVAFRFQNAFEQVTEVLGDA

SEQ ID NO: 6279 - protein, 546 aa, unidentified
  source 1..546: note = uncultivated organism
MAKCAIYCRVSTDEQAEKGNVQSQIEYAKKYLELHGPENNIDDFELYIDEGISGTIPLADRPAGSKLIADANSNSFTILYMYRLDRLARSVKHVLDTYELLESKGIALKSMTEAFDTSSPTGKFFMTLLASIAALERDTIRERTQMGKDRNARAGKWVSGLAPFGYRAGDDGKLAIYDQEAETVRMIFDLYSQDMTMMKIARYLNARGTETPASSKGTKNKTGGKWHPASISKILSAEVYTGKYQYLHGSKGNRKNIEMDVPVIIDIEVFSGIQKKAKDNSDLYRGRKGRLYLLRGSVFCGHCGLSMSGSGANNSKNLYYRCPGTTDQGQGKKCTSRAIKAIELENAVWEDILEIVNHPDKFQKYFDEENEKNEERSIPITSELTGVEESILTKQKARGKILSMIARGIVSDQEAEDELKDLAIEIRALNSRKEYLFEQKSREINIEEEFVNSRIAFDIIKERANSLDIEDKFNVMQGLVSRIEVFTIMKNGNKGGNTATIKYTIGHCMELIVPSNTESHTKIYNIESTWLFQAFSKKVGTRIKWS

SEQ ID NO: 6280 - protein, 562 aa, unidentified
  source 1..562: note = uncultivated organism
MDRRKNLVRCAIYTRKSTEDGLEQEYNSLDAQYDACTAYASSQRHEGWTLVKDRYDDGGFSGGTLERPGLKRLLADIEAGKVDIILLYKIDRLTRSLSDFAKIVDILDRKGASFVSITQSFNTTTSMGRLTLNMLLSFAQFEREVTGERIRDKIAASKRKGIWMGGPVPLGYDVVERKLVANEPEAELVRHIMQRYLALCSVRDLVTELADEGHRTKIQFRTSTANRGGCTFQRGTLYHLLANKIYRGKIVHKGEVFNGEHDAIVPEDLWNDVQLMLAARSQGGNSRASPSRISLLTGLLFDGEGRAMVPTHTQKGNRRFRYYATRTDLVDQSTAWRVKAQDLESIVISQLTVTLRQPAEIESLLIPSTYNAEQAQDLFTVAYRLAEQLQTYPSVKRQQLLAMCLVRVVLHDTKVEMELNNEGLLKALHNKDNFSVLSANLVIQCPATKVRRGQELRLVIPPSHSNDLPAPRDDKLIALVTESRATLDLILKNPNKSMPALASEHRRCRIRMAKLAKLACLAPDILTMILNGKQPVNLTPRRLLNADLPLGWDEQKRVLGFA

SEQ ID NO: 6281 - protein, 537 aa, unidentified
  source 1..537: note = uncultivated organism
MAEPVRCAIYTRKSSEEGLEQEFNSLHAQREACEAYVLSQKHEGWQLLPEAYDDGGISGGTLERPGLKALLAQVEAGKVDTIVVYKVDRLTRSLADFAKLVELFDRKGVSFVSVTQAFNTTTSMGRLTLNVLLSFAQFEREVTGERIRDKIAASKAKGLWMGGRPPLGYDPKERTLVVNQAEAEQVRLLYEQYLKLGSVDELVAFAADRNLTSKAWTGAAGQILGGQTLRRGALYHILANPVYIGLISHREKRHAGQHEPILSRALFNKVQKRLTEQRRRAKLRGNAAAASPFAGIAHLADGTRLTPTHTKRRGKRYRYYANTEVGIRISAALLEQKITAELEQQLGSTEMMASKLATLGGALAPRLEQARQLGELVANEGAVLSRTTALKLLERVVVNEKQIDLRLHGDLFGAQQSIVLHINLEEDLLTRNGSMALLSGSVRRQTSSSVLTHIAQGRIWFEELTSGVYPTVAALAAAEGVSGPYISNAIDLAFTAPSKVDALFSGKSIFDRTMADLKKLPPVAICWSQQALPLSIG

SEQ ID NO: 6282 - protein, 575 aa, unidentified
  source 1..575: note = uncultivated organism
MEKDENLIDLITTLFMREQSGRKECFFMPKFKATAYIRLSYTDDRSSESDSVSNQRRLIENFVERNPDIEVVSEKIDDGYSGIIFDRPAFKEMMQDITDGKINCVIVKDLSRLGREYIETGRYLRRVFPAYGVRFIAITDNIDTAHDSNGDDLTVSVKNIMNEAYCRDISIKTRTALDVKRRNGDFVGAFTVYGYMKSEDNKNQLIPDPYASRVVRDIFRMRLEGASASKIAAELNRLGILSPLAYRKNNGLPYAKKGYADKADCKWSATTIIRILQDETYTGTLVQGKQGTPHYKIKQMEQRPASEWVRVPEAHEPLIARQDFELVQRIKGLDTRTSPKEDTVYLFSGILICGCCGSRMTRKTNRAGGKEYHYYYCPTGKKKGCTHPVMLKESSLIACVRDSLKAYIDNVASLETLLADIDQASINQALAKEYSDHITDNERRLEQVLEFKARLYESLVGGMLTKEEYASYKAKYTKQAEDIKESIRVLKEKLTDVLENRSERNRWISQFTQFATLETLDRRALIHMVQSIHVMGKKELAIAFTYEDEYKKALQLIKLAAQNQQTEEFEHRKAG

SEQ ID NO: 6283 - protein, 526 aa, unidentified
  source 1..526: note = uncultivated organism
MEICAIYCRLSDEDKDKASKGDDSESIQNQKLLLSEYATSQGWAVYRIYSDDDYSGLDQDRPAFNAMLRDAEAGRFHILLCKTQSRFTRDMELVEKYLHHKFIEWGIRFIGLVDHVDTSIKGNKKARQINGLINEWYCEDLSDNIRSVFRTKMRQGQYLGAYAPYGYQKDPSDSHKLVIDPEAAEVVRKIFSLYLQGYGTHRIAQILNDLGYPKPSVYRQILTSPAADGDTAAGRSGLWSHTTINRILRNEVYTGVLSQGKETTASYKSKKRIQRDKSEWITIKNNHEAVIGRQDFDAVQGLLDQKRRSGKPGRAHLFATLVHCMDCGGTMIKGTTNTNQLHNATYQYLKCGTYTKSSGKYCPTPHRINFARLQSAVMQELERLLNAYLDQEGYDRVCAKLCPTNRQDASRIRHELSLVQQKKEERGRALSSLYIDKANGQMDESQYAIISKGICRELEQLTRQEEELLAVSAKQENTEPVTLPQRLKISDLTYDIVRKAIGSIEIGEIHDGTQEVNIHWNFSHFF

SEQ ID NO: 6284 - protein, 553 aa, unidentified
  source 1..553: note = uncultivated organism
MRAALYARCSTEEQTQGYSLDAQRRAFREYCDRQGWVVAAEYVEEHGASGRSADRPEFKAMLEGAQQRRFDVLVVHKLDRFSRSLRDTISYITRLHECGVSFVSVQEQFDFTTPAGRLQMHILAAIGQWYSDNLSQEIKKGLSERARQGYWVGPLSTGYCTGLCSTCKDECPLVGGEDIGDGRTPIPHPRDSEAIRLAFQMYSTGNHSYRTILQELNSQGYTTNRKEGRRRWTKEALKHTLANPFYIGKVRHKGKLNQGRHEPLVDRELFYRCQEVKRLHGRSPRTYVAKFRTYTFSGVLYCAGCGERMRADYATGHKYYRCTSRGRGIDCPAPRSRVRGDSLERQMGQIIRSLTLPPSWQDRVAELYGAKDERDRILAEQKRLREKLRRLKTSYHEVEISEKQYRAEKGRTERKLAGLRLPEESHLEEVASVVQTLAASWDCATAEERRDMVRLIFDAVYCDPSSKRLVALQPKPDFLVLFRGAGMLQEKEGLVWPSATCGEQVGISAPDWTRTSTPLRAQALNLPRIPIPPQGLRIPLYSLVGWLSTRNGD

SEQ ID NO: 6285 - protein, 520 aa, unidentified
  source 1..520: note = uncultivated organism
MSRKKPPAGPKTRCAIYTRKSSEEGLELEFNSLDAQRESGEAFIASQQHEGWECLPDHYDDGGFSGGSMDRPALNRLLADVAAGKVDCVVVYKVDRLSRSLLDFARIMETFDKHGVSFVSVTQQFNTTHSMGRLTLNILLSFAQFEREIIGERIRDKIAAQRRKGKWAGGVPVLGYDVDRTNPSPKLVVNAEEAVRVRRIFSLYLELGSLLPVVEELARRGWCNKLWKTKKGVARGGRPFDKCSVYGLLTNPIYIAKIRHKSELDDGEHEPLIDPDVFEKVQATLQKNGGGKGNYLINKYGALLKGLLFCKACGHTMVHNVTGRGAKRYRYYTCGKAIKSGWNSCPTKSLPAAEIEAAVVDQIRCVAHDDDLRAEVLRQARAAADDELAELTPQQRQLERQLARDHAEISRMAAAPEPSSATTARILDLHDRVTQGEQRLSQIRARTVEVQRKQIDAADVAAAFADFDNVWNALSSREQSQVIALLVARIEFDVTDSTIAISFHPSAIKALAEGNIEDAA

SEQ ID NO: 6286 - protein, 617 aa, unidentified
  source 1..617: note = uncultivated organism
MPIEQRRPPKRCAVYTRKSTSSRLDQEVNSLTTQHEICSAYIASQRYREWILLPQHYDDGGHSGSGLERPALAALMNDIEAGEVDTVVVYKIDRLTRSLLDFVRLMEIFDRRGVGLVSVSQAFDTSDSMGRMILNVLLTFSQFERELIAERVRDSIRTRKRHGQIHGGMAPFGYDYHRGALQVVEAEAEMVRFIFAAFLHHGTYTAVMTAVREAGFCSSPKTSRKGSVRGGKPMSAGSVYNILRNPIYVGEIRGHECNWPGRHTSIIDRATWNAASTLAASRTRKGPAALGTNHFLAGILWDDLGRHMLLDVNWVAGHGYHSYVSSNAQSSQAEFRRPYRSRADRLDAVALAALQTFLADRGRLRAALATHGMFGKELDHLVIEGRIAADRVKAMTPRQCEGVFAALFERIEVSPDVLMMNVRLIELRRFLEWEGQGAFVGRSADWATSNARYAIEVPVSVIAAERWPAFTVQPRDPGVRSNPDKQLQILLRSARAAQALFDARRDLDLGGLAKLFGRSSGYFSRLIRLNYLAPDIVASIADGTQPAELNRKKLASAHIPLDWAVQRRMFGFAEPHRPATPRSLFGRGLSPLAGNPKLDVQQETEKSSSRRTSSRGR

SEQ ID NO: 6287 - protein, 541 aa, unidentified
  source 1..541: note = uncultivated organism
MNNKIKVAAYCRVSTDMEDQLHSLSAQIKYFTEYISSHEDYTLIEVYYDEGITGTSVKKRDGFNRMISDCEIGKIDLILTKEVSRFARNTIDTLSYTRKLKSLGVNIVFMNDGIDTRDKDSELRLTIMASLAQEESRKISERVKWGVRRRMENGVVFGSGRIYGYKTVDGKLEIVPEEAEVVKRIFHMYLYENKGTTKIAQELNAEKITTLNGRLWSAPTLLLMLKNEKYAGDLTQWKYYTPDFLEHNQVKNRGDNPDIPLITVENHHEPIVPKEVFEAVNKEIKRRRDVCCDGRKYSGTYWYSSKVICGKCGKPFNLSGGRKDQHRKLRCCNRAFYGKVPVTDANGEVKGCDNKTTNEPALTAGAKYILRQIQISRMEIEEQLLEEIKIIQKSEPKANVKNLQEQIENLKQKKRNAIDLVLDGLISKEDLAEQNSYYDEQISQLTKRISTGQNTSAAHKKQLNKIREYIRAVRETGGLDIDNTELYRDLVEKIVVYESKDERILEYYLNCVPFGFRVKYHMQKPNMYQEFAIIIDSCTVI

SEQ ID NO: 6288 - protein, 601 aa, unidentified
  source 1..601: note = uncultivated organism
MIFVDVDMDVSGAMPIRERPGLGPWLAPDKIGQIDGFLADEMDRLSRDMLDYLQFAHDMAALGKIIIDVSDGTDTSTERGRQALEDRILAAQREREKIATRRRKAAERLSNEGRWGGGTPGYGYSPRCICHGERRCPEPPDRQQGWWRVQDPEEAPIAKWMVQQRIAGRGFSAIAGELNERGIPAPRGGRWYATTVSKILTSPLLLGHVVILKGETGVKGTPGYRKGQVVATRRDKDGQPVRFTDEPLIDQETWDQLQEAIKAGSRARGMAQSRHMLYRVMYCRACSPRPFNPETGVRMYGSRRHTTWREVRRESVEFASQDQLAALGAFILEQRKRAGLSLRQLAELTTLSDSQLNKIERGLHRPSARALRLISGAFNMTVETLLGEVSPDLELEPERPVEREHPAYYTCKSCGLNIRIDKVEPLIEALVLHEAGGRVLLEKRVVHGDDHAADIARLERAAERRRELLADDPDDEDMKASLAKTEAQIAALRSQPHEPDSVEWREAESGINVADHWAALDTAGRAKFLRDWEVTCFAGRQGAETRLGWLELYSDAFRLRSGDSRLCPTALPALITHSQEWQRVPGAVLPSRVATSPTTRS

SEQ ID NO: 6289 - protein, 502 aa, unidentified
  source 1..502: note = uncultivated organism
MRAVIYARYSSDSQREESIDGQLRECREYAAYNDLEIVGVYIDRALSAKTDNRPEFQKMIKDSYKTAFDVIIVWKLDRFARNRYDSAHYKAALKKNGVRVVSATEKISESPEGILLESLLEGYAEYYSAELAVKVKRGLTENALKGKWNGGTVPFGYMVNGEQKLETEPVSAEVVRLIFQMAYDGKTIKDIHRYLEEHHITRQNGKPLRYNAVRYILSNRIYVGEYSHSGVTLEHAVPAIVDQELFDGVQRELQKNAKAPARHTAEDDYLLTTKLFCGKCGAMMVAQAGTSHMGNVYRYYACVRQKKHQCDKKMLPKDKLETFIVQKTMEILQNDSVIEELAALLYRIQYSESTLLPQLEQQLHDKEREIENMVSAIQQGVASASLMKRLDEVEQQKQDIETSIAKEKIKSPVYTEDEYRMALSNYRKVDITKQDGKRKIIDTFINAVYMYDDHMKIIYNGKNKEECVSMDALENSSTLFSSGAPYRVFIRDFTCEYSIFLF

SEQ ID NO: 6290 - protein, 566 aa, unidentified
  source 1..566: note = uncultivated organism
MRLRCAIYTRKSSEEGLEQNFNSLDAQREACEAYIASQKHEGWTILPEMYDDGGFSGGTIERPAFQRLLVDVGEGKIDVAVVYKVDRLTRSLSDFAKIVEIIDKRNVSFVSVTQQFNTTTSMGRLTLNILLSFAQFEREVTGERIRDKIAASKKKGMWMGGLPSLGFDVKDKRLVINEVEAKTVQHIFRRYTELKSVRLLKAELDAKGIVSKPRNASDGTRYGEKPLARGSLYLMLQNRIYRGETVHKDQSYPGEHEAIVDEALWRKVQSILTENRADRMLGTADKQVSLLSGILFDARGERMSPTHATKNNTRYRYYVSRPLLAGTIKHSGQRIPASNLEALVTGRIFNWLGDRAAMLDIIQSYTSDVTTQKRLMVGLEQCLATWLELKADDVRNLMLSIVARIQVHADRIDILLKPISLVRWLGRTDSHAEPTTATRCDTDGPFVTLSIPARLKRVGKEMKILIENGSDSTSPDASLVRVLVRACVIRDRFLADKSATLDEIAKSEGIVPSYVTRLFRLTLLAPDIVSAILAGKHPPELNARKLLDDTRLPLDWNEQRRSLGFP

SEQ ID NO: 6291 - protein, 553 aa, unidentified
  source 1..553: note = uncultivated organism
MPVEIAVYSRKSRFTGKGESIENQIGLCRQYIQLHFGDNVRLHIYEDEGYSGGNTDRPMFKQMIRDAKNKVFAVLVCYRLDRISRSVGDFAELIKELEQLQIQFVSIREQFDTSSPMGRAMMYISSVFSQLERETTAERIRDNMHELAKTGRWLGGTTPTGYCSKAVAKVTVDGKTRQAYKLEIVPAEAEIVCSIFRDFLQTGSLVQVTENLKQYGAVTKNQNEFTRFAVRNILQNPVYMTADQDAYSYFRENAVEIYAEKEDFNGKFAIMAYNKTLQKHGRHPMLRNMQEWIVALGKHQGLISGTDWVRVQNILKSNCSKTYRKPKSNIALLSSLLHCAVCKSYMRPKSAGVRTKDGLIHFYYVCREKEKSKRQSCSCANADGSQLDASVCEAVLNITEDYEIFLSTLKSCCSLWKSGGNNPHKTLQSTEKAIQTLICSLQATNGSAAEPHILEQIVKLDSQVKKLRSQILQEEQNKTTVKFSNSELQTICDKLYSFPALFEEMNVAEKREILRSLINYIDWDGKTANVWMHGVFPVQVTTAASLPLREDSK

SEQ ID NO: 6292 - protein, 517 aa, unidentified
  source 1..517: note = uncultivated organism
MREIHVIDARAGTTAEKLRVAAYCRVSSDSDDQLNSFLAQVRHYTAYIGQNPEWKLADIYADEGLTGTRMDKRDEFNRLMADCRKGKVDLILVKSVSRFARNTMECLKTVRMLRELGVVIHFENEAIRTDRLTSEMMLAIPGTLAQEDSISISQNLRWSYQKRMSAGVFNSCCAAFGYTLINGKLEINEEEAAIVRQIFQWFLLGIGKQRIARMLNEGGAGKRYGYPVWYSMTVDYILNNERYMGDCLLQKSYMSDTLPFRKVRNRGEKTQYYVENSNPPIVNREIFLAVRTLLESRKREYHPKGNWPLTKKVICPVCGHHYRRIVSNDVVYWLCSYGASGKSDCSDRRVSEGLLYETISRLAGKLRCHAKEILTPMLEQLEEWQKKSSGHMPKIHEIDLQTAELQKQKLVLARLKSKGYLDAAEYTRQNGEIQIQIDKLRRQRTKLLCSEDDQWLLELKATCCLIASDQPLDVETVLECVVNTMTIEDDGMLTVRLLGGLTLRESLSPTEMRYRAS

SEQ ID NO: 6293 - protein, 571 aa, unidentified
  source 1..571: note = uncultivated organism
MLDVKRCAVYTRKSTPHGLELEFNSLQSQAESCMSYIDTRKAEGWVHGETYEEGVRSGGSIDRPVLQKLLADVRAGKIQVILVYKLDRFSRSLIDFLNMMEELKKYGCSLVSITQSFDTSTEMGQLIMNILLSFAQFERQVASARVKDKVYASRKKGYWMGGSVPYGYRSVDKRLVIEPAEAEKIRWIFETFAAAPSTHHIVNMLREQGLKTARGNPFSISVVANILKNPIYIGKIPLGDDFFPGKHEAIISQCLWERVRTAFLRRPVKGKRIRPEARIRELSTLGGLVRCSHCSCAMPPTYTNKKDKHYCYYVCSSHQKYLTPCPVRRVPAAQLENLVFAEVENILQSEAMFKTVMNKEHEDFHFEKKEAEWCFETMAETWSCLFTSEKNRILELLVGEVRVYKDRLSIFIRREGLMSLLREFAEGAAGNTVFEADDFYEIQVPLQVVRAPKGCVVLMPRNREANAAPSRGFEHLPRLVAMAWKWGKWFDSGKYKTLHEIAKVEGLAYDYAKRVSRLNQLAPDIIEAIMCEHGFPVSFRDLSRMEIPFLWSEQREKLLKPAENMAEISHS

SEQ ID NO: 6294 - protein, 564 aa, unidentified
  source 1..564: note = uncultivated organism
MTNKHVRCAIYTRKSSEEGLEQSFNSLEAQREACRAFILSQKHEGWTALNTRYDDGGLSGGTMERPALRRMLDDIVAGRVETVVVYKVDRLTRSLTDFSKIIEIFDSHGVSFVSVTQQFNTTASMGRLTLNVLLSFAQFEREVTGERIRDKVAASKKKGMWMGGAIPQGYDLVDHRLVVNRRDARTVRRVFREYLRLGCVSKLKDYLESKQIRSKVRTSTVGRTYGGTTYSRGALYHLLNNRIYIGEIVHHGKSHPGRHEAIIPRELWNKVARRLKENNRSHRMGRSLSTPSLLTGKLFDGNGARFTPTHAVKNGKRYRYYTSQAVIQQSGIKPAITRFPAQDLEHVVASQIFLLLQRPAKLTAGLKNSPTKSAAAERTEELARRWPKLETLRQHEFIRNILKRVTVGQTTVWIEIDRTRLLATLLGQSPEALRPWCANKLGTLRLTGTIHVLRRGGQIRVVLPHGDSCSDGTPVPSLVKAVARAHGWYEQIVAGEVTTISQLAQKSGLTRRYVRRILLCAHLSPQITEALFTGKHRPNLTLKEILSSVALDWGEQEKSILRLH

SEQ ID NO: 6295 - protein, 568 aa, unidentified
  source 1..568: note = uncultivated organism
MGKQKEAIAIYSRKSRFTGKGESIGNQVELCREYIRTAFGQEYAEKAVVFEDEGFSGGNLNRPGFKRMMETARDHRFQAVVVYRLDRISRNISDFSTLIQELGRLGIDFVSIRESFDTSSPMGRAMMYIASVFSQLERETIAERIRDNMHELAKTGRWLGGTTPTGYTSQAVKSVTVDGKSRKSCKLKLIPQEAEVVRKIYSLYSETGSLTMTEEELLRQHVKTKTGRDFTRFSVRNILQNPVYLMADQDAYQYFVEKQADLFSDRKEFDGVRGILAYNRTNQEKGRATVYLPISEWIVSVGQHPGIIPAKTWICVQESLERNKSKAYRKPRSNQALLTGLLRCRCGSRMYPKLANRFTPEGARVYTYVCKMKERSKGSLCDSQNVDGNRLDAAVLEQIQCLKGDVGVFLSQLEKGKGIFPGSEERTLEELRRQQIQIQRKISALVDSLAEFGHSEAQIHVTERIEELHARNAQLQVQIAEQESKGKRNSLREEEFQRVLHTLTGFGTSVGIMTVEQKREIIRRIVRKVEWDGQRVQVVLYGAEEDCFTSGTGTGHKEPLQPSLEKEP

SEQ ID NO: 6296 - protein, 527 aa, unidentified
  source 1..527: note = uncultivated organism
MRDIKEKKSILRAAPYIRVSTEEQATEGFSLEAQKERLAAFCKSQGWDVHKFYVDPGETARNMNRPSLKEMLQDAKTGKFDVVLVYKVDRLSRRVKDLQNIIERLDEAGVMFKSATEPFETTASSGRLFLNMLSAFAEFESDTIAERAYMGMLANSRLGNYNGGGISDGYLVKDKKFVPDPERAGIIKHIFTKYTEEDIGGRRLARWFNENKLFSRNGKKWTENSIIEVLKNPVYKGDYIWNRFRYKTIDGKDKITERDPSEWIVVENAHEAIVDKKLFEEVQKKLESKQKYRTRMKECDYLLSGLVHFKPCGIRLSGWVKTRDCLEERYYRCNRSQFGIETPYCKECRGKSIRQEVIEDFIRNQMYSLKDRLPEIKSLLKELKGNAILAEENLSSKEIELEKKKARNKEERDKLLSSYEAGVIDLKAFARRIDSLKEQRKEIENQLFLTRAEKNNKLIAQADADFTVDIIKEFPAYFEAADRKERKNLIQALVERIDVEHDGRTTVTFRLPIGQNDSRNSACYLAA

SEQ ID NO: 6297 - protein, 508 aa, unidentified
  source 1..508: note = uncultivated organism
MRAALYCRVSTQEQALNLNVMQQLEPLRKFTEFKEWEFAGGFSDGGVSGAIPLGERWAGRRLLQAVQAGQVDVVLVYKVDRLARNLKVCVDAIDAFERAGVAFVSATESFDTGTPFGKAALGILAIFAQLEKDMITERMSGGRQRRVSGGAYLASIVPYGYERDPATRNLRPHPKQAEIVRQIYAWCCAGDGLQEIANRLNNSHTPPPSGGAKPAMAWHHQTIHKLLLARRHIGQSTYSGRPMACPALVNERTFAQAQAALKLRRRMSGPKPKHTYLLKGKVFCRQCGSLYYVASSSDGKSIYCCGSIRRYGKDAPPHEGRTRWRAAELEETIRQFILRLRSDPENLLAKARVWEERAEGIATERENQETKLRAALDRLEEQRRRVNALCVSQSMTVDEANTEVARIKREKTELETKLSALQQPIGADAYRRMAQILRETAADDRQRHLHEAVDAGLVNYRREVDSLITRIWLERDGSLTVEGAVGSETFPANKIDGLARICRQRWPL

SEQ ID NO: 6298 - protein, 567 aa, unidentified
  source 1..567: note = uncultivated organism
MKNNRNINDNRKIAIYSRKSKFTGKGESTHNQIEACKKKIEMTFDNIDIENDVLIYEDEGFTGYNTNRPAFQNMLKDIRNKKIKAIAFYKLDRISRNVSDFSSLVIELDNYDVSFLSATESMENVTPSGRAMMFMISVFAQLERDTIAERIRDNMLELSKTGRWLGGMTPTGFKSEQIENITIDGKKRKLFKLTEVDNEMIIINTLFDKMLTLKSLTKLETYTLQNDIKTKTGKNYTRWSLKNILTNPVYSKADKDVYNYFKNFNIDVYADEKAFDGTHGLMVYNKTKKKKNLVQKKDVSDWIVAIGKHKGIISGKNWVEIQKLLDRNSDMKYRKPTSSNALLSGILRCSHCGSFMRAKLKNKATDEQGHRKFDYMCELKDKSRKQKCNCKNINGLEADKLVIEEIKKLINPTSKFYKALKEMSANCFEEDNKNIIEIKNIKNLINKNENDILTLLDRIKYVDISLIDDLSNEIKKIKEKNIELKNQLKKLNYATDEIDDKETANILLNVINTYFNTLNDLDLNTKRNMIKLLVSSITSDGENITINFIGARDIKETTIFPNGDNCK

SEQ ID NO: 6299 - protein, 542 aa, unidentified
  source 1..542: note = uncultivated organism
MKRVRILLRVSSNQQLEADGDLTVQRRLIKEYIEKQPDWLLDEKEYFEGANSGYKNSVDNRTVLQEALRDAKKKEYDILCAYKDDRIGRRRWEIGAYSMNLKDFGVDIYTVRDGCISPSYDDIMGQMMLALRYGNAQKSSSDTGMRVKDTAQKLVQKGKFMGGTAPYGYELVLSGEISKHGRALKKLVIVPEQAEIVKKIFDLSLSCEYGSGRITRFLNTEESYKNKAPRDIWKAGTVTSILTNPIYAGYTAYKRREKTNGRYHRLDSKDWIYAESVNPEIQIIDEQTWNEVQRKRKQRAEKSAKSNILDSSNMIKENKGELTLIDVLYCGTCGSKFTNGTKYNYWTLKCGEKRASKYGVYKCSRQKDGMPHTHTNQYAAEAIEELVYEQIGNYLESIQNKTEIFAQIVKNSRKEKERISREIQNLKTEIRKSEAGIRRMEMMLPDVLAGKSSLSPETLQHSISLHRETKTAKETEVQKLQKNLDNMNVSLQNREEICRWIPGWRDVFFNADKKAKRVLIDRIIDRITADGNDIHIKFKISK

SEQ ID NO: 6300 - protein, 574 aa, unidentified
  source 1..574: note = uncultivated organism
MKTTRCAIYTRKSNEEGLDMAFNSLDAQREAGIDYIKSQKHEGWQLVEEEYNDGGFSGGTMKRPGLKQLLDDIDRGRIDVVVVYKVDRLSRSLSDFARMMEVFDEKQVSFVSVTQQFNTTTSMGRLTLNMLLSFAQFEREVSGERIRDKLAATKKKGYWVGGQPPLGYRLQTGEESKGLFIIPEQAELVRTIFERYIELSSPIAISNELNEAGHTTKQWTSKNGNVHGGKPLSQKYTHSVLTNRLYIGKITHTRGEHTEIYEGLHEAIIYQATWDTAQQLMTKQDRKNLHRWTHPHLLKGKLRTIDGFAMSPTSTQRPLTKKNETKQRRLVRYYISQKAIKHGFKNCPIKTINAEHLDELVRGLVLGHLDHRDLDQQSTEVRDRWIRKAIYEVTLAPDSISIRLDTKKIEQLQRHAFSSTPKEAPSRPVCLRTPEVDDRSEYIQLKLQLQIKKLDGRRLLLSPDGHDLIIPSTPEPKQHFVDAIGLAYRWHDELIKSGLQIRVFAKEHGIARSRILQLLPLTQLGPDVLRNALAGTLPSSITLDDLLTASKQLDWDRQAAELGINTENRHLKTA

SEQ ID NO: 6301 - protein, 545 aa, unidentified
  source 1..545: note = uncultivated organism
MKPLRCAVYTRKSTEDGLEQEFNSLDAQREACEAYILSQRHEGWTLVPNRYDDGGFSGGSMLRPGLKALLADIEAGLVDVIVVYKVDRLTRSLADFAKIVEQLDAKQASFVSVTQAFNTTTSMGRLTLNVLLSFAQFEREVTGERIRDKIAASKKKGMWMGGPVPLGYEVIERKLVPVRQEAERVRTIMRRYLEIGTVPALIEVLRREGIVTKVQNRTSGPHKGGIPFRRGSLFHLLKNPVYRGKIVHKAQVYDGEHEAIVDEELWDAVQAQLSQKSPPRKRPTNDPQQALLRGLLIDPHGRPMVPTYATQRTRRYAYYETRKDLARSTDPSATRFAQGRFEKYLIVQLTELLEDEHALRRLSKIEEAGQLRTMFAAAQLRASRLAHNRERQAIIKELVASLQVRAGHIDVTLKAEAISVPTCDHLAWSIPLPERKPFREAKLRIDAECNGRAPDTKLIQLIADAFDAQQLIMHNPGLSINQIAKQEGRCRKQLTKLLSLSWLSPRIIESMMSGIQPKTINRTILLETTLPAAWVDQEALFGFVS

SEQ ID NO: 6302 - protein, 529 aa, unidentified
  source 1..529: note = uncultivated organism
MRVGIYVRRSTDDEHQLYSIEAQDTRLDAYIGSQPGWRLVARFPDDASGASTERDGLQRALAAARAGLIDVLLVYRVDRFSRNLRDMVMLLDELDAAGVVFRSATEPFDTSTPMGRMLVQMLGMFAQFERDTIIDRVIAGMERKAAKGKWKGGKRPFGYQADKTTHTLIVDEHEAVIVRLIFGLYTRDRLGSRAIATILNDRGHRTSSGGKWSGYQVIRALNNRVYLGELTFRDITTTGTHDPVIDPKTWAQAQAILGTRGESHAHRAASASDYMLTGRLRCPKCGKAMIGTRATGRNKTYRYYTCWNLARYDTSKCDFKRLNADEADNAILGALATFYRTRHDLIRDAITAAQAQHRAAHAHRHAELAAVDNEITKTSQAIDRYLTAFERGTISEDLVAGRLTDLRAKTRQLRIRRDELTHTLDSEPAAPQPATLATVADRITEIIASGTHNQIKALVEDLVAKVTITGPDRLRPVFRIPQPRNHNGAATAQPAETAPKGAVRTMTNLVELRGLEPLTPCLQSRCSSS

SEQ ID NO: 6303 - protein, 558 aa, unidentified
  source 1..558: note = uncultivated organism
MRKLRCAIYTRKSSEEGLEQDFNSLDAQREACAAFIESQKAEGWILLPERYDDGGLSGGTLERPALERLLSAIDEGKVDQILVYKIDRLTRSLADFAKIVERLDATGASFVSVTQSFNTATSMGRLTLNMLLSFAQFEREVTAERIRDKIAASKKKGLWMGASVPIGYDADGRTLSINQKEAEIVRTIFRLYRDLGTIRAVKERCDALGFRTRVRQLSTGQQVGGTQFFTGHIQYILTNPVYAGRIRHRGNVYDGMHPPLIEPDEWDETQKRLQVAARKSRRPGGRGSSAGKATVSRLAGKVFDETGDRLTPTHSKTKQGTRIRYYVSNRLIRHGGAKDVSAWRLPGPDLEILVEHLVHQHLEAPEFPVRAVPALAADAVATLRARIERVTAGGFSSEPQSASPLLDLVQRVDIDRGEIRILLSSANVAEMLGQPEDAVESDALVIASSFTHRKRGVETKLILAGEARPRDDTLFRNIAKAHRYMAAIRSGKTFSEIAKSEGASKRRIQHLIEFAFLAPDVVRRVHEGQQPVGLTSEWLKQNDIPADWRAQRELFATL

SEQ ID NO: 6304 - protein, 523 aa, unidentified
  source 1..523: note = uncultivated organism
MPRRRIYVKNDTRQSTFRNADQTAKSPRIVRCAIYTRKSTSEGLDQAFNSLDAQREACEAYVASQKALGCQVIPTRYDDGGFTGGNIERPAIRQLLDDIQSGLVDCVVVYKVDRLSRSLLDFARMIKVFEDRQVHFVSVTQHFNTADSMGRLTLNILLSFAQFEREIIAERTRDKIAAARRRGQWSGGRPILGYDLVPGEHRLTVHPVEAEKVRAIFRMYLDKESLLSTAQALNARGWTTKRWIAANGNVIGGRPFDRANLHHLLTNVAYIGRVRYRNETHPGQHEAIVDLRIWEKVQRLLRRNARTAGSFLRNKHGALLKGLLRCKACDAAMVQMVSKKGPKLHRYYVCTKAQKRGYDQCPTGTILAGPLEQEVCNHLKPLAEGPSHWDDLPPLEQARLIRLILQRVEYDGQTEKATMTLTAEASATQGREEDPAESVRQVEFSVSGLKPRQRRRQRRSREPCHVASAVRTIVLAYQIEQAVQGGRAKDYAEVGRQIGLTRARVSQIMRLLRLPPAIMEMLF

SEQ ID NO: 6305 - protein, 559 aa, unidentified
  source 1..559: note = uncultivated organism
MNRKQFLTAMYLRLSRDDSDVGDVMDSEGNLKSESNSIGNQRELIRAFIHEQQDMELYDIYVDDGFSGSNFDRPEFQRMISDIEAGKVNCVIVKDLSRFGRDYIESGRYIQKIFPDFGVRFIALTDHYDSFRADTSESGIVLPVKNFINDSYCRDISTKVKSQFEVKRKNGECIAPFALYGYKKAENDKSRLVPDEYAADIVRKIFAWKVEGMAVSAIAEKLNGLGILSPKEYKKSTGVNYKGGFSGAVRSQWSSATIKRILTNETYLGHMVQGKREKINYKLKKSVDKPQEEWIKVENTHEAVISEDQFRIVQNLLRADGRVSTVTEKNSLFTGLLFCGDCGEQMIRRMNRYKDTCRVYYICSTKNRGDGCSRHSIEEEQLKAVVAEMVRHYANCFLEEKRMFEKALEMETSFESIARYDTEIARLKDEQDKYFSLCSGLYEDLRQGIITKEEFERLHGDFKRKALEFEDAQRKQEGMIKELFKNGVLSAARLRIMQESSELKEIDRHTLCSMVKKITVFENKRLEVEFYYMNQYRVMREVNKKVKNSEPGRNKERSA

SEQ ID NO: 6306 - protein, 635 aa, unidentified
  source 1..635: note = uncultivated organism
MKAAIYSRKSRATEKGDSIEHQINRGIVYCEERNWEYVTYCDYDFSGGYIKRPEFEKMMKDIKSGTFDVLICYKLARVCRNVKDFSNFYDLLTQYGVSFVSLKENFDTTTSAGRASMYFTAVIAQMERENISEQVLDNMVDRAKDGEWNGGPVPVGYDVIKEEGKNIKGKKKITSKLIINKDEATIIELIYDEYMKPDGSIRGITKKLILLGYKTKKGKDWRDNQVNRILKNALYCVADDDAYNYFNDENNPIIMINDKSDYDGKSGLMYYGRRKPKSYTTTAPADKEDWILAVGKHEGIIPGKIFVAAQKKLSKNFARAPRLGTSTKSPLTGLVRCKKCNGAMTIVTAKVNKKADGYAYIYFECRKKAESSGLLCEGTRINARELEKRLLTHIKEIFSDKKKLSNILNDYNEQIKQNKIDEREIEEKKKNIKKQLQNAETGIENLLNALAENTLPANLIKQKYAEYELKKEYLEDELSKLGLQLIDNEIKINSNYVIGVLKELQPQDLNSIDFEVRKNFYRSFIKNIYVGDETIEIQLFLSISNNLLVCNRKDMVEGTKQQIIITLLLPIFNIDSLPNYTIGQKIYKYRKANNIYQKDLADMIGVSLTTIANYENERTIPLKNTLNKLKYYEII

SEQ ID NO: 6307 - protein, 580 aa, unidentified
  source 1..580: note = uncultivated organism
MLKATKPVRVAIYTRKSVEDTEDKQFNSIDAQRQMCESFVAAKAAEGWVALPDRFDDYGYSGGDLDRPAYQRLIAECEQGKIDKIIVFRIDRMTRSTKDFCEFDEKMKKLGVGFTSVSEPFVDTSSPMGELVVNLIVSFGQWERKTIQERIKRHFQTALEQGYFVGGVPPFGYKVDDHTLVPDPETAHLVPHIFRLFIELGSAKKVAKKLHDEGIERFPGRPWTVQSVYNCINNVRYVGNASCHGKIVKGKQVALVTRDLWDKVHTKVKEVEVKTVERVISPETELFRGLITCGHCNHAMVYRWSRKDTLGTRKYAYFVCQHDSRQAVSKCPIRSVSVTTVQDAIERELESVMLSSTGLLVAVANETSYTPEQIVTGFRRHTFWQNLAMPERTKIYRLLMHSVVVFSDALEIKMHLPVANAKHELVKAHYLAEDANESSDVRVEADGCLFVKVPIAFRTISGRKQIVREGDGGADAKPTTHMLKEELAQGSILKAFAKGIAWMKIVDEGKATSVSQLSEIVGVDRHYVIHTIRLATLSPRIVRAALSGTLPDGFSLQKVRKIETDDWEEQERLLGFPMAS

SEQ ID NO: 6308 - protein, 537 aa, unidentified
  source 1..537: note = uncultivated organism
MSRTSIQGRASDRRSTSRINGTIRCAIYTRKSTDEGLDQEFNSLDAQRESAEAYIASQRHEGWACLPDRYDDGGFTGGNMERPALKRLFTDIEAGNIDCVVVYKVDRLSRSLLDFARMMELFDKHAVSFVSVTQQFNTTSSMGRLTLNILLSFAQFEREIISERTRDKMSAARRKGKWVGGMPVLGYDVDPRGGRLVVNEEEAAQVRAIYQLYLEHKALIPVVQEIDRLGWRAKLWITKKGNERGGKPFTKNSLFRLLTNVIYAGKVNYKGSIYDGEHDAIIDGDLWQRVQDALRRNGRTGGKEVRNKYGALLKGLLYCLPCGTGMVHTYTNKNGKRYRYYVCLNAQQRGWSSCPTKSLNAHEIETAVVEHIRGLGTNEEIIAATASKVREQSDKRMAELDVERRGHERELKRLHTRLRKLVGESVAAASDGRSATDQLADLQDRIRTLEQRMTAIREEVISLQREAVDERDLARALSVFDPVWESLSPREQSRIIRMLIERIGYDGRDGTVTVTFRSPGVKALCTEAEFRSRKEIE

SEQ ID NO: 6309 - protein, 514 aa, unidentified
  source 1..514: note = uncultivated organism
MRETTVRAAVYLRISLDREMDGLAIERQRADCLAIADMRGWDIVQEYVDQSMSATDKSKRRPAYDELVEDFAAGRFDAIICWDLDRLTRQPRQLEDWIDAAEERGLRLVTANGEADLTTDGGRLFARLKAAVARSEVERKTARQSAAHAQRAAQGRVPKGMRPLGYTVTGDIVPHEAEAVRAIYTAFNNGTSLRAIAAALSGETGDRVPPRVPALPRHTRTVAIERNARRTEANRTLPAEKQLRLRTVPEDGAWPPSTVLGILRNPRYAGYSTYTPREEHRDGGKRRSWRAAILRDDSGEPVRGQWEAAVDEGLWSAVQEKLDSPERIANRIGTDRRHLGSGLYRCGVCEDRVRAHSSRYRCVGHIIRSREQVDRFVIHAIEARVTRPDLADLLPSRNEPRLQEIKIEMGAHRAKIARAQRDYDAEVIEGRDLKRVRDREEVAIAALESERVRLSASATAGAVLGAHDPVRAFQAADLAAKRGVIDALCDVVLHSHPRGVRTFNPDSVEIRWRS

SEQ ID NO: 6310 - protein, 557 aa, unidentified
  source 1..557: note = uncultivated organism
MEQIKKDKRIYHAAIYVRLSREDGDVDSTNKRESNSISNQKDLIKYFLKDKEDIVVVSERVDDGYSGSNFERPAFKLMMEDIKKGIVDCVVVKDLSRFGREYIDSGNYIERIFPSLGVRFIAINDNYDSIKDNSQADGIIIPFKNLINDAYCRDISIKIRSNLEVKRKNGEYIGAFTPYGYRKDEADRHKLVVDTYAAGIVKEIFRMKLSGMSQTAIANQLNAQGVLSPMEYKHSLGIQIQDHFKTHEQAEWSAMSVRRVLENAVYIGTLIQGKRTTPNHKVKKLMEKPMKDWIKIERNHEAIVTEREFAIVQRLLGMDTRTSPSEETVYPLSGIAVCGDCGAVMIKRDVPAGGKVYSYYICSRNAATKECSTHRIPMAKLEETVLKLLKVHIENVLDMKRILNYMDTVPFQELDIKELENRKEAMEKEAERCRELRDCLYVDFREGIISKDDYAELYDGYTEKRRKAEEAIRSIERQITEILESKSDKYQWLDYFTEHQNLKELTRTVAVELIDRIKVYDKKTIEVVFNFDDCYHTLLGQMKTLGCEIASEKKEVV

SEQ ID NO: 6311 - protein, 578 aa, unidentified
  source 1..578: note = uncultivated organism
MAYAKLKAAADAGKIVALYVRVSTGYQVDKDSLPFQKKELKSYCKHVLHIDDGRIEVFEDAGKSAKNTDRPAFQRMINKVKAGQVSHVIVYKLDRISRDLVDFSIMWKEFKAARVTFISLNEQFDTSSAIGEAVLKIILVFAELERKLTSERVKDIMIGRAHEGKWNGARMPYGWKWNSETQFPEHNPEEIQAARLIYSMYEKTKSSSKVRDYLNGNDIPTKRGGEWTTKTISDYIRNPMNKGDYRYNYRESPHGKKKPEEEVVYLEGVFPPLVDPDQWNRCNAIMDHNAERLRNAGAAHNQKHVHPFAGLIVCGACGYYFQSMKPDRPRANGFRPSLYRCSGRVTKRSCTAPGASEVKIGPVVFNFISHIVAATKKRQDIKTPEELESLLLSGPEFAPIAYIEESSLREIFDALQGRTRSKDGLYLPEPLSRQTAPDPGSIEAKRAEAAKIGRALDRLKKLFLFDDSAMNEKEYLSTRAELTEQLTRLNNEIRDAEEASFGRVEELNFVSSASSFLLSYSIQSGEHIQYNEFAAAVNDQVLKDFLNLIIDHIVVNEAHVSEIYFKSGLHAKFIYKSA

SEQ ID NO: 6312 - protein, 546 aa, unidentified
  source 1..546: note = uncultivated organism
MNKLRCAIYTRKSSEDGLEQEFNSLDAQREACAAYIASQKHEGWVLLPEHYDDGGLSGGSLERPALQQLLRDIADGRVDQIVVYKIDRLTRSLADFSKIVDTLDAAGASFVSVTQSFNTATSMGRLTLNMLLSFAQFEREVTAERIRDKIAASKRKGLWMGGSVPMGYDPNGRTLTINEAEAKIIRTLFELYETHGTVRLVKEAAEKLNLRTRKRETRAGKQTGGGLFDRGHIHHILTNPIYAGKIRHRKEIYEGQHEAIIDPDRWDRIQQVLQDGASKGRAAKTAKNTSLLCGKLFDEIGDRLTPSHSKTKAGIRLRYYVSHRLIKHSGEANKDGWRLPAQELETKVAHLLRQHLNKPTFLSNLVGDASAAAIATARANIEALSAIQKVSSILDLIDRIELAAGKLSILMNGEQLGTLLEQAMEDVQNEQLTITMPFQFRKRGVETKLIFADAPAQRDDTLIKNVAMAHHWFEQIKAGQTLSEIAKANGISSRRVQQMIELAFLAPDITNGILDGIQPFGLTSHWCKQHAIPANWQDQRALIATL

SEQ ID NO: 6313 - protein, 517 aa, unidentified
  source 1..517: note = uncultivated organism
MIAALYARYSSDSQRAESIVAQMRASREYCRRKGYTIVKEYADEAFTGTNDARPAYRRMMQDAAAGLFEVVIFHKVDRNGRNEFDYYHNKRELAKHNVTVEYSGQAFDSTSPEGALMENQLVGLAAYYSRNLSREVKKGLKENVLAGKITGGKPPFGFSVDKEKKFIINEQEAVAIRHIFTSYAAGESLLNLVKWLNGNGYRTRKGAEFSKSSLHDILRNRRYIGTCILGKNTMRADGTRNNHGPDHEGMTIVENGCPAIVDKETFAKVQARMDENRRRGGRASAKHNYLLSGLVFCERCGGTMSGCNVTSRGTEWKYYRCSTKSNHGEGKCPNKFIRGDKLEEFILGRLSDTIMNIGTLSKLADRIREKYSVIADEHKVQREQLTAREKKLMLALDRIYTAIEEDGADDFDRARMKRIKKEILEVRGELAEIEDMAPTLPSAAEIVRHIRGRVLPLIQSQKLPDLKKLLQAFVAKIAVNTEKIIVTYRFELCGVMSERTIKDTIEFTREYSRELIA

SEQ ID NO: 6314 - protein, 539 aa, unidentified
  source 1..539: note = uncultivated organism
MTVSPSSAEPYHLRFAPGRRVRVRSYRRRSTDEDNQPFSIEAQDSRIASYVASQDGWELTGSYSDDASGATLDRPGLAQALRDARAGRYDLLLVHRIDRLSRSVKGFVTLVEQLDEAGVAFKSASEHFDTTTPVGRMIMQILAVFAEFERALIIDRVVAGMERKAAGGGWTISSRPYGYTVDRSTGHLQPNDDTAPLVPLIYSLYLDQRLGARAIAMWLNEHGHRTQNGRLWSHTSVLKMLRNRAYLGEVHFRDETAIDAHPPLIDAARFDAAEALLTERGEDHAKRRSNSSDYLLAGLIRCAHCDTTFIGNAAHGKNRRYRYYTCHARHRYGPARCNAQRLPADQLETAVLDSLLALLRDTDLIDNAITKAQDGSGDVTAAHRSELAAVQAELRTTDRSIDRYLDAFEKQTMPEDLCGQRLHTLRTKRTGLDARQLQLEDLIADAGTAVQAPGPATLQALHGLVQQALTHGPTPARKALVQLLVEGITAEGRHAIHPRFRIPLPTQEDGTGVRALAEGVELRGIEPLASSMRPRRSTN

SEQ ID NO: 6315 - protein, 508 aa, unidentified
  source 1..508: note = uncultivated organism
MTGVCLYTRISTDEENQPTSLASQRERLQAFCKVQEDWQIVAHHEDRASGTKLERPGLQAALDLARLGKIDQLLVYRIDRLSRKVRQLAQLAEELDTCGVVLRSATEPFDTRSAAGRMMLQMLGVFAEFEHATIVDRITAGIERRAKEGRWYSGRPPFGYTLHDGQLAPDPITAPTVRRIYTLYARDRLGTIAIAHQLRAERAPAPTAGWGHPAVHRILTNPTYLGRIRWRDQDFQSTHEPLIDQTTFAHAQAILAERGQDASRRRGNRSDFLLSGVIRCGRCGRAYIGMSARGKGGAYHYYACTARQKYGRKACQGERVSREKLETAVLRQLTGIYRDRGLIHDAVTAAQEQALRERPALDERRHAVAAEIISIERSIERYFEAFEQGRLSPEHCEQRIARLNARLDDLRAQQAELATDGADEGAQAPTPADLAATASQLESVIAEGEPEQAKALLRILIAELRVNGRHDIQPTYRIITPDRTQTAGVCATSEKVETAGIEPASVIA

SEQ ID NO: 6316 - protein, 539 aa, unidentified
  source 1..539: note = uncultivated organism
MAKDRPTTKPAPIRCAVYTRKSSEEGLEQDFNSLDAQRLAAEAYVQSQVGEGWTLLPELYDDGGFSGGNMERPGLKRLLADIEAGMIDVVVVYKIDRLTRSLADFARIVEIFEKAEVSFVSVTQSFNTTSSMGRLMLNVLLSFAQFEREVTGERIRDKIAASKARGMWMGGLPPLGYGIPKEGSRKLEVIEEEATRVRHIFTRYLALGSVYTLQRDLEAGGVLSKRHITRKGKVLGGAHFSRGALFHLLRNKTYLGLITHKGEVYDGEHQAIVDSDLFAQVQDQLDANSQRRIKGQQRSVASSPLTGILFDAAGERMSPAFSRNRHGTIYRYYVSALLQQGQPVRDDDIVRRLPAVELDGLIKDTLERWLPQINDRFFVLEEVRLSERGILVILDGDRSVELHSVLTEGEEIISANTKRTVIEIELELPLRGGKRHIVLGRRSPQRKDTTLITALRRAHALVQKDRGMPLAAHVPRSPYQCRIQRLAFLAPDIQRAIINGDQPIQLNLQRLVKTALPISWNRQREILGFEQPCAPCSAQ

SEQ ID NO: 6317 - protein, 544 aa, unidentified
  source 1..544: note = uncultivated organism
MKPNDRSDDPRVAVYGRVSSEEQARPDKSSLKQQEKRVRALCDAHEWEATEVYRDVVTGTKWDRPQLQAMLEAAKQGMFGRVVFLALDRLARNLHDLLDIHEKLSDAGVGLVSVKEAFDTSTPVGKLVFSVLGAIAEFEVERQQERMTDGRVGRVERGKYQASIVPYGYSYKPCTCPPRHPCEDPTHGVLTPHPDHADIVTEIYRLAVEEHLGLSTIAHRLNDRGTPPPNNSSHPLHKSNHGWHTSTIQRILTAERYTGDGTYKSPAGEVAMTCPPLIDIATFEAARDHFKRRQRTARAHPKHIYLLGGLVKCRHCGSHCSGTTSGGRDTLYYACNKSRRYGAKEHGGKGLWPAKLVEPPVQRWLLELLSDPQEALSRAEVAWQQQDAASAERARERRRLEDKLTALDNEEENAETAHVRGRLSEAALVQQQGRITSERAQTRALIDELAQAGEQRTVSPAHRNDVLEVFKELASSKWAEWSHEDVTDEEYYDAHITHGDRAKWQGFIRDFVSTVWLEQDGSVTVEGVLPSQAASEVAVTSPRS

SEQ ID NO: 6318 - protein, 1094 aa, unidentified
  source 1..1094: note = uncultivated organism
MEVLWPSVKEETVEKKSEKLRVAAYCRASDIYGDDKRSSLENQMDYYSKYILQHEDYKLVGIYYDSGVSGMTVQKRPGFKRLIRHCLEGRIDVVITKSISRFSRNSKDLLETVELLKEHNITVIFEKEKIDSMKTRNKFFLTALSAVYQQESLEISANNKLSAENRNKMGRPIFRNQYGYRVVEIDGRKTFEIVDEEARAIKYIYKRFLEGNSTTKIALELTESGIRTPSGNEIWRGTSIKNILTNNNYLGDRLTNEYVSLLMERRYIRNEGQENRYYIKNTHPAIIDEEAFHKVQEMLESKQVTSKPPMKNYPLSKRIICAYCGWPYYHSEKRNKHRWKCGLKGEHATLCESNSLVETTLNEMMKRALDERYDFQKPGALKRLKQDLERLNNNDRFELHRMSNLMSLLSAKEELAISEGIERDLLIAKVEKIESEILAFEDLASKIEEDRVYRENAVEMIVKSKTLEDFIKSLDASILRAWIMEISVLTKNDFKVRWLDDSYEELGDYISIKEKRSFKLSESKKQKAGISIFREVDKEPIEDKKTEKRDDERRSEEVEIIEIQNKPSTELIDKIKKKYKESATDILKIEPKKTKKKTRVGVYARVSTREPDQLGSLEAQVAYYTFALLKDPNNQLVRIYADEGVSGTNAKKRSGFQKMIKDCENGKIDRIVTKSISRFARNTVDALEYVRKLKEYKVSIYFEKEGIDTAKEDGEVLLTVYSALAQEESRSLGESISWGKKALAKRGIVRHNARTYGYDFNKDRSWYIVEEEAKVVRSIFERYINGIRTPQISRDLTIEGIPTMKEGSSWDAKRISTILNNISYTGDLLYQKNYTKDTFTSRSKQNFGEVPQLLIEDHHPAIVDKAIWYKAQSIMEKRRNPKTNSKRSHDKEEFFSRFICSNCGNFYAHVLLVTKHKWRCKASLKKEPLACCDAGYIEEPEIIKQFMKMLIECKKDSSFKSLIEEKIEEKSLTRNEKQLLSYLEEEIQKRYQELYKVVEAGGKSGEDTVEIKKHTDGIMAVQDKINEIIDKEDEYKFLVEEKEWLMKELDNLPDKKKLDYRNDIFKRIIKDGVISSDNIITFNLIFGISKTASK

SEQ ID NO: 6319 - protein, 515 aa, unidentified
  source 1..515: note = uncultivated organism
MEGKPVVALYARVSTRHQAQEATIESQVAQLLGYAQAHGYEIAPEHRFLDQAVSGKRLERPGLDRLRDAAANGEIQRVLCVSPDRLARSLGVQQVLLAELHQVGVEVVFLTQPVLKASPQAEFFLHIQGAVAEYERAIISDRLRGGKLYRLSQGQSVPGHPPYGYRYQPRSGPVPAAWVIDPAAAAVVQQLFLWYAEAGWTASQIAQQLNEQQTPGPEGKGWSPATVRRLLRQSAYRGLAYYNRYQYAEETIGLPRRQGRGRLLYPRPELRPEEEWIAVVVPAIVETPLWEAAQEQSKLNARFAKRHSQRPYLLRGLLVCGVCGHTLQGRTQRGRVTYFCPYGGSRRAPNVSPHTCVVEAETVEPAVWNALADLLRDPQRIQLAWEATTTADTEIQVQQQRLTALRRQSQRLVDAYQADALTLSELVERRQPLQREIRTLELRLAHMTQAAASPLDLAEFTNRITRALQAPDLATQQEVIRLLIERIVVTDDALMVEHVVPTVNDSRLQLTCCEL

SEQ ID NO: 6320 - protein, 518 aa, unidentified
  source 1..518: note = uncultivated organism
MPTIRTILPQKKEEEKKLLRVAAYCRVSSDSDDQMHSFAAQTQYYKKLIGENPLWTLADIYADEGITGTSMNHRDEFKRMIADCKKGKIDRVLTKSVSRFARNTTDCLATVRLLTGLGVSVLFEKENIDTASMSSEVLLAMMSMQAQDESASISGNMLWSYEKRMKNGTFVGTKAPYGYRLEDGKLVIYEPEAETVRWIFRQYLAGQGARAIADELNAREKDSESKNGVWRIYTVQHILKNERYMGDALLQKFCTEKLQGAAHKKITNKGTHTKYYVTNSHPAIISREDFQKVQEALAKYRQQKGRANRKYSGLIKCPACGCAFTRLKSGYWVCGSRKRLGSQCPNISIDERSLDLAVDRVLRTIEETPSLIEETVRCLDRAQQAASGSQNKIKAIDRSIAETTSQLMVLTELQTQGILDAADFVDQNRGLSEQIFRLRSDRRALLMSCEDEAIDQLEELQENVTEARQSLQNEDYDALNAVIDRIVVTGDTTLEVHLHGGLVLPECLPNIKRRCKRG

SEQ ID NO: 6321 - protein, 581 aa, unidentified
  source 1..581: note = uncultivated organism
MAQRKKNSLSTSKAKKAALYIRVSTAYQIDKDSLKVQERELINYTTLVLNIKDYEIFRDAGYSAKNTDRPDYQKMMSKLRTGEFSHLVVWKIDRISRNLLDFAEMYAELKDLGVAFISKNEQFDTSSAIGEAMLKIILVFAELERQMTSERVTAVMISRAENGSWNGGKVPLGYVYHKETKSFSIHPEQAEVVKLIYDSYERMQSSTAVAKFLNQKGITTKAGKKWNPSTVCLILRNQVYKGTMVYNKRRISVTGKLKPEDEWITVDNHHAAIIDTEQFERCHALLKRNMIGSDRSTYFRGNCHVLAGLLYCDYCGSMMAAQIGKPLKSKGGIIPSNYSCYNKRHGLCENPFASDSMIGPFILNYVANMYRIQKTFGKSTSIETLESKLLRGEAFNEVAHIETAGLDQLYQALKTQVFSEHPVYYEPNLPDHEAAPDQKAIYLGEKSSHERALSRLHQLFMYADSDMSETEYFEEKNKLEAKLDAVNQKLSALESGAISDVTSVYFTALVSNFILENSLNKERYIDYFSLKKKIDPMELKLFLNAVLSKCYIRQRRVASIVFQNGYEHRFIYKDEEVQENG

SEQ ID NO: 6322 - protein, 580 aa, unidentified
  source 1..580: note = uncultivated organism
MRFEDDKRKFAIYSRKSKFTGKGESIANQIELCKRYIQTHNENVRDEDIILFEDEGFSGGNVKRPQFQLMMSELRNKKIKAVVCYRLDRISRKISDFSSMIDEFAEYDVAFVSIKEQFDTSSSMGKAMMYISSVFAQLERETIAERIRDNMHELARTGRWLGGVPPTGYTSIPIVGSVTVDGKPRKAYKLDLIKNEAALVKQLFEVFLETNSLTKTETYFLQNHITTKNGKNFSRFTIKGILQNPVYMAADKDSFEYFNNLNVDVYANEDDFNGRYGIIAYNKTLQKTGQANKVRDMNEWIIAIGKHKPIISGADWVKTQTLLEQNKSKSYRKPKSNVALLSGLLYCGNCGSYMRPKQSQRLNANGEKIYNYLCETKEKSRMHNCQMKNPNGNTVDRLVCEEIKKLSEDSSEFIGQLKQTEKEFLSNNSEYNSQLDIYKNEYEENQRQIEALVMALAKSAEMPAYDYINKEIAKLDCKNKELINKIDDLEKITGNNSMSATEFNLLEELLASFSKTFDVMSIEEKRAALRTFIERVVWDGEQVHIYLFGSEEKENLNNIIEDINSNSFDGCGEPQGVDCE

SEQ ID NO: 6323 - protein, 545 aa, unidentified
  source 1..545: note = uncultivated organism
MCIAPYENEVIRIAIYSRKSKFTGKGYSIGNQVEMCKNYISNLAIEDEFDISVFEDEGYSGKNLERPNFQKMMEIHEIKPFDYLVVYRLDRISRNVGDCAKLIEQLKATQTQFISVSEHFDTSTSAGVAMLNMATVFAQLERDNIAERIKDNMYMLAQNGRWTGGTYKSVKHTNADVNGKSRSYYTLEIDEDTIGLVKMIFSKYSELQSINAVEIYLNDTKNLTPNGKEWGKANVKRILENPIYCIADKDSLDYFNKLDSNVCFTKDDCDGIKGIIPYNRRIGEKNTATTPDKWVIAISTHKGIYTGEEWIRIQNLLKENSKNCYGGVSATKQSLNKHSVLSGVLYCSCGAYMRPKLYASGKMAYMCIEKEKSKKAKCSMPNIDGTELDKVVLNELFSFNLKNSNVSKQIALLRKKVNNVEDDIYAQIKSLNSKKTENIKSIENLVNALASGANHLTMDIINNKIAELTEHNTAIDVQLDELSHKDDIQTKMHSNINDLETAIIYLKDNFDRLSIENKREYIKKIIDKVVWDGEKAHIFIKGSTV

SEQ ID NO: 6324 - protein, 537 aa, unidentified
  source 1..537: note = uncultivated organism
MDKKKVRCAIYTRKSSEEGLEQDFNSLDAQREACDAYIKSQVHEGWVLVDKQYNDGGFSGGTMERPAFKELLKDIENNEIDIVVVYKVDRLTRSLMDFSKIIDVFDRHKTSFVSITQQFNTTTSMGRLTLNILLSFAQFEREVTGERIRDKIAASKKKGMWMGGKVPLGYLKEDKKLVVHNEDAQKVQMLFDKYLELKSVPKLMHYLKENKIKTKTDKYFSKGQLYHLLSNRVYIGKITHKDKVYDGEHEAIICDDFFEKVQKLLYENKVDKTCGVKSSSNSLLAGLIFDDKNNLMTPSHSNSHKRRYRYYISTALKNYNDNEVGTISKIPAGEVEKFVVETTKEFLQDKEQIQKIVSEYKISKQNKLIYIAQNIQDYSEPKLIKTIIHKIMVSKNLIEITYNEASIKNVLNALANNQEIVVPDKNEELTPIVISKNIKITQLSRNDNILILNAKEYDTPEPNPYLVNAIVKSFYYHKQIQSGKTIEDLQTEEGLKDSKYIRNIMNLKYISPELTEQILNGTQAEEFSLKKLITFNK

SEQ ID NO: 6325 - protein, 536 aa, unidentified
  source 1..536: note = uncultivated organism
MKVAGIYTRKSKYSAKGDSIEQQISVCKEYLKRLDIEDFLIYQDEGFSGKSTDRPMYKQMLKDANSNKISHIICYRLDRISRNVADFAILKRELDRLEIDFISVSEQFDTTTPIGRAMMLISSVFSQLERESISERIRDNMLELSKTGRWLGGTTPLGYKSEQVTFEDPNGKERYYFKLIHVPKEVDMVKDIYSKYLELKSMTQVVKYLLSHNMKTRKNTEWARSKISYILKNPVYVKATKSIIDFFEKEGILVFGEPDGAHGILTYNKTKEKSGSKLRDPSEWIFAIANAEGIISDEDWLKTQKLLLENKDKAPRMGKTNTALLTGLLRCAECGNYMSVKYGAINTETKKRKFYYACHFKYDSGCARCQNNNADAIQLETVVLNELKEICCDSGLLVERLKKYKNEIQKGSTETDIQNLNELIIQSDISIENLLTTLSLTSDKDISKSIINRMEVLNIQKKDYNSKIKILMKSDDLVKEYQINLDALVQSYFRFSNMIDFATHDEKKILISSIVKKITWDGKTKKVKLELVGADS

SEQ ID NO: 6326 - protein, 532 aa, unidentified
  source 1..532: note = uncultivated organism
MKRKVAIYARVSTEHEAQLSALDNQVQYYDDILKKNPDWILYDRYIDEGITGTSIKKRKNFMRMIEDAKAGRFDLIITREVSRFARNTVDTLQETRKLKNIGVEVYFVEDNIWTFNDQDVELKLTIMATLAQNESKKTSQRVKAGQMITFQNGVFYGSGNILGYDKVGKDLVVNEEQAEIVKYIYSEYLSGKGTVKIADELTKNGVVTSTGLTTWNASYVSRVLRNPFYCGTIVYRKSYIPDYLEQKAKINYGEVEKVVVEGRHEPLVSKEDFQKVQQIMDSHSRPIKLGRKQALGYPKNLWSKKLLCECGSNFNRKIYNKNKDGTTYCYICYNKKSKPKNRFKDTCDMKEVPEWKLQYMAEAIFRNLTQNSDSRKALAERLLKGVDIDEHPEKKMLQRIDKLNKLIEDETTKLDRLMDNYLDENIDVNMYDMFQKKLSSRIEKYKIEILELEKKCSSIEPLEVRIENAKKSIRKLLDISYNGVDEKIIEEFVERVIVHKDYFEWKLNFMNETIKLEINGNSKKDGFLIEHK

SEQ ID NO: 6327 - protein, 568 aa, unidentified
  source 1..568: note = uncultivated organism
MRVALYTRVSTEDQAREGFSLEVQRTYLLQYAKNFGWDVFCSMSGRDVYMDDGYSGGNMDRPALQRLLFDARNKQFDLILVYKQDRLSRRLKDLLGLLEEIDSLGIGYKSATEPFDTTSSAGKMAIQMLGSCAEFERNRLVERVFPGMVVGVKRGHWQGARYAPYGYRYNKEAKKLEVHPEEAKIVKEIYAMYISGTSTSRIAGHYYNLGIPSRQGGRFYNKFISNILQSKVYLGMLVWNKRRYNTKEKTKNGEGKGYKYVNNDPSKIIEVPNTHEAIITQSEFDEARALLKRNRTNGVVRFRNNVYHLSGILKCNECGGNYRGITATVNHRTKMRRPWYRCSSKGIPHIKCNNMSVTADAINKQVWDIIEIVRKNVHVLEELGDMIKLNASEPEQLYIEQLEEKDALLKKNVEKQRAIYELFSEDKINMGLYKERAELLSNEEKKLKQDIKAIQLKILDKRNSVNLVKATQDFLLKLRNTPDNQNQQMDYLMKTFMRIMFRSIHIQNQEIVKRDLNEPWKTCYEEGMKCLKKSETTNKEAIPKEKAKRSYLPYQQESVYFCAPSDAR

SEQ ID NO: 6328 - protein, 535 aa, unidentified
  source 1..535: note = uncultivated organism
MAQTNLAIARPPRITVINARVPERVKLRVAAYARVSSDSDDQLNSYMAQVDHYTRHIASNENWELVDIYADEGISGLDAQRRDDFNRMLADCRAGKIDRLLVKSISRFARNTKEYIQYVRELLRLGISIHFEKEGIDTGKMTSEQVAQIYGAFAQMESTNHSANMRISMRLRMENGEFLPPSAPYGYRLDTEARELKILPEEADVVRYIYAAYLGGQGKDDIAKELGELGVERGHKRERWHPSTVAYILTNITYTGDEIWQKSYATNEIPFRQVLNRGQKPKYFVEDCHEPIISKEDFERVQVLMAARRMQFHSGGRANGSVFSKRIVCGSCGRLCRRKVTGGKVYWVCHQRDVDKTRCPVPQAPEAEIAAAVLRAYHKLKGNQDLLASLLDQLRELRERELRSNRKISDIDNELKRLAEQNLVLTRLKSKGCVDSALFLSQQDETERKLKDLRRLRRRILETTEEDGEIQATEGMLDYLEDSPEWLEEADGELFDYLIERLTLVSAGELKITLLNGMELTERMELTERMERAVR

SEQ ID NO: 6329 - protein, 504 aa, unidentified
  source 1..504: note = uncultivated organism
MSDSICLGYSRVSSDEQAQHGISIDAQRNILQGYAAMTSQQIRIYEDAGFSGKNMNRPALRQLLDDCRTNSVSAVVVWKLDRLSRSLRDTLSIIEDVLQPRGITLVSVTESIDTSTPSGRMMLNMLASFAQLEREQDSDRVVMAHKHLARDCKYLGGHVPIGYRIDDKKHYQLDPVTAPIVRRAFEMYMARSGYTPILEYLNSCPLSGTRKTEFKKQDLKFMLQNEIYVGTYIRRLGADPRHRITSPETIRVPGGVPAILTEDEWQRVCELRSQSERASAIYSARTVWPLSGLVYCAICGALMPLNYAGKDRDGTKQRYYKCKASCCRPARLEHIQDAVFSVLESMAGSDTDAITKACAIANSFSDAADEDHAAEARAVDQQILDLNKRIARIVAFISEQGASAPVSLADDLRRLEKDRADLQNRANALRRPAARYDAPATVAAIRACAGIKKEPPEQQKALLQAAVYKIKVSDEDYRIIFNWHLGGGDEPPHPMCQSYRRSTP

SEQ ID NO: 6330 - protein, 508 aa, unidentified
  source 1..508: note = uncultivated organism
MEAIYARQSLDKKDSLSIETQVELCRRETAGTEIKVYIDKGFSGKNTNRPQFTRMMEDVEKGLVSKVIVYKLDRLSRSLLDFAAMIDTFKRHGVEFLSTREKFDTSTPIGNAMLSIIMVFAQLERETIQLRVRDSFHARSERGAYDAAAPYGYQKTKASVYGKPVSTLAIDPETAANVQTLFETYAYTEKSLGAMAKELNRKHLPSPNGVEWDSGKISRLLSNPIYVKADADIFRFYQATGVKLTNPIDEYLGENGCITYGAWDRKRRKFGQWNTLCLSIGLHPGIVHSDVFLRCQHKLNQNIQIGNEGKGKHTWLTGLLKCGYCGYAVRVVASGRCIPRFTCSGKTNYGTCQEYEKRWLVSELEQTIEGELLKAVRRKQELAAKNQQEEDLHHKRLKIEIAKVEQKIDNLLNALAEGAGVSPKYLNEKIAALEEEKRALEREREICEASHRARGDIRQFGDILFMWDAMRLEQKRQIGKLLIERIFVFNEKVQIIWKYNFMEQQANA

SEQ ID NO: 6331 - protein, 567 aa, unidentified
  source 1..567: note = uncultivated organism
MTDKRRTLRCAIYTRKSSEEGLDQDFNSLDAQFEACAAYIASQKAEGWRRVPERYDDGGLSGGTLERPAIQRLMGDVDSGRVDMIVVYKIDRLTRSLADFARLVDRLDAANCSFVSVTQAFNTSTSMGRLTLNVLLSFAQFEREVTSERIRDKIAASKKKGMWMGGVTPLGYDVARQDNQRGLVINTGEAEHIRAIFTLYDEHECLATVARKAKDRGIRSKRRTFKSGVRWGGAVLSHGAIHAILTNPVYAGRIRHKHQVHEGLHVAIIDEALWTRVQDKLQAHAARPRVRDRATQKLRQPEARSPLAGTLFDETGDRLTPSHSKRTTKRGTRRIRYYVSRRLLKGAQDDPSGWRLPALQLERAVCGAIARHLAEAGERLFHNPDPIALYTAQDALRRIHARLAARDSDAMQAVVDRITVAPERLAIRLGRSGLAGVLGLEPDALADAALRIETGFALRRRGVEVKIVTGAVEHAPDKTLINAIAKAHQWLGEIRQGTSMGAIGRRHGWTNSPIKQRVRLALLSPAITAAILEGRQPPELTLHKLLQTPIPLDWDRQVEALGFTEII

SEQ ID NO: 6332 - protein, 552 aa, unidentified
  source 1..552: note = uncultivated organism
MARTPKRYIQKDEIRERAVYRAGIYVRLSNERSESWREKSSSPQTQVAVCKDYAKDENIEVIEVYEDYEYSGTNFERPAYIRMMEDVRNRKINCIIIRDLSRLGREHIEMGRLIDKVFPFLGVRFISVSDKLDTSKGVNSNKSFEVMLKNIINDLYAKDISTKIISAKHQRARNGYFIGSVPPYGYKIDKTPQGQRLIVDEKTAPIVKMIFELTLQGKSQYEVALELNRQKIATTMHYYKTGELYRTDENNQWHKGTVSKLLTNRTYTGTLTQGKKRQNLAKGEKQRTTSEDEWIVVENAHEAIISTDDFEKVLTERKERKKQHPFASTPHNFKRDRVNRYQGKVFALDSGEPMFRRTRIYGKNKDKFLYIHQTENCSGKITDNVKVSIREKDLDEIVKNLILEIASKMIDENSFIENMALNFQKRREFLKDKKKACSKSIEQLEVLNSKLYERYALGETAKETYLSTKDSYSLQIKGYQEEFSKLDAEIGSLKLNEKRAKRWIKNIFRAKDKVKIDKELVDALIDRIDVTTDRKLQIKLSFNLESLEGLYE

SEQ ID NO: 6333 - protein, 695 aa, unidentified
  source 1..695: note = uncultivated organism
MRNEVVAIYARQSLDKKDSVSIEAQVDACVRTCNAYGWKYYIYDRDKGYSGKNLERPCFKKMMSELEQNNITMIMAYKLDRISRSIADFSKLVEELKKRKVEFCSVTENIDTSSPMGRAMINIIMTFAQLEREQTSQRVSDNTKYRMLNGQFIGGKTILGYDRDKAVVDGKKRAILVVNETEAHTIKKMFSWYLEPDGSMSKIAKRLNEQNITTKSGYKWDASRVRETLSNPTYCKNSLLVRKYYEQTDIKIHNPPDDYDNKHGMLIYNRLKSQVETPMNEQVLIVGDHEGIIEAQDWLDVRDKIKSRKSLAPRFGQSQITILAGLVRCEKCGAIMHVSNKKDRVDNRYFVCANRHFKACDNDIIRVTPIENKVEEELLKYCSDNSELLKIFANTEQLNKGLEQQREDLELQLKEYKKQMNGLFDELLAHTGQRAVIDERIDLLQLDINKAESELKNVNAKIYSTLHASENMQFIIEYIKKFKILYEEANFEERKNMVRYLIKNIYISKEHIKINFFMVAPNSIKKHNPTEVSLFGADHFNGQYEIATINVDLEPVSEPLFDLTLCGDVIKFARLHKGLTRYDLCSKIGCTYSALSQWEVNHRLPQSFLISRLESVLDISLQPTRNFGQLIKGSRISHGFSVKELARSLDIAESALHSWEREATFPNPIQLRKINEALGLDLQRIVPELRFSADS

SEQ ID NO: 6334 - protein, 501 aa, unidentified
  source 1..501: note = uncultivated organism
MQDYLKCAVYTRVSTDMQAEREFNSCESQLDKIESFINSQENMEIFRVYSDPGFTGANINRPGLQELLEDVRQKRINLVIAYKIDRLTRSPKDFYQLIELFEKYGVNFISVTERFDTSTPSGRLLRNIMLTFAQFERELASERTRDKLLQRAQKGLWNGGIVPYGYRRENKRLIIQKQEAETIKSIFEKYLLTKSIVSVYQDLKSKNITYRNDKPFSKTAISYILHNPIYTGLVKYAGITAKGIHQPIISQELFNQAQKIHKNKKRTMKLYKDFALAGLIKCKECGSHMTPCYTNKRNGRKLKRYYYYRCTETFKQQWESCTTKQVSANRLEDYIRDNLERISLDKQYLESLFFSLNHRPQEDRIGFLNGSKNPAKTTPPRYRSGLEQPAEPPKISAEIFAQTLSAFLKSFSEKRGIEKNIWAKKLFESIQYCKNSIKLNLFSSSGILPNPGPQKEKIRSEGAENPEITVRKERNGCPAWARTRNLSSKSWCVTITPPGKK

SEQ ID NO: 6335 - protein, 559 aa, unidentified
  source 1..559: note = uncultivated organism
MSRDDQRPRKPGAVRCAIYTRKSTEEGLDLEFNSLDAQREACAAYVSSQRHEGWSLSPDNYDDGGYSGGNMDRPGLQRLLADVRGGTVDVIVVYKVDRLTRALSDFSKIVDILDAAGASFVSITQAFNTTTSMGRLTLNVLLSFAQFEREVISERVRDKIAASKRKGIWMGGTIPIGYDVVDRKLVINEREAETVRHIFRRYLEVGSVRALMAALGAEGVRTKVQTMRDGSKRGGVLFARGPLYCLLKNPVYVGRIPHKKESHPGQHKGLVPQELWERVQRLLVANAADRRLGKNATEPSLLAGMIYDTQGHLMTPSHAKKGPRRYRYYVSGLSDNAEHGDRPLRIPAGEIERLVRAGIAEFLGDAGQIANATDSLLVNADDQASAIAKWGRVALDVPKMATHELRELFLQLDANIAIGADTCRLTYAARNLLPERAGGQSHPERTDVLLPGILMRRGQELRLILTPRDGVSRAPNPRLVALIAKGFAARTQLLARKRTSQAQKAHLCRTARTCYLAPDIMQAILDGRQPENLKARGVLRVSEMPWCWEEQRRVFGFRA

SEQ ID NO: 6336 - protein, 557 aa, unidentified
  source 1..557: note = uncultivated organism
MSDTMIKKVAIYCRVSTQEQAEEGYSLEEQQRLIREYCQQKNYEVAMVYEDAGISGKDIRHRPAMQQLLEDASKKKFHLVMSWKINRISRKLSDAIKIVETLEKYGIGYQSYSEPFESSTPAGKMQFQMMALVGEFERNTIAQNVKMGMRAKAMSGEWCGGIPPFGYCWVTMEGTENHGRRKSRLEVVEREAEAVRLMFQLYASGKGYKAIVGRINREGYRTKLDNAFSVAQIKSILTNPVYIGKVRYDVRRDWNEKRRNNINPNPIVADGKHEAIIPEELWEQVQFMISQKNGKPARIYDGEYPLTGILKCPQCGAGMVISRTTNRNKDGSKQKLTYYACGNWKNKGTTVCHSNMVRVEKANTFVYNQLDKLLSDEKFFKEVVGRVNREHRILKENAIKERGVQEKNLEKIKVRQQRNHELYEDSEISREEFLTRREELNRQLCELREKQTETSMVILEEGKKEIPKETIREILKNFSRILPSDIDRTIRKRLLHLLISEITIDQHRNIDSIKLKLSDELIQFLQGYGGTPPDGAPSVFMFRELGIKTMDLELVLS

SEQ ID NO: 6337 - protein, 536 aa, unidentified
  source 1..536: note = uncultivated organism
MEKKIEKEKPIIKCAIYTRVSTSEGLKQEFTSLDNQRESAESYIQSQKSEGWVDLPERYDDGGFTGANTDRPALQKLIEDIKSHKISCVVVYKVDRLSRSLLDFSQLLEFFDQNSVTFVSVTQHFNTQNSMGRLTLNILLSFAQFEREIISERTRDKIGSAKRKGKWVGGCVPLGYDLNKETHKLIVNAKEAEIVREIFSLYLKERSLLAVTKIANAKDYRTKTRKLADDKQGGGVKFSITSMERILNNAYYTGKVRYQNTLYPGEQEPVIDDATFMKVQDALHTNPAKPKTRAPIGKSIGLLSRLLRCKACNSSMYLTHSVKHGNIRYTHYVCLNAQKRGYHECPTRLVNAGLMESKVLDCLKKLTDDQRLKSDVWNAYTLDQRRTILKSLIKEVNYNGETGILEIMLNSTQKSHKFNVSKAELKYHAITPKDRLIQAEPQLRQNLLLACQIQALIGKSKAKDIKEVSGWLNLSQQRINQVMSLLFLSPRIQEEMILQNDPCLFEIPEYKLRIITDELDWDKQYATWQKLAQKTA

SEQ ID NO: 6338 - protein, 542 aa, unidentified
  source 1..542: note = uncultivated organism
MRRVRCAIYTRKSSEDGLEQNFNSLDAQREACEAYIASQKHEGWEVLPDRYDDGGISGGHLERPSLQRLMQAVDDKRVDQIVVYKIDRLTRSLADFAKLVDRLDAAEASFVSVTQSFNTATSMGRLTLNVLLSFAQFEREVTAERIRDKIAASKRKGLWMGGNVPLGYQADGRTLKIDAAEAATIRCLYELYLEHGAIREVKERADELGLRSRQRLRGAGRISGGTPFDRGHIHHILGNPIYAGRIRHKGQVYEGQHPAIIEPVIWERVQRMLAGGATRARGTKRVSARSLLTGKLFDETGDRLTPSHSKKNGQRLRYYISRRLVTDRSRKHPDAWRLPAEQVEGLITDLIRAHLQQQDIAVRLIRDLSASEVEAALAKLHAIQRTRDCLILVERADLSSGKLTIRLHRGELVKVVECNPDKINPDALILTSPFQMRRRGVELKLHLGDAPAGFDPKLLQNVVNAQRWMALILSGMTFSEIAEAEGTSKRRIQDVVDLATLAPDVLDAIAAGEQPDGLTSDYLIKTGVPALWSEQREKFAKP

SEQ ID NO: 6339 - protein, 540 aa, unidentified
  source 1..540: note = uncultivated organism
MARKSRKATETMILAQPEQLLYNAGGYIRLSSDARRKPGDSLENQQDIIENFIATSPDIRLAEIYCDNQTTGTNFDRSDFNRMLEDAQSGRINCIIVKDLSRFGRNSIDSGYYIEKQLPAMGVRFIAVTDAFDSKDGDGGVMIPLKNMIAESYALDISRKCRAVQQQNIQDGRFVGRLAPYGYSKSPDDCHRLVIDEEAAAVVRQMFDWAASGIGAGEIVRMLNEMKILPPSHYKQEKGLITSKKLIGKPYWQKRVVVDILKSRMYVGDMVQGKTQTKGYKQSNVHPEDWVCVQNTHEPVVSREVFDRAQTMFQHASERDKQVRRDAVAYSPHIFKGKVFCAHCGHPMHRHRQNKDGIYWYRCESQWKFHKDACFQVSVKEDELKSEVFALLRKHAEAILGGYIQMERMAPVKTAAADTELDEINRQLSASGHFLKSLYENMLGGLITSDEFVAMKADYEAKIEALFKRADEIRTQRRESASQREAYTEFANAASEAIAGNELTADVIDLLVEKILVKRDKSFEIALRFRDEFREVKQVG

SEQ ID NO: 6340 - protein, 566 aa, unidentified
  source 1..566: note = uncultivated organism
MARKSRKNTEGSSAVQVMPPKRVFQTAIYVRISVENERKIEADSIGTQIQMLKDFASQMSELSIYDVYCDDDITGTNFARPEFSRMMNDVRDRNVNCIMVKDLSRLGRNYLESGEYIEKVFPFFGIRFIAINDRIDTFEKPIDISVQLKNMANEMYAKDISKKIRSTMKSLQAQGKFIGSQPPYGYMRNPEDKYALLVDPETAPVVREMFQKILDGYTVHNITLQFNERGVPSPGRYKYDKGLVKNAKFRDSVWFFPTLRRMLSDPIYLGWIQNGKYESHFHKGGNKCVKVPKEDWIIIKGVHEPIIDEETFNAVQEILNVKQTEGANIGRYDSKGNQESILRGKLRCGECGKSMAIRKKKNHGVVQYWYICPMHEHYNSSYCTKKNIKKEQMEQLVFTLIKKQMQLYVDARQLIVDLNRHASSRGKYEIYQEQIKNTEKQIAHYAQMKASLYQDYSEGLLTEADYITVGQDYARKMDDLKIFMASLSRDALKYAPEYTGSEKWAKRVEEFQQQEQLSREMVEAFIDVITVYGDSRTEVAFRNMDELEAVLYQASERRKEDMRYAV

SEQ ID NO: 6341 - protein, 558 aa, unidentified
  source 1..558: note = uncultivated organism
MSKYQATEYVRLSYADDRMNESDSITNQKKLIADFLKSHPEIELVSERIDDGYSGILFDRPAFQEMMDDIRSGKINCVIVKDLSRLGREYIETGRYLRQIFPAYGVRFIAITDGIDTANESLGDDLTVSMKSIINDAYCHDISIKTRSALLTKRKDGDYVGACPIYGYRKSPENKNQLVPDEQTARVVQEIFRSKIDGASAAKIAEELNNLGVLSPLAYKISRGLPHPKKGFADSQNARWSATTVLRILKDETYTGVLIQGRQGTHNYKIKDVIDKPESQWIRVENAHEAIIRRHDFDLVQKILGLDTRTSPGKDKVFLFSGILICGCCGERMTRKTVPYKDKKYFYYFCPKGKKNGCTGSVMLKEDDLITCVLESLKAQINNVVSLERLLDSINEEQINRELIEQYKMQIADNEAQLAQIRRFKSTLYENFVGGFLDKDEYKTLKDDYSRDMARLQSAIDLLRQKMEEASNNTSERLRWAEHFKRFSTMTELDRRAVIALIQSIEVVGKENLNITFRYQSEYDKAIQLLQQRGSTLSPETGFTITERTQAILQKEAV

SEQ ID NO: 6342 - protein, 578 aa, unidentified
  source 1..578: note = uncultivated organism
MEQKKENRIYRAAIYVRLSKEDGDKEESDSIVNQKDLIKSYLSGREDITACMECVDDGYSGADFDRPNFRRMMKEIEAGKIDCVIVKDLSRFGRNFVEAGRYIDQIFPALGIRFIAVNDGFDSINGRTSSERILIPFKNLINDAYCRDISIKIRSQLEIKRKKGDFIGSFAVYGYFKDPADRHKLVVDSYAADVVRDIFKWKLEGASQQRIADRLNERGELSPMEYKRFCGLNYQSGFQINPKAKWTAVAIGRILRNEFYIGTLVQGKRTTPNHKVKKTIQKPSGEWVRVENNHAPIIDREDFYAVERLLLQDMRVAPKEEAVYLFSGIVFCGDCHQNMVRNSVSRNGKTYVYYMCGNNRANHACTSHRISESVLEDSVFHALKQHIEVVLNIERVLKYIETLPFRQEEMQKVDAQLVKKKEETERYSRLKKSLYESMMDGLINKAEYLELKAVYDTKMQEAQEAEAKLIKDMENLLKNRSGNAAWIERFRQHQNLTELTRHIAVTLIERIDVYEGCCIKIYFKYQDSYECALALIEGMNQLRPLGGMIETSCQESMAQYTQKMTQAVKKPVHGMEVL

SEQ ID NO: 6343 - protein, 541 aa, unidentified
  source 1..541: note = uncultivated organism
MPKKKKKQKKSDKKIAALYCRVSRFDKYADEFSSVEVQEKKMRGYCDLEEWEIFDVYIDENISGATLDRPEFKRMMRDAKAGKFNVVFGYRIDRISRSNKDWHDLLDELDDMDIDIRTVDPAMNTTDATGRLIRDILISFAEFELNIGIERTFDKMYEMANRGIFTGGTAPIGYDLVDKKLVVNKNEETLIKDIINKCLAKSMPAQIAKALNKKGHTTPLKKFNTGNTYGGKPFNANIISKILKNPAYAGYTTWDEELFKGKHKAIIKKKDWDNVQSMMKPKTSAPRTGTGTKLLLTGLLKCGYCDSFMTSQPTSKKMKDGTKKKYWYYRCVNAAKHGADSCKNRQISGPTLDDFILAFASKLASNDKFVDSVFKDVSQKNKQKIKITKTDIKRIDGQISAINKKIANITNAISQYKKGNLSPLMDEMEKLTKQKEEFEENKAKHKLFLNGLQSSTVDIDLIREQFGNLPDLLDKADNDDKSNIISTLISQIILKIPKGSKKGEIITKVRNQPAQTFVYQNGRVCVLHSLAPEEGLEPPTK

SEQ ID NO: 6344 - protein, 565 aa, unidentified
  source 1..565: note = uncultivated organism
MKVKDTRKKAIYSRKSKYTGKGESIENQIEMCKKHLQMKYDIDIENDVVVYEDEGYTGANTKRPQFQKMLRDIKNKKISTVICYKLDRISRNVLDFCTLKDELSEYDVSFISLKEDFDTSTPMGVAMLMICSVFAQLERDTIAERIRDNMTELAKTGRWLGGVTPTGYKSEKIEKVTIDGKTKSLYKLAPIEEEQEIIKLIFDKFLELKSMTKLETYLIQNDIKTKTGINYTRFATKKILTNPVYVSADIHMLEYFRKNNVDIFADDKDFDGSHAIMAYNKTMQVVGKATKVRSMDEWIIAIGKHKGIISGKNWVAIQDLLDKNSNKRYRKPQTNTSILSGIIRCSNCNSFMRPKLDKTYTKDGIKKFRYMCELKEKSLRQKCNCKNLNGIEADKAVYEKIKEIIRPDGELYKIIKELASGNFIEMDNTYNELKVLKSTFKQNEEAIKSLIEKLAYIPVDLVEDITKEIKILKEKNSVLEKKIKEMGNERTNTIDDEESAKIVLNLFNTLQDKFDELDINTKRTLIKLIVPSIYSDGENVTISLLGYRGVKNSEVELIPRGEDCK

SEQ ID NO: 6345 - protein, 555 aa, unidentified
  source 1..555: note = uncultivated organism
MQTQAAANLMSPIYLTENKANIVKVGGYGRLSVEDRNAGESESIQTQKSIITDYCKEHGYVLVELFLDDGVSGTTFERPAFKRMIEAIERGEINTVVCKDLSRFARNYFEAGVYLHKYFIEKGVRFIAIGDHVDSANGNYGLNVPILNIMNYEYAQNISEKTRDAKKARAKHGMFLGSKAPYGYIRDPQDRHHLLMDEEAAGIVRQIFAMAEDGAGYNKIAKTMQNEGILNPISYFIEKNPDYFTNGYYLHESKWHVTSVKAILTNPVYLGHTVNGRRTSKTMKGKSEKAPEENWIVAENTHEALTTPAQWENVQTQIAVRSRACKDGEPQMFAGLLYCADCGSALSYSRAPRKTVPDSGQFKCWYYMRYGKEYCSTHYISEKQIKAVVLDAIRRNAQYARLYHNRYEKMLTAALAENAQGKLNDRKKEAEKARKRIETLDGIIRKLLEQNAAGAITDERFATLAAGYEQEQRELKAVLDEYEAAVREVDEAVIKAEQFTSLIEKYTDLQELDAHVLHTLIERIEVSQRETQPDGSKTQKVTIYFKYVGYVHIVL

SEQ ID NO: 6346 - protein, 605 aa, unidentified
  source 1..605: note = uncultivated organism
MPDATNLALRRCAIYTRKSTNHLLDQDMNSLVTQREICSAYVASQRYRGWVEVDQRYDDGGQSGSGLDRPALARLMRDIEEGCVDVVVVYKIDRLTRSLIDFVRLVDIFDRRGIALVSISQAFDTSDSMGRMILNILLTFSQFERELIAERVRDSVRTRKRHGMIHGGLPPFGYDYEDGGLRIVEEEAEIVRFIFAEFLRTRRYTSVMTAVRKAGLRSSIKQTRQGGTRGGTLINGGTVHGILRNPIYVGEIRGHGRTWPGRHRPIISAETWEAARALSAERAKRPPHGKETAHFLAGLLWDDLGRHMLLDVDWHRGKPYYCYASSNATWSQREYRRAYRSNADRLEQLVIASVSGFLCDRRRLRQALKTLGLYGQELDLLATKGARAAAHIECSPASKMESLFAALTDRIEIGEEHLTIGFRSIELQRFLEWDGNGSFHARPGDWPCSSARYELEIAACAISAERWPVINVTPRDPALQALPDRRLNALLRKARDAQRMLESGRDETLDQLARQLGCRPGHFSRLVRLNYLAPDIVAAIIDGTQPASLDSTTLLKANLPLDWGLQRRLLGFAAPRRELAQRMLFDRGMWPGRAENSGQIETPST

SEQ ID NO: 6347 - protein, 537 aa, unidentified
  source 1..537: note = uncultivated organism
MSRTINQDRIDVAPISSRGNVTTHCAIYTRKSTDEGLDQDFNSLDAQRESAEAYIASQKHEGWSCLPERYDDGGFTGGNMDRPALKRLFSDIESGRIDCVMVYKVDRLSRSLLDFARIMEIFDKHGVSFVSVTQQFNTTSSMGRLTLNILLSFAQFEREIISERTRDKMSAARKKGKWVGGMPVLGYDVDQGGGKLIVNEEEAARVQAIYRLYLEHKAMIPVVQELEHRQWRTKQWTTKKGRERGGKLFTKGSLFRLLTNIIYTGKVHYQETIYTGEHSQIVDIELWQRVQDTLRHNGRTGGKEVHNKYGALLKGLLYCTPCDAGMVHTYTLKNKKRYRYYVCLNAQQRGWASCPTKSLNAYEIETAVVDYIRGIGRNGEILAATAAKVRQETEKRTAELETERRAYERDLRRLHARLRSIMSEPSAAGSDRSLATDQLADLQDQSRAIEQRMTAIREEAIVLQRKAIDERDLVNALSVFDPVWDSLAPREQSRIIRSLLERISYDGRDGKVTVTFHSPGIKALCMEPSLRSQEIKQ

SEQ ID NO: 6348 - protein, 563 aa, unidentified
  source 1..563: note = uncultivated organism
MRKPIASQTKVFRCAIYTRKSSEEGLEQDFNSLHAQRESCDAYITSQRHEGWTPLPALYDDGGYSGGSTERPALKRLLADIQSDLIDVVVVYKVDRLTRSLADFAKIVEIFDAASVSFVSVTQQFNTTTSMGRLTLNVLLSFAQFEREVTGERIRDKIAASKQKGMWMGGWVPIGYDRKDRTLTVNETEAVTVRTISDLFLKLKNVRRVQTELMRLNLTTKPHETPRGRAIGGLSFARGHIYKILSNPLYIGEIEHRGIRYPGQHPPLIDRKKWDAVQAQLAANHHENRTRTNAKSKSLLAGLIYDAAGRRLVSSHATKNGKRYRYYITSSGTGRSGGTPDPARLRLPATMIDELLRAKLQSFLTDKAAISILLRETRCRPAEIGSGLATASALAGPLTSGSPMPHHVADLLARVTVSHTSLKISITRDRLLAILTGKFVERSQDNDKDNIISLEVPVPAMADGGSGKFVLEDQNVKTPDAVVVKAIARASIWFEQLITGKSQSMAEIAVRENITDNYVSNLIHLAWLSPDLVGRILEGGSEATALARAAMLTRKSDVLWRQR

SEQ ID NO: 6349 - protein, 542 aa, unidentified
  source 1..542: note = uncultivated organism
MKIALYARVSTGYQVDKDSLPFQQKEMKAYCEHIMHRSDYVVYEDAGKSGKNVDRPGFQRMMSDIRSGKISHVIVYKIDRISRNLVDFSQMYDEFKKYRVTFISLNEQFDTSNALGEAVLKIILVFAELERKMTSERVKAVMIGRANSGKWNGARMPYGWRWNSEKELPEHDPVEAENARMIYEMYAEQKSTTQLMRYLNDNGIATKRGGRWTTKTLCSYLRNPLNKGDYRYNYRESANGAKKPTEEVVYVPGVFDPLIPPELWDRVNAIIDKHAEENGSVGRQHTGKQSNLFSGILVCGACNSNIVVQKHDRKRANGFQPTLYRCRSYVETNCKHGHSSDVWLAPLVFNMLYRFMLLDDFSFSRMEELEEFLLGAPEFNDYKISDISLGFLYKLIKRKENVFLLETASEKKTVRSNYTAEISKYERALERLDNAFLFDDSTFSQQEYSKRRSELTEKLTALKNKAAEKVIEYIPAKIPQGILTAFDEAAAGDGNIDIIYLTTQIGIKDLHDFLYSIIEKIVVLDKKIIEILFRNGIDLRFI

SEQ ID NO: 6350 - protein, 560 aa, unidentified
  source 1..560: note = uncultivated organism
MSRADVRKAPAFTPETRLVACYLRVSTGKQAESDLSIPDQRRQIEDYCASRGWTMVEDYVEPGSSATDDRRPAFQAMIDAALATPPAFNVILVHSFSRFFRDQFQFERYARKLAKNGVQIVSITQDMGDSPMGTMLRQIVTLFDEYQSKENAKHTLRAMCENARQGYWNGARPPIGYRVVEVGKRGAKIKKALEIDPLHAGTVRLIYRLAREGTGNSGPMGLKAIVCFLNERDIRTRNGGRWGKGAVHQILTSTTYIGQHQFNRRDVRARQWKAETEYAVMTVPPLIPEEEFHEVRRQLRARSPAMMPPRAVGGSTLLTGICFCAACGGAMTLRTGTSKAGRSYRYYTCSTKARQGPSGCKGVSVRMDRLDDAAVAFLLSELLGPERLETMMAPLLVHRDAWADRRRTHVIELRERAADAETKLRRLYEAVENGGLVATDRMFRERVAELGAIRDQAEANAERIAGMVDRTGPTVTALDLHCIAADARTKLHGEKGGARRALVRSLLQRIEVADKHRARVLGYREALLKALAIASGTKLARAGFGGSGEPDDRYDFPLTL

SEQ ID NO: 6351 - protein, 606 aa, unidentified
  source 1..606: note = uncultivated organism
MASTNEVVEVKEKRVACLYRVSTKGQMEKDDIPMQKRACREFIEKQVKWKLVKEYSEKGVSGYRVAASKRDELQRAKVDAEAGLYDVLLVFMFDRLGRREDETPFVVEWFTRQGVEVWSTQEGEQRFDTHVDKLMNYIRYWQSSGESQKTSMRVSEKHRQMVKDGEFRGGKPPYGFHLSKTGVVNKKGKELLGLEIDKDESKVVKEMFDLVYLQGYGGVRIAKYLNQKDIPPRYTDKWSLGVVNYILRNPIYKGYMAYDKTTSLETGLSKRLKPEDWILSDNQIEKLIIIEEDVWDKVQVIRASRAPNMTGKKGTIDDYNLEKSTVPNGTTKSPLLFVGRIKCGYCGSPLTTTYHYKSWTNKDGSVHKKLRPKYRCSGKALGKGCEGQTVYAQDRIETTVLDEVKKYLEELKKVDMTTQINKFKKSNMDEDSTELKNLHKQLEDNYEELNALMKEVSKSIMGKSSFKPELLQSIIEEKESEVQKLNNKISIIDEKLKSKNVEVGEMQLLQKYIPIWESNFDDGTIENKKVMLNLIISKVTVFKDYIDVSFKINISNFVSNTKLLGLQNKRSWEYNYVSNTTPNSTVIEKLSRLLLCDIIKSTTKGL

SEQ ID NO: 6352 - protein, 539 aa, unidentified
  source 1..539: note = uncultivated organism
MGTIDRSKVALYIRWSTEDQGQGHTLAIQAEACRHYCLSQGWSVADTLVYVDEGWSGGSLDRPALSRLRGQVIAGSVQAVVVYRLDRLSRNIRDIIALVLGEWDGRCVIRSATEPIDTASDTGKLTFTLLSSFADFERGTIRARTLGGKRKNAEQGKNAGAPYPFGYERGEATGTYRVVEREAAVVRLIFHLYLQGMGCKPIAEQLNSWGMAARLQGPGRPRLSPGTWSNTAVLRILRNPVYAGELAYGQRARNPRRGRDGERHYLVNHPDDVIRVESPYIAPIVDQETFRRANEIRQARKSPHLGRRAAGSEHLLSGLAWCPCGHSLCGRRSKSVRYYVCSGRKNKGASVCRSGQVRADVLEQIILAGLESMYGDVSLEDTGEQQRVRGEKRQMLGELLGRSDGELRQARQARERLAGDYGRGAVTGEAYQHLYDSLEDRIRALAAAVADLKGRLCVAESDATEPPATTTLGTNFGTLNVAQRKLLLGRFLHRIVACREPGSSLLTVHVDWNGSPFATNISMNSMTPRLATLSSPSNR

SEQ ID NO: 6353 - protein, 532 aa, unidentified
  source 1..532: note = uncultivated organism
MPKIKCAIYVRKSTEHGLDQEFNSLDNQELSCKAYIASQAFNDWEYYKTYADGGISGGTMERPALKQMLDDMAHGLINTVVVYKVDRLSRSILDFHNMMKYFEKYGVNFVSITQSFDTSTSMGKLTLNMLLSFAQFEREVSSERVRDKLRASKAKGLWIGGFPPLGYDVINKKLVVNETEASQVRTIFELYLQMKSVDGLARYLPTIGIMAKRWTTRKGRVLGGRPLKIMSLHRILHSKTYLGYVECKVAGTTARGEHAPIITQELFDAVQRELANNTHCKSGRTAGSPNLLSGRLYNSDGTKFINQSTVRPHRPTLYYYAVTGTYLAAGDVDKLATDTICEFINADLESVPATFAQTIKQIDYNALEYMARRKLIQTLITRAIYAPSQITFFINAVPDALRPFIHADYMNTQSNKTDFIQNNGEIILTRKIVINRHGDTNKYSLPHKSLMTKTDNNNLIVRAFTTAWKYRTIYEQSGDLGQVVKSEHTSWRSLYRYLNLAYMHPEKVNNILSGKESYSMDELFAIAPKNQI

SEQ ID NO: 6354 - protein, 588 aa, unidentified
  source 1..588: note = uncultivated organism
MENEEIVKKRLLRTVFYIRVSSDEQAEKYGPEVQLKAMEAYVQSRPSELVPPTKSLIFRDDGESGAKGVKDRPELARLIQMIKDYPENDRPFDMVLVYRIDRMARKLAILLNVIETFEKNKVKFASTSEHIDTSSPFGRAMLNIMGAIAELERETILDRTSEGRKLAYKQGKISGTPYGYVKDKDDYLVPFPLEQKVVEQIFEDFTNRYMNHSQIAQKLEDEGVLSPAASANEYKRKKKKGTKKITNACFWRYEQVRSILADEVYLGVRYYGKSKDRIRIPRSEWQKSEHNHQAIVSQELFDRAKRRLEENRSRASLHHKRKDDRRYLLTGLIKCGSCTGIGQEKNSSWVGEPQKIRGSNPPRYSYYYRCSKKRHHKAEKPCSVIPIPAEEVERYVVEFLKRLIDNPELMFSYQKNLTHRKASLAKLEKRKKVLGKQIQQNSVKQDKLRVLYSNDDDYTIEKYNQEKEKLKTATTRMREEVIEIEQRIAGSEDSPQYVKTLLALKDHQDTLDFILADKDRTYSFIHDMISEIYIYARDKTELDKIAGPKKDGQLIPYMIDIKMRLPHEMLPDLMKAGFGLKSDEVCAR

SEQ ID NO: 6355 - protein, 517 aa, unidentified
  source 1..517: note = uncultivated organism
MNAPSVRVALYTRISTDEVNQPYSLGAQHDRLEAFVASQSGWTIVERYTDQASAKNLDRPALTDARAAAAAGLFDLLLFYRVDRLSRKAGDLITIGEELQRHGVGLRSATESFDTADPTGRMLFQILGSFAEFERATMHDRINAGLERKASRGEWTGGVPPFGYRKEHDESFLRPDPATAPIVQSIFTRYVQTRDGARSIAAWLDAQGIRTRNGAQWGTSGVLALLRRRTYIGEVSFRREWRPGSHEPLIERELFEAAQTILDQRAVSPAVRRSNPADYLFSTLSIVCDRCGHPMVGASAHGRGGKRYPYYTCSTRARRGPSGCNQERLPKDELEDAILAQMTEVYADTSLVAAALEEAQAEARARDAERGAERHRLETEAAELRRKIDRYVAGFEAGELRASLLQSRADTLQAQLAAIETELAHQPVPKAPSGHVDIALVSWGLSQALGEVLASTSPRLTKELLRVLIKEIRVVSPLDIRPTYRVPASEVRILEDLVELQGFEPWTSCMPCRRSPS

SEQ ID NO: 6356 - protein, 581 aa, unidentified
  source 1..581: note = uncultivated organism
MAERRTGSGRVRAAGAGAGHDLSTGSTGRRCAIYTRKSSEEGLEQAFNSLDAQRDACEAYIRSQRHEGWVSLPARYDDGGLSGGTLERPALQQLLADIRAGKVDLIVVYKVDRLTRSLADFAKLVDILDAHGTSFVSVTQQFNTTTSMGRLTLNMLLSFAQFEREITGERIRDKFAASRRKGMWMGGTVPLGYRAHERKLAVDEPEAERVRHLFRRYLALGSVLALREEATREGLLSKAGQPLSRGALFHLLQNRLYRGQVVHKGHTYPGEHDAIVEEELWDAVQRRLASNRQDRSPGRRSSNPAILLGLAYDASGDRLTPTHAIRRGVRYRYYVSHRLVTDGRRSAPEGRRIPANDLERSVVDTLLQFLTDPPRLLGRLGDTGTLPTSLPKQHRLIHAAQALADGWPQLSPAEGRALLHRLLTRVDVTDEAITLQLDPAHLREHLLGSQPDGEQQARSPILLSTPATLIRAGRETALVLGDQDTPAPSKRNPTLVRLIVRAHALHDALLTSGDASLETIAVREGVSRSYLARLVRLAYLAPSLTEPILLGTQPAAITPSRLMRDTRLPLDWQEQQLLSAD

SEQ ID NO: 6357 - protein, 555 aa, unidentified
  source 1..555: note = uncultivated organism
MARTSRRFEKKKEDTKSKVLYRAGIYTRLSNERTESWRDKSSSIETQALTCKEYALKENIQVVDVYTDYEYSGTNFNRPEFQNMMQAIRERRINCIIIKDLSRLGREYLEMGRLIDKVFPFLGVRFISVNDKLDTLKVMDSKKSFEVTIKNIINDMYAKDISVKIKTSKMNRAKNGYFIGSNPPYGYQVIKEEKGQRLEVDEKVRFIVEKMFELTLEGKSQLEVTKYLNEVGYATPTVYYKTGRIYREEGDPEWHVGSIGKILINQAYAGDMVQGIKSQYLAEGKEQKLADKKDHIVVLDTHEAIIPRETFMQIQEERKQRKADSVFSAKPHNFKREPENRFQDLIFSYETDEKLYRRTRIVFEKKKKVLKYLYQIERFDGSSEEKDTLFIMEADLDKRIASDLSKAVGGMTNKTRFSKRIRDRYALALNEIEDKQSQYDEMILKEEYALQKSYENYSLGKIDKDTYLLERDIALGRISTLEREKSAQEENILELKQDRKKALKWIKDIFLANELDKLPTELVQSLVEKVIVYASHDFDVVYKFNMESLKEDTSE

SEQ ID NO: 6358 - protein, 564 aa, unidentified
  source 1..564: note = uncultivated organism
MDTKNRVAIYIRVSTQMQVDKDSLPMQRQDLSAYAQYILNTTDYKIFEDAGYSGKNTARPAFQEMLKGIRNGEFTHLLVWKIDRISRNLLDFATLYSELKQLGVIFVSKNEQFDTSTAMGEAMLKIILVFAELERNMTAERVTATMISRASNGQWNGGRIPFGYHYDPTTRTFSIDEQEAVLVRAMHDGYEREKSLVTLTYILNDSGYRTRQGSHWTPTSISVILKSMFYCGDYVYNYRKEGSRQKVKDSSEWVTITDHHPAIVSREQKARIMAQLHENLRFLQERGISAHRTKFIHVFGKLIFCGKCGHRMYSVTAGKRDNWDHSNYLCSTRRKSKTMCNQKSTSDAIVGEFIFNLLLNMLNAQKHFTKDTTNDELQRMILAGNTFSSIASIDPDDLDYIRNLLESDSLTGVIYGRTAETKQSKDSYAKLSQKRIKLNRALDRLRDLYLYSDEGISEKDYILQREKLENQLENIDQQIIALETSRKAEEDDEFLQRASEFIIAKNLSDRNYIYYKRLAQSVDRNILADFVSKVIERIVVTDDQFTSVSFKNNIVLHFDYKKEP

SEQ ID NO: 6359 - protein, 553 aa, unidentified
  source 1..553: note = uncultivated organism
MSDTLHIYTRVSSTAQEEDGTSLDTQKQLGIDRAKVLGMKSRVWNEGGQSSKGDDLLNRPELAQILTRIESGEIKHLWVFNTDRLSRNETTWSIIRLKLLQNDVKLHTASGTFQLSNPMDKLLLGILSEISAYDNTLRTERMRLGKLSRLRQGCWIGGVAPYGYKVVDRKLVVQPEEAKTVREIFLEYCEGMSVKSIRKSLIEKGVRPRRGNKIWSLGSVEALLSNSHYRGSYTVTDKKYKETVEIQCEAILSPSLLQHYDAARQNRKTHRAGESNLRNFYLLRGLLFCGHCESVLGGRIYPTQRRSVYYCARRERLRDDPYSRAKNLTKCNCGPYLRIKETDEFIWKTVVEVLEQSHHYKEKIKQLSLNAKKADGAEAIGSKSLQSQIRRTGREIQEIKRSVVSVESSRILQKRGSDVVDAILKNLDEHLQSIEARKLDLLSRLKNADKLKRWTNWMIDFGTRITELKTMKDEAKKEFLEGIVNKVTVISAPDNRYACTIHFRLPYVQDKLLKVIGAKKTAKGARFTVQDGKDTITAELHLPFMKRRRQQKS

SEQ ID NO: 6360 - protein, 526 aa, unidentified
  source 1..526: note = uncultivated organism
MTNAVIYARYSSSSQRDASIDQQVAACRKYAEQMEYKVIGVYADHAMTGTNDKRPEFQRMLRDSSKRAFSFVIVYSLDRFSRDRYDSAVHKHELKLNGVRVISAMERITDDPTGILMESILEGFAEYYSKELSQKIRRGTRDSAEKGRVLGKIPFGYRRGEDGRFAIDPDNAPVVEEIYRRTAACEQAASIIRDINRRGIRTASGSEWTRTSLDTLLTNPRYYGLYKYADVEIEGGMPVVVSRELWEEVQKHIATKPNPRHGPRRNDKGVYLLTGKLFCGCCGAPMVGVSGTGRNGLHHYYKCAEKVKRAAACHKHSVRREVAEYLIAERIRAVVMRDDVIEWLADSAMAYYEQSQQSSDASLLRGRLAATQKKKANLMQAIMAGIVTPTTKDALEHLEDEEASIQADLATAELRQGVPPDRAELTAFLRSFRDGDVSNPTFQAALFDAFLVKAYLYDDHFKIYFRVEDETIDQDVPIDTAPTLPDGIIDLGTVRIDAQKLHSQPTMRTTLKRSRDGIVIEVQLLA

SEQ ID NO: 6361 - protein, 512 aa, unidentified
  source 1..512: note = uncultivated organism
MTQSPIRCAVYTRKSTDENLELDFNSLDAQREAAENYIASQKHAGFICLDERYDDGGFSGGTIDRPAFARLMADVEAGLIDCIVVYKIDRLSRSLMDFARIMEILERHNVSLVSVTQQFNTTNSMGRLTLNILFSFAQFEREIISERTRDKMAAARRRGKWTGGAPVLGYDRVRDNGGTRLVVNRAEAERVRTIYRKYLELGSLLAVVRWLDARQWRNKRYETAKGQMRGGNEFNKSTLQKLLTNQLYLGKITYQDQAYDGEHEAIIDEDLFGRVQGMLRRNRGSGGKHQRNKYGALLKGLVRCKHCGCAMSHHYATKKQRRYRYYVCLRAQKKGWSNCPFPSLPAGELERFVVDRIRETLSDPNLLRDVIGRATQQLQDKIDEFRQQRRSREARARRIGRELSELAKTPDAPGVADELAGLQEEMAQAEKAVLEINRRIVELQQNLIDEDELVGAFEAFDPMWEQLRPAEKTRLIHLLVQCIEYDGAAEEISITYLPGGLQSIAETEVAHA

SEQ ID NO: 6362 - protein, 562 aa, unidentified
  source 1..562: note = uncultivated organism
MIRQRCAIYTRKSTEEGLEQDFNSLDAQSEACAAYILSQKHEGWAELSDRYDDGGFSGGSMDRPGLKMLLKDVEAGRIDIIVVYKVDRLTRSLADFAKMVDLFDGEGVSFVSVTQAFNTTSSMGRLTLNVLLSFAQFEREVTAERIRDKVAASKRKGMWMGGAVPNGYDVRDKALVINPDEAEAIRTIFAEYLATGSVRELSDRLDALGIVSRRRTDRYGRKTGGAPFSRGALYNILRNPIYIGKTRHKDALFDGLHEAIIDDATWTQVQGLLAAHGGKKIGASRRPAKRLLDGVLYDSNGRLMRTTYAIKSKHKGGTNQSRRYWYYTSKPTSSKDRDRIERLPAAEIERLVLDGLREHLHDQSLLTAQIRLAVGLDPFILSEILQAADAWRAEAEETGVGAETQYLNGLIDRVDVKKGQLSVQTNLGALLSSEAAQQPIHTTLELPFQTRQSGRAKPIVIAPPDAPQPDQDIINLVADARRWSAELLDGASSTIRQIEDREGLRSGSVSRVLPLAWLAPDVSTAILEGRQPAHLTAKVLRGLPDLPLDWQDQRKILGIPHP

SEQ ID NO: 6363 - protein, 534 aa, unidentified
  source 1..534: note = uncultivated organism
MRDTSTSTLATGRVSVASQPVTMRCAIYTRKSTEEGLEQEFNSLDAQREAAEAFITSQRHEGWVARPERYDDGGFTGGNMERPALKRLLADIEAGGVDCVVVYKVDRLSRSLLDFARIMEVFEGHHVSFVSVTQQFNTSTSLGRLMLNVLLSFAQFEREIIAERTRDKMSAARRKGKWTGGTPILGYDLQDARLLVNDDEAEQVRAIFELYLERRSLIAVARELDRRGWLTKRHVSKRGRETGGKPYTKSALSRLLSNAIYTGKVNYRGVIYEGEHEPIVEPELWHRVQQLLRLNGRTGGKDVRNKYGAFLRGLLFCEPCGKPMVHTYTAKGGKRYRYYVCSNAQQRGWASCPTKSVPAHDIEASVLDQVRRLGSETAVVAETLRHAREQSSQRASELERERRALGSELTRLNAELRKLAGEVGMPADETMETERLADVQDRIRTIEQRITCIREELISLQRGAIDEKDLAKALSLFDPVWDSLSSVEQCRVMRLLVERVDYDGRTGKMTASFRTGGIRELCGEADLFRDQEAR

SEQ ID NO: 6364 - protein, 545 aa, unidentified
  source 1..545: note = uncultivated organism
MERTAVLWTEGTCGVKAKTRCAIYTRKSTEEGLDQAFNSLHAQREACEAYIKSQATEGWVALATEYDDGGFSGGNMSRPGLRRLLADVDAGLVDTVVVYKIDRLTRALSDFARIVERLDKADASFVSVTQSFNTTTSMGRLTLNVLLSFAQFEREVTGERIRDKIAMSKKKGMWMGGVPPLGYDLPTDQTTRALVVEPSGAERVRAIFQLYLELGTVSAVEQQIASWGWRTRERLSRRGVRSGGAPYSRGMLFHLLKNRTYIGEIVHGDVTAPGLHEAVVDRAVFDRVQQQLACNGVTRAERPLRSADLKLKGKMFDADGHPMNPSFGYGRAGRVYRYYVSSPLQTGHKHKVDQGAAIRRVTAETIHEVVSSAVQPRLGGTADGIGSVIGAVRRVEILADEVRLELIADQLTPAGRKGLTPADRDHLALIVPVRCRRRGGRVEQILPPGTARKTVKRDPTLIRGLQQSHRLAKLMGWRAGDGSVGDAQMKQPESAYERKLVRLAFLAPDIQRAILSGTQSPGLTLARLLHEPIPTDWADQRRVFA

SEQ ID NO: 6365 - protein, 520 aa, unidentified
  source 1..520: note = uncultivated organism
MTADVPTIRCAVYTRKSTDEGLEQDFNTLDAQREAAEAYIASQKGAGWTCMPDRYDDAGFTGGNTDRPAFKRLMGDVEAGKVDCIVVYKIDRLSRSLMDFARIMEVLDRLGVSLVSVTQQFNTTTSMGRLTLNILLSFAQFEREIISERTRDKMGAARRRGKWTGGPPVLGYDLARDRTGTRLAVNREEARRVRAIFELYLEEGSMLATLRTMRERGLTTKRYQTRKGTWRGGKRFEKSTLQKLLTNVLYLGKMPYKDQVFEGEHEPIVDEDLFGRVQGLLARNRNSGGKYQRNKYGALLKGLVRCKHCGCAMVHHFATRGVKRYRYYVCVRAQKEGWSACPAPSLPAKELEDFVLGEIRALGKDGRVLEEALVATQAHHQADIDALERKRKTVEGRIRSMGHEVGELAPRAGYDEEATREMGRLQERIREDEQEGARLNERIETIRRQMLDPDEIAGAVEAFDPLWNTLSPTDKARLVHLLVERVEYDGEAEMISTTFHPTGINTLTEEPEEEASCPTA

SEQ ID NO: 6366 - protein, 553 aa, unidentified
  source 1..553: note = uncultivated organism
MLNKKKKVRMLLRVSSNQQLEADGDLSVQRQLVAEYVYQHKDWILDAREYFEGCNSGYKNAVQDRDVLQQALQDAEKREYDILVAYKDDRIGRRMWEIGGYVMQLKSFGVDIYTVKDGCISPENDDIMGQMILALRYGNAQKSSSDTGMRVKDTARKLVQQGKFMGGKAPYGYVLVMSGELSKHGRALHELKIVPEQADVVRYIYELSLYKEFGSAKIAKELNKNACYQKLAPKDVWKAGTITSILTNPIYAGYTAYKRREKLPDGKIKRFDYSEWILSEKPNPNIQIIDSDDWNLVQSRRKQRGERYKISPKNQRMIIISRNDGMLPLLDVIYCGYCGCKCTNGSKYHYWTIKKTGEKKSKKVPIYKCQNAWQGVPHDKIYQFKAEKLEKIVFASIAEYIDKLQENNDIFKQITKNARKAKEEQKKILLREQEQLEYIKKNIGELEDKIPDAMRGEYPISFDYLLSLIEKQKEKREKQEKVIIDLKSKMQETDVSFQEWENLRIQIPTWKDVFMNADNQTKRVLVNKMIDKIYVKQDEITIRFKLNSKALLL

SEQ ID NO: 6367 - protein, 523 aa, unidentified
  source 1..523: note = uncultivated organism
MTPEKHAAGYVRVSSEEQAAHGISVDAQRAILEGWAAMTQAGPLQIYQDPGFSGKNTHRPALQRLLADVQEGRVSVVVVWKLDRLSRSLRDTLAIIEDVLQPRGVALVSTTESIDTATPAGRMMLNMLASFAQLEREQDSDRVLMAHKHLAEDCRYLGGHVPLGYRVDDSRHYQLDPATAPVVRRAFDMYLSRAGYSAVLDYLNAQAPAFWKRRTPWKKSDLNNMLGNEFYAGTYRRQLGKQSIRVPGGVPAILSPEEWTRVCSMRDDNRHQSGLYRARTVYPLSGLVRCGICGRVMPLRHGGKDRAGAVERYYTCHGKCVPPIRLEALEAAVLDAVEMLSAQDDALRRACHIANGYADGRDADRAADAPPVEDHLLRTRRRLAQLVAYVAESGAAAPRSLADEMQRLEAEEAALVEKLSTLRRPSGRYNPDAMAAALSACRGIKKNAPEVQRQLLQGALHAVEVHPDEIRLTLACLLDGGDDPPAYIRHSTPRKRGGHRRPHDPAQAFQVIPQTWTQSAPKR

SEQ ID NO: 6368 - protein, 682 aa, unidentified
  source 1..682: note = uncultivated organism
MAKLKKQLQPKPELKPIKRAAGYVRVSSVSQIGEQKTSLGNQENVIKKYCEDKGWTLTEIYEDAGKSGKSMKARTEMQRLLLDAKKNEFQVVVTWDVTRFGRSVLDTKRNLDELEKLNIHLIAINDGIDTSQKNKLDNLKLNFLATIAEYEAETIRERTEGGLIRLLEKREVVPGHTPYGYYWDKKLKQVLPHPEESGRLTWMVAEYLKGVSLFDLAAKLNEQNTPCSRRGKWHSATISNLFHQEVYFRGVMFVNFGKVKYDFPCKPLILNTQWKELQERLKQANTRAGRPALAAQDFLLHRLLLCGVCNSKLITRNGSPKRVDGTYLQSYTCAYYEKSEEWLQGRERCSFHRVNADDLENHVMEELCRVIRGEHFHRYEESARIERERELAEECEYLTRQLAKEEIAREEFVVALRNGLSGARFAALDKEAEEKIITLNSALSEAKQKLDDIRGRRTQEEEFLRFRAEHHVELHFLTMKIMAAPFALKQKLLRGFIDGKIIVPVDNYRKMKILWRLNLPLLKEVLAEIPPLEPGPGGRGHTEMDKLIWVRGKDCKEQRKPINRCESIRFDCPPHERPVPLAHYKQLLRGMRTPGNDRRLTANHPGACPNQSFLHNPNEGFQGRVAREGMSVEQIDQILMVSLARPGTGTCPGIVEEVTAPGDIVVLKRVVKSPGSAFGKAG

SEQ ID NO: 6369 - protein, 505 aa, unidentified
  source 1..505: note = uncultivated organism
MEEKVVARCYMRVSTEEQAQSGYSLAGQRDKLDLFTQLQGYAIGGWYRDDGVSAKDLNRPEFQRMMSEAQRGDVIVVYKLDRLTRSVRDLDELLREFDKRGLHFRSVTEQFDTTTATGRLMIRMVGEFAQWERETIAERTAFGKQKKMAAGEWGGGRPPFGYTLAPSERMKGGRTLMRLVPDLDAAPLVAAIFDRYLSGHGLRSISTWLNEKVGARSALGRKFDSVKVTRILQNPMYLGMLQSGDRLIPSDHKPLVTREIFDRVQETFDLRKQMAPRQATGVFVLSGVAKCGVCGGTICVGKAGPKGRQAGQYWYRCRNYTYARGCGGEGKSLTSAPGPAMEAQLVQKMVRLGQLETLDKFYRGIEEDYERRIGMTASEIETVRSDITEAEKAVQRWDALYETGHMEMAEYLKRIQPLEERLKILRGRLEEVRRTPAPPPKEVLAQFLVTFADIWAEADPHERKALLQHFVSAWGATVYLYPGQRLDVVPPHRPADEPASAGPDD

SEQ ID NO: 6370 - protein, 520 aa, unidentified
  source 1..520: note = uncultivated organism
MSPPKPSTPQIRCAIYSRKSTNDGLDQEFNSLDAQREAGEAFIASQKNEGWICLPDRYDDGGFSGGNIERPGLRQLLTDIEAGHVNCVVAYKGDRLSRSLMDFARIMTTFESRHVSFVSVTQQFNTTHSMGRLTLNILLSFAQFEREIIGERIRDKIAAQRRKGKWAGGIPVLGYDVDRTNPSPKLVVNAAEASRVREIYNLYLKLGSLLPVVDELDNRDWRNKAWTTRKGRLRGDRHFDKGSLHALLTNPIYIGRIKHKEDLFDGEHEPIIEPDQFRQVQARLQHNCRTGGVEVRNRHGALLKGILVCKACDRAMTHTFTSKGTKRYRYYTCTQAIKKGRRCCPTQSLSASQIEEAVVDQFRDIATSVDLRAEVLRQAVDHAATDLDSLRSEGASLKRELTRHHAEIRRLAISGEQSSATTALIAGLHDRIAQAESRTVELKRQIVDIQTHRLDQADVDAAFGDFNGVWNTLSPREQAQALALVIARVLFDAADSSIDIEFQPSAIKALTGDRHGNTTI

SEQ ID NO: 6371 - protein, 547 aa, unidentified
  source 1..547: note = uncultivated organism
MTRLRCAIYTRKSSEEGLGQDFNSLDAQHEACAAYIKSQASEGWKLIRDRYDDGGISGGTLERPGLRRMLADIATGHIDIVVVYKVDRLTRSLLDFAKLVEAFDKAGTSFVSITQSFNTTMSMGRLTLNMLLSFAQFERDVTAERIRDKIAQSKARGMWMGGTPPIGYRPDGRSLAIVDDDAAIVRHIFNRYAELANVRLLAAELKESGVRSPVRSAATGRGFGGRTFCRGHLYRILSNPNYIARIDHGGRSHEANHPPIIEKELWGQVQAILAANRNGERRPAPIESSLFAGKLVDHRGVPMIATHACKGTVRYRYYVSRDLHHSGDARSSEGWRVPARQIEPLVRTKIVALLNDPLELLALATNEMPEPDELNAIVNRSKEAASALAGPRTEGAKRLRNLIAAIRLGREQVSIQLNPAALEALLDIRITNELITFHITAQLKRSGHVMRLIQRNGSAAQPNVDRTLVKAIVYGRSWWRELQSDTDLTIEDLAQRERITAAYVVRIVRLAFLSPTTLKNIIEGTLPAHLTIKRLCAPRAIHARWDC

SEQ ID NO: 6372 - protein, 531 aa, unidentified
  source 1..531: note = uncultivated organism
MAETKATNIAIYSRKSKFTGKGESIENQILKCKKFIEFKFNVNIDNFPNDNIFIDEDYTGRNENRPQFQRLKKKVENGEIKHIIIYQLNRFGRNARDIHNSMAMCEEHDCVMYSATEGFDTSTSFGRAVMGILASLAQLETEQLGERVKDNMYTLAKMGRWLGGQSPLGFDGTREYYIDSNGKQRSVTKLTSNDEELNLVTIIYDKYLEEKSLSQVSKWALTNNLKGKNGGDLNKSAINAILQNPVYVKSNQEVFEYLENEGYEVCGRPNGNGILRYGKKAEEKIASVAAHKGIISAKKWLEVQAILKANTEKAPRMGKTHTALLTGLLKCKCGSGMRITYGSKNKEGIRPFYYTCSLKNDSGGTRCNSKNIHGPKLEKELIKYLKTYNKETLIKEFKQLLDSTKSLQGYMKAEQIESEIVKSNNSIKKLLNRLKLIDDEEVASIVLQEIKIEKNKIKELEDKKKKIINESTEISINQAKLFEFISDLEEFNNTFENLNLEDKQKYLNALIKQIKIDENNNLNIEFNLKKN

SEQ ID NO: 6373 - protein, 519 aa, unidentified
  source 1..519: note = uncultivated organism
MKRGTSPKAATDARRCAIYTRKSTAAGLEQDFNSLDAQREACLAYIQRQQGWTLVDERYDDGGFTGANIERPAFQRLLTDIDAAKIDVVVVYKVDRLSRSLLDFAKLMERFGAAGTTFVSVTQNFSTADAMGRLTLNMLMSFAEFEREMIGERTRDKIAAQRRRGKWTGGTVPLGYTVEDKKLVVNDLEAVLVREVFSLYLQQHSTLAVARLLNESNRSTKRHVAANGRLREARPWTKADVTRLLRNPIYAGYMSSHGELHDGEHVPIVDPETFSKVRDLLDGRSGPTKDRGRNADYVLRGLLRCACCGSAFTPASTRKGRTEYRYYRCVKRDKEGKEACPSAPLPAGAIEEYVVERLREAVAAGSLASDVETSVKERLRVQRKDLLTERKKLPAQIAALSADGKRLLNTMAEVDGVARRLADGRLQGLGNELGRCEARLATVERELAVIEKTEIDASWVARCLNDFAAVWDVLTPENRGRLLRAVVQQVEVDEPANKVKVFMVDLCAALPEPVEAVPA

SEQ ID NO: 6374 - protein, 517 aa, unidentified
  source 1..517: note = uncultivated organism
MANQTPRVTVIQPVTQEKAKLRVAAYARVSSDSADQLNSYMAQVDYYTRFIGENGDWELADIYADEGISGLDTRKRDEFNRMMADCRSGKIDRILVKSVSRFARNTRDTLRFMRELMRLGVTIQFEKENMDTAKLSGEQVAAIYAAFAQMESTGHSSTMRTSVRMRMENGIFTPSSMPYGYRLHGLEPEIVPEEAEVVRHIFSSALCGMGRKTIAAELNELGIDRGHGRKIWHHTTVHYILTNSFYTGDSVWQKFCTTDTIPFQKMRNVGQHPKYHADEDHPAIISREDFQKVQTLIDQRRTQFYDGATSSRSIYIGRIYCGKCGSKLRRKVCGSKVYWDCYRHNSGKDCCTARQIPETVLTAALLRLHNKLALHGQEILQPLLEQLRELRERELRSNQKLSDIDKEIANISGQNLVLIRLKSKGCIDPALALSQADALNRKLRDLRRLRRKVLEAADGDEQIQATEAMLDYLDSAQWQDEVTPDIFENLVERITVVSAEEVRLRLLNGLELMERLV

SEQ ID NO: 6375 - protein, 555 aa, unidentified
  source 1..555: note = uncultivated organism
MKKLITEMVYRANAYLRLSKEDGDKAESDSIANQRDLIQNFLSDKPDIQLVAERIDDGYSGATFDRPSFLKMIEDIKAGTVNCVIVKDLSRFGRNFVEAGRYIDQIFPEYGVRFIAINDNFDSARGRSQSDNVLLPFLNLVNDAFCRDISIKERSQLEIKRKKGDFIGSFAVYGYLKDPADHHKLIVDEFAAAVVQDIFKWKIEGVSQQRIADKLNERGVLSPMEYKRYCGMAYRSGFQVNPKSKWTAVAVGRILKNDCYIGTLVQGKRTTPNHKVKKTIVKPCDEWVWIENNHAPIVSREDFAIVGRLLSRDTRVAPEQETVSLFSGLIFCADCGQNMVKNSVCQKGKTYSYYMCCTNRTTKKCSSHRIPEQAVQDAVLASLKQHIDNILRIEKVLAYIETLPLQRMEIQKLDTQLVRKQEETLRYQQLKVTLYESLKDGILDKNEYLEMKALYDGKLREAQEAETTLRQEQERILQNRTEESLWTQRFKTYRNIDGLDRRIVVTLIDRIEVYEDCRINIRFQYQYDYDRALEFIQSAGKTISPDTSAVQKEAV

SEQ ID NO: 6376 - protein, 541 aa, unidentified
  source 1..541: note = uncultivated organism
MREAIHTADNVTLIPATGIQGVPQYSLGQARVAAYCRVSTDEEEQQNSYNVQINYYTDYINANPNWKLVGIFADEGISGTQTANRTEFNRMIKMCRRKRIDIILCKSISRFARNTVDCLDYVRELKSLGIAVIFEKENINTLSASSEFAISLYASFAQAESESISRNVTWGIERSFREGKFTYYMKQTLGYRLGDDGKPYIIEEEAKAVRDIFKMFAEGHSMAEIAVVMTERGVVRRNGSSEWNRHHVNIILRNEKYVGDAILQKSYTVDCLTHERARNYGQKPKYLIQNCHDPIIDRDTWDKVRLELARRSSENKSARKKGEKSRYHTIYALTSLLYCSHCGKPFRRTTWQWNGKKKGVWRCADRLESPKITCKKSPSIHEDKLHRAIVNIINSTIKDTGQLNSAVQESTQASRNEMMEIDKEIVTLSARIAEINALRDNLIGNISGNQFEFLSTELRTLNEEEQQKKERLDEIKQRKDNIKLEVQKAATAREMFGNMQPMESFDDNIIRNIIERITVNSKTEITVRFRGGLEISGPVEK

SEQ ID NO: 6377 - protein, 514 aa, unidentified
  source 1..514: note = uncultivated organism
MPTVTRIEPTKSEGLIQKLRCAAYCRVSSNSEDQLHSYAAQLRYYREKINGSETEELADIYADEGITGTCENKRNEFKRLIKDCKRGKIDRIYTKSISRFARNTKECLKNLRLLKELGISVFFEKENIDTAKVSDEMMITIMGGLAQEESTSISKNLRWSIQKRMKDGTYEAPSVPFGYDKINGELVVNENESEIVRNIFDRYLSGEGITKIADTLNREGIKTKSNNKWGITTILYILTNEKYTGNSILQKKYSTDTLPVRLLVNNGDRPKYYVTETHKPIISQEVFDSVRRLLNQRKKAHKKSQFKSVLTSFVKCGYCGSSYRRKRQNNKWIWICKKHDTGADLCEAKSVDEEIIKQAFIRLCNKLILHHREILLPLQRALQELNAKKFSGNTKILDIRRDMAGLKEQKHVIARLRTKGFLDEQKYNEQLTALDSKFSRLERELNKLSRADDEDETLEHLDILIDCIEQKSVMTDFDEELFGTVVEKIIVRNKTLEFNLISGMKLKENFETPT

SEQ ID NO: 6378 - protein, 501 aa, unidentified
  source 1..501: note = uncultivated organism
MPKVAIYSRKSVYIEGSVSIQTQIEMCKDYAIKKYNNVSFEVFEDEGFSGGNTNRPAFQKLLKAVSLKQFDIVICYKIDRIARNTLDFLNTLETFKKNNVDLISISEGFDPNTQMGKVMLTLLASFAEMERSNIQQRVKDNMLSIAKSGRWTGGSPPIGFKIGLEGGLEFSSPLLIKTIYEMKYSNFKNSEIITNIQNEYGHKFSNTTLATTLKRPVYVRSTKAVSVFLSNNGYKVLGVEDNVHSYLTYTDNNIKYAVVSNIEGLIEPSIWIKVNKDIKSKNSRGTNRFNKDYWLTKTIICPICGKTYAGQTKNWNKTYTRKDGTVYENSNTYHYYMCRDMLKGKLKECTNTKRINREHLEEKIERYIYSLKDKETFKACYSIDKKSNVQEIKKLTKLLKSKETAINNLVDKLSLLSESASSIIINKIESLSKEITHTKLKINTLELEDMDNTLNNEDIIYENIKLFNKEMNVEQKRAITMNIFEKIIYEPNEDSFKVYFN

SEQ ID NO: 6379 - protein, 571 aa, unidentified
  source 1..571: note = uncultivated organism
MTMADSMNGPVSKLARCAIYARKSSEHNLDLAFTSLDAQREACEAYIKSQAAEGWRLLARRYDDGGISGGSLQRPALQALLADIRDRKVDIVVVYKVDRLTRSLSDFAKLIELFDAHAVSFVSVTQSFNTSSSMGRLTLNVLLSFAQFERELIGERVRDKMAASKRKGLWVGGPVPLGYAVVDKKVVVVPAEAEAVRTIYARYLELGAVRALAEDLDRRGIRSKSRQLANGRIIGRGRFGVGALAYLLKNRFYLGEVVYRGEVHRGDHTPILGRELFEAVQERFAAQAVERRCRLRGVSALLAGRLFDDRGNRMSPSHTNKGGARYRYYVCHAILQNKPAGSTGRVPAPEIEALVVEALRRHLQASGTAPSAIPDNARELIERHVERVMLAPQHIKVQFRQDGEAPVAIDADNASTAPAQSNADLTTITIAWTRPHPSAVKGIIHVPAHNTPMKPSRRDAVLIAIANARQWIDDLAHGRAASFAAIARREGKAERHVRLLAPLAFVSPGIVATILDGTAPAGVTATALARALPWCWAEQERQVGIEAAAPPAPGAADRTLVRRGRPSHGPL

SEQ ID NO: 6380 - protein, 572 aa, unidentified
  source 1..572: note = uncultivated organism
MTAAARSRVRCAIYTRKSSEEGLEQSFNSLQAQREACEAYIASQRHEGWQVIAKTYDDGGFSGGNMNRPALKQLLDEIVSRLVKTVVVYKVDRLTRSLTDFARIIETFDQKGVSFVSVTQQFNTTTSMGRLTLNVLLSFAQFEREVTGERIRDKISASKKKGMWMGGVAPLGYDVRDRQLIVNPEEAKVVQEIFTQYLKLGSVAALKQYLDQKELRTKVRTSVSGHVFGGKSYSRGGLYKLLNNQVYTGRIAHRGESHKGQQPAIVEPETWEKVKTLLAANNQGHRQRGRKVTASILAGLVFDTEGNRYTPTHAVKKGRRYRYYTSQAVIQKRRQPSYLDRIPAKELEQLVFSRIRLLLSSPQEMATVYTESALLTSDLGRLIEAAQTMEEKWSEQTSQQSAELLQDIVRRIVLRGSEVEMEVDLEALASSLLQDPDASGNEGSEAQVGNHPVTLKCSFTLARRRGELRLVLPDSHVDTSSSTSSLLKAIVTVHRWKERIVAGEIASVQQLAAEANLNARYVARLFRLAALSPYIVDEVVRDRFMANHSLNHFIAGLPLDWNHQQAFVDAVP

SEQ ID NO: 6381 - protein, 539 aa, unidentified
  source 1..539: note = uncultivated organism
MTKPVKLRCAIYTRKSSEEGLDQEFNSLHAQRESCEAYVRSQAGEGWGLIKTAYDDGGFSGGSMDRPAVKALMADIEAGHVDVVVVYKVDRLTRSLADFSRMVDAFDRHSVSFVSITQAFNTTTSMGRLTLNVLLSFAQFEREVTGERIRDKIAASKAKGMWMGGNLALGYDARDRQLFVNEAEAETVRMIFRRYLELGSVHALMQELERQGVKTKVWTTRAGEQKGGFTFSRGALFHLLKNRLYLGEIPHKELSYPGKHAAIVDRLTFDTAQATLKANAVVHKDRPKKTDAARLKGLVFDEDGGAMSPSFGYGKGGRKFCYYVSTARIQGGAGAGPKDGIYRVSAPQLEAVVLERLGRLLRPKNHDDWAEVGKPLKRVEVRSQSVHLLLRAGTIIDRRPEALDSHDQVVIDGDGAIRIVLGIRPVFRGGRTWLVNPQGGAAVRKARVDAALVGALRKAHECLAEHNASPDAKPDRLLAATSPADSYARMFVQLAFLSPDIQQAIVEGRQPPGLTLQQMLDRGIPVAWVDQRVKFGFVA

SEQ ID NO: 6382 - protein, 560 aa, unidentified
  source 1..560: note = uncultivated organism
MSKQHFLAAMYLRLSRDDSDLGSVTDREGNLKSESNSIGNQRELIRAFIHEQQDMELYDIYVDDGFSGSNFDRPEFKRMISDIEAGKVNCVIVKDLSRFGRDYIESGRYIQKIFPALSVRFIALTDHYDSFQADAGESGIVLPVKNFINDSYCRDISTKVKSQFEVKRKNGECIAPFALYGYKKAEYNRNQLVVDEYAAEIVRKIFTWKIEGVAVSAIADKLNGLGILSPKEYKKSTGENYKGGFSGAAKSMWSSATVKRILTNEMYLGHMVQGKTEKINYKLKKSVEKSEEEWIKVENTHEAIISEDNFQIVQNLLKADGRVSPVTEKNSPFTGILFCGDCGEQMIRRVNRYKNTQRVYYICSTKNRGEGCSRHSMEEEQLKGIVLETVCSFANCFLHEKLMFEKAVEMETNFESIVHYDTEIARLKQEQDKYYALCSGLYEDLREGIITKEEFERLHREFKRKAAEFEEAQKKQELMIKELFKNGVVSAARLKTMQDCSELREIDRYTLCTMVKQITVFEKRRVEVEFYYTDQYRIMSELNKRQRAKERKKHPSERRA

SEQ ID NO: 6383 - protein, 568 aa, unidentified
  source 1..568: note = uncultivated organism
MRALIVVRLSRVTDATTSPERQLEACRELCAQRGYEVVGIAEDLDVSAAATSPFNRPQLGDWLTDRLGEFDVLVFYRMDRIVRRLLDLADLIRWCQEHSVSVVSATEQFLDLTAPFGDIIALLVAKVAEMELAAISDRNASAARYNIRAGKYRGGIPPWGYLPEQTEGGWRLVQDPEQVGVIREVVERVLAGEPLRSVAHGLTAQKILTPKDRFAQAQGREVKGYAWHSGPLKRSLTSPTLLGQVVAREPLTDAQGRVKRDAKGRKVFGPETVIRNDDGSPVIRAEPILTREVFDRLGVELADRENRKEPTKRSAGLLLQVVYCGVCGRPAYRLKGGAGRKPRYRCASAQYREPCGNRSIPLEYADETVETLLLGMLGTSERLERVWDSGSDHSAELAEINDTLVDLTGLLGTGAYKAGTPQRVKLNESIKALAARQAELSTEAFKPSGWTWQPAGEKFADWWDRQDVTARNVWLRSMGVTLGFVYSLEGKGPTLNLDLGDLGTLTQQLKASGPAAQWQEVFEAMTENGIAGMELGRDSVVLVRPDGQRSPAFDLGSDSLIAEQIIRE

SEQ ID NO: 6384 - protein, 528 aa, unidentified
  source 1..528: note = uncultivated organism
MKKKIRCAIYTRKSTEEGLEQDFNSLDAQREACEAYIKSQMHEGWVLVDKQYNDGGFSGGTMERPAFKKLLKDIENDEIDIVVVYKVDRLTRSLMDFSKIIDVFDKHNASFVSITQHFNTTTSMGRLTLNILLSFAQFEREVTGERIRDKFEASRKKGLWLSGTCPYGYEKNEHHMLHPQQPYADNVKIIYESYLEMKNVLKLKKYLADKKILTRSGKEFAKGSLYHILSNKVYLGKITHKNKEYDGLHEPIISEELFNKVQNLMEANAVERKHSTNAKTGSLLAGLLYDDKGNKMSPSYSSGKGKQYRYYVSQSIKNPMDYERGEITKISAGEIEKFVQADLIKLLQNTHKIQGYVTNYSVEQQKAILNKIQAFEPDKVFIRTAVRRVDLSINRISISYDIGYIVKYFATRAFNAEFKFREDDEQIIINLVDVQISLTPKRQNKIIIPGKANYDMKLIQAIVKSFWYNKLGAERKLPPEARNGNNKQLRKLRFLPREIIESIMNGTQDPELNVKKLIEMADKYVEDK

SEQ ID NO: 6385 - protein, 524 aa, unidentified
  source 1..524: note = uncultivated organism
MIKKIRCAIYTRKSSEEGLEQDFNSLDAQREACESYINSQKHEGWNLVNKQYNDGGFSGGTIDRPAFKELLEDIKMDKIDIVVVYKVDRLTRSLMDFAKIVDIFDKHATSFVSITQQFNTTTSMGRLTLNMLLSFAQFEREVTSERLRDKFAASRKKGMFLHGTAPLGYKKENGTLIEVPEQAKIVRLIFNKYLELGSSIKLQKHLEENNIKTVNGKNFSVGHISKILNNKVYIGKITYKNEEYEGLHPGIIDVELFKQVQMCLQKNKGERKYATNNHQYALLSSKLFDDKGNYMSPTYSYNRHKKRYRYYVSQANIQHKKDLAGSVNKIPGDEIENIVKQEIAAFISNKTIIQPYLNNYALEVQNKILSSLEDLKLNDQIIRLIVHKVTISKDNIVLELNKNITIKILENIAYNKEIPINIQDTEFIIIKKDIKIVSTPSHGNKLIIGDEVKYNSTLINAIIKGFYYYNLWKDGKLSPEQKKSSYVYRLMNLRFLPPNIVEDVLNGRQAAEITVKKLYEFAKL

SEQ ID NO: 6386 - protein, 530 aa, unidentified
  source 1..530: note = uncultivated organism
MPKYRAIEYLRLSKEKKGEQNESNSITNQKKIIEEFVKYHPDIQIVDAKVDDGFTGTNFDRPGFQQLLKEMEEKTINCIIVKDLSRFGRDYIECGRYIEREFAIAKIRFIAVVDGIDTLDGNGYANSLMIPVKNLMNDLYSSDISAKIRSSNDALRRNGEYIGSFPVYGYQKSEALKHKLIVDEYPASIVRYIFSQRIKGRSYSGIANELNKRGIQSPMAYKKTAGIRLKTSFSHAEKSDWSAQSVKRIITNKIYTGCLQQKKQTTLNHKLRKRIMLPESDWICCENAHEAIIDPQTFEAANSKQNKPIQNSNNFYGGLVFCANCGKEMKYHTSINNRKCYESYRCLSCHGRERVSIPKEKLDNTVLKTLNIYINTFITDLDTLAKGTDLETLAAVQNTQLKKQIDTLEKKERKLQLRIAGVSEDYIAGIIDKSEAEEYRNIYEKKLDDLICDKNALKASSSCFINDLQKTREKLDRFLTFHGINELDRELAILLVSKILISDKKIKITFNWKDEFEIFYSILKTAKEAK

SEQ ID NO: 6387 - protein, 578 aa, unidentified
  source 1..578: note = uncultivated organism
MSTLQRRSIRCAIYTRKSSEEGLEQSFNSLDAQREACQAYILSQHQEGWRAIDTHYDDGGYSGGSMERPGLKRLLADIEARKIDTVVVYKVDRLTRSLADFAKIIEVFDARGVSFVSVTQQFNTTSSMGRLTLNVLLSFAQFEREVTGERIRDKIAASKRKGMWMGGMVPLGYDLKDRHLILNEKEAEHVREIFRLYLEFGCVKQLKAHLDQRGVKSKIRVGHSGRSSGGAAYSRGALYKILQNRIYLGEIPHKGQSYPGQHSPVVDGELWERVRTLMAENVRARRHGTNANAPSLLRGLLYDEDGNRFTPSHAVKRGKRYRYYVSQRVIEDAASASVQPGRIPAREIEKVVLNELKSFFASADQVVSALADADDDLATTQTLIEAAVGYSKRLDGNSPSSLSEMLETIVARILVHQGSVEIQINRAKLRAQLLAPNRTDPQTQDAMNDLNHQPIVLTIETRLKRCGGEMRLVIPSQSADRSPDNAVPALIKALSRAHEWVRQIIAGEYKDQRAIAAATGLNERYVSRIIQSAFLAPEIVEAIVKGRQAPEVTLAALLDDVPLSWAEQNAKMVVACKS

SEQ ID NO: 6388 - protein, 569 aa, unidentified
  source 1..569: note = uncultivated organism
MAKPKRPAARQDRQSVRCAIYTRKSTEEGLEQEFNSLDAQREACAAYVLSQRHEGWVELPTLYDDGGFSGGNMDRPGLKQLLADVESGKVDVIVLYKVDRLTRSLADFARIVEVLDGAGASFVSVTQSFNTTTSMGRLTLNVLLSFAQFEREVTGERIRDKVAASKAKGMWMGGVVPLGYNVNSRKLVIDEKQATSVRTIFQIYTQLKSTGLLSDELQRRGITTRARTLSSGASYGGGRFSRGALATMLQNRVYIGEFEHRGQVYPGEHQPIIERALWDRVQELLAANRHERRTATRQTETSLLAGMLRDGLGRTMSPTHATKGTRRYRYYVSREDEALADHRLWRLPAHALEQIVLERLGAAIGEGDLLIERLSAPSGETIELVRQRCSELAEKLSTATPTNARSILNDLAQQAQLQDERIMLELDAPALLTMALGSDAGMLGLELHDASRITITVPVAIRRRGQELRLVYQPSGPVSGEVDTTLVGLIARAHQARETLIESATDVSDVERPHLTRLARLSYLAPDVQAAIVDGRQPLDLTARQLLRAAHLPGCWKTQRQVLGFAGRV

SEQ ID NO: 6389 - protein, 524 aa, unidentified
  source 1..524: note = uncultivated organism
MQDQKTGTLRGVIYARYSSDNQREESIDGQLRECHAYADAKGIEIVHEYIDRAFSARTDERPDFQKMINDSEGRNFDVVLVWKLDRFSRSRYDSLRYRAVLGKRNIKVISATENISDSPEGILLESVLDGINEYYSADLAQKIKRGNTDNVLEGKWNGGRPAYGYRTENQRFVVDEKESEAVKLVYRLYTTTNCTINSLVCTLNAKGYRGRDGKPFHHGSVCWMLRNRKYIGEFSCGGTVNKSCVPPLIDLKTFEKAQAKLKRNSRASARFKAQDDYILTTKLYCGDCGAYMAGDSTDKRSGRVYRYYTCRNVKRNHSCHKKSVNKEFIETLVVNEALKFLNEDGMVSRLTEAIYAAQFGENPRLGELEGKIADLDRKMSNLINAIEGGMAYEGLKERYDELAAKKKELSHELEEEKLDNPTLSKDQIQYALLRFKAIDIESLEDRKALIWAFINSVYLYDDNGGYAIINFNYKNHAKKVCLEDIGNSEVKPVLTLDGNFNPVHLIGDCFSIKIMFQHYHRKSP

SEQ ID NO: 6390 - protein, 597 aa, unidentified
  source 1..597: note = uncultivated organism
MQNKKMIAGEEAVYRAAIYIRLSKEDGDKQESNSITNQRELIYGFLRNKPDIQVCWERVDDGYSGINFDRPGIMQLLEEVRAGEINCIVVKDLSRFGRNYIETGRYIQQIFPFLGVRFIAVNDGYDSARPESRADNMILPFRNLMNDSYCRDISIKVRSQIDVRQRKGDYIGSFPVFGYFRDKEDKGHLVIDETAAAVVRDIFAMKIAGKNHKGIADYLNERGIPSPMEYKALLNWRYSTSFKLNPKAKWSAVAVERVLKNEIYTGTMVQGKEKTLNYKVKKRIKVEKEDWIRVEDTHEPIVSKEDFALVQKLLLWDTRTSPKEQEVYLFAGLLYCGDCNEAMVRKKQRTGGKEYTYYMCSGNKKDKTVCSSHRIRENDLKEVVLKMIRIHVFLVCSLENLLKAIKELPLQEYEVQKRQGQLKKRKDELLRIQKLKLSLYEDYKEGLLTKKDYMEMKEDYEKVCLEMEEAIRLLEEEIDSLVQGESSRNNWIDHFKRAGNVEELSRSLLIFTIDRILVFDHGVVRIHFRYQNEFAAAVRSLEEIMGETSDKNRMSERDEEAIRSFLTAAKEAGRDGEEKQKRYRAGTDCVRGEKDFL

SEQ ID NO: 6391 - protein, 624 aa, unidentified
  source 1..624: note = uncultivated organism
MKQLIKRAAVLCRVSTEDQAEGTSLDTQAEICTEEAKRRGYHVTEEDIFKEDGYSGALGIDARPVLHQLWEKYQAGEYDAIFVYRQDRLSRSLALFAALRDEARKVRRCGFKGDGFIFVQGSNDDTPEGKLQSNILATFAEYEREVIKLRTVTGKKKLAKAGKYSGGSQPFGYRWDDEKEEWVIREDEAKIVKLIFQWYVYGDESGQPLGMVRIAEKLTELGIPTPNQFRKTRKGRAGKMQAHWSDATVQRILTHTVYAGTNYLWRGDKMQVSPEQVEKIKKEKTDGWFEVDFPPIIDKMLWEKAQEKRVQSRGGFNRKRPKPILAGRIFCGICQRPFHDAMYNKGTKLVFKCNGKLKQYHLDGSPKCDSPVLDGEAVTAEVKKRLIDMLQDKDQLRKAIEEYVGSLERRKEELETLLSPITEQISHLQEKQKRLATVYVDGALSHEDYKRQINELKEQELAVRRRYEHYWPEMENLTKLEQNIAVVKEAVEEELFDVRYQPDENTVTENIAFVKVHDEKHLTVGFPQRIVTWEELLDRLQVKLWVYPDRLEVRGIVPIEDIANPKCCCLFQFASLTAPCRETAGPAPFPATKRTSPAAPSPAAGRCPENRPCPPLPGRISSRG

SEQ ID NO: 6392 - protein, 570 aa, unidentified
  source 1..570: note = uncultivated organism
MTTPRIIRCAIYTRKSSEEGLDQSFNSLDAQREACEAYIQSQRLEGWQVLRSRYDDGGYSGGNMERPGLTRLLGDINSGMVDTIVVYKVDRLTRSLADFAKIVETLDARGVSFVSVTQQFNTTTSMGRLTLNVLLSFAQFEREVTGERIRDKIAASKKKGLWMGGCVPLGYEVHQRVLVPHQEEAKQVRRVFELYLKVGCVSLLKNELDREGIQSKIRIDETGKRSGGNSFSRGALYELLRNRLYLGEIRHHTRWYPGQHPAIVSKETFDAAQGRLSSHCQGRKDGVRAGSQSLLVGLLRDEQGNRFTPSHTAKNGKRYRYYVSQAAIRNGSKGAVGTIRLPANEIERYVIAAVQTFLRSQQSIFDQLADPDDPPTKTQKLMEAGQALAGRWKRIQPIELHSIVRSVVHQVAVQREGSIRVLLSKSRLRGNLLGEEHRESSGDPGGLITIPIDAQLRRCGMEVRLIVPPAIDQTERQPLPSLLMALARAHQWYEWLIEGKVNNVIAVAIRARMNERYVEKVLRCAFLAPDIVKAILDGRHSPELTFERLVAEIPLSWAEQRTRLGSFLVP

SEQ ID NO: 6393 - protein, 528 aa, unidentified
  source 1..528: note = uncultivated organism
MTKKKPAQGGAAVIYARYSSHNQRDVSIEQQIAACEKYAASGGYNVIARYADRAVSGKTDKRPQFQRMMKDAQKGNFDFVIAWKSNRMGRNMLQAMVNESKLAEHGVRCLYVEEDFDDTAAGRFALRNMMNVNQFYSENMAEDVLRGMMDNAQKCKVNGKLPLGYKKGPEGEYVVDEAGAATVQEIYQRIIDGWTIAEIMTDLNRRGIRTGLGREWKLQSFQTLLQNENYTGVYKFRDVRIENGIPVIIPKDQFERVQVILNTKGRARGSGRLHTPYLLSGKVFCGICGSPMTAQSGTARDGKKHDYYMCNRRRYEHACDKRNVQKEKLERRVAEAVKQALQDDDLIETIVSGYAAALDEAFDDTQKTLLQAELDDVNMRLKNILAAIEAGIFNEHTQERMQELTDSRKELEESLRLEEMANQFPAPDRIRFDLLEFRNGDLNDPDYMRDLIKTFVKAVYVYDDDGNGGGRYLRVQFYYGRESRIYTDEKNPGIAGGTVQESVFKGHHKKILEPVMTISYFEITIPFE

SEQ ID NO: 6394 - protein, 518 aa, unidentified
  source 1..518: note = uncultivated organism
MSRVALYCRLSEEDHNKASASDDSASIQNQKSMLLQYAMQQGWEVFRIYSDDDYAGSDRNRPEFQRLLADAEARRFQIVLCKTQSRFTRELELVEKYIHGLFPLWGIRFVSIVDNADTDNRGNKKSRQINGLVNEWYLEDMSENIRSVLTNRREKGLHIGSFALYGYEKDPEHKGHLVIDPEAAAVVRRVFTLFSQGYGKTAIARILNEEGIPNPTEYKRQKGLRYSAPPGKTGTLWKYPAIVHMLTNELYIGNMVQGRYGSVSYKSRQNRPRPRAQWIRVENTHAPIIDRELWARVQMLISEKAKPFTSGSVGLFAKKVRCASCGYTMRSTKNRGRHYLQCSSRHVSRDACVGAFISVEKLEQIVIQELNRLSALFLDLTGLERNLEFSSTLLAQRAGLQHQLAALQRRQEALAKAIRDLYLDKTRGILSEIDFLVLSKELSAERFQLEQRMEGDRQQLVELNARIATGNDRKECIQRYITPEHLTREMVEILIDYILVGKRRPGEKAPPVEIHWNF

SEQ ID NO: 6395 - protein, 506 aa, unidentified
  source 1..506: note = uncultivated organism
MTKPPPKKIRCAIYTRKSTEEGLNQEFNSLDAQREAGEAFIKSQAAEGWVCIPTRYDDGGYSGGTIERPALKKLMEDINAGRIDCIVVYKVDRLSRSLMDFARLMEQFDRCNVSFVSVTQQFNTTHSMGRLTLNILLSFAQFEREIIAERTRDKMRAARRKGKWVGGSPILGYDLDDKLRRLTVNETEAEKVRLIFDLFLETESPIETIRELRSRGWGRKIWKNRNGGMSGGGPWTKANICGLLRNAAYVGEVHFDGTVYKADHPPIVERAIFDRAQKLMTRRNGGSQPSAFSPLLRGLLVCEKCDAPMVHSCSSKGAKRYRYYFCSRAQKQGADVCRGSGLPAPEIERFVVDQIKAIGTDPELMAATLKEAQAMVPRRQKALNQELKIVEKELASLAAEIQKTALRPENGRELADLQDKQLKAERRQTEILAELDGVRQGAISETDFLTAMRSFMPVWDALSAKEQERLIRLLVQRVGYDGDTVRITFHPAGIKTLAGAQSKEAA

SEQ ID NO: 6396 - protein, 579 aa, unidentified
  source 1..579: note = uncultivated organism
MNKGDTRQKVAVYSRVSSQEQVVEGVSIEAQLAALRAYAKSQGWEVIDEYIDGGYSGGTDERPALKRLLIDADQRRFNIIAVCKLDRYFRNLRLLLNHLHHLEQLGIKFVSTQEGLDTSTPYGKFAVQIMGVIAEFERGRIGERVKDGKRYLISEGNWPGGRTMFGYRWLAKERKWEVIAEEAEIVRRIYYLYVNDKIGTESIAAILNKEGLRTRSGALWHYSHISQMISHSGYKGHHKIGVPMPAIINENTWQLAQERRENARSLLVNPRGWLLQGMCFCGRCGHVLKCMHKKPREPRYYACRGRVQKHMNRDNEKRCDLPYVKAEWLEWGVWKKVKAVLNDSDKLAECVNKALVRLEEKKTEIGTEALATDSRLEAIMARKERLGMVFADGAISESAYRSKLSQLKKQEAAVLKRRHNIDPHELADLATLEVRITRVKDILSQGTLRITEFGIFGELGDEYIPAGFNAWRECDGELAIGEVTEMDTFRIEGTDKVMRGVDAPPGFWECEDPQKQAERIKKNMRAILQLFDIKVIVFPERVEIKGAIPTQILEKSINKEETATAPINSSPSPLLERGN

SEQ ID NO: 6397 - protein, 543 aa, unidentified
  source 1..543: note = uncultivated organism
MEEVKCAVYTRKSTDEGLEKEYNTLEAQRDSGENFVKSQKHQGWTLIEEHYDDGGFSGGNMNRPALQRLLKDVADGKVNMIVVYKIDRLTRSLTDIAKMVDIFDKYHCSFVSVTQNFNTADSMGRLTLNMLLSFAQFEREISGERIRDKVAASKKKGIWMGGCVPYGYQPINRKLTIKPEEAKVIKFMFEKYLEYKSPQAVGKLLEEAGMKTFTRSSIDRMLQNPIYIGKINHHGTLYDGQHEAIISETIFDAVQKIRALKPKNQHACLYNKNEVGIMRGLLTCGCCHSTMTPAASQGHGTKRYYYTSIAAKMYGHHKCTNGAVPLAAMDECMIKIVSQLFQDPKVFQALVEKIAPNKTMELLRVLRTPEKVFYKLPDRQKHLLMKLVITGITVNRDTMEINWTDLGLSLLPETLLQSTTGHQTILPMPFVKHKGKTEIHLPENMTQEPHFDNELIKSICLGFKYQKLLDTTKLSIADLAARENQDATCISRLIRLTSLSPAIVRTILRGHQPPQLYLRNLLRKGIPPIWEDQEKQFGFTILD

SEQ ID NO: 6398 - protein, 536 aa, unidentified
  source 1..536: note = uncultivated organism
MSGANGSNGKNGNGKAPPGPVRCAIYTRKSTTEGLDSDFNTLDAQRESAEHYVRAQAHQNWTILLTLYDDGGFTGANTERPALQRLLDDIERGAIDLVVVYKVDRLSRSLLDFARLMERFDKKGVGFVSVTQNFDTSSSMGRLVLNILLSFAQFERELISERTRDKIQAARRRGKWTGGQVSLGYRIEPEQRGLAVIPEEAEIVRTIFDLYLQTHSMGFITERLNELGLSTKRHVSKKGKTRGGRRWNKSAIYQILRNPLYIGKIRGADDQLHAGEHDPLVSLEAFEKVAESMSLRTTGRLRKNRKSEYLLTGLLRCGPCEAAMTSARGTSRTGKRYRYYRCVHQQQHGGRCPNGLLPAADIEDAVVAQVKEVATHGEVRQRILDRFFSDTNTLTAAQTTRTNLLSRIEELNAESKRLLGAFSDVGGSGGKTLAKRLGEIETEIDHLRIQLGEIEDRLRALAGAQRQVERVAKLLDGFGGLWGALVPQEQRELLHLLIDRIVVDLDAGGFRIVFHEVRVAPAPAPTATAHVEGAAS

SEQ ID NO: 6399 - protein, 540 aa, unidentified
  source 1..540: note = uncultivated organism
MENNVLKEKKQLNCAIYTRVSTTERLEQEFTSLDNQRESAESYIQSQKSEGWTASPERYDDPGFTGANTERPGLQKLLSDIKEGKINCVVVYKVDRLSRSLLDFSHLLESFDKNDVTFVSVTQSFNTNTSMGRLTLNILLSFAQFEREIISERTRDKMAASKKRGKWVGGCLPLGYNLDKVNRKLVINPVEAKLVQEIFDTYLKEQSLIAATKVINGKGYVTKLYESSKGNKRGGNKFKSTAINQIVRNAYYMGKVKHDGVLYPGEHAQIISDEVFAKVQELLTSNRRVFNLKPKHAKIGLLSHIFRCKACNASMNIAYAEKNGKFRYYHYVCLGAHTRSYSSCPTKLVNANLMNNKVVDCLRSITDDPRIKGEEWDKLGLDHKIPIIRSIIKEVRYSGASEALEIQLHDDKVYTFNVPKQELKHTPATSKEQLIKQEPQLRQNLLLAHQIQELLSEGKSDNLKQVAGWLNISPQRINQLRNFILLCPKIQQEIFLGDNKTISEIPEYKLRQITDTIDWQEQEKLWQELLSTLAKQTSPI

SEQ ID NO: 6400 - protein, 539 aa, unidentified
  source 1..539: note = uncultivated organism
MKPDPRHCALYTRKSSDEGLDQAFNSLDAQREACAAYVKSQAGEGWKVLPTVYDDGGYSGGTMERPALRQLLADVEAGRIDIIIVYKIDRLTRSLADFARMVEIFDRHGVSFVSVTQAFNTTTSMGRLTLNVLLSFAQFEREVTGERIRDKIAASKAKGMWMGGPIPIGYDKPVGGNRALVVNEAEAALVRRIYALYLDLGSVHALEQVLQSEGIVSKAHVSGTGKMRGGQPYSRGALFHLLRNRLYLGEIRHGDIHHPGLHPAILDQELFDAVQQRLDSHARKRKSARETVAHSALTGRIYDADGHPMSPTFAYGKGRRLYRYYVSAPLQQGARRRADELLPCRVSGPALEEALATALRRLLPEDSEMDQDPFARILRIEVLAEGLEFTLPIVLLRRLEDRLARGEEAVLDPANPAVLRLKLPLRLTTRRGRTEVLAASPQPRKADPVLVAALRAAHKMLTRDSRGRPCLDAAPLTSHRRRLVRLAFLAPDLQRAILAGDQPAGFTLARFLESDLPLSWPAQRQMFKAIASERQYRQE

SEQ ID NO: 6401 - protein, 502 aa, unidentified
  source 1..502: note = uncultivated organism
MQVIYVRQSVDKKDSISIETQIEICRGKIHSTNTEEVKVYSDKGFSGKSTDRPEFQNMMKELRKGQISKIIIYKLDRISRSLIDFLNMRLEFSKYNVELVSCMEDFDTSTSIGKLMLNMLMMFAEMERETIQKRIKDNYYARGEKGLYLGGHAPFGYRKIETQLNGKKTYTFAEDPEESEILKQMFEDYVSGVSLAKISKVLTENKVNTFRGNKWNGNSVSRILKNPVYVKANAEVFNFLLSKGATLNNAIEDYCGENGCLTYGATCERTGGKFANYNNYYVTIGLHKGIIEPSLWLAVQYTFDSKSNHSNLGTGSLTWLQGLIKCNCGYTYYVKKCNKYRYLYCRGRKNNSCPYPHTMLEAGKVEEIVESELLTYLHHLKDVSTSKIQKDNPEINVLKMSVAKIDEKINRLINQLSEGSEITSQYLNKSIEELHKEKIGIVDKISKIQLHENKVNEIEVDIDNVLDNWGIFELEEKKNIAKNIIDKIVIEDRSISIKCKCN

SEQ ID NO: 6402 - protein, 557 aa, unidentified
  source 1..557: note = uncultivated organism
MSRKSRYITESPVRKSVARWKAGVYIRLSREDEDAKEKDSQSVITQRRIMDKFLSEHPDIELFDYYIDDGYSGTTMDRPSFQRMKADFESGTINCIIVKDLSRFARNDDESGRYIFVIFPFYKIRFISVNDRVDSFADPNSINNLEISFKNIMHSEYSRDLSKKVRTASNIRRQHGEFIGAFCSYGYKKDPEDLHHLIIDEEAAERVRYIFRRYIETGNILRIVKELSEANVLTPLAYKKSKGCRITIPNKQINPTVWDYQSVRRILRNEVYLGHITQGTRQKISYKNKTIVMKDRSQWIKVEHTHEPIITQEQFDEVQRIMERNQRSRSQNVKHNIFAGKVFCGNCGATMSLTRSSSGSQLEYYHCNVAYIKKDACTPKRFRADALQRTILDVLNYHLKLCVDSVEVLNKINADLHKSAARHNSVVNNLRSEVVKLENCKSRLYEQYKEGVLTREQYIEKKGEAEEKIKSIEQSISKISMDTTKKMELSDFPILSQFIRNHAFSDLTREAITAFVEKIVVFSPTEIEVHLTFRDELERLREYLTYTPVQAEAAQEA

SEQ ID NO: 6403 - protein, 537 aa, unidentified
  source 1..537: note = uncultivated organism
MKSKAAIYIRVSTAQQIDRDSLQGQRRELVAYSEYVLGISDVEVFEDAGFSAKNTDRPAFQQMMERIRSGEFSHLLVWKIDRISRNLMDFSTMYAELRKCGVTFISKNEQFDTGTAVGEAMLKIILVFAELERKMTSERVSAVMLSRANNGQWNGGKIPFGYEWDGSKFGFCKEEAETVQQIYDMYEDMHSTLGIAKRLNDLGVTTRRGTQWSATTVYKILTNPFYIGCYQYNVHDEKDSFKKRHESEWVTVDDHHAPIINRPQFERVQQTLSVNSKLARRFRTRKNVHLFSGLLECGYCGSNMSSTAGKVRADGSRPSVYACAKRRNGTCPNKYTSDLEIAPFVFAVLQIILTSKELPIRSIERRFRTKLGVSVTGLEEMMQQEESDVFAEPSGVGERDILEGRKRNIENALRRLRNLYLHTGTMSEAEYEMERKKLSDELSDVEQRLSSSESVEREMTERVTYFALMDRMRTAQFDYGKFAPYADALPMQRFLRSTISRITVKDGFVSAICFKNQKTLSFSSNQKTAISPPSGQN

SEQ ID NO: 6404 - protein, 516 aa, unidentified
  source 1..516: note = uncultivated organism
MRIATYTRISTDEDRQPFSLGAQSERLESYVRSQDGWRIVRRFTDQASGATLHRPGLRQALSEAGAGVYELLLVYRVDRLSRSVRQLAQTAEELERSGVALRSATEPFETSSPAGKMMLQMLGVFAEFERATIVERITAGMERAASQGRWVVGRVPYGYLRDKQTKLIHPHEPQADVVRRIFAMYVEGRMGAEAIAKVLNAEGHRTKNGAPFARPIVLSILNNPIYAGKIEFRGTTHPGLHDPLVDSTTFEAAHRILGERGESQALRRAHPTEYLLSGVIRCGRCRRSYVGTSARGRKGLYHYYVCSTRYRYGSEFCGGDRLPKEALEEAVMEQMEDVYRDSSLIEEALAGAAVKDGEPAEDAARRLAGVRQELAGAKRSLDRYFAAFEEGSLSPADCQERIARLTAQIDALIAEEASLTQQDSEGVPEDPSAIDVAEWAKDLGTFLRAGTAQQRKALLRLLVKELRVMSRDEILPTYKIPALVRAPEGQVDLRGHYSNSLGNLQTLLRDCELLGR

SEQ ID NO: 6405 - protein, 569 aa, unidentified
  source 1..569: note = uncultivated organism
MNEQKIFRCAVYTRKSSEEGLEQDFNSLEAQREACEAYVRSQSHEGWKLIPDRFDDGGFSGGNMERPALRQLMEMVDAGKVDIIVVYKIDRLTRSLTDFAKLADRLDKHGVSFVSVTQQFNTTTSMGRLMLNVLLSFAQFEREITGERIRDKIAASKKKGMWMGGSPPMGYDVVNRQLVINEKDAGTIRTIFDLYLEVGTVPALLDRLQSDDIRTATRYSAKGNHHGNRPFTRGHLYKLLASPIYIGRVPHKTASHRGQHAAIIDQATWDAVQAQLAANTQGPRTRRRRPSAQTHLLEGLLTSERGNRFVPGHSNKGARRYRYYVEQVAAGANRHAAPIRLPAEEIETAALAAVVSVLADHRGLAHRLDGIPASQLSEALNTASDIAGRLGQGRGAKDIELLRAIIRSIEYRRDRLEVTFLGRGLSAAVGIGPAVSDPAWPVNEAPDAGDFSVTVPLATKRRGPQMKLVVHGAERPAAPDPSLVAAVVRAWDWAERLISGEVATIAEICVEEGLSDSYVGQLLPLAFLAPGIVEDILAGRQPPSLTANGLIWGETVSSLWVDQPASYAP

SEQ ID NO: 6406 - protein, 532 aa, unidentified
  source 1..532: note = uncultivated organism
MARALRNGRAVAAVSPAPVRCAIYTRKSTDEGLDRDFNSLDNQREAAENYIRSQRQQGWEIIPDRYDDGGYSGGTIDRPALHRLMSDTAAGRIDTVLVYKLDRLSRSARHFAKIHEYIEDHGAAIVSVTESINTKTSHGRMMVNMLVSFAQYERELIGDRTRDKMHAARRRGKWTGGMPPLGYDVVLEGGKLLVNKQEAEQVRGVFGLFLEKQSLVGTAQELNRRGWLRKSWTTRKGISRQGAEWDRVTLRRVLCDPICIGKMKLGGEVFPGEHEGIIPKAIFEKVQALLEGNSRDGNSSIRNRSGAILRGLLRCSACDSAMTPSYTKKDGRLYRYYTCSKAMKRGHDTCPAKSVGAANVEDCVIGQIRAIGNDPNLCRETFRQALAQVAAQRRGLKAEARRIAGEIGKAREDVDRLVGAVSEASNGAREALFKALEKAQQRLTTMENRGEEIRGQVETLQGCEVDEKEIAQTLEAFNPIWEVLHTPEKERVLRLLIEKVAYDGRTEELAITFRPTGIATLAAEVGPQVETR

SEQ ID NO: 6407 - protein, 585 aa, unidentified
  source 1..585: note = uncultivated organism
MASNQEKRSVAIYSRKSKFTGKGESIENQIELCRQYIAIHFPEIGEDDIYIYEDEGFSGGNTQRPQFINMMKKVRAGNIRTIICYRLDRISRNTGDFAKLIDELDKRNVEFISIRDNFDTTNPTGRAMMMMVSVFSQLERETIAERIRDNMHELAKTGRWLGGNTPTGYKSEKVEKTTTDGKTRSLYKLDIIEQEAELIRLIFNQFLETNSLTKTETYLLVNHITTKNGKQFTRFTIKSILLNPVYMAADSDAWEYFKQADIEIYAEQSEFDGSCGIMAYNKTSQSIGRANQINDMEEWIVAVGKHKPIISGADWVKVQKMLGQNKSKSYHKPRSNVALLSGLLFCGKCGDYMRPKLSKRINKNGEQIYSYLCQTKEKSRMQLCDSKNPNGNILDALVCEHIKKLSNDSSDFIRQLEKAKKQMNESGQEYDNQLENCKKELADIEKQIKALVTALAQSDGTTTYEYVNQQIEELHQKKLGIENRIEELKCLTQNHQLSDKEFDVLRDMLCSFAGSFDTMNIEEKRAALRTFVKKVIWDGKNAHVYLFGANSDNIEYPQIEGDEEPLRGGSKRDTNDAQSQEKEPQ

SEQ ID NO: 6408 - protein, 515 aa, unidentified
  source 1..515: note = uncultivated organism
MSEPLRRQRAVVYCRISDDREGQGLGVERQRADCLARAEREGWHVAEVYTDNDVGASTKSRKARPSYKRMLDAAERGDVDIIVSYSNSRLTRRPYEWETLISLYERKGVLLRTIVSGDTNLETADGRAVARTVAAWDAAEAERTGERVARAAKQRREEGKFHGGNTPYGYAHLGDGMLRINPEHAKVINEAARRVTSGESLYGVCQDLNRRGMKTGPSPRARHGAAWHGRTLKHVLTSPATVGCMEDEDGTLRQVAEPILDRPVWLMLREILYAPSRYASTRQRDWSNRRRYPLSGLLFCGLCGHWLSGSHRTPPPRKDGVKRLGVRTFACVSTNGGCGKIQIDYLPVEAWVLGQVFARLEVPGVQTALSTREEPTDDDQLRQLISADERRLERLDDEHTDGVLDDRRYRRQVARLTERVDTMRSQLAETLRETFIIDTNGRSIQDAWAEHAEDTPWRRALLAHVIDRVTIMPQPPGVASTLTRRRGESDEQLASRRKDHQELLLRQRVRVSWLT

SEQ ID NO: 6409 - protein, 578 aa, unidentified
  source 1..578: note = uncultivated organism
MNNERMIAAVYIRVSTEDQAREGFSLGEQKEKLLQLCAFKGYEVFKVYEDAGISAKDMEHRPAFQEMLQDMRDGKINYIVAYKLDRVTRSVRDLEELISQLEIEIVSERTKFGLNGAIKSSHLPGPAPLGYKKDGNKKTIVDETTKPIIERIFKMYLEGKSFQQISNVFNEEKILNPKKWKDTTIQKIIDNKIYMGDYEQYKRIAKKENKEPVIYMNVVEPIISRAMWEECQRQKEVNQRTYTRDRVYLFFQKIKCPTCGRIMKCKGSGGKKKKYMYYNCEKCHLNYREDKIEECLIQFIYDLVEYDMAVKKYFLPILADHKPTKTNDIDKEINELTKQKERIKKAYMSGIVEMEDFSEDYKLIEEKLEILEQKKSELLNLNNISFTPQQLMADRDIERETMIKLEILNDVVKTNWESKTKDEKQEFISKFIESVILIKDKNNELYIDKINFRKSYINNLLKFLDKGILDVLVPVEINGKEKFIIGSQNISNEQVQEYLDRLNEFYETKMYQLYEKVDEDTGNIIGEFTPKKNEKIIRIVPISPTEIKTKSIINKEDIETKYGIITYNPNKPNKKGND

SEQ ID NO: 6410 - protein, 544 aa, unidentified
  source 1..544: note = uncultivated organism
MNAAVHAGLYCRLSVEDDASQESESIQTQKAILTDYCKQHGYHIVDYYIDDGETGTNFERPGFQRMLADIDAGKINTVICKDLSRFGRNYYEAGRYLDKDFVERGVRFIAPGNNVDSAKGGYDLTVPFLNMMNDYYARDISLKTKAAKEARARQGMYLGSKAPYGYVKDPADKHHLIVDEEAAKVVRRIFQMASDGMGYNKIARVLHEEGIPNPYSYYALQHPGYLPGRNLPIDTRWHVTSVQMILKNPAYRGDCVNGKVGNKIMHGQQRRRPEEEWIVVHNTHEPLVSEEQWEQVQRLIAVRRKSCLGGEPQMFAGLVYCSDCGSALSFSRVHHKTKPDSGKFKCWVYSRHGKEYCTSHYITLEQLSAVVLDDIRRQAAFAKYCRMEYLQRLVSAQTKRDAEELAEKRKSIEADQTRMAQLDRITQNLLEKNAMGAITDAQFAAMNAQYASERTALETRLASYREREEGVELATLNATKFADLIESYLEIEALSARVLNRLIDKIVVHQRQKEVNGSQFQQVDIYYRFMGMLPIRLEDVSEPA

SEQ ID NO: 6411 - protein, 584 aa, unidentified
  source 1..584: note = uncultivated organism
MNDISNKKIRVALYIRCSTDEQTKGYGIPVQKEKLVAFIKSQENQIFDEERNLYKDEGYSGTLPVDSRPALKQLFEDAKNKQFDVIYVYRLDRFFRKTQLLLEAIAKLTDFNVGFKSITENFDTTNSTGKFMTTLLGAVAEMERDTIRERTTNGRTMAAKNGKWVVGMPPYGLVKDEETKKLVIVEKEAKVVRMLYEWVVYEKLSLNKIAERINSMGIDSPKHVMINKRVTHNYWWERTIGRILTNEIYTGVAYFRKYKRPYKNLTSLVNEDLKRPQEEWIEQKVPPIITRELFDKATRQLLLNRENAERNMQRSYLYSTLLTCGYCGFKMFSGYQPPRKGKHTDKTGRYYHGVYRKKDMVGTTKRCPTCPQYAESRLEPIWETLVDILKNPKNLREPLERYSFKVVDADSIKIKQTRNNDKIKDLDSKLKKLAVLFVNNESVELADFKKMESEYSNEKDKLINDNLKLGQSLLTKKDTKNREVVLEELYEKIKDKLDNVSYEDKKYTIHLFIERITLHAKSNYAEVIFKFPTTTVISNTTLDVSQPHMPLFLNVKTYSEGEVRSKIIEANPLMGKNDVRTKTP

SEQ ID NO: 6412 - protein, 563 aa, unidentified
  source 1..563: note = uncultivated organism
MKKSKSKKTLKAAIYIRVSTVEQAENDFSSLDGQESQCHTWIKSENMKLSPGEPNIEFYGLYKDTKSGKDLKRPGIERLIKDAKAGKFDILLVSKIDRVSRSIKDFLNFFEELQEYGVDVAAATQKFDTTSPAGKALQQMLLVFAEFERNMISERTREKRIETVKKGLWPGGTQRIGYDIVDKKLIINKEEAELVKEIFNRYLKLKSSREVAKSLNKDGYRNKTYVTKKGVAKGGGKFNVSSILSVLNSRLYIGEYDIDGAIYPGIHDAIIEKETYEEAQKLLLANNVKPNNHNPQNSSTPAILSGICICGNCNGAMTVSSTTNRANTKYYYYKCSEKNKMGTSNGHNPKDLSVPILDEFVIETIECLLHAPELLEAMRKRLKFEGEDQIQILEQRIKRITNMVKALKKDKANTLKLVTDNVNATLRDTYESQLESILLNIEEKEDEITFLKEQLEQIKLRRPIGKSAYKQILKEFHQRFSESDIQMRRDLTKTLVKNVESSVNQKSDDGIINVKYIADKRLEADWAEIKNANTVNVRIFDGSGSPGWIRTNDRSVNSRLLCH

SEQ ID NO: 6413 - protein, 509 aa, unidentified
  source 1..509: note = uncultivated organism
MSEMLKPVCLYLRYSDRSQTEQSIEGQQRVCMEYCERNKLNVVEVYVDRATSGRSTEKRVEFKRMMRDSEKKMWNGVVVYKLDRFARNRYDSATHKARLKKNGVKVISATENLSDNPESIILEAVLEGMAEFYSAELSQKITRGMHESALKANSVGGSIPLGYVVENKKLVIDPATAPLVQEAFQRYAAGETVADICRSFNSRGYRTAKGAEFNRGSFKSIFKNEKYIGVYTHKEVRIEGGVPAIVTDELFEQVQARLSLTGEAPARGKAKVEYLLSGKLFCGHCGSPMNGESGTGNGGKYNYYSCYSRKRKRGCDKKPLRKDYIEELVARDALEILTDEMIEELADMAVKQTVTDLQETTNLPELLERNKEVSNSISNIARAIEKGTASDTLMKRLTELEIEKRDITKQIDIESKYVYLIEKPQVIYWLNKFKDGDIRDDDFRRRLVDMLVNSVTVWDEPDGYRITTAYNLEPNIKKTYRVDKNSNTKSIEGFGLGEHTSTIGSQPEA

SEQ ID NO: 6414 - protein, 585 aa, unidentified
  source 1..585: note = uncultivated organism
MASTTTVKVRKATKQAVNRRKGIHMSTLRVAAYARVSTDSEEQLESYQSQVKYYTELINSNPEWQFVGVYADEAITGTQTAKRDDFNRMINDCMNGDIDLIIVKSISRFARNTVDTLTYVRSLKEKGVAVMFEEENINTLTMDGELLLTILSSVAQQEVQNISEHVKLGLSMKMQRGEMVGFNGCLGYDYHKEDKSITINEEEAETVRYIFERYVQGAGGKVIARELKNLGYKTKRGDCNFSEHGVIGIIKNEKYKGDLLMGKTFTVDPISKRRLDNMGEADQYYTENHHEAIVSRELWDRANEILNKRKGSHSRSNGKRDKYSRQFSFSCMLKCGFCGGNLTRRTWNSRADYKKVIWQCVKSTKHGKKECPYCKGVPEALIEEAFVRAYNALCTYDGDFIDGFIEHVKAGLQDSDTDREMKSVNKKITRLKERKSSLVDMRLDDKIDEEIYQMKIAEVNQKMDELLLKKQSLKDRQKDQQDINKRLSDFQKIISKGEVLQKFDRHVFESITDRIIVGEKAENGEINPYKLKIIFKTGYERDEVASEQPFSFGNSCSNTHNDCGIISPQGDNDTCGDGLFIVQTS

SEQ ID NO: 6415 - protein, 509 aa, unidentified
  source 1..509: note = uncultivated organism
MFSTAQVDANRVAVYIRWSTEEQGSGTTLEVQRDACRHFIKSQGWAFRDDLVFVDDGYSGGSLRRPALAALRSAVGGGQVCAVVVYKLDRLSRNLMDCVNLVRQEWSGVALFSTMERFDTQSSIGQMVFNILVSFAEFERNLIRERTMSGKRKRREQGRNPGMQYPYGYRKGVDGGFAIAPAEGEVVRQVFAEYLSGSGLTAISDRLNRQGISAPRGGLWRRATLRLMLQNPIYAGHLPGGYYSYDQGRQKRGKAPAFLLRGAVPPLIRQSDFDRAQSIREDRAEQKRSPDRSSDYLLTTILRCAKCGGPMSGQNGSDGRRYYRCANQKDLKTCDSGIIPKALIEQEVLRAVRDRLSPENLRTHIRSLEEHREQHIAGRRSVVEQLSGRLADLQMRREKVDLDYLTGAMEARQHGRLMDRLEAEISSVVDQLERARAACTEAEQSSVDLARLLALAGQIEDLAAQDPMTIRSILRQLVASLTVYRERGRHACAPIDLTIAHNVEFLTRT

SEQ ID NO: 6416 - protein, 564 aa, unidentified
  source 1..564: note = uncultivated organism
MLHPKNVSLERVVAYARYSDDGQREESIEAQLRAIRDYTKKHDMRIVHEYIDRAKSGTNDRRPEFQRMMTDSKKRGFTKVIVHKFDRFSRNMEDSIMYTIELRKNGVTVLSAMEQFDDSPMGSLMRYISLAMADMFSKNLSGEVEKGKRENAYKGMHVGGVPPLGYDVDKSTMKLIINETEAESVKLIFSMYLEGQGYGKIIDKLNFYGYKTKRGHAFGKNSLHEVLRNEKYTGTYIYNRTKNKTGEKYNRHKINPDEEIIKVENAHPAIISREDFERIAVKMAENRNNAPSHTAKEVYLLSGKVFCGECGSRYNGINHVAHGRYPQYVSYRCSRRNGSLKCNNSEIRREAIELYVIDKLANYLFSDGMSERLYKGYTAYFLTRRSVVLNELEAVRKGIGTVTSDIEKLIDLMIQTNSAAMGERLKDMEDRKRELHERENELDGAARMVLYRKSTYIKAFAKAKKRLLEGKLEQTRDIINEFVDRVEVYKDRVDVYFNFDGDADAIDAKIPQAQQSDSYTAVFVLPSINDKIDTMSGRGRRARTLDLRFWRPSLYQLSYTPICS

SEQ ID NO: 6417 - protein, 562 aa, unidentified
  source 1..562: note = uncultivated organism
MLNLTLDREYKAAIYLRLSREDGDFSVANEKTESNSISNQRLLIKEYLKKHPEIAVVREYCDDGYTGANFDRPQFQRMMEAIRIGEIDCVVVKDLSRFGREYIGAGEYIEKVFPRLGVRFIAINDNYDNAQPDAGNNALVLPFKNLMNDSYCRDISVKVRSNLDAKRRNGQFVGAHVPFGYMRAPDNKNQLVIDSPAASVVQDIFRWKIEGLSPNRIADRLNEINVPSPIEYKKAHGSKQRTCFQTKKVAVWSAVAIYRILKNEVYTGTLIQGKTTSPNHKVKKTIAKPQAEWSRTENAHEAIISPAQFDLIRKIMLEDTRSPAGASGVHPFSGKIFCADCGSPMVRKVNHHGKREYAYFVCSGNKHDKKSCSSHIIKESIVYDTVLAVVQGHIAAAMNMSAALEQIDRLAWENREIEKINAKISFQEEMIEKNRRLKVGAYEDFKSGFITREEYKAFTAQFDIQINEAAEAINQLISERNSVMDGLVAQQGWLEQFKQYKNIQELTRSTVVNLIDNIRIHASKDIDVALMHGDRFASIVAFLKEEQIGQTQQAAQLVKGVI

SEQ ID NO: 6418 - protein, 612 aa, unidentified
  source 1..612: note = uncultivated organism
MPSAPTQRARQNHRPAQPAGAPKRCGIYTRVSTEMQVDRNSLSTQESQLTSYAQMHGWAVANVFTDAGLSAKDTRRPALQQMLKWAAEGKLDVVLVAKVDRISRNLMDLLKLIADLKSWGVDFVSASQSFDTSTPMGMLILNVLGSFAQFERDMIGQRVRENMRQRAKSGKWSGGIEPFGYRRNGQTKCLEVEPAEARTVKAIFAEFLRHRALHRTVVTINAAGHRTRDGRPWAPTSIRRILTSPTYVGALCYAKRAMQGNRIVPQDPDDWVVVEGACEALVDRRDFDEIQAELNDRRRRHSWCERSIYLLAGMVRCGRCGGRMAGSTHRDKRDGSVCSYYRCRTRAAKGKAICEGLSCRRHDLEQAVVRHIIGFDPDTLCQELKDYKERAAAELAPRVQRHEDLEASYARFQERERRLLELYEEGIIELDTFRERRAHLERERLAVAQELAELEIAIPESSLDDLDPDALVAQFRELQATFPSLSQADQRRLLQAVVSEITVQPDGKVQVDFNLLAGLRGHELPLDHCREFDLDPAVTPQTLGEQLVQYRQAHHLTQKRLAALLGVRQYTLCQWELGRVEPAPRSKERIEQRTGLALIANGNGRKPKAASP

SEQ ID NO: 6419 - protein, 570 aa, unidentified
  source 1..570: note = uncultivated organism
MARKAGRFNAVSVSAVVTNDVQAVETKSYRTAFYARLSVELKMKPSDSIANQLAIMRDYTKDRAEFTDTYEYIDNGVSGTSFDRPAFQQMMEDARAGRINCIIVKDLSRFGRTYIESGNYIETILPFLGIRFISVNDHFDSEEGFNQNKSLEISLKNLVNDMYAKDISKRVACSRRMDMEKGKFVGSNAPYGYLVDSNDPLRKYVVDEQAAQVVRQIFAMALEGTNLRSISSALQSYHLSSPGEYLKTKSLYHSNEKDVKPWYIGTISTILSNQAYVGNMVQGKRRTRLSENEKQHFTDKNEWIIVENTHEPIIDKETFYAVRDLFAKKVEESAFSSERGKNIPMKADIFDGIIYCGVCGKKIPMMSRLVDRNGKMKRQYFYQCRYNYDAGGDKKCVGSWLEADLIQLVYDALSFQIAMQYEKADAMVDEMNEMIAKTMNAFDHKIKSLEKRIEKIEYSESKSYESYVLGDITKQELSQQQQKNAKEITGLRGQIVDETENKTREKKKLEKEIRWWSAASCMRGKASLSREIIEAMISSIKLYPDKNIRITYNFKDPLAEEREKYRREHA

SEQ ID NO: 6420 - protein, 532 aa, unidentified
  source 1..532: note = uncultivated organism
MRKQRQYNVGIYERLSREDEREGDSVSIQTQDQILRKHVLEQGWNLVDVYVDDGYTGGNFKRPALERMIQDAKSGRINLILVKDLSRFGRNYIEIGQYTDYLFPSIGCRFVALHDGVDTICDDNEIMPFKNLFNEYYLRDCSKKAKHAKRSMAERGKFIGSYAPYGYKLSGDDQRTLLIDHAVADTVRKIFRLRAQGIGARTIASTLNGEGIPPPSAYRGVFTKPQAETPKWNGNTVAAIYSNEVYIGNLVSRKTETMSYKSNIRIDRDEEDMVRFENTHEPLIDRDTWDACVRVMQRNSKAGATKTGESRLFSGLLYCADCGYILTSQADVARSGNRYYYYRCGRYSSGGKGACTSHGISERVLSGLVLDDLHEQLAGASELNDAEISQMIVKSRRKSIDESIATDQEQARALRFRLDELEKVVCSLYEDKALGRIPEQTYFTMTDKYQAEQAAKKEQLRQLEAQLAQAKGADECVLRFIGLAKQYLNAEVLTREMACRLIDKVVVGEKKVVGEKRVQDVEIYYRFIGRVH

SEQ ID NO: 6421 - protein, 598 aa, unidentified
  source 1..598: note = uncultivated organism
MVPMEIKQKCAQYLRVSSEEQVANGYGLDVQKEKNNALATLKDFEISDDCIYSDEGLSGTLPPDKRPQLKQMLEDAEAGKFDTLIVYKIDRIARDNYITLGVVKRLTACGVKLISATEPFDTSTTIGNYMVQLLGATAEMDRNNIVERTTAGRKMSAQKGTWVFGSPAYGYKYNKETQRLEIKEDEAKWVKQFYEWLVYDQLPLREIAHRANELKIPTQETGPSSRQTTTGLWYPRTLGRILSNDTYTGVKYLGKYRKSPRNFKMATDPKNMNPESEWVAVSVLPIISEEMYLSSLRQLKRNSELAARKKIRDYMFSGLLHCSDCGYKFRGGFAKPTSKTANGSRFYLAIQSGRESKLADSKKCKYCGSVSESRLMPIWYALEKILLNPEIVFGKLERHASQNTDESKQESLESVRLKREQLDKDRQRLNIAFIDVGSIDSREYKTKLKIIDEKLNLLVQEETNLVGTLLSKEEQVDGKVKLKKLFKQYKKNIENASYEKKMQILQIFVNSIDINLANNMATVQLNFANVNVLKDNPRGGGPSKSSPLIMSVPTITSKEIALAEYPTHSRYYIHSHTVRTATEQLSKKKSKRMKIMVN

SEQ ID NO: 6422 - protein, 612 aa, unidentified
  source 1..612: note = uncultivated organism
MNEKTRICGLYLRVSTEDQAREGFSLPEQKERLEALCKFKDYKIYDYYKDAGISAKTGNKRPEFDRMIEDAKSGKINTIVALKLDRISRSVYDWEFIMKITDEYNIDLVCANDDVNTTTANGKMITRIMMSVSQNEIERTSERTKVGLSGAIKQGHIPARAPIGYKHIDKKLVPDPLTKDIVIRIFNLYFEGNTYFRIANTFNEEQVLGKTNWCDTGILKIISNVIYKGDYIQGKSKSNPIYYENVVEPLISKELWENCQAQKKKNSRHYMRSQTYIFLQKLKCPKCGRILAGRASHKLKADKWYYYYGCEICKSNIKEEAIEESVKHLLSDILEYDNVVNEFFLPLLKNKFNDSKDELEKILKTLKNKKDRLKKAYLEEIFTMEEFKEENRKIDFDINNIETKLLENNQNEQLNFTIDDILLKRDIDFINKVKLPISYYAFNDKWELLDRNDKFNIVMKYIDDVELELVGKEYRVKQLNFRTTFYEDFQELYSKGFIDKKQPLTYESNGISTSMLIRYSEYLPIKNVMKNFYKLNEYYEVNLYKGTFYKETKKLDIGPFLKNELPIRVFPLQENNDKKDWISMGMICTQNNPNDIKVNIRDMFETIPDIDK

SEQ ID NO: 6423 - protein, 530 aa, unidentified
  source 1..530: note = uncultivated organism
MSRQRTEGSSALQERKVIVIGAAKKPEAQKLRIAAYCRVSSDSSDQLNSFMAQTRYYTDLISSNGSWTMADIYADEGISGTSIEKRPEFQRLLADCRRGRVDRILVKSISRFARNTKECLKTIRSLKAIGVGVCFEEQNIDTSQMSGELLAAMFAAIAQKESESISENQRWSYQYRMENEKFITCKAPFGYRLRENTLEVYEPEAKIVREIFSRYLQGDSKDEIAQWLSTLGVKTRDGKDRWQHTTISYILRNERYIGDSLLQKKYTTDSFPHQKKRNHGQRDQYYRTASHPAIIDREIFNAAKKLLELRAEKVIAGKATNDPMAQKLYCGACGTMFRKKICRGITYWECRNHSRGKGNCPITQIPEREIHAAFLRLCHKLKLHGGPILKELLLKLQAIRERRMLWSEGIIELNKRICDLTDQDHTLSRMNQCGLVDPDIFISQSNELACQLTAAKQEKERLLAAAGDDSIPKTMELLETLESMPEYLLQFDGEIFGDLIEKIIVESNESLRFILKNGLELTEKIERTVR

SEQ ID NO: 6424 - protein, 592 aa, unidentified
  source 1..592: note = uncultivated organism
MPDHTNIIAIYSRKSKFTGKGESIGNQIDLCKEYVERHFGKCAAEQIVIYEDEGFSGGNLNRPAFKKMMEAAKKRQFQAIIVYRLDRISRNVSDFSGLIEELSRLNIAFVSIKEQFDTSTPMGRAMMYIASVFSQLERETIAERIRDNMHELAKTGRWLGGTTPTGFASEAVQSMTMDGKTKKACKLKLIPEEAKIVKSIYDLYLETDSLTMTESALMQRGIKTKKGNYFTRFAIKSILQNPVYMIADEEAYRFFLQQETDLFSAQSDFDGVHGIMAYHRTDQEKGRATIYLPPKEWIVAVGKHPGLVPGKVWVTIQKSLARNKSKAFRKPRSNEALLTGLLFCSCGERMYPKVSKRKNAQGDSIFFYVCKRKEHSQRSLCNSKNVHGNTLDLAIMEQLKQLPEDQETFLKQLEQSRKFYTGNPMEWEGRLTELKNKKLDTEKKMGSLVDSLADIQESAARAQVSKRIEELSCQCDGLEKQIQEVENFTSQHALSNLESGIMGQMLSLFRDSVDQMPLEQKRSAIRAIVRKVIWDGTNAHVILLGVPDDEGENRQLLPHRSANHMGESSPPLSSGQIETPGTSKTPWSEDSK

SEQ ID NO: 6425 - protein, 521 aa, unidentified
  source 1..521: note = uncultivated organism
MRRARAINGNSRAAVVPAVRCAIYTRKSTEEGLEQAFNTLDAQRDAAEAYIRSQQEEGWITLPAHYDDGGYTGANMDRPAMKRLLADVESGAVNCVVVYKVDRLTRSLLDFARIMEILDEHGATFVSVTQQFNTTTSLGRLTLNILLSFAQFEREMIAERTRDKMSAARRKGKWVGGNPVLGYDVSPQGGALVVNEAEAERVRTIFDLYLEYGSLIPVIDELDRRGWSMKEWRTRKGHMAGGKAFTKNRLYNLLTNVSYTGKVAHQGQIYPGEQGQIVDLDLWNRVQERLKANGQSGSREIRNKYGALLKGILVCDTCDAGMVHTYTKKSANRLYRYYVCVKAHQRGWNKCETRSIPAPEIEQSVVDQIRSIGGNPALLNEVVRQWEEQREMHTSALERERRFIERDLKQLAAEMPDVVNGGGATGRLAEVAERTECLGRRSAEIRAHLAALDADPLSRADLERALRDFDGVWQQMAPREQEQFVKLVVKQVRYNGKTGVVAVDFHSAEIRRLCINGGATR

SEQ ID NO: 6426 - protein, 530 aa, unidentified
  source 1..530: note = uncultivated organism
MSELRATAPKVTVRPATRNRFTALPINGTRKRRVAAYARVSTDSDEQFTSYVAQVSYYTEYIKGRVDWEFVEVYSDEGLSGTNTKYREGFNRMIEDALAGKIDLIVTKSVSRFARNTVDSLTIIRKLKEKGVEVYFEKENIYSFDSKGELLLTIMSSLAQEESRSISENVTWGQRKRFADGKVSMPYKHFLGYRKGENGEPEIVEEEAKIIRWIYQLFLYGKTPCGICQILDEHKIPTPTGKTKWNPGTVQRILTNEKYKGDALLQKTFCTDFLTKKMKVNEGEVPQYYVENSHPAIIAPQVFADVQEEIARRRNAGRYHRGTSIFAGKLKCGCCGEYFGSKTWHSTDKYRKEIWRCNLKYKGAEKCATPHVTESEIHEQFVKAYNKLLDERSFIFEDCQMLIDMLSDNAVLEKELVDCEAEMAVVEKLAQQMIRENASRSTDQEEYNTRYAALVTRHQKAQSTQNRLKKTLDDQKTRVLQVKQFLKDIENGNVINEFSEQLWISMVEDVTIANDKSWTFKFRGGTEIMV

SEQ ID NO: 6427 - protein, 560 aa, unidentified
  source 1..560: note = uncultivated organism
MDIIMDQLFRVAIYLRLSKDDGDFSSGMEGKNESNSIHNQRKLLLSFLEKRPEMELYDEYKDDGRTGTNFDRPDFKRMMEDVRTGAVNCIIVKDLSRFGRDYIECGKYIEKIFPQLGVRFISVNDGFDTAAASSSDSIVIPFKNLINDSYSRDISIKVRSNLDVKRRQGEFISNFAIYGYTKDPQDKNHLVIDDYAAGVVKDIFKWKLEGLSPDRIAGRLNKLGILSPMEYKKSKGSRYKTAFKTGSKALWSHVAVRRILQNEIYAGVLVQGRRTTPNYKIKRPIYKDESEWVRVEGKHEAIIEKSQFDLVQQVLREDTRAAAKESSVYPYCGRIYCADCGAAMVRKTANSGGKRYVYYVCSANKADRTICSKHSIREDALDKAVLKTIQRQIEVALDLDRVMQQIDAFDWEKVELRKIDGNIEYQNQVIEKNNVLRLGIYEDLREGILSKDEFLTLKAEFTARIEEAEGIIEQLMMDKNSIMDGLGKQQNWLSRFREYENVSEISRVLIVNLVARVNIYENAEIEVVFRHQNQFAGIMEFLKTQENDGKDAAYHGLEVV

SEQ ID NO: 6428 - protein, 526 aa, unidentified
  source 1..526: note = uncultivated organism
MTTRRQPAATPPLPEPKRCAVYTRKSTTVGLEQDFNSLNAQREACEQYIRSQAALGWQLIPESYDDGGFSGANLERPAFVRLMQDVEAGKIDVVVVYKVDRLSRSLLDFARVMDRFNRAGAAFVSITQNFSTADAIGRLTLNMLMSFAEFEREMIAERTRDKMSAARRKGRWTGGPPPVGYDVVDRKLVVNEAEAALVRRIYELYLDLRSVVAVAGALNAEQRTTKHYVSIGGRSHGAREWESNSVLHVLRHPIPAGLMRCHGEVHEGQHPAIIDRVTYHRVQNLLDERGGQRTRWGRNPDYLLTGSIYCALCGQPYSPASTRKGKGEYRYYRCSKRGKRGLDGCRAAPLPAHAIEEFVVERVRAALADGRLAADVTQAVKERLAGQRAALVAERQELPGKIATLSSEGQRVVELAGNLSGAGRRLLDTKLQDVGDQLGRLEARLRDVERRICLLDDCEVEAEWVSRCLADFNQVWDTLNPENRGRLVRAVIERVEVDEPNSGVRVFIANLNPSPAAAVRAIAVNS

SEQ ID NO: 6429 - protein, 520 aa, unidentified
  source 1..520: note = uncultivated organism
MAADNLARKAIVIPASQAPETIQLRVAAYCRVSTDSEDQKNSFAAQNAYYTAFITRKENWTLVDIYADEGITGTSAKKRPDFQRLLSDCRKGKIDKVLVKSISRFARNTTDCLEAVRELKALGISVVFEEQSIDTSVVSGEMLTAVLASCAQAESQSISKNLKWSYQKRMESGNFITQKYPFGYRLVEGKLIIDEKEAATVRKIFHLYLSGWSTVEIAAEINKAGVPTRDGLNSWSCATVKYILQNEKYIGDALLQKKYSTDTFPYQKKPNKGERPQYYISDTHPPIIEREMFETVQALYKSKRPQIVGTPRLRYDFSQKVFCGNCGTCFKRIVNRDTPYWVCYCHSRGGDCSTPPIPEAELSTAFLRCYYKLNHSGILEKLKDSLITVRSRQMLWHPDVIELNKQISNLSSQSHMLTVLNRQGAVDPDIFISQTNQLAQQLRKAKRQKEKLLERDGNDALSKTRELMEILEYGPESLDAFDGELLGELVEKIIVESNEQIRFRLINGLELPEKIERTVR

SEQ ID NO: 6430 - protein, 564 aa, unidentified
  source 1..564: note = uncultivated organism
MSKVQVIQAQKEKIDRNTGKTINKARVAAYCRVSTDSDEQMNSYQSQVHHYTELIKKNKEWEFVDIYADSGISGTQSDNRDEFQRMISDANNGLIDIIITKSISRFARNTMDTLKYVRMLKDENIAIIFEKENINTLTMNGEMLLTILSSLAQQESESLSANTKMGLKMKMKRGELVGQASCLGYDYDKEKKKLIINEEEAKIVKYIFNRYTSGIGCFVLARELTEMGAKTKKGNTTWSDSSVRGIIKNEKYVGDILMGKTFTLDPISKRRLDNFGEEEKYYIKNNHEPIISREQFNKAKEILEKRSRNHNQGRMKKHSLKYAFSSMMKCAYCGGNITRRRWHSGTDKQKDVWFCTTAIRKGKKSCPECKAVEEKIIENAFVKAFNILCRDNKTIVEEFLENIEKELQSKDNKKLLNKIDGDIRNVENKISKLLDLHLEDKIDKENYEEKYTELKKGLQDLKAEKRELDKTEDEEKTINERIASFRKLFESKEPIAEFDREVFKTVVEEVIIGGYKEDESIDPYMLTFIFKTGLISKIDGHKQISKSEQNAGLQKCTYQEDNPR

SEQ ID NO: 6431 - protein, 510 aa, unidentified
  source 1..510: note = uncultivated organism
MKKVPEKKQQIRCAIYTRKSTEEGLDQEFNSLDAQRESAEAFIASQRHEGWVCLPERYDDGGFTGGNMERPALRRLMAAAEAGGIDAVVVYKVDRLSRSLLDFTRIMEVLDRRGVSFVSVTQQFNTTNSMGRLTLNILLSFAQFEREIIAERTRDKMGAARRKGKWTGGKPFLGYDIVPGGRALMVNEAEAQRVRQIFGIYLKTQSIQATVAELNRRDWTMKRWTTQKGRDFGGGAFNKSSLHGLLTNVAYIGQVNYQGHIADAEFPGIVDPATFRKVQKYLAENNRCTGARVRNRHGSLLRGILRCGHCQTTMVHAYTRKGETKVYRYYVCNRAMKEGWDKCPAPSLPAGEIERFVVEEVARIGRDPGLQEEVIRQHAAARRRELAEIVAERRKLEQQIKRLRDEVREAAAKGDAERLVECQRQADAVERALADNRARGEVLAAEDVSEEVLRSALERFTPVWESLTLPERERMLQLLVERVTYDGASGEIAIAFRPAGIRALEMEAAK

SEQ ID NO: 6432 - protein, 532 aa, unidentified
  source 1..532: note = uncultivated organism
MSKYNRLGNNGGRQNGKPRVAFYTRISTDEDHQKYSFGAQKERLEAFCKAQYGDDWVLHKLYRDTESGTHMNRPGLEEMLYDAENQLFDILMVFRVDRLSRKVRELAQMVDELTKHNIALKSITEPFDTTNAAGKMMLQMLGVFAEFEHTTIVERTKVGLERKARTGRFVGGYVPYGYALDPEKGLVVNEEEALLVKKVFKMYAFGKEGSAAITTRLNEAGYRKRSGKKWDRRIILHILKNPVYIGKLKWREVLYEGNHEPIISEILFNKAREILNKRNEELKGRQFKNGDERLLSGIMKCGSHMFGGGGKKNGRYIPYYMCSKRYTQHECDQNYIRADILEESIIEDVKDIFRDEQLIARIWKKANEMLEAEKPDIEKEIAALEDRVLKAQARIDKYFEAFEEGKLKPEVCNEKVEDLNVQIKELESEKKELEARRKRLELPALDKELIGKIVNNLEEVMAAGDNKKRKHLLQLLVKKVLIHDRQTIEVWYCLPNAPSRASRGQDCKPNRQRFETCNKWLPGRDSNPRLSG

SEQ ID NO: 6433 - protein, 553 aa, unidentified
  source 1..553: note = uncultivated organism
MRERHIYNAAIYVRLSKEDGDVSDASRAESNSISNQRELIKDFLKDKTDIRVVSERVDDGFSGVDFERPAFRLMLEDIRQGKVDCVVVKDLSRFGRNYIESGRYIEKIFPMLGVRFIAVNDGYDSLAGKSQTDEIVIPFKNLINDAYCRDISIKIRSHLDIKRRKGEFIGSFTVFGYRKDERDHNRIVVDEYAAKVVRDIYAWKRAGMSQQGIADRLNRTGVLCPAAYKESCGSRYRVKFRTGKEMRWSAVAVSRILSNECYTGTLVQGKSTTPNYKVKKAILKDEADWVRIEDAFEAIIPREEFDTVQGLLLKDTRVAPEKGHVYLFSGIAVCGDCGRQMSRKVSTVAGRKYVYYMCSANKREGVCTGHRIREEELTEAVTESLRCHIDRLAELRDILDYIGTLPMQDADVRRLEARMVKMEEEAGKYERLKVSAYEDLKDGLLTKEEYAAIRQEFEGRRKAALASAGQLKQEMERLARREGKRHEWIEGFVRNKGIRSLVRGVAVELIEEIRVFEDKRIEVRFRYEDRYREAVELAEGTGSLPGADGREVS

SEQ ID NO: 6434 - protein, 569 aa, unidentified
  source 1..569: note = uncultivated organism
MKTIRCAIYTRKSSEEGLEQDFNSLDAQHAACSAYIASQASEGWTLLKTRYDDGGISGGTLERPGLKALLSDIATGKVDIVVVYKVDRLTRSLLDFSKLVEAFDGAGVSFVSVTQSFNTTTSMGRLTLNMLLSFAQFEREVTAERIRDKIAASKQRGLWMGGTPPIGYKPDGRSLAIVEPDAVLVRSIFERYLALGTVRALHDELIREDIRQPLRTSANGRPFGGTPFQRGQLYNMLKNPLYAGRIRHGAKTYPGNHPAIVEQETWDKVQAQLNDNTQGTQLGPTAKDPSLLAGKVVDQYGEPLVSTHANKGKVRYRYYVSRHLQHGIAQGDGDKRLNGLRIPARELEKVVLQAIVAQMKDPIAVARQLGATMANPQHATSLLNRSTTLLAKLDGKRGLPVQALLGRIVRRVAVQEDAVELTLEPTALGKELGLPADVIAADEIRIIIPARIRRSGLAVRFVLQTGQAAVPGTIDRNLLVGMAKGRAWWERLKADTSLTVTGLAAAEGADPSYVDRMVRLTFLTPSIVDAALEGTAPADLNLNRLKDLKRIAMSWSDQRRLMGFAAPRG

SEQ ID NO: 6435 - protein, 506 aa, unidentified
  source 1..506: note = uncultivated organism
MRQSAPQDPAATKQVAIWIRVSTEDQARGESPEHHEKRARDYAALKNWHVREVYHLEAVSGKSVMGQPETQRMLADIESGHVTGLIFSKLARLARNTRELLEFADIFLAQGADLISLQESIDTTTPAGRLFYTMIAAMAQWEREEIAERVAASVPVRAKLGKPLGGQAPFGYAWKDRRLVPDPKESPVRKHVYELFLEHRRKKTVARLLNQEGYRTRNGSAFSDTTVERLLRDPTAKGVRRANYTKSLGDKKHWVMKPETDWVLTEVEPIISEELWAECNRLLDERRNGRRPARKAVQLFAGFAYCTCGQKMYVPSNTPKYVCQKCRNKIPVSDLEEVFHDQLKRFFFSSSDIAGYLENADQTIKAKGELLQSLEKEADKIRREADKLYQLYLADEITKHGFGTKHRPLEERLKQIEDQMPRLQAELDFLKIQFLSSDEILNEARDLYTRWPSLEQEEKRKVIENITDKIVIGSDEVAINLCYLPSASEIMAGKQRNFRDSWPQPA

SEQ ID NO: 6436 - protein, 524 aa, unidentified
  source 1..524: note = uncultivated organism
MDDYKVGIYLRLSREDERLGESSSISNQRDLLLNYIRDHNLIFVDEYVDDGVSGTTFDRAGFNRMIKDCENKKINMIITKDTSRLGRDHIEFGFYVERYFPEHGIRYVAVNDGIDTASNSSANDMLVFKSAFNDMYVKDISNKLRSSLNVKKRNGQFVGAYAPFGYNKSDNDKHVLVINEEEATIVKRIFDMFVNGNSLSTICDTLTREKIKTPSISKNMNIGQKNLHYGVWSTRTVNDILKCPTYIGNLTQGKQKKVNYKSKKRVHNKEENWIIKENAVPPIIEKDVFELVQNMFKSNKNRQGNGITDKLLLRGLIYCKDCHHTMGFRAHKQLTKKNGEVIRIYGNCNYWAKRKKQNVCTPHSVKYNDIETLVINDLKNMCIKYLSESNLENILLSSDKLKKKKSYIKIQISKLENNIESINKKIDDCYNDKLEGNITLDMYKRTYNNLTLQIKSIETEIKEYRKVLFELENNKISEQDYYKDKIKEFMSLKNPSRTLLTSLIDKIEIDEENNIDIYYKFKLI

SEQ ID NO: 6437 - protein, 529 aa, unidentified
  source 1..529: note = uncultivated organism
MSRRARKEATTENGHASGRIRCAIYTRKSSDEGLDQEFNSLDAQRESAEAFIASQKAEGWTVVATRYDDGGYSGGSMERPALERLLCDIDAGQIDCVVVYKVDRLSRSLLDFARIMETFEKRNVSFVSVTQQFNTTHSMGRLTLNILLSFAQFEREIIGERIRDKIAAQKRKGKWAGGVPVLGYDVDRNGPSPRLVVNAKEAAHVRQIFQMYLDKGSLLPVVNELANRKWPNKRRITKKGKHLGGRPFDKSTLYQLLTNPILTGKITHKGVLYDGEHEAIIEQDVFDQVQALLTTNGRTGGAAVRNKYGALLRGLLRCKTCDRAMTHTFARGRNGQFYRYYRCVRAIKSGSAVCSTGTIPAHEMERVVIDEVRGMAKDKTLVAQVLNEAQSSITSELKALAKEREDLNREAARHHQELRRLVADGATTSDVTSRIADLNERIREAERRRPELDTRIAELERETVSRAEAETAFADFDALWSNFIPREQARLLNLLIASVDYDSEAGTVAVTFRPTSIRALINHRLEEAA

SEQ ID NO: 6438 - protein, 522 aa, unidentified
  source 1..522: note = uncultivated organism
MKSAVIYARYSSERQSEQSIEGQLRVCNDFAARNGLRIVGTYIDRAMTGTNDHRAEFQRMLSDSDTPQEWEIVLVYALDRFGRNSIEIAINKQRLQKNGKILISATQRTSQNIDGSQNLDGIILENVMIGIAEYYSAELSQKIRRGQNESREKGNFVGGGIAYGYKVVDKKVVVNEDEAEAVRTIFHQYASGRVAREIIETLHERGLSHRGKPFLPNAIYQILRNTRYIGFYTHNGKKYTNTFPSIIATELFNTVQAMLAKNKLGSHSRDTQFLLKGKLYCGICGKKMNGESGTSFTGKANYYYKCATKKKKSSACPKETVRKEEIEKLVVQTTIDTLRSPKTVEKIAEAVVSIYQRRWQDKSILHLLKEDRDKKQKALKNLLSAVEEGLLTPTTKNRMTELEEEIDILNGKILAEESKEANLITKEQVIAFLTDLPERDPQIIIDTLIRKVVLFDDRIEIHYNFIDKPEPDEPDGTSPEDRRVIPFSFQSSLQSRVPPYRNKSNRCYKNNPGEKYRQDFFL

SEQ ID NO: 6439 - protein, 525 aa, unidentified
  source 1..525: note = uncultivated organism
MRTEMATVTLIPAHRVAGARKKAEEAPKLRVAAYCRVSTENDEQATSYEAQIEHYTDFIGKHPGWELAGIYADDGISGTNTKKREEFNRLIDDCMAGRVDMVVTKSISRFARNTLDCLKYIRQLKDKNIAVFFEKESINTLDAKGEVLLTIMASLAQQESQSISQNVRLGLQYRYQQGKVQVCTNRFLGYDKDEEGNLIINPEEAKVVKRIFREYLEGRSYYAIGKGLTADGIKTAAGNDYWLASTLRKILMNEKYMGDALLQKTVTTDFLNKKRVVNKGIVPQYYVENSHEAIIPRELFMQVQEEMVRRARLETGTGKRRVYSGKYALSHLMYCAHCGDIYRRTHWQTRGEKHVVWRCISRIDKRKNNIDCPSRTIYEKDLHAAVVTAFNQLIERKDELIPGMKIALERALGQSNGPRVAEIDEQLEAMQRELVKKANANQGVETLADEIEALREEKQRLLQEDTDRAGMKKRFDEFEAFLNEQITGITDYGEVMVRQLIKKITVFDDRLVFEFKAGIETEVQI

SEQ ID NO: 6440 - protein, 588 aa, unidentified
  source 1..588: note = uncultivated organism
MTNEKEKPKEKQPLRAALYVRVSTAMQDTEESYGPEVQIERGRSFCGSQGFELAEDHIYKDTISGSTPSEKRQELSRLLADAEQGKFDVLLVYKIDRLARSLMVFMDIIERLNGFGIAFRSVTEPIDSSSSSGQLMIQMLAMFAEFERKMIRERTMSGKLQAALEGKFVCGVPTFGYKIDKATKKLVIIPEQAKIVRKLFGWVVDEKMPLREVEKRMNQMKVPPPYNARYKKRQTLNYWHRRTIGRILTNETYTGTFYYRKYKRPFNNLTSITDKRKLRPQEEWVEMSCEPIITREIFEAAKRQLLKNREMAKRNQKRSYLFSKLIFCSRCGYRMFGGYQPPTKKWPGAGGKYYHGTYKNDKVVGVSKRCEWCPQYAETRLEPVWESLKEILKHPDNMLKPLEKYIYQEENPENVKERLEQIAVELSTVREKQSRVDELYINGQLEQQKYREHSNANGIEEKKLSDEASRLRQSLLTKKEKTDRTFAIKQAYEQIKERLDSVSYDEKSEIVRLFVERITLHAKEDYASVVFTFPGSTETATVKLGEKVSQENKAFPLVLNIRTVSELERRREIMALVNENMHLPKTLV

SEQ ID NO: 6441 - protein, 555 aa, unidentified
  source 1..555: note = uncultivated organism
MSRQVAVVTGMTIPERRYMNTTVDAGLYMRLSVEDETNNESTSIQTQRAMLTDYCREKGFRIVDCYVDDGETGTNFERPEFQRMLRDIEAGKINTVICKDLSRFGRNYYEAGMYLDKYFVERKIRFIAIQDNVDSAKGSSGLTVPMINVMNDYYARSISEKTKAAKQTRAKQGMYLGSKAPYGYQKDPKDPHHLIVDPQVANIVRRIFDMAEDGAGYFKIAKVLQSEGIPTPRAYAEKTKDSGWHITSVQKILQNPVYCGDCVQGRRGNLTMHGKQIQKPEDEWITVENTHEPLITREQWATVQKQLQSRKRSTKKGDVQMFAGLLFCADCGSALSFCVRRRKTMPDGGEYKCWRYMRYGKEVCTSHYITLDQISEVVLEAIRRQAIFAKHCRTGYRNLLMEAQQLRDEEEMVQQKEKAEQAQKRLTQLDLIIRKLLEQNAMGVISDERFAAMMKDYEVEQTELQTTISEYETQKTKQSEAVDNIQRHIELVEKYTDIKHLNARILNRLIDRIEVSQRGKDMDGCPTQMITIYFRFIGKAELELMDMISPTLIAG

SEQ ID NO: 6442 - protein, 570 aa, unidentified
  source 1..570: note = uncultivated organism
MAAFSFLIQSDDPIGPEKPPLNFQQISGLHPEEGLEQEFNSLDAQREACAAYVASQKAESWVLLPTVYEDAGLSGGTLERPGLQRLLDDIDAGLVEQIVVYKVDRLTRSLSDFAKLVERLEAAGAVFVSVTQSFNTATSMGRLTLHMLLSFAQFEREVTAERIRDKVAASKRKGLWMGGRVPLGYEKDERTLRINEAEAETVRTLYALYRKHGTLRQVKAEADRLRLRTKRRFAADGTRTGGLPFRRGHLHCLLTNPLYAGRIRHQRRVYEGQHPSIIAPELWDAVQTQLQAGAAKPRRRTTKGRAARSPLAGKLFDETGDRLTPSHTKKKNGQRLRYYVSRRLIQHSGQKDLSGWRLPAPMLEQTVVHLIRQHVDATTSPASLIHAPTMQELASVRRFLDGLCSGTNDDSASAAPLLRLIRRVDISPGSVSILLDRNTFAACLSMEPERIREDALRIHAPFRLRRRGVETKLVLGNPTKSVDRTLLRNIANALSWLDRIKAGKTYEQIATENAIPTDRVRKAIRYAFLAPDIVRAIVEGRQPVGLTSSYLLHHPLPDDWEKQRVLVKTL

SEQ ID NO: 6443 - protein, 521 aa, unidentified
  source 1..521: note = uncultivated organism
MKMIPKRCAIYTRKSTDERLDMEFNTLDAQRDSCLNYIASQKSEGWVPVLEEYDDGGYSGGSMDRPALTRLLDDIKANRVDIVVVYKIDRLTRSLADFSKLVEIFDKHDVTFVSITQSFNTTTSMGRLTLNVLLSFAQFEREVASERIRDKIAASKRKGMWTGGTVPLGYDVVDRKLVLNKEEAKRVAHIFKRYIEVGNLSDLYRELNEKGIRSKGKKGEAVFCASSLHYLLTNPIYIGKVRYKKEVYDGQHEAIISGELWQNVQDKLTEIAVAKRSHKKHSQKNLLQGKLFDSDGNRYGPVYTRKPNMIYRYYQLKQQKDEGNETIHRLSATEIEPFVEKIIRVHLTDLDKVITLFDFDPAQHVDLYKMISENQSLIETQDLINLSVKEIVVYPNKILICLTTAKLFEYFVEELGLISNYIVSEEKAIETEFMTRSTNKGAIKIEPKRNGVSDNILENLSPIELRNLVRGMVWREDHFNGMSLKEIANRDDVSDNYVGQMIFKSFALCGIGNNDKPYLIR

SEQ ID NO: 6444 - protein, 518 aa, unidentified
  source 1..518: note = uncultivated organism
MIKPATRTIRCAIYTRKSTDEGLDRDFNSLDAQRESAEAYIASQKNEGWVCLKDRYDDGGYSGGDMDRPAVKRLLADVEAGKVACIVVYKVDRLSRSLLDFARIIETLDRYNVSFVSVTQQFNTATSMGRLVLNVLLSFAQFEREIIAERTRDKMSAARRKGKWTGGMPILGYDLAPEGGRLVVNEDEAQRVRAIFELYLEHQALIPTVQELARRGWTNKRWVTRKGRERGGQPFDKSSLLRLLSNVAYRGKVNYHGQMYDAEHEAIVGEELWREVHGRLRRNGASRGKHDRNKHGAILKGLLQCAPCGCAMAHAFTARGNKRYRYYVCVHAQKRGWDTCPTKSVPAAEIERFVVDQIRAVGRDPGLVAETLRHARRQRAEDLRRLEAERRGLDRELAQLNDSVRLALDAAARDETARGRLADLQDRIRKGEQRAMEVRQEMAALDREQVDESDLATALSLFDPVWDSLAPREQARVLQLLVERVAYDGRDGQISVTFRPTGIKTLAAELVSREEVEA

SEQ ID NO: 6445 - protein, 560 aa, unidentified
  source 1..560: note = uncultivated organism
MAEKLLRCAVYTRKSTEDGLDQEFNSLDAQFEACTAYAQSQRHEGWSLVKDRYDDGGFSGGNMERPGLKRLLADIETGKVDIVLLYKIDRLTRSLTDFARIVEVLDRAEASFVSITQSFNTTTSMGRLTLNMLLSFAQFEREVTGERIRDKIAASKKKGMWMGGPVPLGYEVRDRKLVVNESEAEQVRHIMRRYLALKSVPVLAEELNHKGYRTKVQRRSSGPHRGGCSYRRGTLYHLLANRIYRGCIVHKDKAYAGEHEAIVEEQLWDEVQALLAANASGSARRLRHKHPSLLLGKVIDGEARAMTPSHATKSRRRYRYYVTRPDQLDGTRAWRVSAHDLEQLVCSSIAAKLADGQFIIGITGSADTDAERLQAATAEADLVAATLRSGHANAKAELLELIVQQARLHEERVEVELDKRAIGKRLGLVVDLSDVAPEIVTIPAIRVRRGHQLRLVIPGPEDARTKPRRRDAKLVGLVAEAHQARELLLANPQNSIAGIAREQGRCRTRLGKLVALACLAPDIVTSILEGRQPEHLTASRLLSKPLPLAWTDQRRELGLS

SEQ ID NO: 6446 - protein, 535 aa, unidentified
  source 1..535: note = uncultivated organism
MTNRTPVKAVRCAVYTRVSTDQGLEQDFNSLDAQYEASQAYIRSQAHAGWTLVRTKYDDGGFSGGNTDRPALQRLLQDIQAGRVDIIVVYKVDRLTRSLADFAKLVELFDAHGVSFVSVTQQFNTTTSMGRLTLNVLLSFAQFEREVTSERIRDKIAASKRKGLWVGGPLPLGYRMQDGKIAIVPDEAETVRQIFACYLELGSVNALMRDLIQRNIRTKVWPRKSGSARGGVHFGRGTLYYLLRNRFYIGEVNYKGEILPGEQPVILGQELFEAVQQKLTEQRTNHTRTRSRSDHLLSDLLYDDTGIKMTATYAKKAGIRYRYYVSLPLLHGHSDAIVGTVSRVPAASIEKAVITRLRTCDAKSGLPAAATRRDRHALEEHISRIEVYPRKLIVRFKDKVSPDGEPNEPRSLTISWQKPPSRARRDIMVPGGTKREHIHPAKIERRAHLVAAIARGRKWLDELVCGSVTSIGQIAERHRCSERQINLTLSLAFLAPDLIKAAVEGRLPRGIGVERLRDAPLAWSRQFDILGLSQD

SEQ ID NO: 6447 - protein, 529 aa, unidentified
  source 1..529: note = uncultivated organism
MSEGANISGTSALQREIHYIEQAIRPVTLKLRVAGYARVSSGSDEQQNSFASQLRYYNTIIEENEKWELVEVYADEAVTGTSTNKRDDFNRMLADCRKGKIDRIVTKSISRFARNSMDVLRTVRELKEIGVSVLFEKENIDTDKISSEVLLTLFSVFAQQESLDLSANVKKGIRIRMRSGTYVQSTAPYGYRMVDRRLEIYEPEAEVVQRIFAEYLAGDSTLKIAKALTSDGIIRSVQKPKWWPETIVDIIRNERYIGDSLLQKSYTTDSLPYKRYINDGELEKFYVQNSHEAIVDPMQFELANILLNQRGETVSRAVRANYPLSKKLICQNCGSKYRRRIINDKTYWVCRGHFADSSSCDSTQQLERNIYSTFTRLYNKLKANYKRILIPMQAQLEKMREISQRANPEIAEINKQIAALAEQNHAISDLVSRGIMDSALFISQQDEINAKIKNLKKAKNQLANTDDDDMLEKTEDLIAILENGPDCLTNMNEGIVAEMVESITIENSTILHFKLINGLVLTENIERMS

SEQ ID NO: 6448 - protein, 557 aa, unidentified
  source 1..557: note = uncultivated organism
MKRCAVYTRKSTEEGLEQDFNSLHAQREACEAFIKSQRHEGWKLMSAKFDDGGFSGGAMKRPALEELLEAIEQGKVDIIVVYKVDRLTRSLADFVKIVELLDGKGVSFVSVTQQFNTTSSMGRLTLNMLLSFAQFEREVTAERIRDKIAASKKKGIWMGGPLPLGYDVEDRKLVINKTEAKTVRRLFQMYVNLGTVHRVKEEADRLGIITKRRTQKNDKQTGGKPFSRGNLYQLLSNPLYVGLIPHKGETYPGQHKAIIDQKTWNVVQSMFARNASNRIHSTNTRGPFLLTGKVFDEAGQLLYQHQAHKQEKRYCYYVSRHMMYSAGSDNDGWRLPAKTLEDAVTEPICELLQDQSRLIDVFELHNHGAADIDKLENMATSLPDEINFGAPDVRRHILQAIIQRIDLTRDRVSITLDKVEFSKTLGLLVPTNKIPITIAIPIRLRRRGIERKLIIEGPDASGVFLDRNLCRLIAQARHWFSLLATGKVSSVREISKLDSVNENEITRSLPLAFLAPKIVEDILDGRQTETLTAYRLKRLSSLPLDWQKQAKLLENLT

SEQ ID NO: 6449 - protein, 540 aa, unidentified
  source 1..540: note = uncultivated organism
MQNKIWNATLYLRLSRDDGDKEESNSITGQRELLRDYISQRPEFREYAVRVDDGFSGSTFERPSFQAMIEDVKAGRTDCIIVKDLSRFGRNYLDAGEYIEKIYPFLGVRFIAVNDNYDSLGDKKASDDLIIPFKNLINEAYCRDISVKIRSQLEIKRKNGQFLGSFAAFGYMKDEQNKNKLVVDQYAADIVRDIFKWKLEGVSPQDIADALNKLGVLSPMEYKRSLGMKYTTSFKTNTQATWSAATVIRILKNPIYTGVLVQGKETTPSYKVHKRVTKAESEWTVIEDSHEPIVSKIDFDSVQKVLKCDTRRSPDGKAVQLFSGMVFCGDCGASMVRKTVPAGGKKYVYYVCSAHKQNKSCSPHRMRDTALEEIVLDSLKQHIREVVDMSELLAITDTAPLRTAQAQKVQRQLDKKREEYEKLQKLLMSLYENLADGIIDREEYSRLKASFASRADEAEKQMDALRERLTEIQNNGTENAWMSEYTKRQGLTALDRAVVVALIDKIFIHSNDMVEIIYRWQDEFAWQLDILRKARLREVV

SEQ ID NO: 6450 - protein, 544 aa, unidentified
  source 1..544: note = uncultivated organism
MLQLCKFKELEVYKVYKDAGISAKDMEHRPQFQAMLQDMKEGKINYIVAYKLDRITRSVRDLEELISVLEQYNSFLLCDRDDVNTSTANGRFFVRMLTVLSQLEIEIVSERTKFGLNGAIKSGHIPGQRPFGYTKSEDKKMIIDNATRPYVEKIFDMYLEGKSFQQIANYFKENNIYPKKKWHDTTIQKIIDNKIYMGDYEQYKRIGKQENLEPIVYMNVVEPIISRAKWEECQKQKERNQRTYTRDRIYTFFQRLKCPSCGRIMKCKGSGGSKRKYMYYTCEHCHVNFNENYVEELLESFIYDLLGYDMAVKKFFLPILEDKNNKIDTTTIDKEIRNLEKQRDRIKQAYIKGIVEMEDFKEDYKLIEDKLANLENQKLELVNLETFNYSPHELLAERDLEREKMIRLDTLNSLLKSKWNDMDKSEKQEFISKFIDTIEIKKDSKGNLILEKINFRNGFIKELLKFYNAGIFDVASPVMIGDNEECIKGGRMTEDELNRYLTKNEHFETSFYEMYETIDNETNEVILEYQPKDDEKNYKICSTY

SEQ ID NO: 6451 - protein, 556 aa, unidentified
  source 1..556: note = uncultivated organism
MAQATLSCPAGAIHLVSETKYFATKYIRLSYADDKDGESNSVENQRKILDSFISSQPDIEAVSEKVDDGVSGVIFDRKAFKEMMADIEAGKINCVIVKDLSRFGRDYIETGRYLRRILPAYGVRFIALNDNIDTLRDSADDLVVSVKSIINDAYSRDISIKTRSALNIKRINGDYVGACPIYGYRRSEENKNRLEIDEYPASIVRDIFRMKIDGMSALKISETLNTRGVLSPMAYKRDRGLPHPTGGFADTPEAKWSATAIFRILNDETYTGTLVQGKKGTYNYKIKDVIDRPESEWQRTENAHDHIITAQDFDLARRIMQLDTRTAPGGSKVYLFSGIIICGCCGGRMTRKTNRYKGKEYLYYYCPTGKKNGCTGASMIKESDLIECALESVKAHISGIASLESVLAVSDGRKAALVLAKQLQAQIADNENQLAKISGFKSSLYENMVSGLLTKEDYKTLKTKYTTDEARLRDAIATLEAERDNAMEGRAERLRWIEHFQKFEGLNELDRRTVVNLIRSIRVLSKTELDFTFNYQAEYEQALSLLGISKSTQEVA

SEQ ID NO: 6452 - protein, 535 aa, unidentified
  source 1..535: note = uncultivated organism
MGGDGIIAKKVGGYLRLSDEDRFKLKDTDESESIQNQRDLFLEFVANHDGWEVYDIYVDENVSGTSTSRPEFERLLKDCESGNIDIVICKSQSRFTRTMEEVESIMHNKFEEWGVRFIGIVDHADTDNKGNKKQRQINGLTNEWYLEDGSENIRSALKIKRKNGKFTGSFAPYGYLIDPNDKNHLIPDPIAKEVVREIFQKYIEGYGYQKIRDHLNDNGISSPSERKKEIGSNFVCGHAKNRKTYWNNDTVAKILRNEMYLGKLLQGKTTRVSYKNKKIKKLPRDKWIIVENTHEPIIELELWKNVEAKIKKHHKVTKTGKIQIFSKKVYCGCCGKSYTKNVCNTSKGKIDYLRCGSVRLGGINCNNKSIRMDDLKKVVLEAFKEKQTEFLDESRLKVNVKCEFDKNSFYQRLKALKQEKEKIVSSVKNSNYYLKGLYEDKRDNIITQEDFLILRNEYDVEVKNYELRIIQIDDEIEILEHKQEKNDDLEGLLEKYKNIKRLTREMIELFIYQIRIGEKDKDTGMREIEIEWDLF

SEQ ID NO: 6453 - protein, 514 aa, unidentified
  source 1..514: note = uncultivated organism
MAKSNGNGNGPPTPVRCAIYTRKSTDEGLNQDFNSLDAQREAGEAFIRSQVGEGWTLLAEGYDDGGYTGANIERPALRRLLADIQAKKVDCVIVYKVDRLSRSIRDFAKIMEILEKCGATFVSVTQQFNTTTSLGRLTLNILLSFAQFEREIISERTRDKQVAARKKGMWTGGHVPLGYDLDATGGRGLVVNNGEADRVRQIFEWYLEGQSVFSIVAKCEDLGWHNKQWTTQEGTVYGGHPIRKCHVYKVLANPIYIARVRADGELYPAGHQAIVEERTFQLAQEKLKDGTRNPGGPHSYKLEALLRGLLYCSCCGSAMSPSYSSSKNRRYRYYVCIRASQRNGEACTTRAVSAPVVEDAVVESVRRFALAPDVIEEVARVSRQRLAEELSRFREELKAINVRVRNAKSQLVRARTPDPAREAALKEQIAAGEEKAEELRKAVARGERLRMDTSTVRQRMETFDEVWKTMTINEQIALLRQLVERVGYDSRADKVRVTYKSNAIKQFCQQGARQ

SEQ ID NO: 6454 - protein, 522 aa, unidentified
  source 1..522: note = uncultivated organism
MQKVALIYVRKSMVRSKTDELSPARQRAQCIEEAERKGWRFELYEDVGGHRSGRSEKHRPAFRRLKQQLSRPDVAAVIVARLDRLSRSPRDFFNFLSLLQKHEVELISLREKFDTTTAVGKAFVSIIMVIAALEADLASERTTDSIEFRRNQGIHVGNAPFGMMRQEDGTLVPSPDAEIVRKVLTIYVDGGKGFQATANDANAIPLRFRDRTGRRVPFDKSSVRSIVSNVLVYLGYIPTVRSKDMTLPDNLDTSHSLVDQMIEIYHARKGQIEPIITRSLAERVLATRLQRRELRIVRPRRIFILTPILYCAACGSEMRGQTHRNKPWYKHKTLSCTPGQGQHAAEELEHKVLSLFQGLKLPPGLIDIIRGKVIERLEKRPENEGVKQTLDHLHRKLNRLKELYLEGDMNREEYKARKATIQTQIAEWEAKLGPVDYDIEGILAKLNTLAEMLAQGTQEQQKRAINAAFERIEVGLDGEIKKAVPKPWFQPLFHDLAAALRGDLKCPQGNSNPCRHLERVVS

SEQ ID NO: 6455 - protein, 634 aa, unidentified
  source 1..634: note = uncultivated organism
MKKNDHTKQDDRAVVIYARKSKITHKGDSIANQEEYCREYARLHLKLPADYEFKVYEDEGKSGFYADRPDFQRMIRDVEQNKIRAIVCYKLDRISRKMSDLTTMIDYLNKHNVALLISSNNLNTQDSNSKMMIQMLGIIAEFERDVIKERITDNLIELAKDGRWMGGIPPTGFSVDRSQHGSGSKKNGYAYLVTIPEEKALVQHVFQAFLSTRGYNAAARKLNAEGYRTKTGLPFNTQSVRDIVTNPVYCSADQDAYRYFIEHDGDIYGEESDYDGLHGISVYNRTREMREESDDSTFLHPEFSKTVREKDISEWIIAIGRHEGFVEGKDWVTAQTLKLDIADRYNRPHRATNALLAGLIYCPLCHQRLNVVSESGRYTHGKPRFKYACPNAVRKGACDYQAVHGVEFDEFIVEKLSSLSDEEQNYYLTNIQRQIDQTVKGDKTQQEITSLQKEIDRLDRDIKAQVKALRTASDTTRPYLEADVNEMTEEVFAKRKTLSKLEMELEDQQAHIRDYEKIKETLLSFRELVKDAEPTEIVSLIGSIVERVYVTRDGKNEVCHIYIKGCVTEDYSGEEDYFFGRSGTLETESEETTMTAFSQGGEMCDSEGCRKYHSFEIRHPASAEMCGYDAPPRS

SEQ ID NO: 6456 - protein, 512 aa, unidentified
  source 1..512: note = uncultivated organism
MTTVTIIQPTISEEQNHKLRCAAYCRVSSNSEDQLNSFMAQTRYYEKAFEKSDREQLVDIYADEGITGTREDKRDEFQRMISDCRKGRIDRIYTKSISRFARNTKDCLKNIRELKSLGITVLFEKENIDTDMTDEMMITIMGGLAQEESTSISQNLRWSIKKRMENGTIKMCKAAFGYKLVNGELVLKEDEAEIVRKIFEWYLSGAGTTQIANKLNSMAVEKYGKECHWTSGTVCTMLKNEKYIGDQLFQKRYTTSVLPYKRVYNRGEHAKYYYSQRHKPIITREVFYKVQKILNEQKKAHKGFQHKHIFSKKIYCGECGTIYKLKKSKTEACWVCRNHDYDSASCSMKRVSERNIKSAFVKLHNKLLYNYRQILTPLAVNLERVNLKSLSNNTDLLEIHKQIAKLKEQTHVLARLKTKGFLDEAKYLEQTTELNSKTAKLQTEIKKLNVSDEEDETLEQLDMLIGYFEKRQKLMVEFEESAFESIVDKIVVKNQNELEFHLIGGLELAEEI

SEQ ID NO: 6457 - protein, 509 aa, unidentified
  source 1..509: note = uncultivated organism
MANGNNSNGTPKPVRCAIYTRKSTDEGLNQDFNSLDAQRDAGEAYIRSQAGEGWTALPTQYDDGGYTGANMDRPALRRLLADIQAKKVDCVVVYKVDRLSRSIRDFAKIMEILEKHGATFVSVTQQFNTTTSLGRLTLNILLSFAQFEREIISERTRDKQILARKRGKWTGGHVPLGYDLVDGCLAINVEEAARVRQIFEWYLEGHTVHGIVAKCEGLGWRNKEWATKEGKTFGGHPVRKCHIYTMLANPLYAARIRAADEIVAANHPRIIDDDTFDLVQQRLKENTRNPGGERGPRVEALLRGLLYCAACGSPMSPSYSSRQNRRYRYYVCLRTMQRNGDGCSTRAVSAPVLEEAVIESVRRFAAQPEVIEAIARAARQRLTEELGRHREELKALNVRVRNAKSQLVRAKSLDPGREAALRAVVSSGEAKAVQLRSIVARGERLRFDDRTVRQRTATFEEVWKTMTIRQQAALLRQMIERVGYDARGEKVKVTYNSNGIREFCKGATT

SEQ ID NO: 6458 - protein, 520 aa, unidentified
  source 1..520: note = uncultivated organism
MNRKKPEEDRSRIRCAIYTRKSTEERLDLEFNSLDAQRDAAESFIASQKSEGWVCLPKRYDDGGFSGGNLDRPAYNELMKDIEAGEVDCVIVYKVDRLSRSLFDFAQTMKVFDASGVSFVSVTQQFNTTNSMGRLTLNILLSFAQFEREIISERISDKIAAQRQKGLWCGGQQVLGYDVDRSSTSPKLVVNAQEAEMVREIFESYLSLQSLLPVVQKLDQLGWTNKTWLTRKGRYKGGRPFDKCSLHALLTNVIYAGKIRHKDQIYDGQHEPIIVQSVFDKVQTKLKEHGRGNGNRLVNRHNALLKGLLHCPACGYAMVHCPTKKKSKVYRYYVCQTAIKRGHSQCRTGSIPAPAIEAAVVESLRCIVDDEGVRRAVFEQSEQLLQQHLQRHDLQLRQLTSQRSRDEAELKRMATEGETGDLNDARRQDLKTRLAKTQGRIVEVEKDLEHLKQCRFGRSDVEEAVSDFDRLWAILRPKERVQMMELLVSRVQYDRFEGALSISYHPTAIAALIQNEEEAA

SEQ ID NO: 6459 - protein, 504 aa, unidentified
  source 1..504: note = uncultivated organism
MTDQLVLGYSRVSSEEQAAHGISIDAQRNILEGYAAMTSSKIRIYEDAGYSGKNTNRPGLQQLLSDCRSGSVSAVVVWKLDRLSRSLRDTLTIIEDVFQPQNITLVSVTESIDTSTPSGRMMLNLLASFAQLEREQDSDRVVMAHKHLARDCKYLGGHIPLGYRINQDKYYELDPVSSPVVRHAFELYMARAGYSAILAYLNSQSEILSFKKPFNKSKLNFMLQNEIYSGTYIRRLGADPRHRITAPETIRVPGGVPALLSAQEWQRVCDLRDQAKSGSSRVRSSRVYPLSGLVFCAVCGSLMRVNYGGKTRSGHIERYYECKNRCATAPRLEHIERAVIDACRIFSQEEEPLRQAVALVNTYSAAADQDHAAEISAHRQELIRLSKRSQQIVSFIAQNGTQAPSALADELQAIDDQKGRLLAKIEALSTPVARYDPDETLAALRAAGEIKNCPPEQQRQLLQKAVFKVLVSQEDYQVIFLWRKCGGDEPPRYLCHIISRSSRF

SEQ ID NO: 6460 - protein, 653 aa, unidentified
  source 1..653: note = uncultivated organism
MNFESDSLAARRRKVVFYGRVSTEMEAQIAALKNQIIWYQQLAERHPEWTVVTMYEDEGISGRSINNRPGFMKMLTDAKKRKFDLIVTREVSRFARNTVDALVVTRKLKTYGVEVYFVNDDIWTMSGDGELRLTIMASLAQEESRKFSERVRAGIKIAQGKGRYFTGWRPYGYTNDSANKTLVVREDEAEVVRRIYAMHAAGIGSTSIAKRLTEERIPNYAGEFQWKEGQVYDILRNPIYKGYKTTNKEHVSDYLSQTIIKHDRSEYVYVKCDFEPIIPEQEWEACQRRLKRASAFLDGGVSEAYLYGKSESRDKWACRMFCACGARMRAASRNKAHEANYLCYRKLKSRRADKSKPMPAWQRVDCNASYVAQWKLELMAKEIFQQVWKDHKQEILDYYREENEKNAISPDHSEEIEKKKQLIEKTQNDRQEVDSMYRQNLIPLSTYQNICDRYDACIRHAQEDLAALESKPRFYDLKKIEESLNWEELFPDGYVSREFLDRFVSRIFAVNAQRFVWELNLSEKNYSMECGVIGTFRFPYVTTQELEEKPAADKKRRGKKKGDDERKKHQNQRTVSSDGLYLKMIRGDIPTHIWAQADPCMIVCRLLSRRLAADLPASITIKLNYEQARAYRNSRGYVLWPRNWKDLTVKALL

SEQ ID NO: 6461 - protein, 559 aa, unidentified
  source 1..559: note = uncultivated organism
MARTANRQSITKAEAKNKVWYVAFYIRLSREDKRGKEESESITNQRLILTDFLEQQDDGDEYIFVDEYVDDGVSGTTDEERENFQRLLADIEKGKINCVIVKNLARSFRNNGDQSYYLGDWFPRHNVRFISLYQQPVDTYKDPQNAQNIAVPVQGVLNEEHARGTSESVRRTFDKKREKGLHIGSFAAYGYQKDPKNKNALIIDEEAAENVKSIFAWYLEGMSKNAIVRKLNESGILCPTAYKKSRGMKYKNPNVTNTPPLWCAMSVTNILKNRIYVGDMVQGRYRIKSYKIHVQEAVPEEEWFVVENTHAPIISREDFAKVQALLQRDTRTAPKQKSLYLFSGFLRCADCGKAMTRSQVRGNVYYYCRTYKDRSKTACTKHTIKHHPLEQAVLYAIQEQIYLAVCYSEMAARIHTAPLQKSRSVRLNAFIASKEKELSRISRYKQSLYQDWKDGEITYTDYRRMKEDYERQIEALRKIIGNLQAEKAELEHGVGSENPFLTAFQKYENINRLTRDIMIELVDTIQVYENGNISIKFKFANEYRRAAQYQEGSTQEDAV

SEQ ID NO: 6462 - protein, 569 aa, unidentified
  source 1..569: note = uncultivated organism
MKEIMKKETEKKVYAAAVYLRLSKEDGDVCDEGRKEESNSITNQKRLIHDYLKGREDIHVFKEYVDDGYTGSDFRRPSFQEMIKDMRAGKINLIIVKDLSRFGREYIEAGKYLQKIFPAAGVRFIAVTDRYDSLTADRTEKNIVIPVKNFVNDAYSADLSVKIRSHLESKRGNGEYTGAYVSYGFMKDGSDHNRLVADPVAGENVKLIFRWKLDGMSNSGIAKKLNSLGIPAPADYKRSLGIHYKSGFQKNLYSGWSPAAVGRILSNPLCKGLVVQGKQERINHKIKKMVAKPESEQSIYRQEDLALIGEKQFDAMQGLLKKDTRTNPGREGAYLFSGILYCPDCGRQMIRRKTTHKGKQTIFYICKTYNVEKSCTRHSIKEQELIALVTETVKAQVQMAADAAETLKAAEEARERMQTFPLPDTRLPELEKELTDNAAMLSGLYTDWTEGILSEEEYEEMKAFYSGRCEELKGQIRKRRERAEKAGEAAGEARQWLGSMTDTGSLLSGTEGELRRSFICSVIDKIWVYEGKRVEFSFLYQDRMAEVCSLCGMFKETLQEQTLCEKGAV

SEQ ID NO: 6463 - protein, 522 aa, unidentified
  source 1..522: note = uncultivated organism
MGRAKPAVKAAETKSRCAIYTRKSTEDGLEQEFNSLDAQREAGEAYIASQKHEGWVCLPTLYDDGGFSGGNVERPGLQRMLTDIKDGKIDCVVVYKVDRLSRSLMDFARVMETFEKHKVSFVSVTQQFNTTHSMGRLTLNILLSFAQFEREIIGERIRDKLAAQRRKGKWAGGIPVLGYDVDRSGPSPKLIVNAREAMQVRKIFEWYLEHCSLLAVVRRLDEKNVSNKAWTTQRNLVRGGRPFDKNALYCLLTNPIYIGQVVHNGERFKGEHEAIVEADVFNRVNATLKHNGRTGGKEVRNKYGALLRGLLHCQCCQRAMTHTFTQRKERFYRYYTCTRAISAGHNQCPQPTLPAAEIESAVIEQIRSIAHDRRLQAEVLQQAEAGILEEKEVLTTERDRLMKDRVSHESELRRLSIGSSHPATTALIADLHDRIAKRNSRLSELSQLLAKLESERIAETDVTQAFGDFDKLWQTLSPREQTQLIALLVSRVEYDAERQTMAVCFHDTAIASLIERHAKERS

SEQ ID NO: 6464 - protein, 557 aa, unidentified
  source 1..557: note = uncultivated organism
MADRVRPLRCAVYTRKSSEEGLEQDFNSLQAQREACEAYILSQRHEGWRVLSQAYDDGGYSGGSMDRPGLKQLLSDIASGQVDVVVVYKVDRLTRSLTDFARIVDVFDQRGVSFVSVTQSFNTTSSMGRLTLNVLLSFAQFEREVTGERIRDKIAASKKKGLWMGGFVPIGYEANGRTLTVNEAEAETVRTIYRLYLELRSVDALKAELDRQGIHTKVRPGRGGAMSGGGPFSRAHLYRLLSNPLYAGEIAHKGQRYPGQHPAIIDEATWEAVQAVLAQNSHRHLVKAHAKNPSLLAGLLVDASGERLVPTHATKLGRRYRYYVSSSLLKSRLKEARSPENTSAVPTWRLAAVEIEAVVVQMLTRALSSRDWCLAHAPDAQHLSEQREVMERAERYRAVLAGDEPLARRGLILEFLEEVVLEEDGVALKLRAPALMLRRFDAITHPPAQLTEPVKLCETVALHRRGTETRLVIESESAPERTPDPALVRALAQAHRWWRDLLEMRFVSLRELAQAYGTDERYVARIVPMAFLSGPLTAAILDGAQPPEFTLHRFLHK

SEQ ID NO: 6465 - protein, 513 aa, unidentified
  source 1..513: note = uncultivated organism
MATVTRIDPRALRNNDKKLRTCAYCRVSSNSADQLNSYAAQIRYYTKAIRENPEWDFVDIFADEGITGTRADKRVEFQRMLKLCEHGKIDFIITKSISRFARNVTECLEFARKLKRQGIGIFFEKESINTLRMSDELMLSTFSAIAQEESVAISKRLRHANLERMKRGEYIAGTCPFGYRLVDKKLTVYEPEARTVKDIFNAYLSGSSVNEIARDMNQLQVAKRKDTEWHYITVFYILTNEKYIGDTLFQKTFKTDTLPFEKKKNNGEKDQYYATGSHDPIIDRETFETVQKLLKEKAEYFGSPRPSKSYPLSKRIRCKECGAYFIRRSNKDKVIWSCYNHERDKNNCHAKRYREEDIYKAYMRMFNKLYCYRQTLLRQTLAHIDYVIKYKKRNNPTVKAYNQSVSDLLNKKVMLESLRQKGYMSEEMYYTQCKEIDRLLRDTKADRAILYDSELEDSYSNIKELYEIVESYEKEMTHFDEKLFDKIVVDVYIKKDNTIEFKLMGGLTLTERL

SEQ ID NO: 6466 - protein, 606 aa, unidentified
  source 1..606: note = uncultivated organism
MHTAIYVRVSSEEQAKSGYSIDAQKSNIEKFCKSNNINNFVFYIDEGYSGAKYERPALQELLSAIKDKEVERIVVWRIDRLSRKMSHLIKILEICESNNVIVNSMTESFDANTPVGKLLVNMLGSIAEFERESIIQRIEAVKETRKKKKRLPLGNPPLGLKVENDRFVQDENAFVIKKIFEMYLEGYKSKKIAKELNIKGYRTGANKEFTRASVWKIVKNPTYAGLIEIDGVLVEGNIDPIVDRETFYRVQEIINSNRYDKKKPAMKHILTGIIYCGLCGAGLHTAGTGKKRNYRCATRICYDVSKCDLPGLNADFAENEVYRKIFKIISSNLDEFIKPLTEKYEELKAESMGDRKQIKILKNKRSEIKANIDKYLSLFESGEMHFDSIRERLSSLEKRVSELDEEIANLEKKVGSETSYEELKENILFIMNNFRSLWNVADNNEKRNLIQSIIERINVYSDCFIIYFKTGYEEKVFINKKPAYINRNLEEWEIKVLENLPTNRAKAMLMIFRDHMSMIEAAYKLQVDFSKIQHLVHQFSQYGVKCCMAEFKENMKIEFEDYLLEHIDEFKQLTFAEIQEKLKSMGYDVSSNKVKNFWYRHFPRKD

SEQ ID NO: 6467 - protein, 512 aa, unidentified
  source 1..512: note = uncultivated organism
MKIIQISPLAAEPARKVRLAAYCRVSSDSDDQIHSFAAQIRYYSGYVEKHPQYSFVDIYADEGITGTSFEKRDEMNRLLTDCKCGRIDRIITKSVSRFARNTEELLLSVRMLKEIGVSVYFEEQDIDTAKLSAEMLLTMPGVVAQQESMSISENMRWSYRKRMERGEFNCCTPAYGFRRIDKILVIFEKEARVVRWMFRLALRGFGRQSIANLLTAAKIPSPSGTDTWSYSTADYILRNPRYMGDAILQGRYTTQTLPFKRKVNKGELPKYYVENANPAIVTREVFEAVQILLDQRRSDSYAPRNRYPLSGILYCPDCGKKFRRQTTSGKAYWLCAARASGKTNCRSIRFPEERLEETFTLLLHKLRDNRESLIEPLIRKTEELYRRNHAYTEEIQSIDKEVADLAAQNHLVVQLYNQEMLSTEDYRRRVHTLNQNILELRRKRGRLLYGAEESRHLSELQQLREILKNSEDGWAFNPELFLDLVQRIQVETSESLTFEILGSIPLRERLAG

SEQ ID NO: 6468 - protein, 506 aa, unidentified
  source 1..506: note = uncultivated organism
MDAIYVRQSIDKSEYSISIESQIEDCIELVAKGSKYEVYADRGYSGKNTERPEFQRLMEDVESGLIENVIVWKLDRISRSVADFTQMMEKFKAHGVRFKSRNEPIVSTDNSSFGDAIFSILMVFAQLERETIQMRVKENYYARGQQGFYLGGRAPFGFNKVQTTLMGKKTYMLEPVPEQVEIVKKMYELYGNGDFSLGEVQKWLHGNATKTKKGNLFQKHAITRILGNPVYVQADADVYTFLQSNGVEPNNSPEDYIGENGIFLYGDTKGVAREKYAADGKEYATIGLHKGIIPSELWLRVQERLLNNHNFGSKGTGTKSWLSGLVVCGYCGKAVCFKEGGRKGSKIYTICVGRIEKYCHEKKRALTADTLEQIVEVQLLAYLKSLKVKTAKAKPAFSAQINSIKAAIAKLESEMDSYVKQIPQANSVLINLINAEVEKLNSEKMKLLQELNRLNVQENAPMYGGYDIDKVIAEWSTMDMTERKSVAKVFIKQITTTDDEIKVVFF

SEQ ID NO: 6469 - protein, 552 aa, unidentified
  source 1..552: note = uncultivated organism
MKKVRCAIYTRKSSEEGLEQDFNSLHAQREACAAYILSQASEGWSLLEEEYDDGGLSGGTLKRPALQRLLGDIEAGKIDIVVVYKVDRLTRSLIDFAKLVETMDQTEVSFVSVTQSFNTTNSMGRLTLNMLLSFAQFEREVTAERIRDKIAASKAKGMWMGGIVPLGYEANGRTLAIVDEHAAVIRDLFRRYCEIGNVRLLKEQLDDEGMMIPERFTATGRKMGGVPFTRGQIYKVLSNPIYIGEIHHKGQAYGGQHEAIIEPDLWATVQERLAANRQGEQRTPTIKAQSLLAGKVFDEHGEPLGASHACKGKVRYRYYVARERESGSTATDRIRIPARELEAAVVGRLVAALDDPLSLLALLGAELDRSTIEAAGALASELANRLRSRDRKLVRDIVNSAKVGTERIVLTVDANQLRQRLSVPILEHDKAQITLDCKVRLKRTGMAMRLVEPDGRGAHDEVDRSLVELLAQARKWWDRLSDGETTIAALAREQGINDSWISRVVRLAFLSPEIVDRILAGAQPAALNGTTLTTANQIPRSWNEQAMLLRLT

SEQ ID NO: 6470 - protein, 553 aa, unidentified
  source 1..553: note = uncultivated organism
MNEARRIYKAAIYVRLSKEDGDVADAKKAESNSISNQKSLILNFLKDKEDIEVVSVREDDGYSGATFERPAFQLMMQDVQNGLVDCIVVKDLSRFGREYIDAGRYIERLFPAMGVRFIAINDNYDSVNSSGQSDEIVIPFKNLINDAYCRDISIKIRSHLEVKRQNGEFVGNYCVYGYRKSEENHNRLEPDEYAGHVVQDMFQWVKNGMSLDAVSKKLNALGVLSPMEYKLSNGENYKCSFKKKETCEWTPTAVRRIVTNPIYTGMLVQGRVTTPNHKVKTQIQKEVDEWAVVENSHEALVRQRDFDIVQRLLAIDMRTSPGQDSIYTMSGIAVCADCGALMTRKVSTVSGKKYVYYLCSNHKKFKRCTSHRIREDELEETVLSTLKELIGQLLDADEVIRQAGEMQIRRIDIQKMEERIQANEEEINRYNRMLVSLYEDYKEGIVDKKDFQLIKENFEQKKTIAEQAIRNIEKEAEQAAQERDSDRSWIEEYRENRNISSLTRSLVVNLIREVRVYEKGNLEVVLDCDDKFHSMLEQAARIQKIERAERMAV

SEQ ID NO: 6471 - protein, 567 aa, unidentified
  source 1..567: note = uncultivated organism
MKELNRWHIIYSRKSKYTGKGESVENQVDLCKQKLLAKYPDLKEEDIKVFTDEGFTGANTNRPAFQKMMNLIRENKVASVTCYRLDRVSRNVGDFCNLINELQAYNVGFVSIREDFDTTSPMGKAMMLICSVFAQLERDTIAERIRDNMMELAKTGRWLGGTPPTGFKSQEVQNLSVDGKKKKLFKLKELPEEKLIINLLKDKYLEIKSQTGLETYTIQNNIKTKNGKKFTRWSLVNILSNPVYSMADADAYDYFIEKGALVVGDKKDYNGKFGLMVYNKTNQLTKKGRNDNPINEWIVAIGKHKGFWTGKEYVEVQNLLALGANRRFRKPAVNNALLSGTLRCSYCGSFMRPKLYQSEVDGELRFSYLCELKDKSRRTKCDHKNLNGNEADKKVVEVIKSLANPKGEYYQALKDLASGKLNKLDTKSNELYTLTNEIKKNEKDIASLIDKIKIVPADIVQDLAKEIQKLKSANVELEKQVKKLNIDKTSIIDDSENAKIVLDIIDSYFNRFDELDLLQKRTLIKLVISSAYSDGENLILNLTGTRESAKMTEFPLGDNCKWNSYAF

SEQ ID NO: 6472 - protein, 511 aa, unidentified
  source 1..511: note = uncultivated organism
MASNPKPLRCAIYTRKSTEHGLEQEFNSLDAQRDACEAYIKSQASLGWKVLPQHYDDPAYSGGNLDRPALKKLLADIETGWIDVVVVYKIDRLTRSLADFAKLVEAFDAKSISFVAVTQQFNTTTSMGRLTLNVLLSFAQFERELSSERVRDKIAASRRKGKWTGGSVPLGYDAKDKKLVVNKTEAETVRTIFRRYLELQSFSRLVADLDLRGIVTKRRNTKVAKYNGGIPFTYGPLAHFLKNRIYLGEVHHGGKWFQGEHKAIVDRLTFDRVQQLLTTKSNGRKAKRSKNGALLTGKLYDDKGNRMSPSFSSKNGVRYRFYVSSALLRGRKAEAGSVGRVSATEIESKVLAALQTHHRNEDYDGASLSIGSLERIIVGGNKLTLSIANVAGRKGASQEIRVAWSSKPKGGATVVECKSATESSPNQSLIQSIARAHVWTQRLLDGTFESIEALAEANRLHPKVIRLALRLAFLSPEVTSAILEGRQLTGLSPRIPKLLPLAWTEHRSLLS

SEQ ID NO: 6473 - protein, 663 aa, unidentified
  source 1..663: note = uncultivated organism
MCLTLRANMHDWWKEVQQMENTKIMQDFIPSQKFKRVAAYCRVSTNSDEQLKSLAAQREHYQQYISNHPGWELAGIYYDEGITGTKKNKRPELLHLLKDCEAHQVDLVITKSISRLARNAADCLDIVRQLKNLGIPVIFERENLNTANMDDEFILTVLSSMAESESNSISANNRWSIQSRIANGYFKVSTPPYGYDRDFEIIPDDAKVVKQIFTAFLNGKSSLAIAKDLAAPSPSGRKWSDSTIRSLLRNEAYTGNLRLQKTYTDHSFNRHVNHDEDTMTWYQDHHDPIITLDEFDRTQSLLAKRAKYRHTETRSLKYRQSYLYSGKLICQCGAKFKRQKKAKRVTWSCQKHIKDSQACPIKPIDERQIEVAFTTMINKLIFSKNKLLNPYLQGLRNEPENRKYRRMKELEESILLATEKRDTLMTMLSQDLIEPNEMMAKTKELIVRSNQYRQELSKLRSTFGENDNLILATRELLNYVNNHDIQATFDEQLFKQTVDNITVQDNSHLTFNLFCGLSLPERIWLLMSTVTFGYRISDGKIEIDPVNGQRVKNIFKDYLNAKTLTGVALNNGFKFHGAVKRILVNQTYLGTDDYPQLISQKVFEQVQTEVKNRAIQLGRTNLPSHQVKFYVQTKFKFNRSHHRYKRPAKQAEYMYQLIESEES

SEQ ID NO: 6474 - protein, 531 aa, unidentified
  source 1..531: note = uncultivated organism
MTVRATKAVRCAIYTRVSTDAGLDQDFNSLDAQYDASQAYIRSQAHAGWALIRHRYDDGGFSGGSTDRPALQQLLADIKAHKVDVIVVYKVDRLTRSLADFAKLVELFDAHQVSFVSVTQQFNTTTSMGRLTLNVLLSFAQFEREVTSERIRDKIGASKRKGLWVGGVVPLGYHAKDRKITVVEEEAKVVRHIFQRYLELGSLNLLLADLRTSGVRTKTRPLSSGRTIGGIPFTRGPLAYFLRNRFYIGEVSFKGETFPGEQPAILDRKVFDAVQAKLDQQRIHQNKARLSSDALLTGRIFDDRGNRMTPTYATKNGIRYRYYVSSALFHGQQREAGTLKRISATEVETVIANAIRTQLHIKSDATPDRELISGHVARVDVMQAQLKVTLSGDPEHLGAVESNAPTALLIPWTKGPSKRRRELILPASTRPEADQRPIRAETRTKLVSAMAKGRRWLDELVSGAVISIDQIAAREGCSIRQVNMTVSLAFLAPPLVNAAIEGRLPRGVGVVSLRDAPLEWSRQLAMLGLAS

SEQ ID NO: 6475 - protein, 503 aa, unidentified
  source 1..503: note = uncultivated organism
MRVAFYGRVSTEEQADRGNISNQVEFAKRYFDLHGPQENIEGYDLYLDEGISGTLSMEERPEGFRLMAEARAGKVSAVYFYRLDRLARSTQVVLNTYYELERLNIAIKSMTEAFDTGTPVGKFFMTLLASIAALERDTIQERTQMGKERKAREGCWTSGPSPFGYRIGPDKRLLVHQPEAQTVRLIYRLYNEGMSMVPLAQYLNAMGIPTPAVSKGSKKNSAGQWHAGHLSIILRSRLYTGEYRTMRRSQKGREGHIINVEAIIPRAEFERTRTILSENGELARGGRGRQYPLRGVIYCGHCGLAMVGNSGSTRGLFYYRCTGTVNHGRGKVCGNRQIRAEELERAIWDEIIEFFKKPGKFIEMARNRLDQTVKETLPSEDQLEQAERAMSLKKEARSRILSMVSRSLISPLEAEYELKKLAGEIIWLEGRLGDLAAAQEEGAIDGALCSTDLLKLISQSVEKIEPHREIIKLLVARVVVTARESGGKRDVKAVVYYRFRPGE

SEQ ID NO: 6476 - protein, 520 aa, unidentified
  source 1..520: note = uncultivated organism
MAAAEFGIPTGLKRRTLRCAIYTRKSTEEGLEQTFNTLDAQRDAAEAFIRSQREEGWVVLADKYDDGGFTGANMDRPALKKLLQDVGDGLVDCVMVYKVDRLTRSLLDFARIMDVLDKHGVNFVSVTQQFNTTGSLGRLTLNILLSFAQFEREMIAERTKDKMSAARRKGRWVGGNLMLGYDLSDKGAGLVVNNDEAARVRAIFDLYLEHGSLIPVVQELDRRGWRMKAWTTRKGTATGGKAFAKNRLYNLLTNMVYVGKVDYGGHVYEGEQEAIVEPGIWQSVQDRLRYNSKTGGRQIRNKYGAVLKGILRCGSCDVGMVHTYTQKAPNKLYRYYVCVNAHQKGYNECQTRSVSAPVIEQAVVDQIRGIAANPDVVADVVRQLDEQRIAGVEGLEREKRVIEKELGRLGEETAGLLRMTGKLATDRMAELQARVSVLERQLRDVRDQLTESVGQAGDAASVRKTLKEFDGVWSEMTPREQEKFVKTLVDRVTYDGATCTVTVGFRTAGIQQLCAQVENR

SEQ ID NO: 6477 - protein, 530 aa, unidentified
  source 1..530: note = uncultivated organism
MAKVTTIPATINPLTFQPLNQTKKRRVCAYARVSTDSKEQEESYEAQVRAYTKMIKEHSNEWDYVGIYADEGLTGTMVENRKEFKKMIEDCKAGKIDLILCKSTSRFSRNVLDAISYIRLLKSLGVEVYFEKENMWTLQQASEFVLTVMLSIAQEESRSISSNVTIGKRWAMEQGKVSWAYSTFLGYRKTEEGIEIVPEEAKIVRDIYRWFLKDGKSCSEIASILNDANIPTPSDRGKKWTVNNITSIVTNEKYAGDAILQKTYIPDYLSHKPKKNKGELKKYHVSDSHPAIIDKEEWEMTQAEFKRRQGMHGRYSANSVFSSRLVCADCGSFYGKKVWHSNDTYRKEIFQCNSKFKKGKSKCETLSLTEEKIKNAFIKAFNSTFDKKDIIIEDTIAIKNLLTDTSEEDKIIEEANVELDVVSELVNKLINNNSKIAQDQEKYQERYNELSARYEKAKKQLEDASAAKAIKRDKSIMIERFIESLKGIDGPLVNWSDAIWIATIDKAVIGTNYIEFEFKNGKKKKIEINH

SEQ ID NO: 6478 - protein, 624 aa, unidentified
  source 1..624: note = uncultivated organism
MKKQSVRCAIYTRKSVEDGLGQEFNSLDAQRSMCESYIQCRKEDGWAVLPTHYDDGGYSGGNMKRPALQALLSDIKSGKIDAVVVYKIDRLSRSLLDFVKLNEQWKRYQVDFVSVTQDINTASFVGRMLLNLLMTFAQYEMEMTSERIRDKIAECSRQGKFCAGMPPMGYKKDPDTHKLVIVPKEGKLVQRIFRLYLKFNSCGLVGQELNRRGITTRHWISRQDISHGGQPWNVAEIRKVLINPLYAGWIRHKSERYPGKHEALITQQMWDQVQVLLKSKSERRVQRISSHREDAVLSGLFRCGHCNCAMTPSYTVKNRKRYFYYACQRTLKFAEHRCPLCKIPAYEIEKIILYQLGLVLKTHSFLESLTAEFKEQQQSLYEKIRTECRGLSAYLRGKISDGDQAPVLQLEKKRAQKEILQNDVVSVKEYVKNFDDLWIFIPANSRIALLKNLIAEIKMDTTHVRTLLHEDWNEYEQEIRSGLKSGGVAATLERTPQGLVLVSSIQIQKLGGRTRIELNGMEYDYNRRSFLKAIALAWQGMELLESGEVASIPALAKQMNLSTTYLSNILKLGALSPKIVEQIVQGSIPGDLSLAALRNPIPLDWEEQWKALKFDSLSLQTQDY

SEQ ID NO: 6479 - protein, 802 aa, unidentified
  source 1..802: note = uncultivated organism
MQEIIRCACYTRKSVEDATLDRDFNSLTSQREACENYINSQKSKGWVCLPEHYDDGGFSGGNMNRPAMTRLKADIEAGKIDMVICYKIDRLSRSIIDFAELQKFFEEHNVHFVSVTQDINTSNSSGRMLLNILITFAAFERDLIIDRVRSAIEGGKKRGKFCGGVPMLGYRSDPFTKKLLIDEEEAKTVRLIFEKYMALESIQATVSEINRLGLKTREWVSVSTGKKHTAKPWNSTSIHRILTSPIYAGYVSHYDTNYEGEHEAIIPRPQWEKVQDEVVARYNEIEMPRISADEFTPPEKPQKESKGQKKSSDRIDEIQWLDEIYKKCDEYGIHFSKRILKAFHTAVKTAEWSPITILAGVSGTGKSELPRLYSHFGGLLFEPLSVQPNWDSQESMLGFFNSIDNKFDAQPVLRFLAQTQQPSNLSGEERLARWEKMAGSAFKFDPDNNETHKKLLEQLQGSVYPGADDCMGMVLLDEMNLAHPELYFAEFLSKLELRRGKGRGDLPFLPVKIGAGLPPYELPLGRNILWVGTMNQDETTKSLSDKVLDRSIIIYFPRPTQLVRRKKLMPLKDANRKLIYKGDFQQWWAMESEFTQELIAPYKQFIERMNDSLGIAGRAIGHRVWQSVEYYMANYPDVRVALRNGGDSAAINAAMHVAFEDQLVQKVMPKLRGIDTRGTFAACLKEIRTQLNAGIDDKPFDLDKDFELACVLGHGQFMWQSANYLNEDVEVNASAEKDNAPEGSSDDSTSDPDENRSSRNDEGQTPPDWYRPDDKSRIARWNRMSPEKQQEMIENYKRQPKQ

SEQ ID NO: 6480 - protein, 522 aa, unidentified
  source 1..522: note = uncultivated organism
MCGACYDALYARQSIEKKDSISVESQLAYCRYETRGASYIEYTDRGFSGKDTNRPGFEAMMKDIRGGKIKRVIVYKLDRISRSILDFANMMESFQKYHVEFVSSTEKFDTSTPIGRAMLHICIVFAQLERETIQKRVTDAYYARCKRGFFMGGRVPYGYRLIRTVIHNVHTSMYEEVPEESEQLKLIFSMYADTDNSLGDIVRYLNDHQMKQLRGAEWNTARLSEMLRNPVYVKADIDVYHFFRNQGTQIVNPASDFTGQNACYLYQGTGSDSGKRSDLSGKELVLAPHSGFIPSKLWLACRVRCLNNRQSAKTCKPKNSWLSGKIKCGNCGYALTVRRAKTKWGRYFVCSRSGEHGGCKGAGCTVYADVLEDYMMKAVEKRLSEFSTLEGWDSAKSRTRERPTLYGAAGKAGVRQIHKKIRLTQIEEEIHGLLSKVSEADNILMKYINERVLVLDAERNALQEENVMSDNADTGAAGARWRLNGHVKAWENFSFSDRQEVADLLIKVIRIADGNMEITWKL

SEQ ID NO: 6481 - protein, 529 aa, unidentified
  source 1..529: note = uncultivated organism
MKTGDTKVVRCAIYTRVSTDQGLEQDFNSLDAQYDASQAYIRSQAHAGWTLLRSKYDDGGFSGGNTERPALQRLLVDVRAGKVDVIVVYKVDRLTRSLADFAKLVELFDQHGVSFVSVTQQFNTTTSMGRLTLNVLLSFAQFEREVTSERIRDKIAASKRKGLWVGGRAPFGYQTKDRKITVVKRDAEFVRTIFRSYLKLGSIYLLMGDLRKRKIFTKAHTVKTGKTIGGIPFTSGPLSYLLRNRFYIGEVVYKGEILPGEQPAIIDRGLFEAVQAKLANQLNNHVQTRSKTDALLTGRIFDDRGNRMSPSHTRKNGVRHRYYVSLPLAQGHRCDAGSIDRVPAAEIERAVSVAISKELKIPQTEQSDLVTKCVTRVDVKPGHLTIELSVPRKLKSNKDAFDRKVLRVPWQKPPSKVSREVIRPLSTGSVDSRPIRSEARIRLVTAIACGRKWLEELLTGAAPDVETLAAREHCSVRKVNMTISLAFLAPGLVKAAIQGRLPRGIGIARLSDLPIEWSKQYLALGLTAP

SEQ ID NO: 6482 - protein, 521 aa, unidentified
  source 1..521: note = uncultivated organism
MKVAIYARVSTDEQAKKYSIPVQLELLRNFANVNSYEVFKEYVDKGESGTISERPELQDLLNDARSGRFKIVLVYRIDRFFRNTRKLLNTVDELGKLGVSFKSVTEPFDTSNPTGNFMVSLLGSVAQLERDTFIQRSRMGTVKSAKSGNVLTGISLYGYKYNRKNLHYEVNEEEAKVVRETFRLYTESDSSLGKVAEKLNNLGYRTRNGLKWVSDRVHQILVSTAYYGKWYYRTKYHPEPIPVNVPSLIDRKLFDKAQRFLKERRIYSKRNTKNNYLLSHLLFCGVCGRSMAAMTKSMKSVYNGRPYGPYIRSYYYCFGQVKKKCSLPFVRVDRIDSLVWSKVKEILENPSLLIKVIKEREEKDEGRKVSLGARLKELDSEIGKCEQEKENILRAFRKGILDDIELASQIEDIRNQERALRQQQEEIKIQIIGQKQVRERLGHLSILVSGIQERLASFTFEEKRELMRTLVEKVTIYGSGKIELRVVVPEIMPSTPKEGEQRDLGSFMHSVLESATVFRHE

SEQ ID NO: 6483 - protein, 612 aa, unidentified
  source 1..612: note = uncultivated organism
MRDPVRKRTFRCAIYTRKSSEEGLEQDFNSLQAQREACEAYITSQRHEGWKASANAYDDGAYSGGTMERPGLKQLLADVGAGKVDIVVVYKVDRLTRSLMDFAKIVEIFDRQSVSFVSVTQQFNTTSSMGRLTLNVLLSFAQFEREVTGERIRDKIAASKKKGLWMGGFVPLGYRPDQRTLAIHQKEAEIVRTIFKLYCETGSVAKVEAELVRQGIRRPKSKAITSGRTYGGRAFTRGEIYKLLSNPVYVGEIGHKGQRFDGQHPAIIDPKTWALTRTRLATNTHARHIQLGAKDPSLLAGLLFDDAGTRLTPTHTNRQGKRYRYYAKPSSQPHKRGRPRETNRGWRIPAPEVEKATVDLLVHQFTDQQWVLKTCGAGDGTIRAGRTVIAKAKDLAGRLRSESRGPLRELLLMLLSRVTLSESEIRVEIRKKGLAAGLGNVESVHTGSVEAPDWLDLDFETPYSSGDQAAITVVLPIKSRRRGLETKLILDAPGGEKPGEPDPALVKMIANAHQWWEDLVSGRIPTVRALAQTYGKDERYVARVLQLAFLSPALVDAVLAGRHPVEMTAQSLITLQEVPAGWASQVSLLIGSQIPNLKVARSNSAPATRVRS

SEQ ID NO: 6484 - protein, 515 aa, unidentified
  source 1..515: note = uncultivated organism
MNVAAYCRVSTDKEDQWNSLESQKAYFEQYIQRHPDWELYKIYADEGISGTGTKKRAAFNRMMNDAYDGKFSLILTKEVSRFSRNILDTISYTRELRSMGVHVYFMSDGFGTQDADCELRLTYMSSSAQEESRKTSMRVTWGQQRQMEKGVVFGRSMLGYDVEGGKMTVNPDGAELVRLIFHKYAVEQVSTGKLANWLREQGHRTLTGSTKWTPQQIIKILRNEKYVGDLIQRKTYTPDYLTHEKKANHGQVEKIILRNHHEPIIDRELWEQAQSRLDQNNKHGDGREVHSNTHLFSGKIRCGCCGSGFVSRVKTTAQRPYRRWSCAKAVTEGSKEYVDNNGNAMGCGVGRLLRDDDALNMVQTALKRLNMDREEVVGHVAALALEAIQSGQSNISDTPERLGFEMEKLRGKKEKVMDAYLDGAFSKEEMQAMKDRYDIQLADLAQRLTVVEEKQRTGTDTRQLKQKLSSKLNALLSGEAESEILYKTILYQITVFQDRHIELTLAGLPQVYVFS

SEQ ID NO: 6485 - protein, 505 aa, unidentified
  source 1..505: note = uncultivated organism
MKTAACYCRVSTEDQEREGTSLESQQEACLKKAQELGYQIDDGFLIRESCSGLTLDRPRLSQLREWVRNREIQAVIAYCLDRLSRDPVHFIILQEELERAGVALIMVTEDVDSSDMGKLIAHIRGFAAKLEAEKIKERTMRGKRERIKNGKLPTGRGILYGYSYDKEFGINVANDKLDIVKMIGQWLIQESIFLNEACRRLMEKGIPAPKGGHRWSRGTVGRIMRNPAYAGKSYAGKTKTEGKKRVSCPETDHILIHNAVDRTAFTWEEWELIQKQLDRNRELSPRNQKLTYLLSGRLFCKLCGRKYYGVPMHGKPYYRCSGRLRLLSDKRCTSKTVSAKYLDDAVWTKIAEALRNPGTILAGIQHLKDRVNKEGFLEEELERISKEIKMLDSAQEELLQWALKGFPEEMVTKKNERINRKKAELRREFKDIENKFEQAKESHIDVEKVEDLCRTASQSLLGFGHTQKKLALEALKIRLLIDSKAVELEGVLPVPSEVCAMSQHL

SEQ ID NO: 6486 - protein, 564 aa, unidentified
  source 1..564: note = uncultivated organism
MFFSNQTQIQSKPKHWICASYVRLSKEDEDAANGGKDESNSVTNQKALIQSYLEEHPELELYKEYVDDGYSGVSFDRPEFNRMLSDVKDRKVNCIIVKDLSRFGRNYIEAGKYLEQVFPFLGVRFIAITDKIDTGKEQSDSDQFVLPFKNLFNDAYSRDISTKVRSHLAVKRKNGQFVGSFACYGYFKDPADHNKLVIDPEAAEVVKQIFYWKIQGLSTERIADKLNALGILCPMEYKHSLGMRVSSNFRTKGKAQWAPKSVLRILKNDLYIGTMTQGKKTTPSYKVKKIINKPEEEWDRVEGTHEPIIHKDIFDVVQKLLLRDTRIAPDEKKLYLFSGFLCCADCGLNMVRSRRKYKDKVYSYYSCSGYKNGSGCASHMISETRLYDAVLKAIQQQCQLVVDMSRLLKYARELPDDPKSLHRFDVQLAKLDQEIAHNQEMKLHLVENLNIGLLSREEYQELSAMYDKRIKDTRQAKQNVELERNGLKDLPLEGEWLKTFKKYQTFTELDRMMLAELVDYIEVHADKQLTIHFKFADQIEQVRQYLASLNISAVPPNGTDGGGS

SEQ ID NO: 6487 - protein, 679 aa, unidentified
  source 1..679: note = uncultivated organism
MRIATYTRISTDETRQPYSLDAQATRLRSYVDSQEDWQLVRQFTDQASGASTERPGLQRALAEARAHRYDLLLVYRVDRFARSVRGLATLLEQLDAAGVAFRSATEPFDTATPAGRMMVQMLGVFAEFERATIIDRVIAGMERKAARGEWCGGSRPHGYLVNPATGHLVANPDEAPLIEIIFDHYARQRHGAKSIATWLNTHGHRTKSGKPWNHMAVLTVLRNRAYLGEIFFRDTYHLAPHQPLVDVETFQLAQQILTQRGEDHAHRASNASDYLLAGLLTCTHCGKKFVGTAAHGNRYRYRYYTCFSRHRYGTTTCPADRLPADQLETAVLAALLHTYRRHDLLNVALNAGHARSGQQRRQRQDELDLVEKELSKAEEAIERYFLAFEAGTMSENTCGQRVQTLGDKIATLHSRRAVLAAELDADQQPTVTEADLQALRHRVEHTITHGVPDAQKGLLQALVADIQVESRNAVRPYFRVQLTGQHPAGLAEPTSDAMVRPPSGSVPPAGFEPAPPPPEGGALSPELRGPGREPRVPAAIWPIRVVVMRTRVLVVDDDAVIRQLVCVNLELEGFEVVTAVDGQDCLDRVKELAPDVITLDVMMPRLDGYQTAERLRADPETRGIKILLLSAKAQERDLRRGSEIGVDAYLTKPFDPDVLIDTVRRLAADPAERAGATDG

SEQ ID NO: 6488 - protein, 556 aa, unidentified
  source 1..556: note = uncultivated organism
MQGGTRVYCLYRVSLSRQADRIQVGERNEADIPMQRDACRKFCHEHGWEIVNSITEPGVSGYKTPTFERYAIQEILSEAKTGNYDILLVYTIDRLSRRDYELPMLVAELKNAGVTVWSVQDGEIPFGTSMDHLQLFMHGWKAYGESERISQRITTIQNQIVMRGEFRGGTIPYGYKLIESGEISKQGKARHIMVTHEPEASVVRMIFHKIADEGYSMYELTRFLCKMEQPEGTRKMIWRSATLHDMLRNRIYIGQQRIRNEYSLPFERLQIVEPAIFAKVQDITVKAQRSLPGKCADVEPAPLYHDLIFCAHCGGRLVYNHAFDKRKDGSYSIRYYYRCYNRERFIDPCNGASTFSAKQIDASVRDRTGQLINFLVESPADALIRNSAELARSEYLAQRDSMQQKLADLDEQLEILQRKLTDMLRLYGIETTSELQLVYQDIRDKRNAVLYALQKMKSSAYEMDHLLKVKEKVLQKVIRECEKWRRKSWKEAEAMTPRFFERIDVHKGYFLDYRIIPEIKQFLPVTQRLGDKTFSSDILHAHGCQTVLPADASARL

SEQ ID NO: 6489 - protein, 541 aa, unidentified
  source 1..541: note = uncultivated organism
MPVRRCAVYTRKSSEEGLQQEFNSLDAQREAGVAYVRSQAGEGWRLVETQYDDGGISGGTLERPALRRLLDDIAAGKIHVVVVYKVDRLTRSLGDFAKLVDVFEGHGVSFVSVTQQFNTTTSMGRLMLNVLLSFAQFEREVTGERIRDKITASKRKGMWMGGVPPIGYEVRARKLVVVEEDAKLVRHIYRRYLEVRSITLLARELVRDGHRTRVYASDTSRGFGGKNFSGGHLHRILRNRIYIGEVVHQGIAYSGEHDAIIDADLWARVETILEVSRIGHRGPNVVGRAPLTGKVFDDAGNRMSPTQGRKGARRYRYYVSRAILDRRTERVGSIPRVPAQSLEDAVFAAVRDEINAARYDVKTALPTVDAEDKSAILAHAVNRVVVGTDRLHVTLASGGPSASVTSDAETHDPSESEEVEHMIEIPFSLQRRTGSFQILPSSTGARVISMRDPSLIRAVVRGKEWAERLLSGDGKSPGDLAREAGVTTQYLMRLVRYAFLAPDITESILAGTQSSRITVESLREALPLDWSEQRKLFGLAD

SEQ ID NO: 6490 - protein, 594 aa, unidentified
  source 1..594: note = uncultivated organism
MTLLIRSLRRSLPSSQPATSASARSKAWADLPFRQPSKQPESNLAVRQARAVKAVRHNTKRERRLILKRAPNSETDASRPMSAGQVRCAIYTRKSTEEGLDQDFNSLDAQREATEAFIRSQRGEGLVALPERYDDGGFTGGNLDRPALDRLLADIRGGAVECVVVYKVDRLSRSLIDFARIIEVFDKHNVSFVSVTQQFNTTNSIGRLTLNILLSFAQFEREIIAERTRDKISAARRKGKWIGGRPMLGYDLGPRGGRLVVNADEALNIRTIFKLYLDYNALLPVVREIDRRGWRTKQWVTRSGVTRGGTPFTKGRLFRLLRNPIYIGKIDFKKQIYEGEHEAIVEAAIWETVQQILQRNGRNGGAEVRDSYGALLKGLLRCAACHAPMVRTYSTKDSRRDRHYVCAEAQQKGANCQTRSVPEAVIKAVVIRQIRRLGSDPRIVARAVAKAEEQRLGIVGDLSLERQAAKRELARLGTQLSAVTKAACSDQPVANGVADLQERIVKTERRLTEILQELERLDSHTVDENDLRTVLARFGPVWELLNSREQVRIIRTLIDGVVYNGKTNKVTMTFRSAGIRKMCRRTGGEGRNES

SEQ ID NO: 6491 - protein, 564 aa, unidentified
  source 1..564: note = uncultivated organism
MNRLNCAIYTRKSSDEGLEKEFNSLDAQREASAAFILSQKHAGWIALPDLYDDGGLSGGTMERPALQRLLDDIKNGKVQIVVVYKVDRLTRSLADFAKIVDVLDAHGASFVSVTQQFNTTTSMGRLTLNMLLSFAQFEREIAGERIRDKIAASKAKGMWMGGNVPLGYDVKDRKLIVNEVEAETVRMIFRRYADLGSVRLLGYELDRLSIVSKRRAGAGGVLAGGNRFSRGALYTLLQNHLYRGEIAHQDRIYPGQHQAIIDAELWQIVQEKLVENRQARTLGITTEEPSLLAGLIVDARGQRMTPTHAVKQGRRYRYYVSTSLITGIRSDHAKGWRIPAGDVEALVLDRLRAFFASETDVGEALSGFDLDASTLRSALSESIRFAETWTDLPPNTVRELMRSVVQVEIQDEKIVMALKRNEIASVLLGNAFSLSPMSGSDAFELCIEAKLRRAGKGIRLVVGGGTTEKPNGQMAALMRDAHATRVALMTGRDATLDAMAQRLGIKRDYLSVHMRLTYLAPDIVRALLSGRYPPELAPTHLVSLCKDLPHDWQLQRTVLGFETR

SEQ ID NO: 6492 - protein, 525 aa, unidentified
  source 1..525: note = uncultivated organism
MRKRSDAVPPVAVVAASTAPATIRCAIYTRKSTEEGLKQDFNSLDAQREAAEAFIVSQKGQGLQCLSEHYDDGGYSGGNMDRPALKRLLEAVEANELDCVVVYKVDRLSRSLLDFARIIELFDRHGVSFVSVTQQFNTTTSMGRLTLNILLAFAQFEREIISERTRDKMSAARRKGKWIGGHPVLGYDIDPKGGRLVVNPQEAAQVRTLFELYLELGSMLPVLQEAERRGLTTKRWTTDDGHVRGGQPITKATLHRILTNVLYTGRINHKGVLYPGEHEGIIEQQTWDRVQDSLRHNKADNGASVRNKYGALLRGLLFCVPCGRPMMHTYTSRKSRRYRYYVCYGAQQKGWDSCETKSVSAQAIESAVLDSVRRLGTDPQLADAVAAEALEQIAKRRRAIDQDAEALRRSLHQLNHDLAREAADTAVDSGARFDRIAALQREIEETERRLTGLASERDELDRDHINSGDLRRTLAEFDSIWSSMTTREQEQLIHLLIAKVGYDGRTGKVTINFNSTGAKQLCQGK

SEQ ID NO: 6493 - protein, 506 aa, unidentified
  source 1..506: note = uncultivated organism
MANAVIYARYSSHNQTERSIEGQLEDCTEYAKRCGYTVIDTYIDRAQTGTNDNRENFQRMIADAAKKQFECIIVYKLDRFARNRYDSAVYKNKIKKYGVRVVSAMEQISDTPEGIILESVLEGMAEYYSANLSQNVKRGIRVAIQNKTFTGGVPPYGYKVVDRRVFPDEKTAPVAKWIFEKYAEGVPKKDIIEELNEKGYKTVRGTEFTINSLQHVLNNKKYIGIFVADGEEVEGIYPPIIEKDLFDKVQTMLAAHKRAPGAQKAYVKYQLQGKAFCGYCGAPLVGEMGTSATKNKYHYYACAEKKKNPRSCNKKREKKDFLEWYIVEQTVLYVLTPKRIDYIAGRIVRAYEKDFDDSAVRELESRLANVEKELDGLVDLAMQSPNKVMMKRINERAEVLDAQKSDLSIELAKLKIANSIKITKAEIVKWLSSFCDGDLQDEAFRRRIIDTFINSVYVYDDKIVIYYNIKDGKQVSFIDIDETAETEGFLRGEESSCFKPIAPPPA

SEQ ID NO: 6494 - protein, 530 aa, unidentified
  source 1..530: note = uncultivated organism
MTRNINNPKPATLPVVRSAIYTRKSTEEGLEQEFNSLDAQREAGEAFIASQRQEGWTCLPERYDDGGFTGGNMERPALQRLLADIEAGKIDCVVVYKVDRLSRSLLDFAQMMRTFDKHRVSFVSVTQQFNTATSMGRLVLNVLLSFAQFEREIISERTRDKIAATRRKGKWAGGHPILGYDVDPRGFRLVVNEAEAERVRAIFDLYLEYESLLPVVQELERRGWVNKRWTTRKGRERGGQPFERTSLYRLLTNVAYIGKVRYKDEVHDGEHPGIVDPAVFHRVQTLLQRNGQTRGAPVRNKFGALLKGLLRCVPCGCSMTPSHTTRNGTKRYRYYVCSSAQKRGWNTCPSKSIPAAQIEDFVVGQIKYIGQDRALLEEVLAQARQQDAARTSELEAEQRSLEKDLARWHAELRKLSCQLRPGDDNGSIISRLADLQERIGLVEERMRKVREQIQTVQQQLLDEEETALALSVFDPVWEALTPREQARVIGLLVERVDYDGASGKVSITFHPTGIKALAQQLADQRQERSA

SEQ ID NO: 6495 - protein, 507 aa, unidentified
  source 1..507: note = uncultivated organism
MRSAAVNEDNRAAKPVGIWIRVSTEDQARGESPEHHEKRARDYSALKGWRVREVYHLEAVSGKSVMGQPETQRMLADIASGHITGLVFSKLARLARNTRELLEFADIFQAKGTDLISLHESIDTTTPAGRLFYTMIAAMAQWEREEIAERVAASVPVRAKLGKPLGGQAPYGYQWKDRQLVPHPEEAPVRKLVYELFLQHQRKKTVARLLNDAGHRTRTGARFSDTTVERLLRDPTAKGERRANYTKSLGDNKGWVMKPESEWVLTSVEPIVTEELWDQCNLTLRDRANGRKPARKPVHLFAGFAYCACGQKMYVPSNSPKYICYSCRNKIPVTDLEGVFHEQLKSFFFSSSEVTAYLQQADQTIAEKQELLGSLEAEAQKTKREMDKLYHLYQADEISREGFGARYQPLEERQKQITDQIPHLQGEIDFLKVQYLSSDEILTEARDIYSRWLELEAAEKRKIIENIVEKIVIGKEDVAISLCYLPSSAEIMTERQHDVTGSWRPPA

SEQ ID NO: 6496 - protein, 551 aa, unidentified
  source 1..551: note = uncultivated organism
MGAGLLRFFIYSRKSVCTGKGESVENQAEMCRQYIYSKFPSADISDSCITVYEDEGFSAKNTDRPRFQQMLRDMRESGPDYLVCYRLDRISRNVSDFSSLIEELNRRGISFVCIKEEFDTSKPMGKAMMYIASVFAQLERETIAERVRDNMLMLARTGRWLGGTAPLGYSSEKEREVIIDGRIKTSCRLKECPAELTTVDAIFDKYLELRSISGVSKYLISMNIRSRGGNFFSLPGIKEILQNPAYCAADKDAFRYFSSVGADLCFEEKDCTGRFGLLAYNKRDYKKKNAPRRTADQWIVAIGKHRGRISGRKWAEVQRIIEDNIPTGKKPAKMHNDYALLSGLIRCEKCGRRMFAKPRSVKNSERGLYDYICSGKLRGGTELCSCPNMVGVQTDELVCKSIAEYVTESRRIYGLLEKMKRELTAAEKEDPAAAIDAEIKKCSDEADNLITALSQGNTGAAFIKKVNDRITELDAEIKRLESEKAALAADKSSSGNSEELTEAFAEKLSDLKKGLSCPDGLSVYEKRAVVRLLVKSILWDGENMSICIGGR

SEQ ID NO: 6497 - protein, 544 aa, unidentified
  source 1..544: note = uncultivated organism
MRIHNQKYYAGSYKRLSREDAITVGSSKNESNSISNQRELIQNFVKSHSEIEIVKEYADDGFSGVDFERPDFLRMLEDIKAGNINCVIVKDLSRFGRNYLEVGKYLEEIFPALGVRFIAISDNYDSTYANKGNEQLVIPFMNLVNDAYCRDISVKIRTSFEMKQQKGEYIGSFAPYGYKKKPDNNHKLIIDYEAANIVKMIFERTVAGMSNSNIADMLNGEGVPSPAEYKRLQGDNYVCHFQTNETALWSPLSVRNILGNRVYIGAMEQGKTSSINYRLKKRIKRDKKQWYCVENAHEPVIDKEIFVLVQRILGLDLRTSPGEDTVFLFSGILACGKCGEILLRRKNKVKGSEYIYYGCYDSNKKLRCKNISIREDKLKQAVLQTIKKHIASTTKMSELLRNIQKLPFEESKVRSIDCIIQEKEKEILKYQRLKMKLYEDYHDRFLGKGEYENFKEIYSKREQEAIEKKKELQIKKEMFLSGDTKIQKCVQQFHKYENIESLNRTLLFTLVDQILVCSKTEIKVKLRYKNEFIDYFSSDKQGRL

SEQ ID NO: 6498 - protein, 546 aa, unidentified
  source 1..546: note = uncultivated organism
MLIAIYSRKSKWTGRGESVENQITMCREYIQYNIEDSREAEIIIYEDEGFSGKDTRRPEFQKMMEDMKDRHYDYLVCYKLDRLGRNIADLALLIEELNKSETNFISIKEKFDTSTPIGKAMLYFSGVLAQMEREQIAERVRDNMVMLARDGKWLGGNTPLGFAVTKEEKVTINGRSKKAWRLVQDREEIKTVRFIFQEYLEKQSLVKVTEYFLKNDISTKRGKEYSTTAIRDILTNPVYCIADEEAYEYFWELGCQVCFAKEEADGTLGLTSYAKTSSAKYRNRDNPPEKWIISLGKHKGIITGKEYVKVQKLLKVNRKKGDTYRKVQNEVALLSGLLYCSCGHAMRPKYYSSSQVTEEGDRKFSYLCPYKDKTHGEKCNVQNVQGNTLDRLVCEEVLRYTEENSNIYNMLHKLKEKIGETGEEKVTEEDIIRKQIKEKRNEIKNLVSALSKSSANTEFVLQIEKEMERLNQECINMEMILKGRGAEKELIGTDEDQLDFLMEQLTSFRKLFDTLTVPEKREYLRIIIDKVLWNGENAHIFIYGIH

SEQ ID NO: 6499 - protein, 513 aa, unidentified
  source 1..513: note = uncultivated organism
MANSKLISPITKQGVQKLRVAAYCRVSSSSADQLNSYARQIDVYTKYIKSKPEWQFVDVFADEGISGMKADNRPEFQRMMRMCELRKIDLIVTKSISRFARNVKDALEYARRLKHIGVGVQFEKEGINTLSLGDEMLLNTFTAIAQEESKSISQHQRLSIVKRMELGEYVDSNAPYGYRLVNKQLEIYEPEAEVVRAIFAMYLNGMSTQEIAFELTRQGIPTKNGKEKWKSTKVSYLLSNEKYIGDSQYQKTYRDTTVPFKQFKNRGEEDMYYATDTHTAIMDKETFDKVQALLNKRKSQFSKATTLNIYPLTSRIRCTECGSFYHRKVKSGGIKWVCATHEEDAKKCNSFYYSEERIYDGFLSMVNKLRFGQKNILGQVANKLEVATVMYKRNNKNASQISESIAEINGKILMLDQLRSKGYLASDIHQSQVNDLRRQLKSLKDERQSEFESRILEMLTEVKKLKAIIDEIEEPLEEFNEHLFHEIVTEIEINNRDEMTVTFLGGLKFTELI

SEQ ID NO: 6500 - protein, 548 aa, unidentified
  source 1..548: note = uncultivated organism
MSKFFIYSRKSKFTGKGESVENQIEMCRNYIDQHFGSLSEHQIEVFEDEGFSGKNLSRPEFQRMMSLANKGQCEYIVCYRLDRISRSVSDFSSLIEGLSKLSISFICIKEQFDTSTPMGRAMMYIASVFAQLERETIAERIRDNLQMLARTGRWLGGITPLGYKSEKVSSDTSDGKTKSLFKLSPIKEELEQVRMIYKLFLEFRSLTKVETYLVQHDIKTRSGKDFTHRAIRDLLLNPVYCEADANAYKYFEQLKSDICCEEEAFDGKHGIAAYNRTRNDGNLQVRTNVSEWLITTGEHEGIIKSNEWIKAQKIMEMNKPKTYAKSVKNEISILSGLLVCKHCGSFMRPLTNTHSRRDPEGNQTFSYKCDLKRKSKKQRCDSQNVNGNTLDKMVCEEILQFDIDGTWMKEKLTTLRHQLNNSGSISQIEINALNERLEQISRDMDTCFNVFATKNVGEEMVAMTNERMQKLTSEKREVNARLLEMEEAAKLSKDFDNQINIITDALKHFKNAFHAASVHEKRLLLRTIIEKIEWDGKDIHIFLFGESA

SEQ ID NO: 6501 - protein, 513 aa, unidentified
  source 1..513: note = uncultivated organism
MIIQKIPVEPNGSNKKIRIAGYCRVSTKKAEQEHSFAAQIKYFRDYVKDIPNVELVDIYADEGITGTSMEKRDEFMRMMKDAKLGKIDRIVTKSVSRFARNNEECLFAVRMLKEYDVSVYFEKERIDTGMMSSEFLISLFGMTAQMESKTISDNMRWSYKHRMKSGEFVTCKAPLGYKLEKRNLEIIEEEAELVRRIFDMYLSGMGFDKITTILNNEGVGKRYGYDVWHPWTVKYILTNERYMGDAILQKRYTTDTLPFREKVNHGEKEMFYVENSNPPIISREIFEAAQALMSFRRSLAESGTKNTSTFQGVMYCSECEKKMRRVEISKKKAWVCCGYSRQKTSCSAHKVFEEDVVDAFKILTIKMYEHREEIFGTAIEQLKKVVDIVGTHRERIKEIDSNLARMSKQCYAISQLYMNQKLSDVEYIAKTNPIHAEMNRLRSERRQLIKMDKEEGSLSDLIDLKAELDTCDSPYVFNETLFDEIVNKITVDEKGEITFHLLGGLKIQERGQF

SEQ ID NO: 6502 - protein, 512 aa, unidentified
  source 1..512: note = uncultivated organism
MKRVVTLYRVSTKGQVDKQDDIPMQRRECMDFIERQKDWQFTAEFMEKGVSGYKVSVSKRDAIQEIRTLAEKKKFDVLLVFMFDRLGRREDETPFLVQWFIEHGIEVWSTREGQQRLDNRVDKLMNFMRYWQAGGESEKTSMRVKAAHTQMTADCIWRGGVAPFGYKLVHKGRIGKKNRPLYDLEIDEITGPIVQEAYDLVCNQGYGIHRAANYLNSKYPDLGKTWTGQTVRTLLRNPIYTGRLHMNDTLSEPQEHLRLVYDETQRFADYVLSSRIPRKYMEQRNAENEALPEDATTKVSVYGATLLSGILYCAHCGHRLVGSYCTKQLATHAYHRPIYRCYNSSIKAKLCDGQSVYSAKKIEEAVLEVVRYYFQNISRTVDAVWREQARIQLRSKLGTLIKQAQAELAKLEKQQTNLKQEVLKSLSGESLFDAQMLKSLLDENAAAIAAAEKKIEQYQDDREKEAERINFLAEQYRQIADWAEEFGAANNDTKKMILARIIAACQRSHFAV

SEQ ID NO: 6503 - protein, 553 aa, unidentified
  source 1..553: note = uncultivated organism
MNQNKIYKAAIYVRLSKEDGDISSAEKAESNSIANQKELIRSFLKDKQDIEVVSERVDDGYSGVSFERPAFQFMLEDIKKGKVDCVVVKDLSRFGRNYIESGRYIEKIFPMLGVRFIAINDSYDSLDGKSQTDEIIIPFKNLINDAYCRDISVKIRSHLDIKRKKGEFIASFAVYGYKKDCDNHNRLVLDEYAAGVVRDIFSWKIAGMSQQAIADRLNDRGILSPAEYKKSCGSRYRAKFQKKEKALWSAVAVTRILKNEVYLGNLVQGKVTTPNYKVKKTVQKEESDWVKIEDTHEAVIEAGDFAIVQELLQRDMRTSPGRKEVYLFSGILFCGDCHNVMTRKTSVVSGKKYAYYMCSENKRGGECSSHRISEKELEKAIMGLLKLHIEKLQDMEKEISMMENLPEKEYNIRLIETRIIKQKEEIDRNDRLKLSLYEDLKEGILTKEEYLALKKEFEQRKRDAYQAARQAETEKKRLMEQQGKHHEWIDEFLQYREMKSLNRTVLVELVKRIEVYEDKRISVCFRYTEEYQELCGLLLEQQEKPLSRRKEVV

SEQ ID NO: 6504 - protein, 512 aa, unidentified
  source 1..512: note = uncultivated organism
MPEVRVIPPVAERAHKLRVAAYARVSSDSADQLNSFASQVEYYTNYIQSKDEWEFAGLYADEAVTGTSAEKRSDFQRLIQDCRAGKIDRILVKSISRFARNTLDCIQTVRELKMLGVAIEFEKEHIDTSKMGSELILSMLSAAAQEESLSISKNLKWSYQKRLRSGNFITCSAPLGYFLKDNQLIPDPKEVPIVQYIFNSYLSGKSTTEIARTLNEAENRTKRNARWHHGMIRYILTNEKYVGDSLFQKSYTPETLPLVRAKNDGQLTQYYIKNSHPAIIDREKFEQVQRLITQKKDQHGTKTEIQKFPLSGILKCGLCGSAFHRHQDQGKNRWICYQHRKNKDLCPMGIIQQEEIYQAFLTLYNKLANNTEIIRDMLSDLHALQDKVYFSNPDNLELNRQIAELVRQNHSLARLQTKGCIDSALYIEKCNLNNQKIEALRKELKQDQASDRIRQLIGKTELILELLKDRELMLEFEESILKAMVQTIVVFPNTICFHLINDLKLKEKRKKS

SEQ ID NO: 6505 - protein, 535 aa, unidentified
  source 1..535: note = uncultivated organism
MSKAAIYARKSKATEKGASVENQINKCKAHLNNLDITDVLIYKDDGFSGKDTDRPAFIQMMKDAKNKKFTTLICYKFDRVSRNVSDFSNLVDELTELGISFISLSEQFDTSTPIGKAMMNICSVFSQLERETTCLRVTDNMYALAESGYWLGGECPTGYKNKRVFYTDSSGKQKSYSVLEPISEEVKLVKLIFEKYLFFGSLSKLEKYMLSNNIKTKRKKDFSKTSLSSILRNPAYVKADKNVFKYFKSLKINTFGNPDDLHGVLIYKKHKGKKGKTHDISEWIYSISSHEGIITAEDWLNVQKMLDSNKSRAPALGCSNTALLSGLVTCAKCNKPMRVAYGTKIPNSNNKRFYYMCTLKHNSGKTRCDSRNVNGIDLDTIVINKIKDLSTNKKILLNELLAHNKSIDSSFESSYYDSINKEIESNNVSINNLLSNISLTTDEDIVKIFLEKISALKEKNKELNAKLTELNGEIASHKKLLNNSTKLIERLKNISKYIDTATNEEKKKLISSIIERVYVNGDTGAVNIKFKQPDN

SEQ ID NO: 6506 - protein, 590 aa, unidentified
  source 1..590: note = uncultivated organism
MMGRGNGNGKPEANGAGKSSITRCAIYTRKSTEEGLDQDFNSLDAQRESCESYIASQRHAGWIALPDRYDDGGFTGANMNRPGLQKLLQHVQAGHVDSILVYKIDRLSRSLLDFARIIELLEKHGASFVSVTQQFNTATSMGRLSLHVLLSFAQYEREIIGERIRDKMAASKRKGKYMGGVPPLGYDVDRDAKKLVVNPDEANLVRHIFKRFFSLGSVTKLTRELNENGHTTKSWVTFKGKMRKGRPWNKSHLYRLLNNPILIGRVSHKGATFPGEHEAIIEKSLWEKAQKQLADNTRSRPDETRSKTPVLLKGLIKCGHCGTSMGATFARKNGKTYRYYLCLQARKSGYDSCPVRSVAAGEVDKTVLARVREMLEDSGLIVKEVSISAEGAASLGNMANLWDELYPGEHARIARMLIEKATVYEDRLDLLIRNEGVLSLAAELGDEDERPVNIDLEQSGTIEVSIPMTFKRRNGRKKIVLPPGASVRAPNEGSHDPVVIAIARAHRWLEELESGQVASIAELARSLDLDGSYVHRMLSLTMLSPEVVTNIINEKGAEYSLARLTKWFPILWNEQKEILLGKQKRRVVSQ

SEQ ID NO: 6507 - protein, 536 aa, unidentified
  source 1..536: note = uncultivated organism
MMIQPRAALYLRVSTARQAEQDVSIPDQRRQGEAYCADKGFAVVDIFVEAGASATTDRRPEFQRMIEAGTAKPSQFDIIVVHSFSRFFRDHFELEFYVRKLAKNGVKLVSITQEIGDDPVHVMMRQIMALFDEYQSKENAKHTLRAMKENARQGFWNGAQPPIGYRLVVAAQRGERIKKKLEIDPLHADTVRLIFRLAQEGVGDGPMGVKMIVNHLNENHIRTRSGGLWGVGAVHQILTRRTYFGIHEFNRLAKGKRPNDKADIVTIEVPPIISEDCFNAVQTRLRARSPARLNPAIAASPSLLTGVLHCAECGGSMTVMTGKGGRYRYYACANRRRKGAVACSAGIIRTELLENVVSQYIEKRLLDPVRLGGLLSSLLDQREERAKEREQRIAELGRKAAEAQQRLARLYAAIESGAADLDDPDLANRIATLKATRDQAQVDAERAEALMDSSGAKSISPELLAEFTKRVKKRLRGSNGKYRRDHFHQFAQRVEILKRKIRIGGTKESLFNAVFALGNVQQKDLVPSAVLKWLPG

SEQ ID NO: 6508 - protein, 638 aa, unidentified
  source 1..638: note = uncultivated organism
MKAAIYLRVSTARQAEKDVSIPDQLKTVEEYCRRCGLDVVAKYTEAGRSARDDNRPEFKRMIDDALSADHPFDIIVVHSFSRFYRDEVHQEIYLRKLEESGVVLQSATEEVGQGFAGEMSRRILSLVAEMENKQRAARVLQTMLENARQGFFNGSHPPYGYRAVEAERRGDTVKKRLDIDPAEAEIVRMIFRLCLHGDGSGPMGIKAIVSALNAKGLTYRRGRPFRINEVHRILRRSTYMGIHYYNRRIDKTDRLRDPSEWIPIEVPHIIELDTFEAVQRHLQSRRPAVKAARLSNGSMLLTQIATCPHCGSGMTLRTGKSGKYRYYACAGAASKGKAACKGRSIPMAELDEVVLGALESRLLQPERLKEILGRLAEKVLLEQSKSVEKQSALQKERRQVEQSINRLYEAIENGIVDDGELFRKRLSGHKMRHDELTRLMAYDKRRTELPADLLSSKNIDRFATAMRRRLRDPQRDGLRKAYVGMLVSRVVVGEKQIEIHGSNAALMAAASSQASISEGEVPSSMPEWRRGWDSNPRDACAPAGFQDRCLQPLGHPSADRALGSKSNVPWKAAPPAAGAYPRTVGARRKGRKRPRKAAQIVRTAVSAQNSHGASRRQGVPPKDPKRSGKLTWEGNHPS

SEQ ID NO: 6509 - protein, 522 aa, unidentified
  source 1..522: note = uncultivated organism
MPGKPPQGVERTASGPVRCAIYTRKSSEEGLEQPFNSLDAQREAAEAYIDSQRHQGWIVLPELYDDGGYSGGTMERPALQRLLANLQGGGIDCLVVYKVDRLSRSLLDFARIMGVLEERGTSFVSITQQFHTTSSIGRLTLNVLLSFAQFERELISERTRDKMAAARRKGKWVGGIPPLGYEVAEGGGRLVVNEREAGVVREAFTLYQERGSVWAVAEELNRLGRTTKQWTSQRGQPHVGVPFSKNGVSWILHNVTYTGQVRYRGETYAGEHVGIIQPAQWEQVQGMLQSRREMKPKGGCREGMALSGLLYCGNCEVAMVASYTSKGGRRYRYYVCSRAQQRGWKSCPVKSVSAGQIEQAVWEGVARLAAPGQQSGGMGERVRQAVERITYDRGQKLVRLRMRQECGGAQVDMALVRLGHGEKRGRLPRITRLMALAVRFQELLRTGTVRDYAELARLGIVSAPRMTQVMNLLNLAPDIQEEILFLPEGEEGREPVSERAIRRLPDILSWKEQRQMWKQLRG

SEQ ID NO: 6510 - protein, 507 aa, unidentified
  source 1..507: note = uncultivated organism
MVGESRKAAIYLRISQDHEMDGLAIDRQREQCEALAQIRQWEVVETYVDQSKSATDRTKSRPEYDRMVADYNAGRFTAIICHDLDRLTRQPHQLEDWIDAAEFKGLALVTANGDADLTTDGGRMYARIKAAVARAEMDRKGARQSAAQLQRAKQGRAPKGMRPLGYATNGDVIPDEAEAVRAIYALFTRPAHPESLRSLARALSGTQGIEGISPRPKHSHVVSSERAERRLAEGKEPRPIEPDGPWSPSTVLGILRNPRYACMSTYTPKTAQADGGRRRSWRAQILRDEAGEPIRGQWEAIVDDETWWCAQEILDNTERVTKTSGSTNRKHLGSGLYRCTVCGGKVTGAPRGYRCAGHVMRTGSHIDEFVTEVIAGRLGQPDALAKHKTTGEAPATSGVTAAIAEQRGRILRAQRDYDAEVIEGRDLKRIREAAEARIAELEAERLLRGRGGALAPILGTEDPATAFREAPLEVQRQVIDALATVILHAQPRGRRGFDPASVTVEWR

SEQ ID NO: 6511 - protein, 560 aa, unidentified
  source 1..560: note = uncultivated organism
MKTIIYARVSSDKQAKNQTIQSQLEVLREYANRENLEVIQEILDDGFSGTTLNRPGMDEVRELFRAGKAEAILVLSPDRLARKQSSLLILMDEFKKFNINIIFTNQQYGNSPEDTLMLQLQGAIAEYEREKIIDRTRRGSLHSMKCGQVWGGHAPYGYTYVNKTANKMGHYEIDPQEADTIKKIFHWYVIEGLSGSAITNRLMELGIPSRSSVNKWWSTAIYTILRNETYAGTAYANKTKGAAPPKHPKVKAYRTKIKSSKVMRPREEWIAIQVPQIIDRELWEKAQVKLEKNKRSSKRNNKKNKYMLRGLVICGECGSMVTGSVSNTKTYYSCGAKRNKNITTKPHDDKNVTVRHEKLDTLVWQELTAMLDDPERLEGCIVSTIDRRQSKSNLPNVNLDKLEKELQKLAVQEQRILDAYREEIITLDELRDQKAKITEQIKLVEARKKAILTQQNHVKQPKFTKEVLGDIGERYKRIMANADHQTREKLANLLINRVVLYPDKARVEGNIPIVNDVLSSADFDPARKKLVSRFIGSKPPNIFTHLNEKKDHQPGNRLVL

SEQ ID NO: 6512 - protein, 596 aa, unidentified
  source 1..596: note = uncultivated organism
MIAIYSRKSKFTGKGESVGNQVELCKDYIRNMFGEFYADRYVVFEDEGFSGGNLKRPDFQRMMTDVRKRKFKAIVVYRLDRISRNISDFTGLIDELSKLDVSFVSIREQFDTSTPMGRAMMFIISVFSQLERETIAERIRDNMHELAKTGRWLGGNAPTGFQSEAVSKVTVDGKTRKSFKLVPVPEEREIPKMIFDLYTQTDSLTAVEAEMLRRRIKTKQGKDFTRFAIKAILQNPVYMVADEDAYNYFKEREADVCFPKDAFDGSSGIMAYNRTDQEKGKTTVLLPVSKWIIAIGQHPGLVPSKRWIQVQESLDRNKSRAYRKPRSNEALLTGLLFCSCGDRMYPKLSQRRTADGEPVYTYVCKMKERSKRERCNRRNANGNILDAAIIEQIKSLTEHDSSFLTQLEKSRQFYTGNREQYESQLADLRAEYAENEKTINGLIDSLAMVGDSIAKPRVLKRIEELTTTNREIENRMHELQGLTEANALSDMEFDLLRQMLSMFRVNIDEMSIEEKRAAIRTVVRKVIWDGVNAHVVLIGADEGEIEFPGMEGRMGNLIDENAEKDPPEAFADVNYEGFAGETPVKDSKSPWGEGSK

SEQ ID NO: 6513 - protein, 555 aa, unidentified
  source 1..555: note = uncultivated organism
MKEKDFYNVAVYLRLSRDDKPDGSAESNSIHSQRDMIRSFIRKQDDMEIYDIYVDDGWSGANFDRPSFRRMMEDIEAGCVDCVIVKDLSRFGRDYIEAGRLIQKTFPAFSVRFIALNDNFDSLTADFNEKTLVLPVKNFVNDAYCSDISKKIRSHQQVKREKGDFIGAFAVYGYRKDSENINRLLVDEYAAGIVKKIFAWKTAGLSNLAIAEKLDGMGILSPMEYKKSQGEKFSTGFVTHVRARWSAVAVKRILTNELYTGMMVQGKNEKVSHKVKRSVEKPKEEWVRVPDTHEAVVSAEDFETVQKLLAVDTRASAGKAGCHMFMGFLFCGDCGKPMIRRINRYKGTEKVYFICPTRNKGLGCTRHSIPEEELKHLVLAGLQQQLALFLDKSHVLTQIETMEVQFDEVAAFDKEIRKLHQEQEKYVSLRSGLYEDLKQGIITEEDFRDFRQIYEKQYQAAEDAIRQQEEAIKDLFKAGVSAGANLEKMKSTLEITELTRDILVTFVSRILVYEDKRVFLELRAEDMFAKVLMLADFIESKENAPVMEQERKEIS

SEQ ID NO: 6514 - protein, 621 aa, unidentified
  source 1..621: note = uncultivated organism
MIEVDDRRGHAREAGVRSAGAGPGSGKRPTSSNQRVRRCAIYTRKSSEEGLEQSFNSLDAQREACEAYIASQKHEGWMLVTTAYDDGGLSGGTMNRPALQALLGDIIAGRVDVVVVYKVDRLTRSLADFAKLTDLLDGAGASFVSVTQAFNTSTSMGRLTLNVLLSFAQFEREVAGERIRDKIAASKKRGMWMGGMPPLGYDVCDKQLVVNETESKTVQTIFESYVKLGNVAKLKAAMDAAGVVSKVRTIKGRPSGGVAISRNGYHTILKCPLYIGRVHHKGQTYPGNHEAIISDELWQVVQEQLTANSSNGATYGDICTRTGIPSHGTSIAYQGQSHRNTKGSHLLKGILFDAGGERLSPSHSTKRIKGTRNRGSSTRRYNYYVSASLMRGQSKSDGCGKNGLRLSATELDALVMQSLKAHLRNREWVGSIASGALPVQEYKDLMSRCIALSKELDDHKARRLLERVTIHQDTIAMELNLKTPAELVGINLDALNQEPIRITQASSILRQGRSSKLVVGSVLVADLCINQALVDQLKLANRWWQAMVGSKASSITDLAARERVDPSEISRTITLAFLAPDIVRAILNGTQPPSLTLNALRRARPLTADWEDQRQMLLAEY

SEQ ID NO: 6515 - protein, 542 aa, unidentified
  source 1..542: note = uncultivated organism
MTRTPAHAPHERRCAVYTRKSTSAGLEQDFNSLDAQREACEAYVRVRSAEGWRLVPERYDDGGFTGANLDRPAFQRLLDDIDAGRVDLVVVYKVDRLSRSLLDFARVMERLGRAGAAFVAVTQNFSTADAMGRLTLNVLMSFAEFERAMIAERTRDKIAASRRKGKWTGGSVPLGYDVTNGKLVVNELEAVVVREAFALYLEEKSAFLVAKALNARGHRTKGRLGENGTRRPGPRWTKVSVLRVLKNPLYVGLVPYGRERHPGEQAPLVEQETFARTQELLKKPSVRRRHAGRNERYLLSGLVRCGACGGAMTPASTCKGGRAYRYYRCARRDREGAEACGARALPAAALEGFVRARLRTCALAPELSVQALAAFDMRLTEATEALGREHAALAKELARLETDEARLGTELARCEGGDGGDTHALLARRQSDVREDLAACRLRVADVERKVALAAGARRDATWAAGVLAEPGVFWDALSPENERRLLSALLDRVVVDLEGGGIELVFAFGALVTGVPGSQTAVPNAPARSDEATPSAAEEVA

SEQ ID NO: 6516 - protein, 512 aa, unidentified
  source 1..512: note = uncultivated organism
MSNNNGQAQFNSRFGYIMVAAGAAIGLGNIWKFPYLAYRGGGGIFLITYIIIIALMAHPMVEMETAIGRHTAVRGRNQGGKIRVKKRVDAIYARQSINKKDSISIESQIEFCRYELKGEVCREYTDKGYSGRNMERPMYQELVRDIRQGKIRRVVVYRLDRISRSILDFANMMEMFREYDVELISSTEKFDTSTPMGRAMLNICIVFAQLERETIRDRVTDSWYSRSQKGLFMGGKIPYGYRAEPFSVDGINTKRLIPDPVEEAYVRQMYEMYAQPEVSYGEIVRYFAKEKIKDLSRPALTALLSNPIYVRADQEVYDFFLSQDTEIVNTPAEFDGMRGCYLYRNRGGKSESEQEMQENILVLAPGEGIVDSGLWLACRRKMMANPSGQGSRKPVHTWLAGKIKCGRCGKALKVDKGGSRWYFRCSKRADNKSCEGAGTLRVEDVEDYVHRKMRQKAKGTAWQEQMSGWRKMSFDERREMADRMLVSVHAAEGKITIEWREDRSIRDELECG

SEQ ID NO: 6517 - protein, 663 aa, unidentified
  source 1..663: note = uncultivated organism
MKYKKVSEVFKQRKKCDIYIRVSSERQVQGFSLDGQKRELIEYAKMKGLEVNNIYVEPGRSGKDIDGREEFQKMLNDVLRVDSEVGYILVFKLSRFGRNVRDILNTINLIHRYGISLLTKDEGIDSSSNMGSMLIAILGTVAEMERENISTQTMLGREEKAKQGGWNGGFAPYGYDIVDGKLVANENAYIVKMIYQKYIDENMGMKAIADYLNRNGIKKQRPKNKQDYKFDDWSDHTIKAILDNPVYTGYIAFGRRRTVKCINEEGEIVDKLLKQEDYITSDEQSHEALVSKELWDKAQQKRKSRAVRGNKRIGQAPKHLLSGILKCPDCGCNMVINYNKWCNQDGSNKQTRTYICGHYNRSGAHGQCKRNGVNAEMIEREVVNYTRKLISNPQFTSYVKEKIGYSTDVSEIEKEIESYEKKLKILERNKESLYKDIDNLADDDKIASRKREDMNKRLDNIYKDIEEIETLKLECEDKIDIIRKQEFNRDKIYEMLLHFDKIFDKLDDEEKQQLIQALISKVEVYKKDEIKTTKTYIKEITYAFDVFDLDTNFLGNKSNNVETVVLLSKGMVDNRKVKVDFSLEDMDLSEFKGKATYEQIKVYVLEQTGLKVSNLYIAQIKKKCGLDVGENFNLPKSENAKQPKCTPEKEEAIMQAFKHFGII

SEQ ID NO: 6518 - protein, 504 aa, unidentified
  source 1..504: note = uncultivated organism
MIAIYARQSLDKKDSLSIETQIELCQAEAGGNAPCKLYIDRGYSGKNTDRPHFTKMMHDIEAGRIDKVVVYKLDRLSRSLLDFAGMIDVFKKYNVEFSSAREKFDTSTPIGNAMLSIIMVFAQLERETTQVRVRDSFHARAQKGTYDALAPYGYVKAKAIICGKPASTIVVDEITADVVRRIFEDYAYSSHSLGFIARDLNSKGIFSPAGVEWDSGKLSRIMANPIYVKADGDIYRYYKALGANVTNPAEDYAGIQGCVTYGAWDRIRRKFDQWQSLSISVGLHKGIIDSKIFLMCQQKLNANCQINNSGRGKHTWLTGLIKCGYCHRAYKVMANGKYKPRLLCTGFTNYGTCHSSVKWDVMEAESIVRTELFRYVNTSPGLIAKEHSEMPPAVRRLKIQEVKLSEQIDNLVSAIAGGNAASIKHINARIEQLELKRDEVMREIQGCLQEHSSIQDAKQFGDIISIWLELDIQQKREVAKTLIDRINLFDGKIEIVWKYKLQAS

SEQ ID NO: 6519 - protein, 514 aa, unidentified
  source 1..514: note = uncultivated organism
MPQVQIIEPTIKPQEQKIRVCAYARVSSDSDDQLNSFSAQVEYFTRLIQSHSDWEFVDIYADEGITGTRADKRDEFQRLMRDCRAGRVDRILVKSISRFGRNSTDCIQAVRELKLLGIAVMFEKEGIDTGQMTSEMYFSMYSAFSQEESTSIAKNMRRGAAMRMKNGTYRLSQSPYGYRLDEHGGFLVCPEEAQTVRKIFGDFLSGKSIREIANELAEAQVPKLRGNPVWSATGVSYILTNERYMGDELFQKRFTTDAFPFKKVKNRGEKSQFYAEGTHEAIVSPDVFRLAQELLKKKSQLHGRKREMQSYTFSKMLECSECGSTFCRRVTKAGTVLWSCYRHFRDKKLCAMENVQESEVEKAFITLYNKLGRNRSEILTPFILQVENLRDKSFMSHPGAMQLNKEIADLLGQNHALATLRAKECIDSAFFMSETNANNAKLEALRRELQRYRDLNDYHEILDGSHLLLKIFEGQESILQFEPSAFRNMVVKVKISADTIRFRLINGMELAERR

SEQ ID NO: 6520 - protein, 563 aa, unidentified
  source 1..563: note = uncultivated organism
MLKLSLDKDYKAAIYLRLSKEDGDFSISGEKLESDSISNQRMLIKEYLKKHPEITVVKEYCDDGFTGANFERPDFNRMMEAVRAGLVDCIVVKDLSRFGREYIEAGDYIQKIFPRLGIRFIAINDNYDSAQPGAADNELVLPFKNLMNDSYCRDISIKVRSNLDAKRRNGQFVGSRVVFGYLRSPDNKNQLVIDPVAAPVVQDIFKWKIEGLSPAQIADRLNDANVPSPIEYKKANGSKQRTCFQTKKVALWSAVAIYRILKNEIYTGTLVQGKTTSPNHKVKKTIVKPQSEWARTENAHEPIIAHAQFDLVQKLMLDDTRSPSGATGVHLFSGKIYCADCGSPMVRRVSRYGEKEYAYFICGGNKSDKTSCSAHSIKESVVYDAVLAVVQGHIDAAMNMADALKRIDDMAWENREIEKIKAKISFQEEIIDKNRRLKTGAYEDFKSDFISREEYKAFTAQFDQQIKEASDTIMRLTSERNSVMGGLAEQQSWLEQFRKYANIKELARSTVVNLIDYIHIRENKDIDVGLMHCDRFASIVEFLRERQEKEDANKVIRFERKVV

SEQ ID NO: 6521 - protein, 555 aa, unidentified
  source 1..555: note = uncultivated organism
MSPRKLACAIYTRKSTDEGLDQAFNSLDAQRAACSAYIRSQAGEGWSEVPEPYDDGGHSGGTLNRPALQRLLTDIAAGRIKIVVVYKVDRLSRSLADFAKIIELLEAHDASFVSVTQQFSTTTSMGRLTLNVLLSFAQFEREVTAERIRDKIAASKKKGMWMGGVVPLGYDAVDRKLVINDAEAETVRTVFALYREHANTRLVKEEADRLGLRTKQHEWRGGRRPGGGPFTRGHINKILINRLYIGEVVHKGISYPGEHAPIIDWGLWDAVQSQLASNAVTRKAGANARSPSLLTGLLETADGRRLVPSHATKRGQRYRYYVSKPGDDRSAAAWRLPAPALETAVIDGIGGFLTDRQRLSTETASNVAAGNLTPFFTRAAALATELRDPTIASLREVLLAIVRRAVIAEDSLCITLNAHALWRRLGIDGAGLPEEVMLDLAMVVRRRGVETRLIVENAFVLAKPDQKLVELVVRAHRWFGMLRDGEARSVHDLARCAGADPGDVSRILPLAFLAPDIVEAVLDGRQPIELTAARLKRMRDLPLDWAKQRQRLGFA

SEQ ID NO: 6522 - protein, 548 aa, unidentified
  source 1..548: note = uncultivated organism
MYLKSQNSFLAAAYLRLSKDDGDKMESDSIRNQRSLIRDFAKQHSDITLVKEYVDDGFSGTNFERPDFQRMLEDARNHKINCIIVKDLSRLGRNYIETGRYLEKIFPVLGIRFIAVNDHYDSADTTNDSDQIIVPFKNLVNDAYCRDISIKIRSQLDIKRKKGQFIGNYAGYGYFKDPKDKNHLVIDEYAAEIVRMIFNMKIDGFSAKNIAARLNEMGVLIPAEYKRACGFNYSSGFMAGKKPKWDVSSVLRILKNELYTGTMVQGKTRKINYKVNVRQKIEPENWIRVEGTHEPIVSREIFECVQKLMELDTRTSPEEESIYEFSGLLRCGDCGQNMVRRTTTKKGKKYFYYHCSTYKRKEGCSSHNISDIKLQKAVLEAIRSQVALIVKADEIIAQIENLPQQQFGVKILDTQMKTLHKEIQKYEELKANLYQDMVDKIISREEYRELKQNFSKKIETAKVSMKGLEEKKKRMLSNEMRTQQWVTEFKQYRNIKTLDRKTVVMLIDKIVVYSTDRIEIHFNYEDEITEFVKYAFANGDPLRKVGEL

SEQ ID NO: 6523 - protein, 511 aa, unidentified
  source 1..511: note = uncultivated organism
MAQVQIIQPYQPHSEELEKVAAYCRVSTDSKDQLNSYRTQIGYYTNFIAQHPGWELADIYADEGITGTSLEKRDEFRRMLSDCRAGKITRILVKSVSRFARNTLELIETTRELKDLGVVVVFEEQGIDTAQMLGEMQLTLLAMAAQEESTSISKNMRWSYQKRMENGTFLGCTAPYGYTLEDGKLSIIPEEATVVQNVFAMRLAGSGQETIAKTLNQQGVPTREGTPWYVSKIHYILTNEKYVGDALLQKKYTANSLTHERKRNTGELPCFYVHDSHQGIVSRECFEIVQKGFAPTNLSRPCEIHTFIHRIQCPDCGRHYRHIHSSGKSYWSCPNQMSGLTSCRVLRLSELSLKWAVVNLFGKLYTHQDTLLEPSAKLLEEIAARQEQSNTKLYELNTVLADLNEKAHTLQRLHNKGFIEDGDFREQSDALASQRKKLTDQRTQAIHGSKALETLDKLRKLQDTLATLPEIPWEFDIGLFDQIVEKIVPISNTELLFKLKCGLELKEVLPK

SEQ ID NO: 6524 - protein, 500 aa, unidentified
  source 1..500: note = uncultivated organism
MAITRAVLYARVSTTQQAQEGVSLDSQLEMAQARCEAKGWHFAGKYVDVMSGKNDKRPELKRMMDAASKRAFDAVIVYKLDRLARSMRKTHEVLGVLQDNDIAFISLTQDFDTSTHYGVAMVGMLAVWAQVESDNTAERVKSSMAHIAAGGRRNWGAIPLGYAVDDGKFVTVEGDAEIVREVFRSFLQDRTLRGTADRLNALGYRSKTGSLFSYTSVRGILRNPIYLGKTVWQRSKYVRTSTGSRRKKWQDPSTWIVCENTHMPIVSQDDWDRAQGLLDENAASSPRAIFGKKYAWSGLIYCECGSVLRRHSQYDYRCSSMSDKGKSSCELRPSIGRLFLELRVVPSIGLEIREAIKHAASTPRKAKPKDDKARERRIKDLQSRREREKDLFRSGVTDIKEMSANIKRIDGELSGMKVVEPFAPKHLQISEDLMGMWVDLDEQKRGDLLRLLVERCIVTVGEFKIYPRFPLSDEREFISVPRENMRRYNGIRSGAFVDPQ

SEQ ID NO: 6525 - protein, 532 aa, unidentified
  source 1..532: note = uncultivated organism
MDEQKKTSGSLALNRAPQVIIIPPSDPVRDRKLRVAAYARVSSSSEDQLNSFAAQNAHYTELITDNPEWEFVDVYADKGITGTSAEKRDDFQRLLADCRRGRVDKILVKSSSRFARNAKECLETVRELKALGVGVYFEEQGIDTSELAGEFLTAIFAMMDQKESQSISDNMRWSYQMRMKCGRFSTNKAPFGYQLVNGNLEINPNEAPIVRLIFNRYLQGHSMEDIAEEISRCGVPTRDKKPYWQTSSIHYILRNEKYVGQTLLQKTYTTETLPYRRKRNHGEYNQYLMQKVHTPIISQDIFDRVQNLLRLKKNCLTPTSGTTYPFAQMLFCSTCGSIFKRKPRGLTIHWMCSRHEKSRDKCPVRQILESEIVQAFFRLYHKLRHQGLPILNQLLADLQSARKGKLLWSLDIVALNQKIADIIRQDRLLAQLKQQGLVDPDIFISRRNELAEQLRAAKLEKERFLEAEEDQTIQQTQELVEALEAGPDFLDAFDGELFRELVDKIIVESNDHLRFRLINGLELTEPIERTVR

SEQ ID NO: 6526 - protein, 510 aa, unidentified
  source 1..510: note = uncultivated organism
MSTVTVIQPTITEEKSRIIRCAAYCRVSSDSEDQLNSLMAQTRYYGKLFENSETEILVDIYADEGVTGTREDKREEFQRMMQDCRKGKIDRIYTKSISRFARNTKDCLKNIRELKSLGITIFFEKENIDTANVKDELMITVMGGLAQEESTSISQNMRWSVQKRMQNGTYRLARPPFGFDIVNERLEVNEEQAQIVRRIFEWYVSGLGTKMIADTLNEKNIPSSQKQKLWTADVVKYILKNERYTGNAVFQKNYVTETLPHVKKRNYGEKQKYYVANTNPPIIEKSVFETVQKILKERYRPYLNDGHLLSGRIFCAECGTAYRFKKCREKSYWTCRRHDIKSELCKNGRIPENDIYAAFVRLHNKLMHNYRQILVPLHTELQNLKLRKFSGNINVIDIHKEIAKLKEQTHVLARLKTKGFLDNAKYLEQTSEISAKINKLQSELKKIICSDDEDETLDQLEMLIDYFEKQTAITEFDKVSFEFLIERIVVMNKNELEFQLYSGLKFREMI

SEQ ID NO: 6527 - protein, 500 aa, unidentified
  source 1..500: note = uncultivated organism
MYDALYARQSVEKVDSISIESQLEYCRHEARGNPCREYIDRGYSGKNTNRPAFEQLLADVRQGKVARVIVYKLDRISRSILDFANMMQLFQQHRVEFVSSTERFDTSTPIGRAMLHICIVFAQLERETIQKRVTDAYYSRCKKGLYMGGRVPYGFARQQTMLDGVRTSMFVPVPQEAQQVQLIYSLYADPANSLGDLVRYLNAHGHKQLRGGMWSTARLSEMLRNPVYVRADAAVYAFFKEQGAQLLNPAADFTGYNGCYLYKGAGGEGRSPSDLSGREVVLAPHEGLVSSRDWLRCRLRCQQNRRSTTTCKAKSSWLLGKVKCGRCGYGLSVVKSDTRWQRYFVCSAALASKKQRCPGTGGTVYAQLLEAYVSQEIQRRLGLFDKLCQREEPQLDRKCNEHRIRLAEIEREIEQLLCKVSGANDILLAYINSRVAQLDEERRQLQTEAERLAHQEGRAAICNPAQLWTKASFAQKQAVADALIEIIKVADGEIEIIWKI

SEQ ID NO: 6528 - protein, 513 aa, unidentified
  source 1..513: note = uncultivated organism
MSRAALYCRLSKEDETAGPGGESESIQNQKALLAAYAQDKGWEIAGVYSDEDYSGADRDRPGFRRLLADAEARRFDILLVKTQSRFTRDMELVERYLHRDFLLWGIRFIALVDRVDTGVQGGKKARQINGLINEWYLEDLSDNIRAVLDFKRREGRFIGSFAPYGYRKDEADHNRLVPDPQAAQVVREIFRRYLAGEGTARIAAGLNAAGVPSPTAYKQEEGQRYRNAGQAAATPLWSRTTVSRILRNPLYTGVVVQGKRRKPSYKSKVLLSMPREDWVAVPGACAPLVDAADFGEAGRLLEAHTRSSGQGERHRLAGLVFCQDCGAAMIKVSSRYKGETHSYLRCGRYAADRGQCASHAVRLDYLEDLVTGRLWELLVRWFSPEEVPPYRPDEELEEAVSREAALLKGEIGRRERALKELYLDKASGLLTAEQFREMSGDYAREKAAMSERLARLEETMARQAQPEPAGRALEDFVDREAMPAQLLAAFVERIEVGTRDGGGRQAVRIAWKI

SEQ ID NO: 6529 - protein, 507 aa, unidentified
  source 1..507: note = uncultivated organism
MAEITIIPAKNRSDEIVRTAAYARVSSDSEDQLNSFAAQIRYYTEMLQNSTDAVFVDMYADEGISGTGTEKRAEFQRLMSDCRKGKIDRVLAKSISRFARNTRDSLDAVRELKTLGISVYFEKENIDTGEISSEMLLAIYSQFAQEESMSISRNCRLGIKKRMMDGTYKNPSAPFGYDYVNGKLQIDPEKAKIVRQIFEWYLSGIGMSEIAARLNTLGVRKEVWRHGTIRHILTNERYIGDSLLQKRFTTDTLPFKTVRNHGEKNQYYISATHEPIIEKSVFDNAQKILARRDWSSGLAKENYPFSKKIFCGNCGSTFRRKIRKNFVGWVCRKHDKLAESCDSRFIRETELQRAFVRLWNKLQAYSKAILTPTLRQLERLSEKEKSGNTQLAELRREIAEIKQQAYLLTTLNSQGTLDTAYFKERTQELDRKLIIAQKQLHVSLDDKYSEKIDEIQKLIGIFERVEPITDFDEIKFGQIVEKITVLSEKEIRFDLIGGIGFTEQIER

SEQ ID NO: 6530 - protein, 538 aa, unidentified
  source 1..538: note = uncultivated organism
MSVPPRRRCAIYTRKSTEEGLDQTFNTLDAQRESCEAYILSQAGEGWECLPDRYDDGGWSGGNMDRPALKSLLADIGRGRIDIVVVYKVDRLTRSLMDFSRIVETFDANNASFVSVTQAFNTTNSMGRLTLNVLLSFAQFEREVTGERIRDKIAASRAKGMFMGGNVPLGYDLGDRRLEVNETEANTVRHIFTRYLDLQSVPALARHLASEGIRSKRWTSRAGVAHGGLTFHIGALAHILRNKVYRGYAVHKGKAHVGEHDAIVPADLFNAVQDQLDDNRVKRSARKTRAASSPLAGKIHDADGQPMSVSFSYGRGKKMYRYYVSDCLLPRTANMPTNREGQRFSAARVERALSTGLRDLVIDRHDADLFGAITKVSALGDRLFVEVDVTQIADDNALGATRLLRKAELIDADAKIDGSTLLISVALPPDRRGRTKQSPDKGMVSTDIKADLAALVRTAHLRLDEISASPLGPTDHSRMKGPATDWIRQRTVIGLLAPEIQRALLTGGAAAHVTPAWMLSQDWPIDWEAQRAIFGGSA

SEQ ID NO: 6531 - protein, 503 aa, unidentified
  source 1..503: note = uncultivated organism
MFDALYSRQSVERADSISIESQLEYCRYETRGNQYKEYVDRGYSGKNTNRPAFEEMLDDIKNGKVSRVIVYKLDRISRSILDFANMMDVFQKHHVEFVSSTERFDTSTPIGRAMLNICIVFAQLERETIQKRVTDAYYARCKKGFYMGGRIPYGFTKKETVIDGIKTSMYVPLSEEAEQVKLLYSLYADPKNSLGDVIRYLYEHNIQHLRGAMWSTSRLSDMLRNPIYVKADADVYEFFKEQGANIANPVTDFTGFNACYLYKGTESSTRKQCDLKCKEIVLAPHEGIVSSQDWLKCRRRCLNNRQSAMTGKAKNSWLSGKVKCGKCGYGLMLARANTKWGRYFVCSTAVTTKKKKCTGTGCTVYADVLESYMKDEIRKRLAEFEVLEKKENYLDDPKINQIKIQVANIDREIEDLLQKVSSANEVLMDYINKRTEALDSEKRSLERELSALEQKSKNGISTEIKDHVRKWDETSLEDKKLVVDAFVKVIHIADGNIEITWNY

SEQ ID NO: 6532 - protein, 527 aa, unidentified
  source 1..527: note = uncultivated organism
MKSTSPKQQRCAIYTRKSTEHNLDLAFNSLDAQREACEAYIKSQAHEGWRLIPDRFDDGGLSGASLDRPALQKLLEEVRARKIDVIVVYKVDRLTRSLADFAKLVELFDRNEVSFVSVTQSFNTTSSMGRLTLNVLLSFAQFEREVIGERVRDKIAASKRKGIWVGGPVPLGYRSVNKKIQIDPEEAELVRKIFADYLRLDSIGELAASLEQEGIKPKSRQVSSSGAPTEKRFVLGPLAYILKNRIYVGEVAYRGEIHKGEHEAILDRDLFEAVQRKLAEGAVQRREGRSKSKSILSGLLFDDRGNPMSPSHTNKKGIRYRYYVSQAVLQNRKAAAGSVTRVSAPDIEAIVSDALRGPAANTETHTAIQIAEGFDRDSIPKYVARVIVRRDEIEIEWRASGSEVSTSHSQRIPFDARLPLRKGLVHSPTEARMDPRAQKSLLETIVKARRWMDEITSGKVHSFEEIAAREHLVERYVRRLSSLGFLSPKIVQAIIDGTAPADLTATSLTRALPHSWSAQEMLSALQG

SEQ ID NO: 6533 - protein, 529 aa, unidentified
  source 1..529: note = uncultivated organism
MPVPKEYIKSERRVYMAKIAVIPKMARTQDKKVRVAAYCRVSTDHKDQVNSYEAQVRYFSGLYRNSDTETLIDVYADEGISGTSVEKRVEFGRLMEDCRAGKIDRVITKSISRFARNTKDCLQYIRELKSLGITIYFEKENIDTARLSDEMMITVMGGLAQEESQSISNNVRWSIQKKMASGTYRHARVPYGYVADKKTGNLVIDPGKAEIVRRIFDMYLKGMGIKKIAEQLNEDNIPSPTGIKWNNVTINKMLRQEKYIGDTLWQKTYSEFMGKQYQINNGQQTKYYLRDTHPAIISREDFAKVAEIKKKQAAPKGESIESPFKKRLICGKCGHSYSSSNYPNNLSWYCGFKNNVPTPCDNITVRDRILRFAFRAMCDKLHAHGAEIFGTCISNLKRLHKAQDNSTAEETQLRKEIAELKEKKHRLSKLLTKHFIEPEQYSAQVYEIDVQIRMLNRKLEKSPKKKDPITLRLEELAEIFESYDGSAKAQAEVLETAVQKIMICEDGTIHFQLLDGLEFVERISDYEGY

SEQ ID NO: 6534 - protein, 556 aa, unidentified
  source 1..556: note = uncultivated organism
MEKFACMYLRLSREDGDSTESNSISNQRQIIKSYARDNDFKVVAEYVDDGFSGSNFDRPKFKKMIQDLEEKKFKTIIVKDLSRFGRDYIESGKYLQKIFPEKGIRFISVNDNYDSENADVSDTHLILPIRNFINDSYCRDISMKVKSSKEIKRKNGEFIGAFAPFGYKKDSKNKHKLVVDTEVSHIIERIFNMKIDGYSSKAIADFLNSIGCVTPSKHKENSGDNHTTGFIVKDSKWDAKMVNRIITNKVYIGVLEQGKTRKLNYKSKREVEVNEEDWIVINDSHKPIISKSIYALANKMMLRDVKQSADIPHILSGMLYCKDCGSSMVRRKVKSKNGYNIFYICSHYNNKGDCTRHSIKEDYLLDMTLFALKDYLRKYNELLSQVNKLDVSKVTFNIDFEGLNSEKRKYERLRQSLYMDLEDELITSEEFERFRKNYLIKIREIEKQIATKKNILANLQEKMKNKDSLVSEIVPTDLSSLNRLTIVSFIDKIEIGENNEINFVFNNLETVNLLKTLIKEESESKSEVKKNLISINKVFGNALENKTPMQLAGGVL

SEQ ID NO: 6535 - protein, 505 aa, unidentified
  source 1..505: note = uncultivated organism
MERYLMYLRKSRMDTDFDDVSVEETLNRHRRILEAFCKERRLNVVETLEEVVSGESLSARPKMLRLLDLVNTGMYAGVVCIDIERLSRGSSLESGYIMQVLQTNSCKIITPSKTYDLQNESDEQFTDMKFMFSRYELKTITKRLVRGRNQSASEGKFLGSMAPYGYRPYKLPGTKGSSLQIEPGEAEIVRMIFDMYGKQGIGYNTIAYQLNQMHIPSRTGAWGQTSITNILNNEVYLGMIRWRHEPTKRIVKDGMLVKKRVQSRDYELYEGLHEPIITQEQWDSVKAVQNSRNHASVHKDKRLMNPFASILFCEKCGAILKRNVPGKSQHTSPWYRCPTRGCNCRTMKCDFVEGAVVSAMREWLSEYTIKVETEQLPQTDPMETALNLIRQQLLDLQSQQDKICEYLEKGVYTVEMFTKRNDTLTREMHRLQESKADLEKSQAAKGSEKKAAEELIPTTQRILDSYPHLSVTEKNSLWKIVLEKITVFRTPEGEFSLHIYPKLPR

SEQ ID NO: 6536 - protein, 615 aa, unidentified
  source 1..615: note = uncultivated organism
MARKSERYPALYERLSHDDELQGESNSISNQKRILEDYAEQHGFTNCIHFTDDGISGTQFDRPGFQKMIAEVKADRISVVIIKDMSRFGRDYLQVGTYMEVLRKHDTRLIALNDSVDTLKGDDEFTPFRNIMNEWYARDTSKKIRSAFQAKNLAGKHTSSSVPYGYLKSEQDKNQWVIDPVAAPIVQRIYRMTMEGKGPYQIAAILSAEHIEIPAYYHQKLGIGLWQTREIRDPYKWGSSTIVHILTNPCYLGHTCNFKTRKHFKDKKSHYVDQDQWTIIENTQEPIIDQETYDNVQRIRAGVRRYPDGWGEAHPLGGLLYCADCGSPMYVNRTGNGKRVANFSCSGYGKIPVGSKCSSGHRVNADSVMALIQETLREIVRFSKEDEEEFVRVVKAEAENQQSSEIKGQKTRLAACKKRLDELETLICKIYEDNALGKLPDKRYQILDAQYAKEQESLEAEAASLQKAVDEYESGQKSADKFIALVKKYQNFEKLDTVMLNEFIYKIFVHERDYKGVANSPQTIEIYFNFIGKFGTQEVNQPTEEERTEIAEKERLRKKRHEAYLRRKANGWQNAYYQKHKAAKKAAIDAKKEAIRAEDQANGVYYLPNQKGESA

SEQ ID NO: 6537 - protein, 526 aa, unidentified
  source 1..526: note = uncultivated organism
METTKNKKAIIYYRVSTEDQAQFGVSLEQQKNNCLSFAEREGWEVVKSFHDDGVSAKTVERPSLQAMLQYCSKNYKQIDYVVIYKVDRLSRNVNDYSNILFLLNKLNIKLVSTTEAIDDTPIGKFVGNIMAANAQMDNEIKGQRVSACMLEKVKQGVWCWKAPFGYKNSRDELNRKVITIDEKRAELIKFIFEKFSNGLYTLEDLKGITNDEGLKSWKGKPISSQLINKIIRNKFYIGIMSVGGTEYEGTHDKLIDEDLFYKCRAVLNKRNRADNISTSRKSEDFPLRHFVVCAFCGRPMTAYYAAGRWGGKYPYYRCYNSECQSKKSIAKKQMEENFVKYLESIIPKDKFLKTFKAVILDVWENKYKEINRNGKNIQEQVNVLKEEKIKLIDMKKKDLLPDEDFKEAFNKLNAEIGAKQLKLSEAKLEEFDIDEAIDYVFSFIKTIPEYWEKATYDQQIKIQGLIFEENPSYNYKIFQTPKLCPILQTKEALAHTNTSLVVLRSEISQNFNEIIGEIGKWAEVFN

SEQ ID NO: 6538 - protein, 611 aa, unidentified
  source 1..611: note = uncultivated organism
MEKDRKIAGIYIRVSTDDQVREGFSLQEQEEKLEALCNYKGYEIYKVYKDAGISAKDMDSRPEFQEMIKDMKEGKINYIVAYKLDRVTRSVRDLEELIRTLEKYNCYLICDRDDVNTSTANGRFFIRMLTVLSQLEIEIVSERTKFGLNGAIKAGHLPGQPPYGFTRDGKKIVVDESKRHIIERIFDLYVKGYSFKRIAEIFNKENVDNFKWYETKLRTIIDNRLYMGDYEQYKRIKHKINKEPVIHMNVVEPIIPRYIWEEAQARKPLNQRTYKRTRTYLYLQKLLCPKCNEMMICKGSGGKKAKYIYYSCTKCKYYIREAYVNKYMEKIMFEILEFDNAYKKHYLPLLADKEHSSVSNNLDKQINELNSRKDRIKEAYLKGIVQLGDFDEDLKTINKDLEVLTSKKEELIKSGELKIYTPEKVMAERDYERAMTQTIDHNFIKHEWKIKSKEEKQEFIAKYIKSITLENDPFSKYHLKLKDLKVGANYLEFIDKFYEFGFVETTQVVDINNNPVIIKINQPVSREFANKYIAEITNKTGMSYYEIKLDDNVEETIENNLIKEAEKEIKLRCKTSEQLIKILPIESDNPFMKKEFKDMTLGLIMTDSKTI

SEQ ID NO: 6539 - protein, 559 aa, unidentified
  source 1..559: note = uncultivated organism
MANAARRCAIYTRKSSEEGLEQDYNSLHAQREACEAYISSQAGEGWRLVKTAYDDGGFSGAGMERPGLQQLLANIRDGLVDTVVVYKVDRLTRSLTDFAKMVELFDAKGVSFVAVTQQFNTTTSMGRLTLNVLLSFAQFEREVIGERIRDKVAASKRKGIWMGGVLPLGYDVRERKLVVNHDEAETVRGIFERYLELGSVRLLGNDLRERGIVSSARVSRKGNARGGKQYSRGALYHLLSNPIYLGEIRHKHERHPGQHEAIVSRELWERVQQRLRDQGVRGGEGRKTEAPGSPLAGKLFDESGEPLYVQGAAKGQRRYRYYVSRALVRGNSEDQEQGWRISAPEIEQRVAAAAQGVLGDRTAIALALEASGVDSNRLPSVLMSVQTWSERLRSDSAAALGELIERVQLSRESLHLSLKLPLAPAEPSDVTGPASLVLTRLVPMQMKRRGVEMRIVLEGESHPVPVDLPLLKAVARAKRWVDELVSGKVRSVSALARREGMDGRSVRRLIPLGFLSPRIVEAIAEGRQPVDLTLEALTRRIDLPLLWSAQHQALGVNIK

SEQ ID NO: 6540 - protein, 557 aa, unidentified
  source 1..557: note = uncultivated organism
MTKKPTKKVYHASIYLRLSKEDGDVTTGSKNESNSISNQKSLIMDFLKDKHDIQVVSIREDDGYSGVDFNRPSFQLMLEDVKKGIIDCIIVKDLSRFGRNYIEVGRYLEKLFPMLGVRFIAVNDNYDSLNVDTAHDIVMPFKNLINDSYCRDLSVKIRSHLAVKRKNGEFIGAFACYGYLKDPENKNQLIIDTYAGPVVQDIFRMKINGFSQYKIAEVLNEQGILSPMEYKRSIGVRFETSFKVNTKAVWSAKAVSRILTNEVYTGVLVQGKQTTPNHKVKVRQAVEEKDWVRIENAHIPLIDPCLFEIVQTLLERDTRTSPKADSVFPLSGLLYCGDCGQPMVRKTTTYSLKGAGDFPTQKYAYFVCQGQSTEKSCSWHRMREKELLDAVLQAVNHHVKNVLDTEKALRDIDTAPSVQFLIQKYEGHIEKKEAELKKAEKLKVGIYEDLKDGLLDKPEYLKLKQEFDSRIQDATDAIRSLHQEILALQENHSQYYAWMDYFKEFGELQELTRWAAAITINRILVFEDNRIKIVFNFEDAFMQAQELLRGLEMKEGV

SEQ ID NO: 6541 - protein, 552 aa, unidentified
  source 1..552: note = uncultivated organism
MEKKKKVAIYARVSTVEQAEEGYSIDEQERLLREYCDKHDLEVYKTYSDRGISGKDIKHRPELKEMLKDSEENKFNMVLVWKINRLSRKLADVLKMVELFEKNNVTFKSYSEPFETNTPAGKMQFQMMALIGEFERGTIAQNVKMGMLARAREGKWCGNRVLGYDIVPVEGSLNKKRKETKLVINEKEAETVKLIFNEYSNGNGYKAITNKLNKLGYKTKKGNNFSVGSIKDILTNPVYIGKIRYNVRQDWSEKRRKNINPNPIIVDGLHDAIISEELWDKVQKILESKKGKPARIYDGEYPLTGILKCPVCGAGMVIMRTTNKLKDGTKKRITYYACGNWKNKGTAVCNSNAIRVDKANEYVFGKIEELLSNEKMIKSIIENINNTRRSNVEPNKKKLEKIDKELSKLKSRKTKILEAYEDDLITKEELVERKSELDKNISALEEERQKLLITVTDENQIEISYDVIKEILQSFGRIMSNCTSREKQKMLLHMLVSEITIGKDREIDSIKLKINDGLIDYLSNEEEVPMKGASSFLIQNFRFGRMKLNLVI

SEQ ID NO: 6542 - protein, 513 aa, unidentified
  source 1..513: note = uncultivated organism
MQLTAKPREVQIKKPAEAGRWNLLVGIYARQSVDKKDSISIETQINLCKKELAENEDFTVFQDKGFSGKNIDRPAFTRLLQAVESGEIKKIIVYRLDRISRSITDFANIIDMLEERKVGFASTSEKFDTSTPVGRAMLYIIMVFAQLERETIAERIRDNYYSRGKTGVWLGGPAPFGFTNARVLSGNKKVPTIQPNEDLEIVREIYALYLSPGASLGSVAKLLQGKYGSMWSNVRLARILHNPAYVKADADIYNFYAMKRCIIVNDVDEFTEQKGCSLYGKRDRSANKYRLTSDHVLSLALHDGVIDSGAWLKCQHKLSENKQIKNLGKGKHSWLTGLVKCGYCGYSMNVKVTESSKYFNCTGRYVSDSCLPDRLSTHRVTDIEQGVLTELRAYIKQLEGKQVHGEASEGGALNLLKQQLYKIDAQIERLMDSLADANDVAMKYINPRIVALDEQRQTLLQEINKKATKIGGLELPDMEGWEGLDLRVKREIVGSFVEKVNVFNDKIEVARRF

SEQ ID NO: 6543 - protein, 521 aa, unidentified
  source 1..521: note = uncultivated organism
MAKVTKLEGNNTHKTTKKLRVAAYCRVSSNSEAQEESLKAQKEHYEAYIFSRKDWEFAGLYYDKGITGTKKEGRVQLLQLLEDCEAGKIDFIITKSISRFSRNTTDCLELVRRLLELSIPVYFEKENINTGTMESELFLAILSSLAQDESTSISENNLWAVKNRFKNGTYKIGYPPYGYDWTGEAIVINPAQAPVVRRIFAEALSGKGTHSIAKVLNAEQIPNKKNGLWRATSILAMLKNNFYTGTVTFQKTYKNALGKRQLNYGQKDKYVAEEHHEAIISKEAFTAVAKVLENNLKLKNVNKNPELHTRRYAFSGKLYCASCGKKLKRVIHASTTHPYIAWSCPTHIEDTKACSLLYLRDDVLKQAFVTLINKLIYGREVLLKPLLEELKTDPTLKVQKAIAAYQVKLLQNTEQRDTLTKLMTDGFIGQQLFIKEQNELLLKANTYRKEIELLSNSKTTENTRLQGVKALLSFTETNSMQESFSDETFTTFVEKVTILSRTEAIFHLKCGLNLKERLKTV

SEQ ID NO: 6544 - protein, 538 aa, unidentified
  source 1..538: note = uncultivated organism
MSRTSASTMQSVEDLRATVRCAIYTRKSTDEGLDQAFNSLDAQRESAEAYIASQRHEKWLCISERYDDGGFTGGNMERPALKRLIADIEAGGIDCVVVYKVDRLSRSLLDFSRLMELFDKHAVSFVSVTQQFNTTSSMGRLTLNILFSFAQFEREIISERTRDKMSAARKKGKWVGGTPVLGYDVDPKGGRLIINEDEAARVRAIYDLYMDRKALMPVVSELERRKWGKKQWTTKRGDIRGGNPFTKNSLYRLLTSVVYTGNVDYKGTIYKGEHEGIVDPDLWQRVQDTLRHNGRSGAKDVRNKYGALLRGLLYCAPCRAAMVHSYTVRNGKCYRYYVCLTAQQRGWTACPTKSVNAHEMEVAVIDYIRGLGSNIDIFSETVSAVRDQNENRLHDLETERRANERELKRLDDRLHALVSDNSALRTDSRLVTDQMADLQDRISFLEQRMTVIREEIILIQRKTLDEEDLKKALNAFDPVWESLAPREQARILKTLIERVAYDGRDGKVTVTFRSPGIKALCMGDEVRMLEEHELKEKL

SEQ ID NO: 6545 - protein, 543 aa, unidentified
  source 1..543: note = uncultivated organism
MKTEQNTAAIYIRRSAPDERDTDDSDNRSLISQERDCRQWAEREGLTVTHVYREAVGTSASHLTNHRRPQMERALSDMGSSYSTLIVWAFDRATRKGIAEAGMILDRVDTVGGRLVSVTDGIDTDDPTARLIIAIRSEMARDEMTKMSARITRGKEEQRRRGEHQGGRLPFGLMRDPSAPYGVCVNEEAADTIRRAATLIVEGAGLRFTCRVLNEKGRRTGNGRLWTPSALCRVLRRPHLRGRRAYGDDVFRGEDGTPVQVSEPILTEAEFRRVDKTLLGRRRFTNRMKPGQTTVGAPTSLLGGLMRCSKCDTGMGHVRNTCTPREKSYHYRYYSCRVCTAPLHRVTAPASEDYVTRCALNFLASLDPDSAIIEEIGLRWLARLSPEQVGRHEEIVDEIEVVEGRLRDLQTEFYEGRSMEVSVYERLNRNLSDEVDVLRNELTSTPPPQANLGPLFDLVACADDPDSDIIGPGSPWANLEEHVRKVIIRVLVDEVAVEKRDQSCDDIEGRISIRFATESNVTRLADRSEPLRGKHITLAVNTA

SEQ ID NO: 6546 - protein, 582 aa, unidentified
  source 1..582: note = uncultivated organism
MSKRDPDNGRGGTKGIRCAIYTRKSSEEGLEQDFNSLDAQRESCEAYIKSQKHEGWAAIAAPYDDGGLSGATMERPALRRLLDDIRTGKVDVVVVYKVDRLTRALTDFSKIVETFDSHDVSFVSITQQFNTTTSMGRLTLNVLLSFAQFEREVTGERIRDKIAASKKKGMWMGGMVPLGYDAIERKLVVNAGEAETVSYIFERYIALGSVRELKQELDADGVVSKVRLSRNGRRTGGVPLARGALYLMLQNRIYLGEIVHKNNIYPGEHTAIIDRDLWDAAQTNLAANRNDGRTGAGAKEASLLAGLLFDDLGHRLTPSHATKDGRRYRYYVSRPLTANIRAETPAGRRIPAGDIEGLVTRRIRGFFADRAEVFGVISWRVQNVAEQEQLLGQATDLVKRWGHLAPVEVRSILLALVSRVDVHSNKVDITINTGRVTDVLQSDPMSLTDISGKGRKTEHLKLSVPARLKRAGLGIKMIIDGSVGAGGEGKADPSLVKLIVKSHVFWEELIKGGGGSLGKIAVGQDVTPSYFTRLLRLTFLAPDITKAILEGRHPPTLTAAKLAKASRLPLTWPEQREILGFS

SEQ ID NO: 6547 - protein, 511 aa, unidentified
  source 1..511: note = uncultivated organism
MSEELRCAIYTRLSKEDEDRQGDSSESIRNQKALLTAYAADRGWTVFQVYCDEDYSGADRLRPAFNQMLRDAEEGRFQVLLCKSQSRFTRDMELVEKYIHGLFPLWGIRFVAVADNADTQVRGNKKARQINGLVNEWYLEDLSENIRTVLDMKRRQGQYIGGAPIYGYRKDPADRHHLIVDPEAAGVVKQIFRWSLEGRGKQEIARLLNARGIPNPTRYKLERGWPGVSPGSDGQGLWNKTTVWRILRNEMYTGVMVQGRRKKVSYKSKALIDLPREQWFRVEGTHEPIVDRALFQAVQQGLALRARGGGTGVPHPLAGLVKCMDCGSAMSRTANAGQGPSYLRCGRYAGGGGCTRHSIRLDALTALVTEQVRHYVGLCCPPGTLPLPAAANPEGEAMERERKTLSARLAKNRQAVRALYLDKVEGLLSREQFLELNQSFLAEQAKLEERLARLDAPPCPEKSADIAGRMEALLKLEQLPRPLAALLIERVEIGERNPETGEQAVQITWKF

SEQ ID NO: 6548 - protein, 554 aa, unidentified
  source 1..554: note = uncultivated organism
MTKHDRPSSRNAADPLSTARAALYMRVSTGRQAESDLSIPDQRSQLTSWCRAKPCQVVAEFVEPGATATDDKRPAFQQMIERACDGEHAFDLIVVHSYSRFFRDSFEQEFYLRKLAKHGVKLVSITQPVGDEDDPVQAMMRKVIALFDEYQSKENAKHVLRSMKENARQGFWNGAICPLGYRLVEVEKRGTKIKRKLEIDPVEVETIRLMYQLYLQGNGTSGAMGVKEIVKFLNAQGYRTRKGMTFGVGHVHKILTNTVYIGRWKFNQKIAKTGKKKPPEEIVEISVPPIIEANVFEQVQRQLHARSPKVVAPRVTTGPILLTGLAVCATCGGGMMLRTGTSKNRRVYRYYTCSMCTTKGKTVCKGQSIPMDKLDGLVTDHLMDRLFQPDRLAAILSSLSSRRAEKAQALNARIMTLQAEVTDADDKLKRLYALVELGVTDLDEVLRDRLNVLKAERERATAALEQAKAHAAPAIRLDPALIERFGRSVRERFGTGSVPFRKAYLQSLIDVIAVDDRQIRIKGRKELLEQAVLASQSGRDWCSQMSTSTSSQRF

SEQ ID NO: 6549 - protein, 552 aa, unidentified
  source 1..552: note = uncultivated organism
MQKNVCYHTAIYLRLSRDDEDIDGSAKRESDSISSQRELARSFVREQPDMELFDIYIDDGYSGANFDRPDFKRMMADIENGNVNCVVVKDLSRFGRDYIEAGRFIQKTFPAFSVRFIAITDHYDSLTADQSTTSLVIPVKNFVNDSYCQDISEKVKSHQKIKREKGKFIGAFAVYGYQKDHEDKNKLVIDEYAAKIVKNIFTWKLDGMSNLAIAKRLNENGIFSPLEYKKSHGEHYATGFHAGIVSKWSAVAVKRILTNEIYTGTMVQGKREKVNYKVDKILEKPESEWFKVEGTHEAIVSKEDYQNVQRLLKVDTRAGKGKEKAHMFSGLLFCGDCKEPMVRRMNRYKGTEKIYYICSTRNRSEGCSRHSISEADLKKVVFRIIQLQVELLIDVNRQMQYLQTKEMNFEDVVGFDKEITRLRNEQEKYLELRAGLYEDLKMGVITQADFKNFSAIYEKQYVETEKALTRQEDMLKKLFYNGVQSGVKLERLKETMQITTLDRDTLLAFVDRIEVYEEKKVSVQFCCQEEMEKMLVLSEFLSSQSEVVREVI

SEQ ID NO: 6550 - protein, 539 aa, unidentified
  source 1..539: note = uncultivated organism
MRVALYARVSSEGQEDRGTIEAQVDYLRRYAELNGMDVAAEYFDEAVHGPVPLVNRPKGKLLIAGARAKKFHKVLFYRVDRFARSLRELLEAHALLADLGVDLQSATEPFDTATPMGRFMFQLLGGIAELERSVILERTTNGKARVAKDGRWPGSPAPFGYAIVDGKLAPNESEALLVREAYQRLAEGSTLVQEAKRWSDAGIHGRNGGYWNAQNLGKLIHSPVNKGQATFKGKHGVLYLEVPPLVPEELWSTALAQLRKNSTRREEKRFMLLRRKIHCSHCGGTFVGAAMVKRNQVYYRCIRSIKGQAVRCKTVNLNARAIEDYVWRQCVGLMELPEQIIHWAEDEIDRLAAIDRNRTKTLQRLHTDLAKQEAARQRVISHVVKGDIAEQDAGQAFAGINVEVGRLNAQLLELESSQELAKAYRDRLIRIVVGIKRLARSIDPHKPEDRRRAVEILLQGIDVRTTGEGRERRAELTFRWIGQAPSGLIDPEDWNVPLDTPIPDVSGVKVSRLAAVLGDVHSDMVVRTLTTLASYTSSW

SEQ ID NO: 6551 - protein, 510 aa, unidentified
  source 1..510: note = uncultivated organism
MSTIAIYARKSVFREDSISIESQIEMCKFEARGESFVVYSDNGYSGKNTSRPEYQKMIQDIINRKIHKVIVYKLDRISRSILDFSKMMDLFQIYNVDFISATEHFDTSSPMGRAMLNICIVFAQLERETIQQRVIDAYASRSKKGFYMGGKIPYGYKKVPIVMGGVKTSMYEIVPEEAEDIRLIYQMYSSPSATLGDVRRELEKRGINVNRRGHAWSTARLSEIMRNPVYTFADLNIYHFFKEQNSCIINPLEDFNGEVSLYLFSGKNKNRKTWDLTDQNIVIAPHQGIIDSETWLVCRKKLLANHQVKTCKPKNSFLSGKVKCGNCGYGLVIRFSKRKNGAVRYFIDTGRTNAHCCTHKIPAIRADEFEKIIVEHIKDKIETLSIKAKTDSISDEIQKNIYKLQSEIDKINSTINSLVDTIATKSTDNTTIIYINKRIAELDMQKNKLINQIDEMNSKKDEDKSNNYDELKDTMSKWNAMEFDDKRAVINLLIEKILVYPDKIEIIWNV

SEQ ID NO: 6552 - protein, 532 aa, unidentified
  source 1..532: note = uncultivated organism
MTKRGRTPGVPPSRDRGAGAPGPIRCAIYTRKSSEEGLELEFNSLDAQREAAEAYIASQRNEGWICLPDRYDDGGFSGGSMERPALEKLLKDIEAGKVDCVVVYKVDRLSRSLMDFARIMETFDRKGVSFVSVTQQFNTTSSMGRLTLNILLSFAQFEREIIGERIRDKIAAQKRRGKWAGGVPILGYDVDRSGSSPRLVVNPREAAKVRAIFQMYLDKGSLQRTVTELRHREWKNKRRVTKKGVSVGGQPFNTGTLHVLLTNPLLTGKIVHRGNTYDGEHEAIVDPALFERVRQQLVENGRTGGIEMRNKYGALLRGLLRCKKCDCAMIHTFYGKRDKQYRYYRCLEAIKNGAHTCEASSLPGLEIEKLVVDEIRTLGGDRELLDRILAEAQVNVDQELTALKTERASIHAALGRLEQELRELVADRSGTAAATARLAAAHERVSGARTRLAEVETRLGLIGAKAITRDEARKALKEFDGVWAQLSPREQGRVLKLLFSKIEYDAENATVAVTFRATGIAALCARQLEEAA

SEQ ID NO: 6553 - protein, 544 aa, unidentified
  source 1..544: note = uncultivated organism
MQDTKVMKIWDTTLYLRLSRDDGDKEESNSITGQREFLRDFLSKHPELRECAVRVDDGWSGSTFERPDFKKMIEDVKAGRTNCIVVKDLSRFGRNYLDAGEYIEKIFPFLGVRFIAVNDNYDSLGDKKASDDLIIPFKNLINEAYCRDISVKIRSQLEIKRKSGQYLGSFAVFGYMKDTQDKNKLVVDQYAADIVRDIFKWKFDGVSPQDIANALNKLGVLSPMEYKRSLGMKYTTTFKTNSQALWSAGTVLRVLKNPVYTGVLVQGKETTPSYKVHKRVTKAESEWTVIEDSHEAIITKIDFDSVQKVLKLDTRRGPENEAVNLFSGMIFCGDCGASMVRKTVPAGGHKYVYYVCSAHKQNKTCKTHAIRDKALENIVFDSLTQHIREVVDMDELLSMIDTAPLRTAEAQKVQRQLDRKRGEYEKLQKLLMSLYENLADGIIDRDEYTNLKQSFASRAEESEKQMDALQNTLDNIRENGTENSWMEEFKKRQELPSLSRAVTVALIDKILIHDGDCVEIIYRWQDEFAWQLDVLRLAQIQEAV

SEQ ID NO: 6554 - protein, 513 aa, unidentified
  source 1..513: note = uncultivated organism
MPVAKLIAPTTKQEIPKLRVAAYCRVSSNSADQRNSFATQERVYTKYIAEKQEWELVDIFADEGLSGMKADNRPEFQRMIRMCELRQIDLILTKSVSRFARNVKEALNYTRKLKLLGIGVQFEEDGINTLAMADEMLLNTFAAIAQEESKSISQNQRLSIAKRMESGEYIASNAPYGYRLIDKKLVIYEPEAEVVRWIFAAYLNGMSTVEIAHELSAKSVLTKGKKEQWKANRIAYILSNEKYDGDTLFQKYYGEETVPFKKHRNYGEMDQFFAYNTHDAILPQGMFQAAQTLLQSRGRKFGRKMSQSEYPLTSRIRCSECGAFYHRKVRNGTVKWVCSRHAADTTACNSGYYSEERIYDGIITMINKLRFCEEDILGQTIQKLEFAAAAYKRNNRAASQLSQSIAELNAKLLALERLRTKGYLAADIYHTQAREIRQQLDKLKTERYSSFESRITTMLEDVRKLKLLIDELEQPLEVFDEKLFHEIVTDICINNRDEMTVTLLGGLKFTEQV

SEQ ID NO: 6555 - protein, 540 aa, unidentified
  source 1..540: note = uncultivated organism
MARKSRKGTAMVSEVQKPALVYYAAAYIRLSSDAKRKPGDSLETQQDIIENFIAASPDIQLTEVYIDNQATGTNFERPAFQRMLADVESGRINCIIVKDLSRFGRNAIDCGYYIEKQLPALGVRFIAVTDTFDSLEGDGGILLPLKNIISESYALDISRKCRSVQRQNIQDGRFVGRMAPYGYAKAPEDCRRLVVDGEAAAIVRRMFELAASGWSAGEITRDLNERKVLPPSHYKWEKGLFQSEKLLGKPFWQKRTVADILSDRVYVGDMVQGKTRTVNGKELSVPREEWVCVPNTHKAVVSHELFNRAQERLRCRSERDKVTRRDALAYSPHLFKGKVFCAHCGHPMHRHRQNKDGIYWYRCESQWKIRKDACYQVSVKEEELKTEIIALLRKHAEAILGGYIHREQMTPVKNAAAETELAEINRELASSGYFLKSLYENLVAGVITAEEFSALKADYEGKIEALSRRADQLRAKRRERRNEREAYQGFADAVSEMLAEHELTADTAQRLVERVLVHRDKSFEIVFRFRDEFREVRCVG

SEQ ID NO: 6556 - protein, 509 aa, unidentified
  source 1..509: note = uncultivated organism
MAIVLYARKSVERENSISCDTQLEYCKSALRPDERNDEIISIVDNGFSGGNVNRKGFQKMMKLVEQGRVSKVVVYRLDRISRSMLDFVNILQKFKDYNVKFLSSQEVFDTSTPYGEMVVKILMIFAEFERTSTITRVTQAYAHRSEMGFYMGGRQPYGFQLVPAVINNIRTKKLEAVPEEAEQIRYIFEVYAQENVSLRRLLDILVTEGRKPLNGSDLTTAKLSAILKNPIYVRADSDVYDYFEHHGVHMVTDCSEFTGEYGAQLYGKTKHKRNDPDWSDMKLVLLTHQGLVSSDIWLKCQRKLEQNKQIHKSVSNQTSWLAGKIFCEKCGDSMTTIKGKINRNGEMRRYFNCTGKSLKRKCTGPKATIYAEDLENMVYGCITEKLNALKDTWHAPAKGDSPEINDLKLRIKEIEKSEQTLVDTMLSGRLNDAMLDIMNAKAAALKKSKSELYDRIDSIRASANEAGAVIDLARSWKNADYDRKKAVASIMVQKIIIGEDGNVKIIWNI

SEQ ID NO: 6557 - protein, 508 aa, unidentified
  source 1..508: note = uncultivated organism
MSQPGRTLRCAIYTRKSTEEGLEQDYNSLHAQRDACAAYILSQTGEGWTMLPEVYDDGGYSGGNMQRPGLTRLLADVDAGLIDVVVVYKVDRLTRALTDFSRIVDVLDKAGASFVSVTQAFNTTTSMGRLTLNVLLSFAQFEREVTGERIRDKIMASKKLGMWMGGMVPLGYEAAGRTLTINEAEARTVRWIFERYLELGSVHAVMLELEAADVRSKSRTTKAGVQKGGVIMDRGAVFHILHNRIYIGEITHKGASYPGQHPAIVDRDLFDAAQAMLAENDKKTRAPGEARRPHKGAPLTGLIFDSAGNRMTPMKVAAAGKPIYRYYVSSPLQIGRREGVGSLPRISANLIEELIVQRLNELKLCAPIDAAPDWLAIRNLIDRVEVTSEAVTVQFDEAMLEQTVRDFSTQYRIAIDRFERRGTVPILTIPVRIVKRGGAKVAIGPDGQSAIRATKTDPALGAALIRAEAWKRQLLTGEAASLKEIARAENVTPAYARRVSGLRFWRPI

SEQ ID NO: 6558 - protein, 1120 aa, unidentified
  source 1..1120: note = uncultivated organism
MARKSVEVLWPSAKEEPVKQNGGKIRVAAYCRLSRQSGDKRINSLENQLKYYTHYIKDNNEYKMVGLYYDGEISGATIDERPGFKRLLRHCDEGLIDLVLTKSISRFSRNAKDLLEIVDHLSNLGIPVIFEKENINSLERKNKFFLTALAAVSQDEIVNIAHNSTWGKNKRILSGSPIYRRQFGYEIIKAGDESFPLIHQEEAEIIKEVFKLFLEGVKIKEISKLLTDRGVKTISGHTVWSHTLIRNILENRSYIGEKITNQKVSALSQKATFLQESEKHMYLIENAYPKIISNECFDKAQKKLLEESTKKAPGIKIPHSCSKRIRCGLCDVNYHKNRKKYHIEWVCSVKQKQTRLCDSPRLSDKRILALMKDAIRNRYDLKKPKVLKEMIDELEWVNKNDRFEFHRLSLLSKLQIVKEKYKQESEDKSVIILKEKAERELIEFEHLASMIEEDRRYRELAIGSLKKAKSPEDFLERATVDVLRAWVMEIKIFSLKDYQIHWYDDLYTAVGTFEKLKQEMELKREGMINEVLVLKPKKKRRDFLFAEEYEFNGAGGKDPPSPKLRGENVQAVRVEEYFSENIIDRIRREIRESKYKDRPARKKLRIAVYARVSTDDPVQLGSLEAQMAYYTYDVLKNPDYRLVQVYYDEGVSGTKAENRAGFQQLIADCKKGKIDRVITKSISRFARNTVDCLEYVRELKAMGVSIMFEKEEIDTGEKDGEILLTVYSALAQEESRSLGENITWSRRKIAERGTVRLSRLPYGFDYNKEGSWEIDRDKALVVNRIYDEYLLGKSMLRIARDLTQDKIPSPNNNSAWGQTTVRKILNNPAYIGDVLYQKNYTSDTISGKRVTNNGEFPMYYIEDNHEAIISKEKWNMVQNLIEANLITKNRNKPLSREEFYKTFQCGSCGCPVIHVQSLCGGEKKHYWRCRAATMKNHSEECFEKAIREENIEHTFMAMLQEMKNSKKLSELTNKAIEEVSLKEHEEEELERLENEIEVYYQNLYDTVEDGKKHGEDTEAIKMITNHIMGLHDRIRSFEDRKERVLDIREELKWFRKEFLTLEPFNPKKERVPFREDIFARLIKSGTFLTDGVIEYQLSIGVNWLVRENRKQYWKLPMKTE

SEQ ID NO: 6559 - protein, 502 aa, unidentified
  source 1..502: note = uncultivated organism
MKRVRCAIYTRKSSDEGLDQSFNSLDAQREACEAYIRSQKHEGWKVLPALYDDGGASGGNMDREALQRLLIEIDEGRVDMVVVYKIDRLTRSLADFAKLVDRLDAAGASFVSVTQQFNTSTSMGRLTLNVLLSFAQFEREVTAERIRDKIAASKKKGLWMGGLVPLGYDKQDDGLVINRAEAETVRSLFQAYVRLGNVRKLKKHADDLGYSTKTRTLTSGRVVEGKSFTRGRLYHLLSNPIYRGKIRHKTELYEGVHDAIIDEKLWASVEAKLSQNRVARKSRCNVGNPSPLAGLVFDGSGQPLTPSHSNKKGQRYRYYVSRDRLVRFPATELESGVASALEADRNLLLHLQQTGQAKIDRFELVQRVTVRDGALDIEVTAGGTAMTISSGFTTRKRGVENKLVLDSEMARAPDSALITRILRAMLWLDQIKLGKSISEIAEAENVTTEYIIHNLDLSYLSPRILKAVVSGKQRSDVSAYQLSKIRIPVEWNDQTELFLEPN

SEQ ID NO: 6560 - protein, 535 aa, unidentified
  source 1..535: note = uncultivated organism
MDETKVGIYVRLSRDDARYGESMSIENQRLMLTDYCDRMGWQIVDVYADDGFTGLNFERPEMQRLIADAKSGRINTILCKDLSRFGRNYVEAGQLIEDLFPTLNIRLVAPNDGVDTLQNRNTDFIPIRNVFNEYYSRDISRKVISARRASAKQGNFQGGAAPYGYKLDPNDKHHLLIDDKSAEVVRRIFTMRVDGKGVVQIADALNTDRILCPRDYYYHCKGKLNPRMNETHKWIDTTVTHILKNEVYIGHMVQFKTGRVSFKNRKTVNKPKESQVRCENTHEPIIDMETWEIVQKSFEKYAGKGRVKERKNGEMPLFSALLVCADCGSKMDFRTGEYINKKGQPRGQNYYTCRANKSSGSSVCTSHLIGEKDLKGLAESELAAFADEISVDEQGLRYRLIAQRTKAVKAEQEALKKKAANIQNRLADLDKMLERLYEELLLGQIPRETLMDMSNRYNSEKEEKKAELAEINAKLEEYINACDDVEKWLDMLKKYMQGQALDHTLIHKLIKRITVGEAKKIDGMKTQPIEIEYTF

SEQ ID NO: 6561 - protein, 529 aa, unidentified
  source 1..529: note = uncultivated organism
MKDRVASPRGRTSPEPPARRCAIYTRKSTTMGLEQEFNSLDAQREACAAYIERQAGWSIVSERYDDGGFTGANIDRPAFTRLMEDAEAGKFDIVVVYKVDRLSRSLLDFVKVMERLNEAGVSFVSVTQNFTTADAMGRLTMNMLMSFAEFEREMIAERTRDKIAMSRRKGKWTGGQVPFGYVSRDKRLVPHELESLVVRDAFDLFLQHRQTALVARLLNEQQKLPRGARLKAGRLLAWTTTGIANILKNPLYAGIIVHDGERYRGEHPALIDEDTFERAQRILSGKEKTPLTFHGTNHEYILKGLLRCGLCGAAMSPGSTRSARKTYRYYRCSTRDKHGPKGCPAQRLPASAIEDYVVERIAETAFDGALAREVEASLVKRLDERRADFEILRAKLPGPIANYSANASRYVEELTRLEGKARELVEQRLSVETQRLAAAERQLRDAERALADLENTATEVRHVIGALRDFRLVWEAMTTPNRGRLLRALLDRVVVEETSGRVDIHLVDFAADPEAPADVGALSKEDAAA

SEQ ID NO: 6562 - protein, 524 aa, unidentified
  source 1..524: note = uncultivated organism
MRETGRNSRNEQTVLRCAIYTRKSHEDGLEQDFNSLDAQREACEAFIRSQAARGWVKAPGQYDDGGFSGGTMERPALKRLLKDIDAGEVNTIVVYKIDRLSRSLLDFFRMVELFEERGVSFVSVTEQFNTTDSSGRLMLGILMSFAQYEREIAGERIRDKVAAAKRHGKWCGGPPPLGYDVDRANKRLVVNEAEAAVVRRIFQRFYQTSSTIQVVRELNADGVATKAWKTKKGKNREGHAWDIGAIRRVIWNQVYTGEVNHNGNVYQGEHEAIIDKELWERTRALLDNNHRTRCHSRRITTDSPLRGLIRCGHCDRAMSPSYTKGQGREVHYYLCQAAHKRGAGACPVSRVPKGEIEKVVVEQIGAVFRTPALVARTFMAARSQEDADRERWNDERARLREELAAIQNKAVEFVRAGGDPGQIMTLNEKASSIGGRLDQVERELGGLGMERITEHDVAKAFGTLEELWEVLFPAEKYRLVHMLVERITVWLDGIDLKLKAVGVAGLVSDLTAYADEARRRGELS

SEQ ID NO: 6563 - protein, 510 aa, unidentified
  source 1..510: note = uncultivated organism
MNRKIAIYARKSVFREDSISIESQIEMCEYEARGQEYLVYQDNGYSGKNTDRPDFQRMVTDIKAGLISKVIVYKLDRVSRSVLDFSGLMDLFQKYKVDFVSATEHFDTSSPMGRAMLNICVVFAQLERETIQQRVIDAYASRSKKGFYMGGKIPYGFRKVPVVIDGVKTSMYEQEPDEAADIALIYELYSKPSATLGDVLRELTARGLNTNRRGKHWNTARLSELMRNPIYTTNDISIYEFFKAQGTNLINPPEQFDGVTSQYLFSGTNTNRKTWDLSGQNIVIAPHRGFIEPETWLACRKKLLANHQVRTCKAKNSFLSGKVKCGNCGYAVVVRFSQRSKGHIRYFIDTGWTENHCCTHKLPTIHADDFEQIIVDKIRDKLSALTIKAASSDRDELQEVIDRTAAKITELESEIERLVDKLMMPDTDKTAMKYINGRIAKLDSQKSELSNEIERLKAEKLKRNNTDYQILHDVMSKWDELTFDDKRSVVEVLIEKILVFPDKLEIRWKL

SEQ ID NO: 6564 - protein, 561 aa, unidentified
  source 1..561: note = uncultivated organism
MIEKIKTIRCAIYTRKSTEEGLDQEFNSLHAQREAGAAYILSQKHEGWQEIPTLYDDGGFSGGNMERPALKQLLADLDMGMIDVVVVYKVDRLTRSLADFAKIVEKFDKKGISFVSVTQQFNTTSSMGRLTLNVLLSFAQFEREVTAERIRDKIAASKKKGMWMGGNVPLGYEREEKCLIINPAEAEQIKFTFDYFLKCKNVRELRKELAKRSYCTKIRKLRDGRLRGGGNFSLGSIYALIKNPVYAGKIQHKDELYEGRHEGIISLEQWQKVQDCIAKNAIVSKHKLKSKEPSLLKGIIFDINGRPFTPSHGFKKKGKRRYKYYIHNEMLVDKGEPIPTFGNLPAYDTEMVVINAIKEILTRPEKLRSLVDDKSHQLHIIESGEKRKVEIEAMQPCEIYKLVRSLVYKVVIEKETVTVELERTALRTYIIQNSYELLEGEVASEDIMRTRMHVSLRRFKREMRLTVNKNNKTGKGNVVTANPAICKALARSFVWNEKLVSGEVASISQLCRIEKLNERYIVQILRLAWLPPKLVEELLEGLHEGMSLNKLLNTHEICYKI

SEQ ID NO: 6565 - protein, 556 aa, unidentified
  source 1..556: note = uncultivated organism
MSSPKIRCAIYTRKSTEEGLDQDFNSLDAQHEACAAYIASQKHEGWKMLPARYDDGGISGGTLERPALQQLMADIDAGRVDMVVVYKIDRLTRSLADFAKLVERLEKADCSFVSVTQAFNTSSSMGRLTLNVLLSFAQFEREVTAERIRDKIAASKKKGLWMGGIPPLGYDPHPDKTRRELVPNAQEADVVRQIFQLYETHRCLNAVVRTAEELGIRSKHHVFATGRTQGGTPFSRGQIYHLLTNPVYLGLIRHKDQTFDGQHPAIIDQPLWDSVQRHLKSASARRRGAPAGQSSNSDAPLKGKVRDETGDVLTPTHTTRHGKRQRYYVSNRLISGSADPTGWRLPAKGFETAVVKAIADHLREHAKRHTVLDNCDVTKLDAAAKAVFGLADTLVADGCKRTAPLIRAIALDPDTLSIDLDPHAVAGAIDLQASSLNPAFCEISTPFTCKRRGVETRIVAGDRCPDPDQTLIRGLRNAHDWAEALKSGEPLKHLAQRIGHSERYIRRVTSLISLSPGLQTAILEGTQPAHLNLENLVRGNIPLNWAHQDRLFGAVS

SEQ ID NO: 6566 - protein, 525 aa, unidentified
  source 1..525: note = uncultivated organism
MSRAPKKPQRPERATTRCAIYTRKSTEEGLDQEFNSLDAQRESAEAYIASQRAEGWTVVPDRYDDGGYTGGNMERPALDRMLRDIDAGKVDCVVVYKVDRLSRSLLDFARIMETFERHGVSFVSVTQQFNTTHSMGRLTLNILLSFAQFEREIIGERIRDKLGAQARKGKWTGGAPVLGYDVDRTGPSPKLVINAKEADRVREIFRMYIQEASLLPVVKELARRGWANKRRVTKKGRELGSRPFDKATLYQLLTKPVYTGKRLFKGELYPAEHEPIIEQDLFDKVQQQLKSNGRSGGVDVRNKYGALLRGLLRCKSCDSAMAHTFCGGKGRTFHRYYRCIHSIKNGSEVCSASNLPAAEIERVVVDEVRGLAKDEALLNQVLADADAAIGGELAAARRERDDVRREIARGHKELQQLVATGKVTVDATGRIADLHARLAVGEQRLPELDGRIKGLEKQIVTPDEAHAVFADFDGLWQSLIPREQARLLKLLISTVEYDGDASTVSVTFRPTSIRALIDRKMEKAA

SEQ ID NO: 6567 - protein, 640 aa, unidentified
  source 1..640: note = uncultivated organism
MEETVRCACYTRKSVENATLDRDFNSLVSQREACENYIASQKGKGWICLPDHYDDGGFSGGNMKRPAMARLKEDIEAGKIDMVVCYKIDRLSRSIIDFVELQKFFEAHNVHFTSITQDINTSNSSGRMLLNILITFAAFERDLIIDRVKSSIDGGKKRGKFCGGVPMLGYRTDPYTKKLLIEEDEAKTVRLIFEKYMALGSICETVTEINRLGLKTREWKSISTGKHHAAKPWNTGSLHWVLTSPIYAGFVAHYDKTYEGEHEAIIPRPQWEKVQEMLEANSPLKRGVKHMTHNHPFSGHVRCGHCNCALTPTFAKKDGRKYCYYICSKCNKNPDHYCPIKRVPSGDLEHAVISQLVGIFRAPSVLRATLLAVRKKEELLRKNYDRDCEILQAQLDDLKKTALKGDVNFDEIKRASGLLADAKRKRMLLKDSIPEDEIVAALGDAAGLWEFMFPGARYELIQMVVGDIVVYPEKISIVLKIDGMKELASEMAVSGYFSEPHGDPEEVSESEQEILDDGSVRITMKLDSKKIEGHRRIVIPAPGAERLKQTSLLRNILNARRWTEMLINGEANNLTDLAAKLGIKTSNMVRTLSLNTLAPDIIESILAGTEPDGLSYSRITSKPIPEDWNEQRRLYGFPER

SEQ ID NO: 6568 - protein, 502 aa, unidentified
  source 1..502: note = uncultivated organism
MKTEAIYTRQSVDRADSISVESQAEFCVRELTGIDYKIYTDRGYSGKNTDRPAFRRLMQDIAEGRVGRVIVYRLDRISRSVLDFANVIDFFQKYSVSFSSTMEKFDTDSPVGKAMLMIVMVFAQLERETIQQRVTDAYASRSKRGFYMGGRIPYGFTLKEIAIDGVKTHCYAPVESECAVIRQIFSLYAKPEASLGDVAGHLKAQHVLNRSGEPWSRNRIRDLIVNPVYVRADRRVYHFFKEHGTEIANPPEDFIGINGAYLYSGNSETRKTVCLNGHTLVLAPHEGVVDAAVWLQCRKKCMQNQSAAKPMKAQRTWLAGKLKCGYCGHALTAKIGRRKSKADVRYYLCSFKYAAKSGCSFRSLRADDVDALVLEELRAKLSEFTVLSRGQQTDTVGRLYDLKNQISEKDSEARALVKQVPLADAALLRLINLRVEELEKQKEMLYAGIAELENHNQADNGAITGYMQVWDKLSLRDKFAVADCMIESIRASESGLEIIWKI

SEQ ID NO: 6569 - protein, 522 aa, unidentified
  source 1..522: note = uncultivated organism
MSKRHSAQASIPEVKRCAIYTRKSTTMGLEQEFNSLDAQHEACAAYVRRQQGWSLVEETYADGGFTGANIERPAFQRLLADVEAGKIDVVVVYKVDRLSRSLLDFAKVMERFNAGGASFVSVTQNFSTADAMGRLTLNMLMSFAEFEREMIAERTRDKIAMSRRKGKWTGGPVPFGYSAKDKRLVVNEVEAAIVREAFALFLQHRRIFAVATALNERGLLPRGRPARPAKHGLRWSKDSMARLLRSPIYAGQMMYGDELYPGEHPRLVDDATFRRAQRILEGAERELRFGGLNPDYVLRGLLRCSSCGDPMTPASTRKGKGRWRYYRCSGRDKHGEAVCHAKPLPAGAIERFVIEKIAEATRDGSLATEVKALLDARIKKKRAEIAELRGTLPGRVADAAANAARYSEDLVKFEGRARELIEKKLRAEADRLTAAERQLAETERDLLDLHDAAIEADWVAGAIANFSKVWELMTPENRCRLLRALVMSVKVYEESSKVEIVLVDFAAKSKASQPGDKSTEAA

SEQ ID NO: 6570 - protein, 613 aa, unidentified
  source 1..613: note = uncultivated organism
MEPNQKKAIRTAIYCRCSTDEQWQGKDFNTLESQTAICKHAIAMKEHEHGWSLGQVFEDGGYSGGSIERPALQELIDEIEAGNIQAVVVYRLDRLTRSIADFYELWRIFEKHDVVFVSATEAFSTDTPTGELFLNLLLSLAQWERQLTRQRVCDKIAERSKRGYWNGGNPPFGYDYSREEKLLIPNKKEVPIVRNVFELIAQYGSPAAVAKQLNTDGISTKSYVATKQDGETKVMGGKRWVGQNVTRLVRNPIYKGIILHGENEYEGRHEALIDVSLWEKSNKALMEKTPVQSATRQRNRHEMLLKGILKCDHCNKHLVPKPAGKKDSDGNPYLYYTCGDINKHGKKTACELRNIPARAFEEFIIKLLSELGQHPDVVKATAEAAKSEHLEAVKPFEAKLRQAVKELDEVSKQVASLIDMAKRPEMKNLSGEFMAEADGLGKRKSELQVERQKLQMEIDYRHALVVDENLICKNLTEFTSLFDKLTFEERSELMNLLFKEIRVSRFDPEKDVQPCDPEVFVTKMRTAWYRVDLRMFSKSFNMKDLIGNQKPEPEVRNKGKSGGDDGIRTHGTLLRFTSLAKKRFRPLSHVSIPEVIVISGDSLRVQPLFKNNF

SEQ ID NO: 6571 - protein, 541 aa, unidentified
  source 1..541: note = uncultivated organism
MLFFIYGRKSVYTGKGESVENQIEMCKEYISAKFPKADHTEVVVYEDEGFSAKNMDRPQFQQMLRDIKLKKPDYIVCYRLDRISRNVSDFSSLIEDLNNHDISFICIKEEFDTSKPMGKAMMYIASVFAQLERETIAERVRDNMMMLARTGRWLGGTTPTGFTSEKMQEIVIDGKIKTSCKLKDNSEELKTVDCILEKFLELRSVSGVSKYLIKQGIKSRSGKIYSLLGIKEILQNPVYCIADEDAWDYFTENHADVCFDKSECSDQYALLVYNKRDYRKKGAPRQDMDKWIVAIGKHKGRISGKKWVAIQSILRDNIPTGKKPAIMHNDYSLLSGLIYCDKCQSRMFAKQRGGKGVNHDLYDYICNNKLRGGVELCNCQNLNGQQADDLVCEYLMQYTDENSSIYKLLEQLKRNLQGKTGKSPAESIEDKIKKCNSEIDNLINTLSQGDLGAVFIERVNIRITELGQELSLLKEEQTRLLKEAGTSADQEMQLEMLSNMLSSFKDNFKTLSTEEKRTFIKLIVKKIVWDGENLHIFIDGE

SEQ ID NO: 6572 - protein, 591 aa, unidentified
  source 1..591: note = uncultivated organism
MARGRRATARREALSPASPTRRRCAVYTRKSSEEGLEQSFNSLHAQRDACEAYIASQRHEGWAALPQLYDDGGLSGGSMDRPALRQLLDDVRAGLVDIVVVYKVDRLTRSLADFAKLTELFDAHGTSFVSVTQQFNTSTSMGRLTLNVLLSFAQFEREVAGERIRDKIALSKRRGMWVGGLPPLGYDGIDRKLVVNSAEAETVRLIFRTYLELGSIGALKAALDGSGVRSKRRRFSDGREVGGAPLSRGAIYLILRNQLYRGQIAHRGEVHQGNHEAIIDVETWDAVQTMLTAQSGRGRGSGAGSQSAVTSVDASSASPLTGLVFDERGHRLSPVTAVRRGRRYRYYVSAPLVRGVCNSDGLRIPAPDLEALVASTLHGHLSDPGWVIEVLGVGLVGREAQRLIAAAGAVAHSFTGASTCVRSAAGPNARIIVGRQKLTIELDAAVLAGLLADTAMAISGEPLPLTPVASTITVSVPAHPLRCGKEMRIVVGSVESERRAPDPQLVALVSDAHRWFESLRNGRHSTIAGIAAAEKRPVADVSRIIALAFLAPDIVEMILTGRQPATLTPERLKPRRPLPLDWSEQRALLFG

SEQ ID NO: 6573 - protein, 519 aa, unidentified
  source 1..519: note = uncultivated organism
MEKWVKIIPPKAEQPAIQRVAAYCRVSSDSADQLHSYAAQIRAYTDLIQGHDGWELVDIYADEGLTGTRMDQREDLNRLLADCRRGRVDKVLVKSISRLARNTRDCLTILRELFRLGVTVQFEKENIDTGTLTSELMVSVSASLAQQESISISQNQRLSYQRRMERGEFITCKAPFGYRMPDGKNLEIYEDEARLVRQIFDSYLQGKSTLDIAADMDRLVVHTRDKKVKWTANSINYILTNEKYIGDALCQKKFTTASLPFVEKRNRGERDQYYVEDTHPAIIARDVFERTQALIQARAWRKDEQQRNYLLTKKVACGHCGSTFIRRETKKGYVSWSCRRHIMRSSDCPVGRIGESELYAAFLRMYHKLKQNEDIVLTPTLKQLEDLESALHRDDPAMLELNKAIAQAMERSYNISKLQATGLLDADACAAKYNEINAELASLRTKRSRLLRSEALEETLDALRKTADTVHRGPDHLEGFDEELFHSLVERITAQSQTQVRFRLRGGLELTESLGEGKR

SEQ ID NO: 6574 - protein, 651 aa, unidentified
  source 1..651: note = uncultivated organism
MPLPLKAGIWIRVSTEEQARGESPKHHEARARAYAELKGWEVVEIYNLSGVSGKEILSHPETQRMLDDVRKERIQALIFSKLARLARNVKELLEIAEIFQKYNANLVSLDENIDTSSPAGRLLFVVIGALAQWEREEIAERVRASVPVRARMGKNTGGIGPFGYKWENGKLVINPDEAYVVKRAYQLYLETGKLLTTCRRLTEEGLKARKSNFTTVTLKRMLTDTVYKGLKRANYTKTRGKGKSWELKPEEDWVYFKVEPIVDEGLWEKVNEMIRKNEENYKEMRVPKEGRYLFSGLVVCGLCGKKMYVYPYERMKDPIYRCRCRNKIRESILENKFKEGLEHLVVHPESFKKIEDEERFKIEELKERKEGMERELRKVKHKIDKLFSLWEDELIDKKSFRERFEELNRQKEEIEETISRIQAEIDFYSVRNISLDFIINQARRMKDMWDLLEEDEKREMAKLLLEKIQVGDGKITFFYNCPSEFMKLENDNHIYRDVYMILKNSNSTGISFLEKSFFILPQEAVKGYPEKLIHIGHHIRKRRIELGMSQRELAKLFEVTEETIYNWENGKKTPALKFIPKIIAFLGYVPFRCESEDLIERLKFYKFINGLTVEELAERLSKHPDQVRAWLTGRRKPSRKNEETIRKFLEK

SEQ ID NO: 6575 - protein, 532 aa, unidentified
  source 1..532: note = uncultivated organism
MKTQPPSRIRCVIYTRVSTDQGLDQDFNSLDAQREAAEAYIKSQLHEGWSAQKAVYDDGGFSGGTLNRPALQRLLSEIKAGLIDTVVVYKVDRLTRSLADFAKLVELFDAHKVSFVSVTQAFNTTTSMGRLTLNVLLSFAQFEREVTSERIRDKIGASKRKGLWVGGMVPLGYTSVNKKLIVVPEEAERVRLIFQRYRELGSLDKVLVDLHARGGVTKQRQLSSGKIQGGIPFTRGGLAHLLRNRFYVGEVFYKGSICPAEHEPILDREMFDTVQAQLDAQRIERRGVRRGGNALLAGKLFDDQGHTMTPSHARKKGLRYDYYLSSALAHGRAGEAGSLRRVAARQIEPLVTGALRAQCLDAGAIDNRVLIDSYLLGCQLSATAVTIRYRPRGAAPTQLSDESNADPEPPLTMTLPWSPQVSRRARNILIPRTAQALPSPLDARARSQLVRAIARGRRWLEEIVEGSVNGPQAIAEREGCTGRSVMQTLSLAFVCPELVTAAVEGRLPKGIGFARLAEPPMEWSQQLVRLGL

SEQ ID NO: 6576 - protein, 537 aa, unidentified
  source 1..537: note = uncultivated organism
MKGKIRCAIYTRKSSEEGLKLEFNSLQAQREACESYIKSQKHENWQLLPTHYDDGGYSGGTLNRPALQQLLADIKAGLIDIIVVYKIDRLTRCLMDFSKIVEILDKHKTSFVSITQHFNTTTSMGRLTLNMLLSFAQFEREVTGERIRDKIAASKKKGMWLGGKPPLGYYRKDKKIYPDEKQVPLVSSIFHKYIELKSTPLVKEWLINQGHNISAGNLNCILRNKAYIGQVGHKGIWYPGEHQGIIEESLFEQAQAVMAGNRINRQRYNPSKSLLAGKLYDDKGNAMSPSWSTGSKGKKYRYYVSQAVIKKEHCKIGQISKISLPKLEEFIDNWFNTFLKDKTAIYPYIKDFEINKQKEIITKLTAYTITRTIEQPLIKRVDILPNHIKITLYEEQVTELLNAHYENRGMDILAETHQKQERSYTEAYHIGVIDNGAKVLVGEVIKPTPHKETNLIKILAQAYTWHQDILKGQTLKEIATRDKVSEQYVRRILELSFLSPKIVRAILTGKQPADCTLKQLLSIYTPNWCEQEEMFFR

SEQ ID NO: 6577 - protein, 511 aa, unidentified
  source 1..511: note = uncultivated organism
MGELALDRQEKECRDRAARDGVEVSAERVYSDLSISAADARKRRPAYDQLLADVRAGEVGSVYVWDLDRLTRQPGQLDQWVKLAKAGLCHVVEAHGMDLDLSRSGDLLVARIRVAVAENESQHKGERQRAANRQRARIGRVPVGNRPTGYTHAGEVIEEEAEAVRAVFAAFLAGASLKAIARALSGDRDELTEGVPTLPRPSYRAAVEWNERHPDRPPHELPAEQPWNSSAVLKMLRNPRYAGFATYIPSEVGKNGDKSAPWHNRRVRDEGTGEWVRGQWEPIVPAEDWERVQAVLDDPDRRPKISGKGPAAARTHLGSGLFRCPACGGRVHLQGVCYTCTGHVARKADLVDAYVASVIEAVLARPDLASLVCVRRAGDATEAKEIEAEVARQRGRIERAEADYAHDLIRAEDLKRARDVAEAAIREAEARLRALADAPEPPAIVREVAPAEAFREADLDAKRAVVDLLCDVYLTKTDRSENARRNARGVELDPSKAVEFRWKTGAAPAEG

SEQ ID NO: 6578 - protein, 520 aa, unidentified
  source 1..520: note = uncultivated organism
MRQVQKLRYTPLQDDRPLRVAAYCRVSSDSADQLNSYASQIQFYTEYIGQHPDWELADIYADEGITGTKTEKRDELKRLIADSRKGKIDRVLVKSVSRFARNLYDSLSLARLLKSYGTSVYFEEQKIDTAEMNDELVLTMQSMAAQAESMTISQNMRWSYQKRMEKGEFVGTVPAYGYKLINETLEVYEPEAIIVRKIFDMYLSGKGKQAIANQLNQEGIPRRHGRNKWYEYTINYILNNERYIGDALLQKKYTTEFPFRKLRNNGKVPQYYIENSHPAIISRKTFEIAQQLQSNKQQRKGKEKTRYPLSTKIRCFDCGRSFRRMITNNIAYWQCCDHANRRSKCESRRYPEEAIYKAFTLLINKLITHREYILTPMIRHLGRMQSRSSNIQAKIYEIDQQLAELNEQNHIIATHRAQGLIDAAEYAAESGAVNNKVTALRAERRKLLSEDENDEMIDNLKMLNSILANQSGIYTEFDESLFMEIVIDILAVTDTDLRFKLIGGLELTETIIRTGRRRRS

SEQ ID NO: 6579 - protein, 534 aa, unidentified
  source 1..534: note = uncultivated organism
MAIIRAVSYSRFSSNNQREESIEAQQRYIYKYIGEKGYAAVGDYIDQALTGTNIDRPAFKNMIEDARKGLFDVVIVHKMDRFSRDVFDTLSVQRELEKYNVRIESVIERFEDTPEGNLSKFIQLGLNEYYSKNLSREVMKGLSENAYKAMHNGGIPPYGFDVDPETKKYVINEKEAEAVRIMFDKLIKGWSYRELAEYLNLLGYRTKIGNKFSATSSFYDILTNPKYMGLYTYNRSVSKPKQIGMKRSHRKNKNEEEIIRVPNGVPAIVDEETFELVQKLLKQRRRSKGQHKAKEVYLLTGLVECAECGSAYHGSSRIGGRNKSKYVSYRCSKRKKLENPCKCKEINKTLLDEFVVNQLYTTLLNQTNLEQLLEEVNVKLKQKYADMDQDLPKLQEQLDGVNQKISNLVQAIAMGGLGSLDTITQEIQRLEHDKVKLTELVQEKQVKKESLTLTLEQLKQVLDESKQYMLSNHDDMVKYILSRFIHKIIIGNETIIVNYNYGGFYFDFKSILLLESVTYQRDDVYSNSSLKEVV

SEQ ID NO: 6580 - protein, 504 aa, unidentified
  source 1..504: note = uncultivated organism
MVAIYARQSVDKKDSISIETQIEHCKMKLIEKEDYEVYSDKGYSGSNIKRPDFEKMIFNIQEGLVTKVICYKVDRISRSTLDFSYIINLFKKKNVEFVSCQENFDTTTPMGKAMLSIIMTFAELERESIQGRVKDNYYARGKEGRFLGGPPPFGFTKEKTLLNGKATSALLPIESEIDIVKKIFKLYDSEELTLGEISKKLATLGVKTAKNVNWDSSKISRIMRNPAYVKADMTVYKYYSNKGCVIDNTAEDFTGEKGCFLFGKRTANERKYTNVKKHHLSLGLHDGIIDSEIFLRCQDRLSLNTNLGNTGKGKHTYLSGILKCGYCGYAMTAFKSKGEECLRCSGKYNYHICTGHENYYRIKDVEDAVEDKLFEFIKNNKDKIYTPIEVKKKEKNEFEVKISKLENAQSKLIDMIKEGVLIDTKSIASEINKISLEMEELQREYDKKERKRKGNNEIKQMGFFLEEWDKITDEQKKRVVKCFIDRIKFYEYIEIEWNQNLENI

SEQ ID NO: 6581 - protein, 521 aa, unidentified
  source 1..521: note = uncultivated organism
MGGRAVIYQRVSSKEQESGFSPETQLEICNEWAARHHYEVVKTFAGESESAKTDANRKRFNEVLKYVLDKKNKIDAVIVYMTSRFTRTGMKSFSIVDELLDRGIPVFSASSSYDARTPDGKLVQGMELLMANHENTIKSQAVRDNGARALRSGRWIQAPPRGYDMKTTRAQQTITINADGELIRKAFAMKADENLTTEDVRVKMKAMGLDLPKQSWSHIFRNIFYAGYFSHPFLKGEIIKGPHEPLVPIEVFLKVNGMLSEAHNRGYETKADKEYAPLLGSLKCPVCGHNLTASLSTKMRKKYGRDVGYYVCSRKNCKCNVAAKRVNEAFEEWADGIALPEAFSGVLEAQLRKAFPVLNQQGKDEVLAIKSTLSKKESEIERIEYNLATAPNVKVQETCSKMLAKAEAEKNEILCELQAKDKEILNLDDFIKNGMEMRNNILKLWRLSDMSHKRIIQKLIFPGGIVWSKENDDIEPLSKNEFLFTWGSKSVGCEDKQNGQTLKNEDLSSLAPPVGLEPTTL

SEQ ID NO: 6582 - protein, 507 aa, unidentified
  source 1..507: note = uncultivated organism
MSLPKVGLYLRLSREDEGEGDQSMSIANQKTFLLQYVRQQGWPVAGIYTDDGYTGTNFDRPAFQRLLGDIREKRIDLVVTKDLSRLGRDQIGTVYYYQCFFPAHGVRYVAVSEGFDTAAGHTSIALPFLAAANDFYTADISRKVRSALDARRRSGAFIGAFPPLGYRKDPEQRGKLLVDEERRWIVEEVFCRYLESGSVRGTARALSAAQVPTPARCRGEGERCRGLWSDTMVRRILTNPTYAGHLTQNRSEKASYKITRRIAHPPEEWTIVPHTHEAIIPQARFDRVQELLRLRSYRPPTGSAHLLTGLAFCAACGSPMSYVREGTRSYMVCQGYRRGRERCTSHRIREDAVLSALGERLRVLARQIDPAELAERTLPRSADGTAHRAELERAVQACRRRIGHLYRDQEEGVITRTEFQELLLENRRRRAELEHRLDAFPPVSGSDPEQWAERVRETLAFTPLTRPAVLALVDRVLVEEGKAVEIRFRFSLPEAGVVQKREICRPT

SEQ ID NO: 6583 - protein, 524 aa, unidentified
  source 1..524: note = uncultivated organism
MKQVRCAVYTRKSSEEGLELDFNSLDAQREACEAYIKSQKHEGWTLITKQYNDGGFSGGTMERPAFKELLEDIKQNKIDIVVVYKVDRLTRSLMDFAKIIEIFDAHQASFVSITQQFNTTTSMGRLTLNMLLSFAQFEREITSERLRDKFEASRKKGLFVHGKAPIGYTKVGSTLVENPEQSGFVRLIFDKYLELGSIKNLHDYLIENDIKTESGKNFRKGHLNHLLKNKAYIGKIMHKDKVYEGLHEGIIDENVFEKVQKMLKEKSIERKYETNNPSYALLASKLFDDKGNYMSPSYSNNRYKKRYCYYISQAILQNREQDVGTISKLPKLEIETLVRKVITDFVRNKTEIQQYIANKSITLQKKILDMVVDIELNDQIIRYVLNKVIVRKNEVEIVLNQNIFVKVLELLAYGEQVLIDYADDEFIIITTSVQLVAVPKRGIKLIIENECQYNLTLIQSVAKGFYYHKLWLEGKLSKEQKSSYIYRLMSLRYLPPKLIEDILNGKQAPNLTVKELYRIAGRSV

SEQ ID NO: 6584 - protein, 519 aa, unidentified
  source 1..519: note = uncultivated organism
MAANVTYIPPKAAKPETLRVAAYCRVSSDSSDQLHSYAAQIKAYTEQIGTHADWELVDVYADEGLTGTRMDKREDFQRLLADCRKGKVDRVLCKSISRFARNTRDCLAALRELSALGVTVYFEKENIDTGTLTSELMVSVSGSLAQQESVSISQNLKISWRRMMDTGNFVTTNPPFGYELADGCGLKIKESEADIVRWIFTGYLDGMSTREIAKLLTERGILTTEGNTVWNPRSVQQILGNEKYKGDTLTLKRYTTNQFPFTVKRNHGEVDQYYIENSHPAIIDADTFERVRKLKERRMQKRRSDRRDSLLSGKMACGVCGTALMRRTTGSGMISWVCRKHDEKAADCPVGRIPEAEIYAAFARMYNKLRANADIILKPALTQLDGLETALQRENPAMLTVNRAIAQAAEQSHNISKLQTAGLLDADACATKLNAINIQLTQLRRERHRLLEHDDIQEAIDRLHQTADIVNAGPERLDIFDEGLFEELVEQIVAESQTRIRFRLRGGIELAEEVGRARR

SEQ ID NO: 6585 - protein, 580 aa, unidentified
  source 1..580: note = uncultivated organism
MKTNPAKQFVIYSRKSKFTGKGESIENQIELCRQYIASHYSQQEADAALVYEDEGFSGGTLERPQFKRMMKNSQNTQFAAIVVYRLDRISRNIGDFAKLIEELGERQIDFISIREQFDTSSPMGRAMMYIASVFSQLERETIAERIRDNMHELAKTGRWLGGTTPTGYASESISTVTVDGKTRKACKLKNIPDEIHLVQLIFDKFLETGSLTKTDQFLLQGHYQTKRGKSFTRFAIKGILSNPVYMIADEDAYNFLVENEADLFSEKEAFDGKHGIMAYNRTLQRPGKAHQERPMNEWIVSVGKHAGVIPGAKWVQVQKLLSLNKSKSYRKPRSNVALLSGLLFCGKCGDYMRPKLSGRLTAAGEPIYTYLCTTKERSCSKICAMKNANGNNLDAKVIATIKKFGKQSEDMAKEITRIKKRISGSREGYGAEAARLKEQLTETESEIKALILSLSKSEGTHAEQYIMEQIDELHEKNESLKKRLAELEAVMQQHNLADMEFDLIRQTLSVMGDNIDDYSVEQKRAAIRTFIRKIVWDGENAHLYLFGSDGDYEFPAPSIGDTGPDGNAGENGEPLGEDSE

SEQ ID NO: 6586 - protein, 506 aa, unidentified
  source 1..506: note = uncultivated organism
MAQVQVIQPYDYNQGKLSVAAYCRVSSNSEDQLNSYRTQVSYYSRLISNNPDWQLADIYADEGITGTSMKKREEFNRMIADCWEGKIDLILVKSVSRFARNTTELLEVTRELKELGVIVIFEEQEIDTSQMHSEMQLTLHAMAAQEESRSISQNMRWSYQKRMEAGTFVGTVPLIGFDLKNGNLDPNQDGWIHGYIFDLYNSGVAMEPIADRLNEQNIGNRVWTRTSVASILKNEKCMGDVLCQKKFTTDTMPFQKRYNHGEKPQYYIRDNHPGTVSRESFYNAKSLMEIRKQKCQRRNSHLFTHRIHCPQCNRHFRAIESSNKIYWMCSSVSSHITNCFPYHFSEDSIKKAFLNLAGKLYIHQEEVLGQTVKLLQEVQYSSRNEDKKLLELNEQLAGLADKSATLQRLNRKGFIDAEEYRQQSDKLAIQRQKLTLERNRKLQGSKILTMVDAIEHLQAQINGWPEIPAEFSIELFDSIVEKIIPTDKGVLKFRLHCGLEFVEVVA

SEQ ID NO: 6587 - protein, 554 aa, unidentified
  source 1..554: note = uncultivated organism
MLTSDMVYKAADYLRLSKEDGDFSFSTNKSESNSISSQRAIIQRFVAQQPDIKLVAEFCDDGYTGTNFERPQFQKMMEAVKAGEINCIIVKDLSRFGREYIDAGRYIEKIFPQLGVRFIAINDHFDSLNFSSSDSLIVPIKNFLNDSYSRDISIKVRSNFESRRRNGEFVSNYTPYGYLRSPDDKTKLIIDEVAGEVVRDIFRWKIEGMSPVIIADKLNARGVLSPSEHKRSAGINYKTAFQTSAHSKWSPKSVIRVLTNEVYTGVLIQGRRTTPNYKVKHTIIKDEQDWSRIENAHDAIIQVREFELVQKLMQEDSRRASGSDTVYPLSGRVFCGTCGTLAKRYSVTYNGSKYAYYTCPNAKKDGGCEKRRISEKELESTVLAILQSEIKLILNMEQALNQIEELAWEHRETARLDKAIEVKVAEMQKCRTMKVSIYEDLQDGLISQEEFLQMKEGYSRQICEIGQDICKLQKERAMLQEGMANRSGWLSQFRAYQNLPSLSRAAVVNLVDKIELYPDKKIRVVLRYQDQLANMVEFLREQDVAKSLPAAEVS

SEQ ID NO: 6588 - protein, 566 aa, unidentified
  source 1..566: note = uncultivated organism
MSERRAIRCAIYTRKSSEEGLDQSFNSLDAQHEACAAYIASQRHEGWRLLPERYDDGGLSGGTLERPALQRLLAAIAAGRIDMIVVYKIDRLTRALTDFAKLVERFEAARCSFVSVTQAFNTSTSMGRLTLNVLLSFAQFEREVTAERIRDKIAASKRKGLWMGGLTPLGYDADPDPSIRGLVVNPAEAETVRRLFALYDDLGCLRKVEDEADRLGFRSKLRHFSTGRSRGGARLTRGMIHHLLTNPVYLGRIRHKDRVWPGRHAAIVDEALWERVQAKLQAAAVRARGRSRTSTGTASNSARAPLTGKLRDETGDRLTPSHTNRKGRRLCYYVSHRLLKGPEAVKSSPTRGWRLPAVALEGTIARLLADHLETVAAGHHLLDRPDVENAATLCSAADALVTELRTGAPAALGALLTTGRIGTGTISLTLDRRALAEALGIAPDRLAAAALIIEAPFQRRRRGIETRIVAGGRAAAPDPTLRRALIEAHRWATALRAGTQIAEIARREDCSESWVRRHVILASLSPSLQTAILDGTQPPDLSLKRLQREGIPLDWAEQARRFGLAG

SEQ ID NO: 6589 - protein, 522 aa, unidentified
  source 1..522: note = uncultivated organism
MKPASARTIRCAIYTRVSTDHGLEQDFNSLDAQREAAEAYVKSQAHEGWRLIRGGVFDDGGFSGGSLERPALQRLLALIEAGEVDVVVVYKVDRLTRSLADFAKLVELFDAHGTSFVSVTQSFNTTTSMGRLTLNMLLSFAQFEREVTGERIRDKIAASKKRGIWVGGVVPLGYRVEDRKLVIDEVEAATVRMIFQRYLALGSLPALLSELRAAGVVTRRRMLSTGRSIGGVPFTKGPLAWLLGNRTYLGEINHKDRSYPGEHEAIVDSALFAAVQAQLQANRRNRRRRYMASEALLSGRLFDDCGNRMTPSSANKKGLRYRYYISSMLVQGRKAEAGSVSRVSASDIETPITQELRARLPEDAALNERELIARHLERVTIRADRIDAELRSDSGASSFSIPWTRRPTKPHRQIRGLPDESKDGTRPMRAENRAVLIRSIAQGRRWLDEITAGRADLDAIAIREERSRRHVEQIVSLAFLDPHLVKAIVDGRLPRGTSLRRLIDPPLAWSAQWQRLGLSVPR

SEQ ID NO: 6590 - protein, 505 aa, unidentified
  source 1..505: note = uncultivated organism
MIAIYARKSVFREDSISIESQIEMCQYETKGEPYVIYADNGYSGKDTSRPEFQRMINDIECGKINRVVVYKLDRISRSILDFSKMIELFQEKNVDFVSTTEHFDTSSPMGRAMLNICIVFAQLERETIQQRVADAYLSRSKKGFYMGGKIPYGYIKVPIEMNGIKTSMYEIKEDEAQDIRLIYQIYSQPSATLGDVLRGLIKLGININKRGHAWSTARLSEIMRNPVYTFADTNTYDFFKSQGSNIINPISDFCGKTSLYLFKGENTNRKTWDLQGQNIVVAPHTPIIDSTTWLKCRKKLLSNHQVKTSKAKNSIFCGKLKCAYCGYSLIVRKSARKNGTVNYFVDSGKCEMKLCTHKLPTMRTTETEDLLIQRIRAKINTLTIKGKSTNDIPDKEKLDLLAQKEQKEKSINALIDSIEKTEPSTVTMMYINKKIESLDKEVKQLNQQIEVLEQKFQSSQKNVAQIHDAMSKWSDLSFDEKREVVNLLIDKIIVHEDNLHIIWNI

SEQ ID NO: 6591 - protein, 535 aa, unidentified
  source 1..535: note = uncultivated organism
MNPVAAPVSIGRRRGTRVQAPTPAPAVVRCAIYTRKSTDAGLDSDFSSIDNQREACEAFIRSQREEGWIVVDERFDDGGFSGGTIERPALKRLLTLIQAGEIDCVVVYKIDRLSRSLLDFVRLLELFELHRCAFVGVTQQINTTTSAGRLMLNVLMSFAQFEREIGSERTREKIHAARKKGRYTGGTPPLGYDLDRLNHRLVVNPQEAEMVRELYTLYITHNSLLEVVKAVNARGWTRKSWLTARETRRGGREFDKVYLQRLLTNPLYLGQITLHDEIYPGLHEPIVDVVIFDQVQRMLDANRNGAGPLARNRHGAILKGLLRCGRCGSAMAHSYTKKDGKLYRYYRCSRAEKQSRSACQTPPVSAGEIESQMIAEIRRFAADPAMVDQVFAEVITQQREQGEKLESERTRLLRERQQRQETIRRLVDSIGSADNGSGALLSRRMGELQASIALIEDRLAAVDSDRLILRQHKVDRLHLDQTLLQFTDLWDALYPGERCRLVRSLVSKVVYDDLTDSLQIEFKAQVQQSSAPRSS

SEQ ID NO: 6592 - protein, 512 aa, unidentified
  source 1..512: note = uncultivated organism
MPTVTVIQPTITEEKSTVIRCAAYCRVSSDSEDQLNSFMAQLKYYENFLADSKTETLINVYADEGVTGTSEDKREEFQRMMRDCRKGKIDRIYTKSISRFARNTKDCLKNIRELKSLGITVFFEKENIDTANMPDEMMITIMGGLAQEESVSISQNVQWSIRKRMQNGTYNVSSMPYGYTKENGNFTVNSGEAEVVRRIFREFLSGKGFNTICRNLNNDGILKNGKSWDKKTIRYILTNEKYIGDCLWRKKITENVFPFKKSKNTGQAEQYYVVNDHEPIISREDFEAVQELIEIKSECFGNKIIHTYPLSKKMICGNCGSIYKRKRSNNKIYWACSKHDLNADDCSSKWISEHKIYDAFVTLQNKLSHHYRQILVPLQIALQDLKLRRFNDNSNVMEIHKEIAKLKEQTHVLARLKTKGFLDNAKYLEQTAELNAKVNKLQSELKKITHLEDEDEMLSQIDMLIDYFEKTENPITDFDESAFEFLIEKIIVISQNALEFHVIGGLKFKEKI

SEQ ID NO: 6593 - protein, 543 aa, unidentified
  source 1..543: note = uncultivated organism
MQTQLAERKIVTEMPAVIVKTERDVRKQKLRMAAYCRVSTDSEDQLNSYNSQIKYYTSIIEENPNWTMAGIFADEGLSGVSTKKRKEFNRMMQKCRAGRIDMIIVKSVSRFARNTLDSISWARRLKKLGVGIIFEKEGVNTMEMDDEILLTIFAGLAQAESESLSKNVAMGHRQSYKAGNVPFHYKNFLGYRKGADGEPEIVPEEAAVVKRIFHRYLAGDSVAQIIKDLEADGIPAARGGEKWSPATVRNMLRNEKYIGDALLQKTYVADVLTKQSKKNHGELPQYYITNNHPAIIDRDIFQKVQEEIARRGCKRKVQSKSARTEQSKYSGKYALNEILVCGECGTPYRRVTWTQHGEKRIVWRCISRLEHGRKYCKESPTLHESPLHAAVMDAISEVVDHEALRCALRAGLEAAYTMDKETIVYRMAKTRVEELKAQFDKLLESAGTAGFDEDYYDQRIKKIGDEMAAKRAVIEGYEARQEEKSRQSEIAAASELLEDEPFTLPEYDDQAVRQLVDTIRVVAKDRITVTLKGGMEIEQRIEA

SEQ ID NO: 6594 - protein, 562 aa, unidentified
  source 1..562: note = uncultivated organism
MEHTKSRTRRCAIYTRKSSEEGLEQDFNSLHAQREACEAFIKSQTGEGWRLVKTAYDDGGLSGGTMERPALQHLLEDIRRRLVDVVVVYKVDRLTRSLADFAKMVEVFDAHGVSFVAVTQQFNTTTSMGRLTLNVLLSFAQFEREVTGERIRDKIAASKRKGMWMGGVTPLGYDVRDHKLVVNPAEAARVKHIYERYLELGSVRLLRRDLERRRVISKVRVSKNGVRSGGRQFSRGALYELLSNPIYLGEIRHKKERHPGQHEPIVGRELWEKVQRHLRDQAATHRQRPTKAPPSPLAGKLFDENGEPLYVQGAVKGARHYRYYVSRGLVRGSVQDDQRGWRVAAPELERAVSAAVRRILSDQAAIAGAIEELNIDTSRLPSIFKAAEAWIQSLQYETEASPALVRLIECVGLKPDGIQVSIKLPIPAGEERDAATPNELALARFVPMRMKRRGVEMRLIIDGDAGPAARIDPSLLKAIARAYRWSDDLVSGRVRSIGEIAKRERLTGRYVRCVMRLAFLAPKIVEAIAEGRQPADLTTVAMTQRIDLPPLWSAQERALDVR

SEQ ID NO: 6595 - protein, 516 aa, unidentified
  source 1..516: note = uncultivated organism
MMCYERSDEMAEITIIPAKDCSDEIVRTAAYARVSSDSEDQLNSFAAQIRHYTELLKDSTDAVFVDMYADQGITGTSAAKRTEFQRLMSDCRKGKIDRILVKSISRFARNTKDSLEAVRELKTLGVSVYFEKENIDTGEVSSEMMLAIYSQFAQEESMSTSKNCRMGVQKRMADGTYKNPSVPFGYDYVGGELQINPEKAEIVKRIFNWYVSGIGMDEIATRLNLQGVRSEVWRHGTIHSILTNERYVGDKLFRKRFTTDTLPFKLMRNRGEKEQYYVSGTHEPIIEKSVFETAQKVLAEKPSRSGLEKEKSVFRKKIVCVNCGCSFRRKVNNRCVRWVCRNHDRNAENCGIRQIRETEFQAAFVRLWNKLQAHGKAIFAPMLRQLETLSEREKSGNTQLAELRREISEIKQQSYLLTMLNSQGTLDGAYFKERTQELDRKLLTAQKQLHANLDDKDGERLDELRKLIGIFERAKPITDFDEIKFGLIVQKITVLSESEIRFDLIGRIGFTERIVR

SEQ ID NO: 6596 - protein, 516 aa, unidentified
  source 1..516: note = uncultivated organism
MRTVIYSRVSTDSQADEGTSLDTQERAGVEYAEAVGHTVVRSIRDAESGSSLERPGMAEVRRLMRDGECDVVLAYALDRLSRNQNHIGVLFDEAETSGVRLEFVTEDFEDTAIGKFIVAARAFVSEVEREKIAERTMRGKAERARNGQLAQGTGTGCYGYIYVPETGQRELNPGQAAVVRRIFEGWVSGKAVNRITTDLNADGIPTLTGKQWYPVTVHRILRNETYTGRTVYRRTKVEMIRQPGGRGRKRRVVEQDPSEHIVIEGASPQIVSAELFARAQSRFEDPERRNARAPSRTYPLRGRLRCRVCGAGMVGQSVNRGRYLYYRCNRVYLSREDKRCTSRLVRKETLEDAVRSTLEDVLAQPELAISMAERLWEGTDHAARLAELARELSHLDDSQDRLIDLYTDGEVTKEAYQQKRERLTKRKASLEREQAQLRSECEPGPDPEMLRERMPEVLGFIREWVTNAETEDLDLLLQALDVRIDVTPEEADVRVEVPMIEGVEAADFATIERTSA

SEQ ID NO: 6597 - protein, 524 aa, unidentified
  source 1..524: note = uncultivated organism
MKPVIPKPQRCAIYTRKSTEHNLDLAFNSLDAQREACEAYIKSQAHEGWKPVAGRFDDGGLSGASLERPALQALLDQVRSAKIDIIVVYKVDRLTRSLADFAKVVELFDEYGVSFVSVTQSFNTTSSMGRLTLNVLLSFAQFEREVIGERVRDKIAASKRKGLWVGGPVPLGYRSVGKKIEIAPEDAALVRKIFIDYLRLGSIGELSISLEKEGIKPRSRLLSNGATIAAARFMVGPLAHLLKNRFYVGDVVYKGEVHKGEHEPILDRELFEAVQAQLAERKVLRKLARSKSSAILMGLIFDDRGNPMSPSHANKKGVRYRYYVSHALLQNRKASSGSIARVSAPDVEALVCNAVKQKEQSDSKISDRELLQRHVERVTVRPKELEILLRGGEEGAGAGPPTCLSIPFTPNLPRKKGITRAPADQETMDSQTRDALLRAIARARGWLDFILFSKEASFDAIAAAENLAERHVRFLMPLAFLSPRIVSAIADGAAPTGLTVSGLARSLPHKWIDQERIVGLAKGD

SEQ ID NO: 6598 - protein, 545 aa, unidentified
  source 1..545: note = uncultivated organism
MALQSIHDVGIYCRLSRDDNNGNLESMSIGNQKQMLVDYVKEKGWNLRETYVDDGYSGTNFDRPDFKRMIQDVKNARIDCIVTKDLSRLGRNYSKVGYYTEEFFVDHGVRFIAINDSFDTNREEDNDIAPFKNVLNEWYPRDISKKVRQVKRAAARQGKFMGSYAPYGYKRHPENKHQLIIDDKVADIVRRIFNESAYGYSGRRIADNLNADGIDTPKFYSAKEGNGMPVRPTEKNYWGSSTVLRIIRHPVYIGNLVQGKSQVTSFKNKKRRVVDRDNWIVVENTHEPIIDREIWDRCQSRARRNCGRESKKTNSISLFAGLLRCEDCGSKLVFTFKPRKKGPSVGSYRCSCYNNNGNHACTHHYIQENTLSAFVLRDIQIHATLVKADRERITQQLLAGINNAQQNSMKQIDKQLRDAESREVAIDENIKQLYEDKCEGKLPESIFQKLLNGYLAEQAELSKTINKIRDQQNEVKIENCDINQWMDTIIEYMDIKKLDRTSVVELIDTITIGEGRMVNGKRRQDITINYRFIGNLLEHAKEDII

SEQ ID NO: 6599 - protein, 533 aa, unidentified
  source 1..533: note = uncultivated organism
MAKTWLTDGAAALEEKAYRVIKIEAQEQPQKTRLRVAAYTRVSSDSEDQLNSFAAQNRYYNELIAEKPEWNLVDIYADEGITGTSAEKRDDFQRMMADCRRGLIDQILVKSISRFARNTKECLESVRELKELGVNVRFERESINTANVSSELITAIYAAFAQKESESISGNMRWSYQRRMESGTFLPSAMAYGYKIVDKKIEIEPEAALVVCRIFRWYLDGVSKDLIAKRLNAEGIPTNQNKIWRNSGVHYILTNERYIGDSIWQKSYTTDTFPVTRYKNKGEREKYYAEGTHPPIISKETFEQVQKLMQFRKETFGKKLREQPYPLSKKLICGNCGTVFRRKLQRERAYWCCMKHDTSLNDCAMLPIAEESIYGAFCRLYYKLKHQSTPIFGQVLASLQVIRNRRMLWSPDIVSLNKRISELSSQNQTLAFLKQQGLVDPDIFISQTNELTKQLRQLKLEKEKLMDAESDMTAQQTQALLDLLENGPDFLDTFDAELFGELIDKIIVESNDSIRFRLKNGLELREGIERTVR

SEQ ID NO: 6600 - protein, 546 aa, unidentified
  source 1..546: note = uncultivated organism
MKVAIYCRVSTEDQAERQTIQNQIQFAEKYVDLHELDVFTFYNEDGVTGTIPLYDRPEGTRLLQDAKEKKFDTLLIYKLDRLGRSARIILNSIHELEALGIQIKSMTEPFDTSSPAGRFMITMLAGVADLERETILERMWHGANRAARDGKWLGGIVPYGYFVNENKELEINNNLLEGFSMSEPEVIKIIFNKIGNEKWSTIKVCDYLNALGVPTSYAKANRKINSKDGKRKVATANLWRPGQVLRISKNTTYKGIHTYGKRSKKERELIEREVPAIVDVELWEKVQKQLKDNQAESFKNKSRDFLLSSIVKCGDCGLTFIGSNDRKTNRAFYKCIGKQNYKNPIENKKCESKNIPADYSENMVWEGCLNFINEPGKAVVEIEKNIKSNKEKFVNTEVEINMLNSSLAKKENEKESILDLYRKKLIDSKDVEIQLSNIQSEKVQIEEKIKELNQIKDTTNQMLASVNSATEFLNSLKEKSIDADFKTKREIIKSLIKKVTVITNHDLPRKTATLQIEYNFSGNNNYSVEKIEGVTHTDMDSLQQSK

SEQ ID NO: 6601 - protein, 523 aa, unidentified
  source 1..523: note = uncultivated organism
MKAAIYCRLSKEDENLADSTQASESIQNQKSILMQYAADHGYEICGIYCDEDYSGVDRNRPEFARMIEAASHRQFDVILAKTQSRFTRDMELVEKYLHGKFAEWGVRFIAVVDHVDTADTAGKKSRQINGLVNEWYLEDLSGNVRSVLDHKRREGKYIAAAPLYGYRKDPANRHRLVVDPPAAAVVQRIFSLCLEGYGSSRIAQILNAENIPSPSLYKQQAGQHCPGPAHPNSDLWGKASVYRILTTRTYAGDLEQGRHRKVSYKSKKTVWLPREEWIVVPGTHEPVIEPNTFQQVQQMLHCRARSSGPGQVHPLAAKVQCGICGAMMEQSSSGGTAKGQNVPVRYFRCRMSLRDRRRCPGQPYIPAAQLEELVLERLRTHIHACFDPASLAHLPLCTKAAKNQQITQEELRRLRLEVERRHRAIQQLYLDKTEGLLTPEQFCQLNEAFQQQAGQLENRCAALEKELDTLSREACQSPQEKLRELLELPQLNRQLVCLFVDHVTVFPPSNASKTRKIEIAWQF

SEQ ID NO: 6602 - protein, 579 aa, unidentified
  source 1..579: note = uncultivated organism
MKPDRFTCLRDERTAKLFIVAAKTTGKRAAGYIRLSVMTEDSYSPLTQKDDILKWCKKEGWVINSDSAIIDEEECVKIGGGDFYVDLGYSGSKGIKRPAYRALMEELKNYDYVVVYKLDRLTRKVSELGTVLELFDKTKTALVGIMDGVDTSTRVGLTVAELLGTIGAAEARNIRDRVMSAQQTMMRAGKWRGGPPPFGYAIKKGKPGEGSTLVIDPEQSKYIKLAIKLFLKGDSIPKICNALNEKGSRTVFGNPWSDPNLRRLLGSPYLAGYLVYGGKIFRNEAGEEVRPFPPLIDLDTYNILQSKIEERYFYHPSRGGALLSGIVYCVYCGGKMIGASPTEHGGATYRCRGKYQLHTDCEGLSTKSASLEGFITDIILQVLSEKNTRQTIRAMSKSMRNTAKNNGADDPKVLHEFLRSQLVSLRQQQGRGNYEYSGGEEDFQKAWDETKNRMLELEKVIKDMTPQTSSPSLNAIMAENDVEAMTEIWQKQLTVPQRREIAKALIRKVVILPTREDWRSLHRYDTDRVKIEWQWQDKKDVLDYYPRNLVPKKGTRKKLADKKKADKLKAEKKKGKVKK

SEQ ID NO: 6603 - protein, 508 aa, unidentified
  source 1..508: note = uncultivated organism
MSADQQKTLRCAIYTRKSSEEGLEQDFNSLHAQREACEAYIKSQRHEGWSLVPTIYDDGGYSGGTLERPAVQRLLADIKSKNIDIVVVYKVDRLTRSLTDFARIVETFDQCGASFVSVTQQFNTTTSMGRLTLNVLLSFAQFQREVTGERIRDKIAASKKKGLWMGGNIPLGYAPNNRTLVVVPEDAETVRGIFRRYLELQSVPNLVRELNAAGQLTKRRTSKTGKERGGRRYFQGAVYHLLKNPIYLGEIRHKGTRYPGQQEAIIDRQTWDKVQSALLVGARRTTIGLKTDAILRGKLFDTAGNRMTPTHSRKPDGRRYRFYVSLAYIKGKPKDNIELPRISAGSIEQLVTDALSRQPGAPTMSDVQRITVGQSRVRIELCQNGAQSSPIDLPICLGRRGNNVEIRHVGSSGDSSAASPDRALLKALIRAYRWRKELESGACKSIAQIANREKANECYIGKLLQLTFLAPNIIDAILDGRQTERLSLSSIRKTSLPIDWSQQRRLFA

SEQ ID NO: 6604 - protein, 562 aa, unidentified
  source 1..562: note = uncultivated organism
MEQRKTPIRRCAIYTRKSSEEGLQQDFNSLHAQREACEAFIKSQAGEGWRLVKTAYDDGGLSGGTMERPALQRLLADISQGLVDVVVVYKVDRLTRSLTDFARMVEVFDARGVSFVAVTQQFNTTTSMGRLTLNVLLSFAQFEREVTGERIRDKIAASKQKGMWMGGTVPLGYDVIDRRLVANQSEAETVRGIFRRYLELGSVRLLMEDLNRRGIRSKVRIAKNSRKSGGNPFFRGALYVLLSNPIYIGEIRHKGVHHLGLHEPIVDRELWEKTQRLLRSQAVRGASRATKSAPSPLMGRLFDERGVGLTPSHAVKDERRYRYYVSRSLIKGTAYSLGRGWRLPAPEIERTVAASACQILSDRTAIAAAAQAIGLADNLLPSLFSAAAAWRERLKSEVEDGAASSALFDRVDLTNTGIRVSIKLPIPSDEGRDAATPNGLALARFVPMRMKRRGVEMRLIIDGDAIPAVRVDLPLLNATARAYRWSNDLLAGRARSIGEIAKREHLTGRHVRRVMRLAFLAPKIVTAIAEGRQPADLTTLAMTQRIELPPLWSAQERALGLR

SEQ ID NO: 6605 - protein, 532 aa, unidentified
  source 1..532: note = uncultivated organism
MSKPRTKHAVDAPEIPTVRCAIYTRKSTDENLELDFNSLDAQRDSAEAYIASQKGQGWTYLPDRFDDGGFSGGTVDRPAFQRLMADVEAGRVDCIVVYKIDRLSRSLMDFARIMQTLETHHVSLVSVTQQFNTTSSMGRLTLNILLSFAQFEREIISERTRDKIAAARRKGKWTGGSPVLGYDRVRDSRGTRLVVNVEEAKRVRAAFTKYMELQSLLDTVHWLDGRGWRNKQYVTNKGVPRGGKEFDKSTLLKLLTNRLYLGQITYNGQCFDGEHEAIVDEDLFGRVQGQLARNRNSGGGGKYQRNKYGALLKGLVRCKHCGGGMSHHYASRGQRRYRYYVCQTAQKKGWSACPYPSLPAGELEQFVVQRIKEMTGDRALLGDVVSRAREQLNRQTEELEQRRKLHENRARRINADINDLTRSPGSAAMHATSHAASELARLQDELVEVEKEIGDLNRQIVDIQHRMIDEDELTGALEAFDPMWDRLRPTERARVIHLLVQCIEYDGTNEEIAITYHPAGLQAFAEMEPCHA

SEQ ID NO: 6606 - protein, 544 aa, unidentified
  source 1..544: note = uncultivated organism
MLPKQTNYSVGIYMRLSRDDERAGESLSIENQRAILTEYVTNQGWTIYDEYVDDGISGVSFDRPGVQRLLNDAKTGKINVIVCKDLSRFGRNYIQVGQFTDYIFPLHNIRFIALSDNVDTANSQSTGMDLMPIVNIFNEWHCASTSKKIRAVLEANAKAGKYKCGIPSYGYFKADDEKHTPIIDPETAPVVKRIFEMRAKGISYQRIAAALNDEHILPPSEYYSKRSGKANVRSITKLWSADAVQTIIKNPIYIGTLAQHRSTTVSYKNHKIVRKNKEDWIVVENNHEPIISRELWDKVVEYNNSVSRGKLNKTGLVSPFSGLLYCSGCGYKMKRAELKNRDHTSRPVFICGYHARYGQNHCTTHTIKETVLESIVISDIQSKLRLIVDEDKARKQFLAKKMGIRSSQGAADNKRKQEIERRHSELDTLIQSAYEHMVLGKVPEDVCIKLIEKYQAESKQLQAEFDTIMERLGSLHQDERDVDEFIRRLKKYAGFETLTREMLLELVEYIVVDDVPKNRNEPRTVHIYYKFLDNALSDKQNALI

SEQ ID NO: 6607 - protein, 521 aa, unidentified
  source 1..521: note = uncultivated organism
MVNKKIRCAIYTRKSCEEGLEQDFNSLDAQREACESYIKSQVHEGWSLISTHYDDGGFSGGTMERPAFKQLLEDIKQDKIDIVVVYKVDRLTRSIMDFAKIIDVFDSHNASFVSITQHFNTTSSMGRLTLNILLSFAQFEREVTGERIRDKFEATRKKGLWIFGKPPYGYTKDEHNVLIPEEPYTENVRKIFNLYLEFGSVDKLFCKLKELNIKSRSGKEIARGLLYKMLSNKVYIGKFKHKDKEYDGQHKPIIDIETFNTVQNLLLKNATNKKHALYSKDGSLLTGLLFDDVGNKMSPSHSNKNGKKYRYYMVYKHKVQKVGNITKLPAGEIETFVKDCLHDLIQDKKTLQKYVENESISTQDKILNLFNTFECDKLFIRNSINRIDIQLNEIKITYNFAYIISYLKAIINNTQVPLVSDIKQLETLKYSVNIALTPQKQNKIIIQGKTNYDLKLINAIVQSFWFNEKCANGELSREEKISGNNKRFKNLRFLPPNIIEDIINGKNDENLTVKDLLKLVA

SEQ ID NO: 6608 - protein, 534 aa, unidentified
  source 1..534: note = uncultivated organism
MKRIRCAIYTRKSSEDGLEQDFNSLDAQREACEAYIASQRHEGWELLPDHYDDGGISGGHLERPALQQLMQAVDAKQVDQIVVYKIDRLTRSLADFAKLVDRLDQAEASFVSVTQSFNTATSMGRLTLNVLLSFAQFEREVTAERIRDKIAASKRKGLWMGGNVPLGYEPDGRTLRTNPDEAEVVRKVYDLYDDWGTVNMVREAAARLDLRSKSRRAPDGSLRGGNLMSRGQLHHILTNPIYAGRIRHKGKVFEGQHPAIIDPVRWDALQEMLSSNAAKLRRSKQYRDPSPLAGKIVDEAGERLTPSHTKKGDKRYRYYISQKLVTGVTRADEKQRTWRIPAGQLESAIVAAVQNPITQLSEAANVHQFPGTETSVPDAKAALNVVEQVSIAPGQLTVDLNAGNVQNLIGRELDCDPDDLTFSLPFTERRRGVEMKLIIGNGEVAVDEKLLANITRANQWYQRLKEGKSIEAIAAEAGTSKRRVQQVIDLAFLAPDIVRDITNGAQPMGLTSDGCLRHDLPSNWQAQRQRIATL
